United States Patent Application Publication US 2020/0163878 A1 - sequence listing, part 50

SEQ ID NO: 190179 - RNA, 1401 nt, Artificial Sequence
  derived and/or modified CDS sequence (opt4) from neuraminidase__InfluenzaB__AHL93349
augcugcccagcaccauccagacccugacccuguuccugaccagcggcggcgugcugcugagccuguacgugagcgccagccugagcuaccugcuguacagcgacauccugcugaaguucagccccaccgagaucaccgcccccaccaugccccuggacugcgccaacgccagcaacgugcaggccgugaacagaagcgccaccaagggcgugacccugcugcugcccgagcccgaguggaccuaccccagacugagcugccagggcagcaccuuccagaaggcccugcugaucagcccccacagauucggcgagaccaagggcaacagcgccccccugaucaucagagagcccuucaucgccugcggccccaacgagugcaagcacuucgcccugacccacuacgccgcccagcccggcggcuacuacaacggcaccagaggcgacagaaacaagcugagacaccugaucagcgugaagcugggcaagauccccaccguggagaacagcaucuuccacauggccgccuggagcggcagcgccugccacgacggcaaggaguggaccuacaucggcguggacggccccgacaacaacgcccugcugaaggugaaguacggcgaggccuacaccgacaccuaccacagcuacgccaacaagauccugagaacccaggagagcgccugcaacugcaucggcggcaacugcuaccugaugaucaccgacggcagcgccagcggcgugagcgagugcagauuccugaagaucagagagggcagaaucaucaaggagaucuuccccaccggcagagugaagcacaccgaggagugcaccugcggcuucgccagcaacaagaccaucgagugcgccugcagagacaacagcuacaccgccaagagacccuucgugaagcugaacguggagaccgacaccgccgagaucagacugaugugcaccgacaccuaccuggacacccccagacccaacgacggcagcaucaccggccccugcgagagcaacggcgacaagggcagcggcggcaucaagggcggcuucgugcaccagagaauggagagcaagaucggcagaugguacagcagaaccaugagcaagaccgagagaaugggcauggagcuguacgugaaguacgacggcgaccccugggccgacagcgacgcccuggccuucagcggcgugauggugagcaugaaggagcccggcugguacagcuucggcuucgagaucaaggacaagaagugcgacgugcccugcaucggcaucgagauggugcacgacggcggcaaggagaccuggcacagcgccgccaccgccaucuacugccugaugggcagcggccagcugcugugggacaccgugaccggcgugaacauggcccuguga

SEQ ID NO: 190180 - RNA, 1401 nt, Artificial Sequence; identical to SEQ ID NO: 189021
  derived and/or modified CDS sequence (opt4) from neuraminidase__InfluenzaB__AHL93371

SEQ ID NO: 190181 - RNA, 1401 nt, Artificial Sequence
  derived and/or modified CDS sequence (opt4) from neuraminidase__InfluenzaB__AHL93382
augcugcccagcaccauccagacccugacccuguuccugaccagcggcggcgugcugcugagccuguacgugagcgccagccugagcuaccugcuguacagcgacauccugcugaaguucagccccaccgagaucaccgcccccaccaugccccuggacugcgccaacgccagcaacgugcaggccgugaacagaagcgccaccaagggcgugacccugcugcugcccgagcccgaguggaccuaccccagacugagcugccccggcagcaccuuccagaaggcccugcugaucagcccccacagauucggcgagaccaagggcaacagcgccccccugaucaucagagagcccuucaucgccugcggccccaacgagugcaagcacuucgcccugacccacuacgccgcccagcccggcggcuacuacaacggcaccagaggcgacagaaacaagcugagacaccugaucagcgugaagcugggcaagauccccaccguggagaacagcaucuuccacauggccgccuggagcggcagcgccugccacgacggcaaggaguggaccuacaucggcguggacggccccgacaacaacgcccugcugaaggugaaguacggcgaggccuacaccgacaccuaccacagcuacgccaacaagauccugagaacccaggagagcgccugcaacugcaucggcggcaacugcuaccugaugaucaccgacggcagcgccagcggcgugagcgagugcagauuccugaagaucagagagggcagaaucaucaaggagaucuuccccaccggcagagugaagcacaccgaggagugcaccugcggcuucgccagcaacaagaccaucgagugcgccugcagagacaacagcuacaccgccaagagacccuucgugaagcugaacguggagaccgacaccgccgagaucagacugaugugcaccgacaccuaccuggacacccccagacccaacgacggcagcaucaccggccccugcgagagcaacggcgacaagggcagcggcggcaucaagggcggcuucgugcaccagagaauggagagcaagaucggcagaugguacagcagaaccaugagcaagaccgagagaaugggcauggagcuguacgugaaguacgacggcgaccccugggccgacagcgacgcccuggccuucagcggcgugauggugagcaugaaggagcccggcugguacagcuucggcuucgagaucaaggacaagaagugcgacgugcccugcaucggcaucgagauggugcacgacggcggcaaggagaccuggcacagcgccgccaccgccaucuacugccugaugggcagcggccagcugcugugggacaccgugaccggcgugaacauggcccuguga

SEQ ID NO: 190182 - RNA, 1401 nt, Artificial Sequence; identical to SEQ ID NO: 189021
  derived and/or modified CDS sequence (opt4) from neuraminidase__InfluenzaB__AHL93393

SEQ ID NO: 190183 - RNA, 1401 nt, Artificial Sequence; identical to SEQ ID NO: 189021
  derived and/or modified CDS sequence (opt4) from neuraminidase__InfluenzaB__AHL93404

SEQ ID NO: 190184 - RNA, 1401 nt, Artificial Sequence; identical to SEQ ID NO: 189021
  derived and/or modified CDS sequence (opt4) from neuraminidase__InfluenzaB__AHL93415

SEQ ID NO: 190185 - RNA, 1401 nt, Artificial Sequence; identical to SEQ ID NO: 189021
  derived and/or modified CDS sequence (opt4) from neuraminidase__InfluenzaB__AHL93426

SEQ ID NO: 190186 - RNA, 1401 nt, Artificial Sequence; identical to SEQ ID NO: 189021
  derived and/or modified CDS sequence (opt4) from neuraminidase__InfluenzaB__AHL93437

SEQ ID NO: 190187 - RNA, 1401 nt, Artificial Sequence; identical to SEQ ID NO: 190181
  derived and/or modified CDS sequence (opt4) from neuraminidase__InfluenzaB__AHL93448

SEQ ID NO: 190188 - RNA, 1404 nt, Artificial Sequence
  derived and/or modified CDS sequence (opt4) from neuraminidase__InfluenzaB__AHL93459
augcugcccagcaccauccagacccugacccuguuccugaccagcggcggcgugcugcugagccuguacgugagcgccagccugagcuaccugcuguacagcgacauccugcugaaguucagccccaccgagaucaccgcccccaccaugccccuggacugcgccaacgccagcaacgugcaggccgugaacagaagcgccaccaagggcgugacccugcugcugcugcccgagcccgaguggaccuaccccagacugagcugccccggcagcaccuuccagaaggcccugcugaucagcccccacagauucggcgagaccaagggcaacagcgccccccugaucaucagagagcccuucaucgccugcggccccaacgagugcaagcacuucgcccugacccacuacgccgcccagcccggcggcuacuacaacggcaccagaggcgacagaaacaagcugagacaccugaucagcgugaagcugggcaagauccccaccguggagaacagcaucuuccacauggccgccuggagcggcagcgccugccacgacggcaaggaguggaccuacaucggcguggacggccccgacaacaacgcccugcugaaggugaaguacggcgaggccuacaccgacaccuaccacagcuacgccaacaagauccugagaacccaggagagcgccugcaacugcaucggcggcaacugcuaccugaugaucaccgacggcagcgccagcggcgugagcgagugcagauuccugaagaucagagagggcagaaucaucaaggagaucuuccccaccggcagagugaagcacaccgaggagugcaccugcggcuucgccagcaacaagaccaucgagugcgccugcagagacaacagcuacaccgccaagagacccuucgugaagcugaacguggagaccgacaccgccgagaucagacugaugugcaccgacaccuaccuggacacccccagacccaacgacggcagcaucaccggccccugcgagagcaacggcgacaagggcagcggcggcaucaagggcggcuucgugcaccagagaauggagagcaagaucggcagaugguacagcagaaccaugagcaagaccgagagaaugggcaugggccuguacgugaaguacgacggcgaccccugggccgacagcgacgcccuggccuucagcggcgugauggugagcaugaaggagcccggcugguacagcuucggcuucgagaucaaggacaagaagugcgacgugcccugcaucggcaucgagauggugcacgacggcggcaaggagaccuggcacagcgccgccaccgccaucuacugccugaugggcagcggccagcugcugugggacaccgugaccggcguggacauggcccuguga

SEQ ID NO: 190189 - RNA, 1401 nt, Artificial Sequence
  derived and/or modified CDS sequence (opt4) from neuraminidase__InfluenzaB__AHL93470
augcugcccagcaccauccagacccugacccuguuccugaccagcggcggcgugcugcugagccuguacgugagcgccagccugagcuaccugcuguacagcgacauccugcugaaguucagccccaccgagaucaccgcccccaccaugccccuggacugcgccaacgccagcaacgugcaggccgugaacagaagcgccaccaagggcgugacccugcugcugcccgagcccgaguggaccuaccccagacugagcugccccggcagcaccuuccagaaggcccugcugaucagcccccacagauucggcgagaccaagggcaacagcgccccccugaucaucagagagcccuucaucgccugcggccccaacgagugcaagcacuucgcccugacccacuacgccgcccagcccggcggcuacuacaacggcaccagaggcgacagaaacaagcugagacaccugaucagcgugaagcugggcaagauccccaccguggagaacagcaucuuccacauggccgccuggagcggcagcgccugccacgacggcaaggaguggaccuacaucggcguggacggccccgacaacaacgcccugcugaaggugaaguacggcgaggccuacaccgacaccuaccacagcuacgccaacaagauccugagaacccaggagagcgccugcaacugcaucggcggcaacugcuaccugaugaucaccgacggcagcgccagcggcgugagcgagugcagauuccugaagaucagagagggcagaaucaucaaggagaucuuccccaccggcagagugaagcacaccgaggagugcaccugcggcuucgccagcaacaagaccaucgagugcgccugcagagacaacagcuacaccgccaagagacccuucgugaagcugaacguggagaccgacaccgccgagaucagacugaugugcaccgacaccuaccuggacacccccagacccaacgacggcagcaucaccggccccugcgagagcaacggcgacaagggcagcggcggcaucaagggcggcuucgugcaccagagaauggagagcaagaucggcagaugguacagcagaaccaugagcaagaccgagagaaugggcaugggccuguacgugaaguacgacggcgaccccugggccgacagcgacgcccugaccuucagcggcgugauggugagcaugaaggagcccggcugguacagcuucggcuucgagaucaaggacaagaagugcgacgugcccugcaucggcaucgagauggugcacgacggcggcaaggagaccuggcacagcgccgccaccgccaucuacugccugaugggcagcggccagcugcugugggacaccgugaccggcguggacauggcccuguga

SEQ ID NO: 190190 - RNA, 1401 nt, Artificial Sequence; identical to SEQ ID NO: 188958
  derived and/or modified CDS sequence (opt4) from neuraminidase__InfluenzaB__AHL93481

SEQ ID NO: 190191 - RNA, 1401 nt, Artificial Sequence; identical to SEQ ID NO: 189016
  derived and/or modified CDS sequence (opt4) from neuraminidase__InfluenzaB__AHL93492

SEQ ID NO: 190192 - RNA, 1401 nt, Artificial Sequence; identical to SEQ ID NO: 188877
  derived and/or modified CDS sequence (opt4) from neuraminidase__InfluenzaB__AHL93503

SEQ ID NO: 190193 - RNA, 1401 nt, Artificial Sequence
  derived and/or modified CDS sequence (opt4) from neuraminidase__InfluenzaB__AHL93514
augcugcccagcaccauccagacccugacccuguuccugaccagcggcggcgugcugcugagccuguacgugagcgccagccugagcuaccugcuguacagcgacauccugcugaaguucagccccaccgagaucaccgcccccaccaugccccuggacugcgccaacgccagcaacgugcaggccgugaacagaagcgccaccaagggcgugacccugcugcugcccgagcccgaguggaccuaccccagacugagcugccccggcagcaccuuccagaaggcccugcugaucagcccccacagauucggcgagaccaagggcaacagcgccccccugaucaucagagagcccuucaucgccugcggccccaacgagugcaagcacuucgcccugacccacuacgccgcccagcccggcggcuacuacaacggcaccagaggcgacagaaacaagcugagacaccugaucagcaucaagcugggcaagauccccaccguggagaacagcaucuuccacauggccgccuggagcggcagcgccugccacgacggcaaggaguggaccuacaucggcguggacggccccgacaacaacgcccugcugaaggugaaguacggcgaggccuacaccgacaccuaccacagcuacgccaacaagauccugagaacccaggagagcgccugcaacugcaucggcggcaacugcuaccugaugaucaccgacggcagcgccagcggcgugagcgagugcagauuccugaagaucagagagggcagaaucaucaaggagaucuuccccaccggcagagugaagcacaccgaggagugcaccugcggcuucgccagcaacaagaccaucgagugcgccugcagagacaacagcuacaccgccaagagacccuucgugaagcugaacguggagaccgacaccgccgagaucagacugaugugcaccgacaccuaccuggacacccccagacccgacgacggcagcaucaccggcagcugcgagagcaacggcgacaagggcagcggcggcaucaagggcggcuucgugcaccagagaauggagagcaagaucggcagaugguacagcagaaccaugagcaagaccgagagaaugggcaugggccuguacgugaaguacgacggcgaccccugggccgacagcgacgcccugaccuucagcggcgugauggugagcaugaaggagcccggcugguacagcuucggcuucgagaucaaggacaagaagugcgacgugcccugcaucggcaucgagauggugcacgacggcggcaaggagaccuggcacagcgccgccaccgccaucuacugccugaugggcagcggccagcugcugugggacaccgugaccggcguggacauggcccuguga

SEQ ID NO: 190194 - RNA, 1401 nt, Artificial Sequence; identical to SEQ ID NO: 188877
  derived and/or modified CDS sequence (opt4) from neuraminidase__InfluenzaB__AHL93525

SEQ ID NO: 190195 - RNA, 1401 nt, Artificial Sequence; identical to SEQ ID NO: 189016
  derived and/or modified CDS sequence (opt4) from neuraminidase__InfluenzaB__AHL93536

SEQ ID NO: 190196 - RNA, 1401 nt, Artificial Sequence
  derived and/or modified CDS sequence (opt4) from neuraminidase__InfluenzaB__AHL93558
augcugcccagcaccauccagacccugacccuguuccugaccagcggcggcgugcugcugagccuguacgugagcgccagccugagcuaccugcuguacagcgacauccugcugaaguucagccccaccgagaucaccgcccccgccaugccccuggacugcgccaacgccagcaacgugcaggccgugaacagaagcgccaccaagggcgugacccugcugcugcccgagcccgaguggaccuaccccagacugagcugccccggcagcaccuuccagaaggcccugcugaucagcccccacagauucggcgagaccaagggcaacagcgccccccugaucaucagagagcccuucaucgccugcggccccaacgagugcaagcacuucgcccugacccacuacgccgcccagcccggcggcuacuacaacggcaccagaggcgacagaaacaagcugagacaccugaucagcgugaagcugggcaagauccccaccguggagaacagcaucuuccacauggccgccuggagcggcagcgccugccacgacggcaaggaguggaccuacaucggcguggacggccccgacaacaacgcccugcugaaggugaaguacggcgaggccuacaccgacaccuaccacagcuacgccaacaagauccugagaacccaggagagcgccugcaacugcaucggcggcaacugcuaccugaugaucaccgacggcagcgccagcggcgugagcgagugcagauuccugaagaucagagagggcagaaucaucaaggagaucuuccccaccggcagagugaagcacaccgaggagugcaccugcggcuucgccagcaacaagaccaucgagugcgccugcagagacaacagcuacaccgccaagagacccuucgugaagcugaacguggagaccgacaccgccgagaucagacugaugugcaccgacaccuaccuggacacccccagacccaacgacggcagcaucaccggccccugcgagagcgacggcgacaagggcagcggcggcaucaagggcggcuucauccaccagagaauggagagcaagaucggcagaugguacagcagaaccaugagcaagaccgagagaaugggcaugggccuguacgugaaguacgacggcgaccccugggccgacagcgacgcccuggccuucagcggcgugauggugagcaugaaggagcccggcugguacagcuucggcuucgagaucaaggacaagaagugcgacgugcccugcaucggcaucgagauggugcacgacggcggcaaggagaccuggcacagcgccgccaccgccaucuacugccugaugggcagcggccagcugcugugggacaccgugaccggcguggacauggcccuguga

SEQ ID NO: 190197 - RNA, 1401 nt, Artificial Sequence
  derived and/or modified CDS sequence (opt4) from neuraminidase__InfluenzaB__AHL93569
augcugcccagcaccauccagacccugacccuguuccugaccagcggcggcgugcugcugagccuguacgugagcgccagccugagcuaccugcuguacagcgacauccugcugaaguucagccccaccgagaucaccgcccccaccaugccccuggacugcgccaacgccagcaacgugcaggccgugaacagaagcgccaccaagggcgugacccugcugcugcccgagcccgaguggaccuaccccagacugagcugccccggcagcaccuuccagaaggcccugcugaucagcccccacagauucggcgagaccaagggcaacagcgccccccugaucaucagagagcccuucaucgccugcggccccaacgagugcaagcacuucgcccugacccacuacgccgcccagcccggcggcuacuacaacggcaccagaggcgacagaaacaagcugagacaccugaucagcgugaagcugggcaagauccccaccguggagaacagcaucuuccacauggccgccuggagcggcagcgccugccacgacggcaaggaguggaccuacaucggcguggacggccccgacaacaacgcccugcugaaggugaaguacggcgaggccuacaccgacaccuaccacagcuacgccaacaagauccugagaacccaggagagcgccugcaacugcaucggcggcaacugcuaccugaugaucaccgacggcagcgccagcggcgugagcgagugcagauuccugaagaucagagagggcagaaucaucaaggagaucuuccccaccggcagagugaagcacaccgaggagugcaccugcggcuucgccagcaacaagaccaucgagugcgccugcagagacaacagcuacaccgccaagagacccuucgugaagcugaacguggagaccgacaccgccgagaucagacugaugugcaccgacaccuaccuggacacccccagacccaacgacggcagcaucaccggccccugcgagagcgacggcgacaagggcagcggcggcaucaagggcggcuucgugcaccagagaauggagagcaagaucggcagaugguacagcagaaccaugagcaagaccgagagaaugggcaugggccuguacgugaaguacgacggcgaccccugggccgacagcgacgcccugaccuucagcggcgugauggugagcaugaaggagcccggcugguacagcuucggcuucgagaucaaggacaagaagugcgacgugcccugcaucggcaucgagauggugcacgacggcggcaaggagaccuggcacagcgccgccaccgccaucuacugccugaugggcagcggccagcugcugugggacaccgugaccggcguggacauggcccuguga

SEQ ID NO: 190198 - RNA, 1401 nt, Artificial Sequence; identical to SEQ ID NO: 189016
  derived and/or modified CDS sequence (opt4) from neuraminidase__InfluenzaB__AHL93580

SEQ ID NO: 190199 - RNA, 1401 nt, Artificial Sequence; identical to SEQ ID NO: 189016
  derived and/or modified CDS sequence (opt4) from neuraminidase__InfluenzaB__AHL93591

SEQ ID NO: 190200 - RNA, 1401 nt, Artificial Sequence
  derived and/or modified CDS sequence (opt4) from neuraminidase__InfluenzaB__AHL93613
augcugcccagcaccauccagacccugacccuguuccugaccagcggcggcgugcugcugagccuguacgugagcgccagccugagcuaccugcuguacagcgacauccugcugaaguucagccccaccgagaucaccgcccccaccaugccccuggacugcgccaacgccagcaacgugcaggccgugaacagaagcgccaccaagggcgugacccugcugcugcccgagcccgaguggaccuaccccagacugagcugccccggcagcaccuuccagaaggcccugcugaucagcccccacagauucggcgagaccaagggcaacagcgccccccugaucaucagagagcccuucaucgccugcggccccaacgagugcaagcacuucgcccugacccacuacgccgcccagcccggcggcuacuacaacggcaccagaggcgacagaaacaagcugagacaccugaucagcgugaagcugggcaagauccccaccguggagaacagcaucuuccacauggccgccuggagcggcagcgccugccacgacggcaaggaguggaccuacaucggcguggacggccccgacaacaacgcccugcugaaggugaaguacggcgaggccuacaccgacaccuaccacagcuacgccaacaagauccugagaacccaggagagcgccugcaacugcaucggcggcaacugcuaccugauggugaccgacggcagcgccagcggcgugagcgagugcagauuccugaagaucagagagggcagaaucaucaaggagaucuuccccaccggcagagugaagcacaccgaggagugcaccugcggcuucgccagcaacaagaccaucgagugcgccugcagagacaacagcuacaccgccaagagacccuucgugaagcugaacguggagaccgacaccgccgagaucagacugaugugcaccgacaccuaccuggacacccccagacccgacgacggcagcaucaccggccccugcgagagcaacggcgacaagggcagcggcggcaucaagggcggcuucgugcaccagagaauggagagcaagaucggcagaugguacagcagaaccaugagcaagaccgagagaaugggcaugggccuguacgugaaguacgacggcgaccccugggccgacagcgacgcccugguguucagcggcgugauggugagcaugaaggagcccggcugguacagcuucggcuucgagaucaaggacaagaagugcgacgugcccugcaucggcaucgagauggugcacgacggcggcaaggagaccuggcacagcgccgccaccgccaucuacugccugaugggcagcggccagcugcugugggacaccgugaccggcguggacauggcccuguga

SEQ ID NO: 190201 - RNA, 1401 nt, Artificial Sequence; identical to SEQ ID NO: 189016
  derived and/or modified CDS sequence (opt4) from neuraminidase__InfluenzaB__AHL93624

SEQ ID NO: 190202 - RNA, 1401 nt, Artificial Sequence; identical to SEQ ID NO: 190200
  derived and/or modified CDS sequence (opt4) from neuraminidase__InfluenzaB__AHL93635

SEQ ID NO: 190203 - RNA, 1401 nt, Artificial Sequence; identical to SEQ ID NO: 190200
  derived and/or modified CDS sequence (opt4) from neuraminidase__InfluenzaB__AHL93646

SEQ ID NO: 190204 - RNA, 1401 nt, Artificial Sequence; identical to SEQ ID NO: 188877
  derived and/or modified CDS sequence (opt4) from neuraminidase__InfluenzaB__AHL93657

SEQ ID NO: 190205 - RNA, 1401 nt, Artificial Sequence; identical to SEQ ID NO: 189016
  derived and/or modified CDS sequence (opt4) from neuraminidase__InfluenzaB__AHL93668

SEQ ID NO: 190206 - RNA, 1401 nt, Artificial Sequence
  derived and/or modified CDS sequence (opt4) from neuraminidase__InfluenzaB__AHL93679
augcugcccagcaccauccagacccugacccuguuccugaccagcggcggcgugcugcugagccuguacgugagcgcccugcugagcuaccugcuguacagcgacauccugcugaaguucagccccaccgagaucaccgcccccaccaugagccuggacugcgccaacgccagcaacgugcaggccgugaacagaagcgccaccaagggcgugaccuuccugcugcccgagcccgaguggaccuaccccagacugagcugccccggcagcaccuuccagaaggcccugcugaucagcccccacagauucggcgagaccaagggcaacagcgccccccugaucaucagagagcccuucaucgccugcggccccaacgagugcaagcacuucgcccugacccacuacgccgcccagcccggcggcuacuacaacggcaccagaggcgacagaaacaagcugagacaccugaucagcgugaagcugggcaagauccccaccguggagaacagcaucuuccacauggccgccuggagcggcagcgccugccacgacggcaaggaguggaccuacaucggcguggacggccccgacaacgacgcccugcugaaggugaaguacggcgaggccuacaccgacaccuaccacagcuacgccaacaagauccugagaacccaggagagcgccugcaacugcaucggcggcaacugcuaccugaugaucaccgacggcagcgccagcggcgugagcgagugcagauuccugaagaucagagagggcagaaucaucaaggagauccugcccaccggcagagugaagcacaccgaggagugcaccugcggcuucgccagcaacaagaccaucgagugcgccugcagagacaacagcuacaccgccaagagacccuucgugaagcugaacguggagaccgacaccgccgagaucagacugaugugcaccgacaccuaccuggacacccccagacccgacgacggcagcaucaccggccccugcgagagcaacggcgacaagggcagcggcggcaucaagggcggcuucgugcaccagagaauggagagcaagaucggcagaugguacagcagaaccaugagcaagaccgagagaaugggcaugggccuguacgugaaguacgacggcgaccccugggccgacagcgacgcccuggccuucagcggcgugauggugagcaugaaggagcccggcugguacagcuucggcuucgagaucaaggacaagaagugcgacgugcccugcaucggcaucgagauggugcacgacggcggcaaggagaccuggcacagcgccgccaccgccaucuacugccugaugggcagcggccagcugcugugggacaccgugaccggcguggacauggcccuguga

SEQ ID NO: 190207 - RNA, 1401 nt, Artificial Sequence; identical to SEQ ID NO: 190200
  derived and/or modified CDS sequence (opt4) from neuraminidase__InfluenzaB__AHL93690

SEQ ID NO: 190208 - RNA, 1401 nt, Artificial Sequence; identical to SEQ ID NO: 190200
  derived and/or modified CDS sequence (opt4) from neuraminidase__InfluenzaB__AHL93701

SEQ ID NO: 190209 - RNA, 1401 nt, Artificial Sequence; identical to SEQ ID NO: 190200
  derived and/or modified CDS sequence (opt4) from neuraminidase__InfluenzaB__AHL93712

SEQ ID NO: 190210 - RNA, 1401 nt, Artificial Sequence
  derived and/or modified CDS sequence (opt4) from neuraminidase__InfluenzaB__AHL93723
augcugcccagcaccauccagaugcugacccuguuccugaccagcggcggcgugcugcugagccuguacgugagcgccagccugagcuaccugcuguacagcgacauccugcugaaguucagccccaccgagaucaccgcccccaccaugccccuggacugcgccaacgccagcaacgugcacgccgugaacagaagcgccaccaagggcgugaccuuccugcugcccgagcccgaguggaccuaccccagacugagcugccccggcagcaccuuccagaaggcccugcugaucagcccccacagauucggcgagaccaagggcaacagcgccccccugaucaucagagagcccuucaucgccugcggccccaacgagugcaagcacuucgcccugacccacuacgccgcccagcccggcggcuacuacaacggcaccagaggcgacagaaacaagcugagacaccugaucagcgugaagcugggcaagauccccaccguggagaacagcaucuuccacauggccgccuggagcggcagcgccugccacgacggcaaggaguggaccuacaucggcguggacggccccgacaacaacgcccugcugaagaucaaguacggcgaggccuacaccgacaccuaccacagcuacgccaacaacauccugagaacccaggagagcgccugcaacugcaucggcggcaacugcuaccugaugaucaccgacggcagcgccagcggcgugagcgagugcagauuccugaagaucagagagggcagaaucaucaaggagaucuuccccaccggcagagugaagcacaccgaggagugcaccugcggcuucgccagcaacaagaccaucgagugcgccugcagagacaacagcuacaccgccaagagacccuucgugaagcugaacguggagaccgacaccgccgagaucagacugaugugcaccgacaccuaccuggacacccccagacccgacgacggcagcaccaccggccccugcgagagcaacggcgacaagggcagcggcggcaucaagggcggcuucgugcaccagagaauggccagcaagaucggcagaugguacagcagaaccaugagcaagaccgagagaaagggcaugggccuguacgugaaguacgacggcgaccccuggaccgacagcgacgcccuggccuucagaggcgugauggugagcaugaaggagcccggcugguacagcuucggcuucgagaucaaggacaagaagugcgacgugcccugcaucggcaucgagauggugcacgacggcggcaaggagaccuggcacagcgccgccaccgccaucuacugccugaugggcagcggccagcugcugugggacaccgugaccggcguggacauggcccuguga

SEQ ID NO: 190211 - RNA, 1401 nt, Artificial Sequence; identical to SEQ ID NO: 189016
  derived and/or modified CDS sequence (opt4) from neuraminidase__InfluenzaB__AHL93734

SEQ ID NO: 190212 - RNA, 1401 nt, Artificial Sequence
  derived and/or modified CDS sequence (opt4) from neuraminidase__InfluenzaB__AHL93745
augcugcccagcaccauccagaugcugacccuguuccugaccagcggcggcgugcugcugagccuguacgugagcgccagccugagcuaccugcuguacagcgacauccugcugaaguucagccccaccgagaucaccgcccccaccaugccccuggacugcgccaacgccagcaacgugcacgccgugaacagaagcgccaccaagggcgugaccuuccugcugcccgagcccgaguggaccuaccccagacugagcugccccggcagcaccuuccagaaggcccugcugaucagcccccacagauucggcgagaccaagggcaacagcgccccccugaucaucagagagcccuucaucgccugcggccccaacgagugcaagcacuucgcccugacccacuacgccgcccagcccggcggcuacuacaacggcaccagaggcgacagaaacaagcugagacaccugaucagcgugaagcugggcaagauccccaccguggagaacagcaucuuccacauggccgccuggagcggcagcgccugccacgacggcaaggaguggaccuacaucggcguggacggccccgacaacaacgcccugcugaagaucaaguacggcgaggccuacaccgacaccuaccacagcuacgccaacaacgugcugagaacccaggagagcgccugcaacugcaucggcggcaacugcuaccugaugaucaccgacggcagcgccagcggcgugagcgagugcagauuccugaagaucagagagggcagaaucaucaaggagaucuuccccaccggcagagugaagcacaccgaggagugcaccugcggcuucgccagcaacaagaccaucgagugcgccugcagagacaacagcuacaccgccaagagacccuucgugaagcugaacguggagaccgacaccgccgagaucagacugaugugcaccgacaccuaccuggacacccccagacccgacgacggcagcaucaccggccccugcgagagcaacggcgacaagggcagcggcggcaucaagggcggcuucgugcaccagagaauggccagcaagaucggcagaugguacagcagaaccaugagcaagaccgagagaaagggcaugggccuguacgugaaguacgacggcgaccccuggaccgacagcgacgcccuggccuucagaggcgugauggugagcaugaaggagcccggcugguacagcuucggcuucgagaucaaggacaagaagugcgacgugcccugcaucggcaucgagauggugcacgacggcggcaaggagaccuggcacagcgccgccaccgccaucuacugccugaugggcagcggccagcugcugugggacaccgugaccggcguggacauggcccuguga

SEQ ID NO: 190213 - RNA, 1401 nt, Artificial Sequence; identical to SEQ ID NO: 189179
  derived and/or modified CDS sequence (opt4) from neuraminidase__InfluenzaB__AHL93756

SEQ ID NO: 190214 - RNA, 1401 nt, Artificial Sequence; identical to SEQ ID NO: 190200
  derived and/or modified CDS sequence (opt4) from neuraminidase__InfluenzaB__AHL93767

SEQ ID NO: 190215 - RNA, 1401 nt, Artificial Sequence
  derived and/or modified CDS sequence (opt4) from neuraminidase__InfluenzaB__AHL93778
augcugcccagcaccauccagacccugauccuguuccugaccagcggcggcgugcugcugagccuguacgugagcgcccugcugagcuaccugcuguacagcgacauccugcugaaguucagccccaccgagaucaccgcccccaccaugagccuggacugcgccaacgccagcaacgugcaggccgugaacagaagcgccaccaagggcgugaccuuccugcugcccgagcccgaguggaccuaccccagacugagcugccccggcagcaucuuccagaaggcccugcugaucagcccccacagauucggcgagaccaagggcaacagcgccccccugaucaucagagagcccuucaucgccugcggccccaacgagugcaagcacuucgcccugacccacuacgccgcccagcccggcggcuacuacaacggcaccagaggcgacagaaacaagcugagacaccugaucagcgugaagcugggcaagauccccaccguggagaacagcaucuuccacauggccgccuggagcggcagcgccugccacgacggcaaggaguggaccuacaucggcguggacggccccgacaacgacgcccugcugaaggugaaguacggcgaggccuacaccgacaccuaccacagcuacgccaacaagauccugagaacccaggagagcgccugcaacugcaucggcggcaacugcuaccugaugaucaccgacggcagcgccagcggcgugagcgagugcagauuccugaagaucagagagggcagaaucaucaaggagaucuuccccaccggcagagugaagcacaccgaggagugcaccugcggcuucgccagcaacaagaccaucgagugcgccugcagagacaacagcuacaccgccaagagacccuucgugaagcugaacguggagaccgacaccgccgagaucagacugaugugcaccgacaccuaccuggacacccccagacccgacgacggcagcaucaccggccccugcgagagcaacggcgacaagggcagcggcggcaucaagggcggcuucgugcaccagagaauggagagcaagaucggcagaugguacagcagaaccaugagcaagaccgagagaaugggcaugggccuguacgugaaguacgacggcgaccccugggccgacagcgacgcccuggccuucagcggcgugauggugagcaugaaggagcccggcugguacagcuucggcuucgagaucaaggacaagaagugcgacgugcccugcaucggcaucgagauggugcacgacggcggcaaggagaccuggcacagcgccgccaccgccaucuacugccugaugggcagcggccagcugcugugggacaccgugaccggcguggacauggcccuguga

SEQ ID NO: 190216 - RNA, 1401 nt, Artificial Sequence
  derived and/or modified CDS sequence (opt4) from neuraminidase__InfluenzaB__AHL93789
augcugcccagcaccauccagacccugacccuguuccugaccagcggcggcgugcugcugagccuguacgugagcgccagccugagcuaccugcuguacagcgacauccugcugaaguucagccccaccggcaucaccgcccccaccaugccccuggacugcgccaacgccagcaacgugcaggccgugaacagaagcgccaccaagggcgugacccugcugcugcccgagcccgaguggaccuaccccagacugagcugccccggcagcaccuuccagaaggcccugcugaucagcccccacagauucggcgagaccaagggcaacagcgccccccugaucaucagagagcccuucaucgccugcggccccaacgagugcaagcacuucgcccugacccacuacgccgcccagcccggcggcuacuacaacggcaccagaggcgacagaaacaagcugagacaccugaucagcgugaagcugggcaagauccccaccguggagaacagcaucuuccacauggccgccuggagcggcagcgccugccacgacggcaaggaguggaccuacaucggcguggacggccccgacaacaacgcccugcugaaggugaaguacggcgaggccuacaccgacaccuaccacagcuacgccaacaagauccugagaacccaggagagcgccugcaacugcaucggcggcaacugcuaccugauggugaccgacggcagcgccagcggcgugagcgagugcagauuccugaagaucagagagggcagaaucaucaaggagaucuuccccaccggcagagugaagcacaccgaggagugcaccugcggcuucgccagcaacaagaccaucgagugcgccugcagagacaacagcuacaccgccaagagacccuucgugaagcugaacguggagaccgacaccgccgagaucagacugaugugcaccgacaccuaccuggacacccccagacccgacgacggcagcaucaccggccccugcgagagcaacggcgacaagggcagcggcggcaucaagggcggcuucgugcaccagagaauggagagcaagaucggcagaugguacagcagaaccaugagcaagaccgagagaaugggcaugggccuguacgugaaguacgacggcgaccccugggccgacagcgacgcccugguguucagcggcgugauggugagcaugaaggagcccggcugguacagcuucggcuucgagaucaaggacaagaagugcgacgugcccugcaucggcaucgagauggugcacgacggcggcaaggagaccuggcacagcgccgccaccgccaucuacugccugaugggcagcggccagcugcugugggacaccgugaccggcguggacauggcccuguga

SEQ ID NO: 190217 - RNA, 1401 nt, Artificial Sequence; identical to SEQ ID NO: 189016
  derived and/or modified CDS sequence (opt4) from neuraminidase__InfluenzaB__AHL93800

SEQ ID NO: 190218 - RNA, 1401 nt, Artificial Sequence; identical to SEQ ID NO: 189016
  derived and/or modified CDS sequence (opt4) from neuraminidase__InfluenzaB__AHL93811

SEQ ID NO: 190219 - RNA, 1401 nt, Artificial Sequence; identical to SEQ ID NO: 189552
  derived and/or modified CDS sequence (opt4) from neuraminidase__InfluenzaB__AHL93822

SEQ ID NO: 190220 - RNA, 1401 nt, Artificial Sequence; identical to SEQ ID NO: 189016
  derived and/or modified CDS sequence (opt4) from neuraminidase__InfluenzaB__AHL93833

SEQ ID NO: 190221 - RNA, 1401 nt, Artificial Sequence
  derived and/or modified CDS sequence (opt4) from neuraminidase__InfluenzaB__AHL93844
augcugcccagcaccauccagacccugacccuguuccugaccagcggcggcgugcugcugagccuguacgugagcgccagccugagcuaccugcuguacagcggcauccugcugaaguucagccccaccgagaucaccgcccccaccaugccccuggacugcgccaacgccagcaacgugcaggccgugaacagaagcgccaccaaggaggugacccugcugcugcccgagcccgaguggaccuaccccagacugagcugccccggcagcaccuuccagaaggcccugcugaucagcccccacagauucggcgagaccaagggcaacagcgccccccugaucaucagagagcccuucaucgccugcggccccaacgagugcaagcacuucgcccugacccacuacgccgcccagcccggcggcuacuacaacggcaccagaggcgacagaaacaagcugagacaccugaucagcgugaagcugggcaagauccccaccguggagaacagcaucuuccacauggccgccuggagcggcagcgccugccacgacggcaaggaguggaccuacaucggcguggacggccccgacgacaacgcccugcugaaggugaaguacggcgaggccuacaccgacaccuaccacagcuacgcccacaagauccugagaacccaggagagcgccugcaacugcaucggcggcaacugcuaccugaugaucaccgacggcagcgccagcggcgugagcgagugcagauuccugaagaucagagagggcagaaucaucaaggagaucuuccccaccggcagagugaagcacaccgaggagugcaccugcggcuucgccagcaacaagaccaucgagugcgccugcagagacaacagcuacaccgccaagagacccuucgugaagcugaacguggagaccgacaccgccgagaucagacugaugugcaccgacaccuaccuggacacccccagacccaacgacggcagcaucaccggccccugcgagagcaacggcgacaagggcagcggcggcaucaagggcggcuucgugcaccagagaauggagagcaagaucggcagaugguacagcagaaccaugagcaagaccgagagaaugggcaugggccuguacgugaaguacgacggcgaccccugggccgacagcgacgcccuggccuucagcggcgugauggugagcaugaaggagcccggcugguacagcuucggcuucgagaucaaggacaagaagugcgacgugcccugcaucggcaucgagauggugcacgacggcggcaaggagaccuggcacagcgccgccaccgccaucuacugccugaugggcagcggccagcugcugugggacaccgugaccggcguggacauggcccuguga

SEQ ID NO: 190222 - RNA, 1401 nt, Artificial Sequence; identical to SEQ ID NO: 189016
  derived and/or modified CDS sequence (opt4) from neuraminidase__InfluenzaB__AHL93855

SEQ ID NO: 190223 - RNA, 1401 nt, Artificial Sequence; identical to SEQ ID NO: 189016
  derived and/or modified CDS sequence (opt4) from neuraminidase__InfluenzaB__AHL93866

SEQ ID NO: 190224 - RNA, 1401 nt, Artificial Sequence; identical to SEQ ID NO: 189016
  derived and/or modified CDS sequence (opt4) from neuraminidase__InfluenzaB__AHL93877

SEQ ID NO: 190225 - RNA, 1401 nt, Artificial Sequence; identical to SEQ ID NO: 189016
  derived and/or modified CDS sequence (opt4) from neuraminidase__InfluenzaB__AHL93888

SEQ ID NO: 190226 - RNA, 1401 nt, Artificial Sequence
  derived and/or modified CDS sequence (opt4) from neuraminidase__InfluenzaB__AHL93899
augcugcccagcaccauccagaugcugacccuguuccugaccagcggcggcgugcugcugagccuguacgugagcgccagccugagcuaccugcuguacagcgacauccugcugaaguucagccccaccgagaucaccgcccccaccaugccccuggacugcgccaacgccagcaacgugcacgccgugaacagaagcgccaccaagggcgugaccuuccugcugcccgagcccgaguggaccuaccccagacugagcugccccggcagcaccuuccagaaggcccugcugaucagcccccacagauucggcgagaccaagggcaacagcgccccccugaucaucagagagcccuucaucgccugcgagcccaacgagugcaagcacuucgcccugacccacuacgccgcccagcccggcggcuacuacaacggcaccagaggcgacagaaacaagcugagacaccugaucagcgugaagcugggcaagauccccaccguggagaacagcaucuuccacauggccgccuggagcggcagcgccugccacgacggcaaggaguggaccuacaucggcguggacggccccgacaacaacgcccugcugaagaucaaguacggcgaggccuacaccgacaccuaccacagcuacgccaacaacauccugagaacccaggagagcgccugcaacugcaucggcggcaacugcuaccugaugaucaccgacggcagcgccagcggcgugagcgagugcagauuccugaagaucagagagggcagaaucaucaaggagaucuuccccaccggcagagugaagcacaccgaggagugcaccugcggcuucgccagcaacaagaccaucgagugcgccugcagagacaacagcuacaccgccaagagacccuucgugaagcugaacguggagaccgacaccgccgagaucagacugaugugcaccgacaccuaccuggacacccccagacccgacgacggcagcaccaccggccccugcgagagcaacggcgacaagggcagcggcggcaucaagggcggcuucgugcaccagagaauggccagcaagaucggcagaugguacagcagaaccaugagcaagaccgagagaaagggcaugggccuguacgugaaguacgacggcgaccccuggaccgacagcgacgcccuggccuucagaggcgugauggugagcaugaaggagcccggcugguacagcuucggcuucgagaucaaggacaagaagugcgacgugcccugcaucggcaucgagauggugcacgacggcggcaaggagaccuggcacagcgccgccaccgccaucuacugccugaugggcagcggccagcugcugugggacaccgugaccggcguggacauggcccuguga

SEQ ID NO: 190227 - RNA, 1401 nt, Artificial Sequence
  derived and/or modified CDS sequence (opt4) from neuraminidase__InfluenzaB__AHL93910
augcugcccagcaccauccagaugcugacccuguuccugaccagcggcggcgugcugcugagccuguacgugagcgccagccugagcuaccugcuguacagcgacauccugcugaaguucagccccaccgagaucaccgcccccaccaugccccuggacugcgccaacgccagcaacgugcacgccgugaacagaagcgccaccaagggcgugaccuuccugcugcccgagcccgaguggaccuaccccagacugagcugccccggcagcaccuuccagaaggcccugcugaucagcccccacagauucggcgagaccaagggcaacagcgccccccugaucaucagagagcccuucaucgccugcggccccaacgagugcaagcacuucgcccugacccacuacgccgcccagcccggcggcuacuacaacggcaccagaggcgacagaaacaagcugagacaccugaucagcgugaagcugggcaagauccccaccguggagaacagcaucuuccacauggccgccuggagcggcagcgccugccacgacggcaaggaguggaccuacaucggcguggacggccccgacaacaacgcccugcugaagaucaaguacggcgaggccuacaccgacaccuaccacagcuacgccaacaacauccugagaacccaggagagcgccugcaacugcaucggcggcaacugcuaccugaugaucaccgacggcagcgccagcggcgugagcgagugcagauuccugaagaucagagagggcagaaucaucaaggagaucuuccccaccggcagagugaagcacaccgaggagugcaccugcggcuucgccagcaacaagaccaucgagugcaccugcagagacaacagcuacaccgccaagagacccuucgugaagcugaacguggagaccgacaccgccgagaucagacugaugugcaccgacaccuaccuggacacccccagacccgacgacggcggcaucaccggccccugcgagagcaacggcgacaagggcagcggcggcaucaagggcggcuucgugcaccagagaauggccagcaagaucggcagaugguacagcagaaccaugagcaagaccgagagaaagggcaugggccuguacgugaaguacgacggcgaccccuggaccgacagcgacgcccuggccuucagaggcgugauggugagcaugaaggagcccggcugguacagcuucggcuucgagaucaaggacaagaagugcgacgugcccugcaucggcaucgagauggugcacgacggcggcaaggagaccuggcacagcgccgccaccgccaucuacugccugaugggcagcggccagcugcugugggacaccgugaccggcguggacauggcccuguga

SEQ ID NO: 190228 - RNA, 1401 nt, Artificial Sequence; identical to SEQ ID NO: 189016
  derived and/or modified CDS sequence (opt4) from neuraminidase__InfluenzaB__AHL93921

SEQ ID NO: 190229 - RNA, 1401 nt, Artificial Sequence
  derived and/or modified CDS sequence (opt4) from neuraminidase__InfluenzaB__AHL93932
augcugcccagcaccauccagacccugacccuguuccugaccagcggcggcgugcugcugagccuguacgugagcgccagccugagcuaccugcuguacagcgacauccugcugaaguucagccccaccgagaucaccgcccccaccaugccccuggacugcgccaacgccagcaacgugcaggccgugaacagaagcgccaccaagggcgugacccugcugcugcccgagcccgaguggaccuaccccagacugagcugccccggcagcaccuuccagaaggcccugcugaucagcccccacagauucggcgagaccaagggcaacagcgccccccugaucaucagagagcccuucaucgccugcggccccaacgagugcaagcacuucgcccugacccacuacgccgcccagcccggcggcuacuacaacggcaccagaggcgacagaaacaagcugagacaccugaucagcgugaagcugggcaagauccccaccguggagaacagcaucuuccacauggccgccuggagcggcagcgccugccacgacggcaaggaguggaccuacaucggcguggacggccccgacaacaacgcccugcugaaggugaaguacggcgaggccuacaccgacaccuaccacagcuacgccaacaagauccugagaacccaggagagcgccugcaacugcaucggcggcaacugcuaccugauggugaccgacggcagcgccagcggcgugagcgagugcagauuccugaagaucagagagggcagaaucaucaaggagaucuuccccaccggcagagugaagcacaccgaggagugcaccugcggcuucgccagcaacaagaccaucgagugcgccugcagagacaacagcuacaccgccaagagacccuucgugaagcugaacguggagaccgacaccgccgagaucagacugaugugcaccgacaccuaccuggacacccccagacccgacgacggcagcaucaccggccccugcgagagcaacggcgacaagggcagcggcggcaucaagggcggcuucgugcaccagagaauggagagcaagaucggcagaugguacagcagaaccaugagcaagaccgagagaaugggcauggagcuguacgugaaguacgacggcgaccccugggccgacagcgacgcccuggccuucagcggcgugauggugagcaugaaggagcccggcugguacagcuucggcuucgagaucaaggacaagaagugcgacgugcccugcaucggcaucgagauggugcacgacggcggcaaggagaccuggcacagcgccgccaccgccaucuacugccugaugggcagcggccagcugcugugggacaccgugaccggcguggacauggcccuguga

SEQ ID NO: 190230 - RNA, 1401 nt, Artificial Sequence; identical to SEQ ID NO: 189179
  derived and/or modified CDS sequence (opt4) from neuraminidase__InfluenzaB__AHL93943

SEQ ID NO: 190231 - RNA, 1401 nt, Artificial Sequence; identical to SEQ ID NO: 189016
  derived and/or modified CDS sequence (opt4) from neuraminidase__InfluenzaB__AHL93954

SEQ ID NO: 190232 - RNA, 1401 nt, Artificial Sequence
  derived and/or modified CDS sequence (opt4) from neuraminidase__InfluenzaB__AHL93965
augcugcccagcaccauccagacccugacccuguuccugaccagcggcggcgugcugcugagccuguacgugagcgccagccugagcuaccugcuguacagcgacauccugcugaaguucagccccaccgagaucaccgcccccgccaugccccuggacugcgccaacgccagcaacgugcaggccgugaacugcagcgccaccaagggcgugacccugcugcugcccgagcccgaguggaccuaccccagacugagcugccccggcagcaccuuccagaaggcccugcugaucagcccccacagauucggcgagaccaagggcaacagcgccccccugaucaucagagagcccuucaucgccugcggccccaacgagugcaagcacuucgcccugacccacuacgccgcccagcccggcggcuacuacaacggcaccagaggcgacagaaacaagcugagacaccugaucagcgugaagcugggcaagauccccaccguggagaacagcaucuuccacauggccgccuggagcggcagcgccugccacgacggcaaggaguggaccuacaucggcguggacggccccgacaacaacgcccugcugaaggugaaguacggcgaggccuacaccgacaccuaccacagcuacgccaacaagauccugagaacccaggagagcgccugcaacugcaucggcggcaacugcuaccugaugaucaccgacggcagcgccagcggcgugagcgagugcagauuccugaagaucagagagggcagaaucaucaaggagaucuuccccaccggcagagugaagcacaccgaggagugcaccugcggcuucgccagcaacaagaccaucgagugcgccugcagagacaacagcuacaccgccaagagacccuucgugaagcugaacguggagaccgacaccgccgagaucagacugaugugcaccgacaccuaccuggacacccccagacccaacgacggcagcaucaccggccccugcgagagcgacggcgacaagggcaacggcggcaucaagggcggcuucgugcaccagagaauggagagcaagaucggcagaugguacagcagaaccaugagcaagaccgagagaaugggcaugggccuguacgugaaguacgacggcgaccccugggccgacagcgacgcccuggccuucagcggcgugauggugagcaugaaggagcccggcugguacagcuucggcuucgagaucaaggacaagaagugcgacgugcccugcaucggcaucgagauggugcacgacggcggcaaggagaccuggcacagcgccgccaccgccaucuacugccugaugggcagcggccagcugcugugggacaccgugaccggcguggacauggcccuguga

SEQ ID NO: 190233 - RNA, 1401 nt, Artificial Sequence; identical to SEQ ID NO: 188935
  derived and/or modified CDS sequence (opt4) from neuraminidase__InfluenzaB__AHL93976

SEQ ID NO: 190234 - RNA, 1401 nt, Artificial Sequence; identical to SEQ ID NO: 190206
  derived and/or modified CDS sequence (opt4) from neuraminidase__InfluenzaB__AHL93987

SEQ ID NO: 190235 - RNA, 1401 nt, Artificial Sequence
  derived and/or modified CDS sequence (opt4) from neuraminidase__InfluenzaB__AHL93998
augcugcccagcaccauccagacccugacccuguuccugaccagcggcggcgugcugcugagccuguacgugagcgccagccugagcuaccugcuguacagcgacauccugcugaaguucagccagaccgagaucaccgcccccaucaugccccuggacugcgccaacgccagcaacgugcaggccgugaacagaagcgccgccaagggcgugacccugcugcugcccgagcccgaguggaccuaccccagacugagcugccccggcagcaccuuccagaaggcccugcugaucagcccccacagauucggcgagaucaagggcaacagcgccccccugaucaucagagagcccuucaucgccugcggccccaccgagugcaagcacuucgcccugacccacuacgccgcccagcccggcggcuacuacaacggcaccagagaggacagaaacaagcugagacaccugaucagcgugaagcugggcaagauccccaccguggagaacagcaucuuccacauggccgccuggagcggcagcgccugccacgacggcaaggaguggaccuacaucggcguggacggccccgacagcaacgcccugcugaagaucaaguacggcgaggccuacaccgacaccuaccacagcuacgccaagaacauccugagaacccaggagagcgccugcaacugcaucggcggcgacugcuaccugaugaucaccgacggccccgccagcggcgugagcgagugcagauuccugaagaucagagagggcagaaucaucaaggagaucuuccccaccggcagagugaagcacaccgaggagugcaccugcggcuucgccagcaacaagaccaucgagugcgccugcagagacaacagauacaccgccaagagacccuucgugaagcugaacguggagaccgacaccgccgagaucagacugaugugcaccgagaccuaccuggacacccccagacccaacgacggcagcaucaccggccccugcgagagcgacggcgacaagggcagcggcggcaucaagggcggcuucgugcaccagagaauggccagcaagaucggcagaugguacagcagaaccaugagcaagaccaagagaaugggcaugggccuguacgugaaguacgacggcgaccccuggaccgacagcgaggcccuggcccugagcggcgugauggugagcauggaggagcccggcugguacagcuucggcuucgagaucaaggacaagaagugcgacgugcccugcaucggcaucgagauggugcacgacggcggcaagaccaccuggcacagcgccgccaccgccaucuacugccugaugggcagcggccagcugcugugggacaccgugaccggcguggacauggcccuguga

SEQ ID NO: 190236 - RNA, 1401 nt, Artificial Sequence
  derived and/or modified CDS sequence (opt4) from neuraminidase__InfluenzaB__AHL94009
augcugcccagcaccauccagaugcugacccuguuccugaccagcggcggcgugcugcugagccuguacgugagcgccagccugagcuaccugcuguacagcgacauccugcugaaguucagccccaccgagaucaccgcccccaccaugccccuggacugcgccaacgccagcaacgugcacgccgugaacagaagcgccaccaagggcgugaccuuccugcugcccgagcccaaguggaccuaccccagacugagcugccccggcagcaccuuccagaaggcccugcugaucagcccccacagauucggcgagaccaagggcaacagcgccccccugaucaucagagagcccuucaucgccugcggccccaacgagugcagacacuucgcccugacccacuacgccgcccagcccggcggcuacuacaacggcaccagaggcgacagaaacaagcugagacaccugaucagcgugaagcugggcaagauccccaccguggagaacagcaucuuccacauggccgccuggagcggcagcgccugccacgacggcaaggaguggaccuacaucggcguggacggccccgacaacaacgcccugcugaagaucaaguacggcgaggccuacaccgacaccuaccacagcuacgccaacaacauccugagaacccaggagagcgccugcaacugcaucggcggcaacugcuaccugaugaucaccgacggcagcgccagcggcgugagcgagugcagauuccugaagaucagagagggcagaaucaucaaggagaucuuccccaccggcagagugaagcacaccgaggagugcaccugcggcuucgccagcaacaagaccaucgagugcgccugcagagacaacagcuacaccgccaagagacccuucgugaagcugaacguggagaccgacaccgccgagaucagacugaugugcaccgacaccuaccuggacacccccagacccgacgacggcagcaucaccggccccugcgagagcaacggcgacaagggcagcggcggcaucaagggcggcuucgugcaccagagaauggccagcaagaucggcagaugguacagcagaaccaugagcaagaccgagagaaagggcaugggccuguacgugaaguacgacggcgaccccuggaccgacagcgacgcccuggccuucagaggcgugauggugagcaugaaggagcccggcugguacagcuucggcuucgagaucaaggacaagaagugcgacgugcccugcaucggcaucgagauggugcacgacggcggcaaggagaccuggcacagcgccgccaccgccaucuacugccugaugggcagcggccagcugcugugggacaccgugaccggcguggacauggcccuguga

SEQ ID NO: 190237 - RNA, 1401 nt, Artificial Sequence; identical to SEQ ID NO: 189016
  derived and/or modified CDS sequence (opt4) from neuraminidase__InfluenzaB__AHL94020

SEQ ID NO: 190238 - RNA, 1401 nt, Artificial Sequence; identical to SEQ ID NO: 189016
  derived and/or modified CDS sequence (opt4) from neuraminidase__InfluenzaB__AHL94031

SEQ ID NO: 190239 - RNA, 1401 nt, Artificial Sequence; identical to SEQ ID NO: 189179
  derived and/or modified CDS sequence (opt4) from neuraminidase__InfluenzaB__AHL94042

SEQ ID NO: 190240 - RNA, 1401 nt, Artificial Sequence
  derived and/or modified CDS sequence (opt4) from neuraminidase__InfluenzaB__AHL94053
augcugcccagcaccauccagacccugacccuguuccugaccagcggcggcgugcugcugagccuguaccugagcgcccugcugagcuaccugcuguacagcgacauccugcugaaguucagccccaccgagaucaccgcccccaccaugagccuggacugcgccaacgccagcaacgugcaggccgugaacagaagcgccaccaagggcgugaccuuccugcugcccgagcccgaguggaccuaccccagacugagcugccccggcagcaccuuccagagagcccugcugaucagcccccacagauucggcgagaccaagggcaacagcgccccccugaucaucagagagcccuucaucgccugcggccccaacgagugcaagcacuucgcccugacccacuacgccgcccagcccggcggcuacuacaacggcaccagaggcgacagaaacaagcugagacaccugaucagcgugaagcugggcaagauccccaccguggagaacagcaucuuccacauggccgccuggagcggcagcgccugccacgacggcaaggaguggaccuacaucggcguggacggccccgacaacgacgcccugcugaaggugaaguacggcgaggccuacaccgacaccuaccacagcuacgccaacaagauccugagaacccaggagagcgccugcaacugcaucggcggcaacugcuaccugaugaucaccgacggcagcgccagcggcgugagcgagugcagauuccugaagaucagagagggcagaaucaucaaggagaucuuccccaccggcagagugaagcacaccgaggagugcaccugcggcuucgccagcaacaagaccaucgagugcgccugcagagacaacagcuacaccgccaagagacccuucgugaagcugaacguggagaccgacaccgccgagaucagacugaugugcaccgacaccuaccuggacacccccagacccgacgacggcagcaucaccggccccugcgagagcaacggcgacaagggcagcggcggcaucaagggcggcuucgugcaccagagaauggagagcaagaucggcagaugguacagcagaaccaugagcaagaccgagagaaugggcaugggccuguacgugaaguacgacggcgaccccugggccgacagcgacgcccuggccuucagcggcgugauggugagcaugaaggagcccggcugguacagcuucggcuucgagaucaaggacaagaagugcgacgugcccugcaucggcaucgagauggugcacgacggcggcaaggagaccuggcacagcgccgccaccgccaucuacugccugaugggcagcggccagcugcugugggacaccgugaccggcguggacauggcccuguga

SEQ ID NO: 190241 - RNA, 1401 nt, Artificial Sequence; identical to SEQ ID NO: 189016
  derived and/or modified CDS sequence (opt4) from neuraminidase__InfluenzaB__AHL94064

SEQ ID NO: 190242 - RNA, 1401 nt, Artificial Sequence; identical to SEQ ID NO: 189016
  derived and/or modified CDS sequence (opt4) from neuraminidase__InfluenzaB__AHL94075

SEQ ID NO: 190243 - RNA, 1401 nt, Artificial Sequence
  derived and/or modified CDS sequence (opt4) from neuraminidase__InfluenzaB__AHL94086
augcugcccagcaccauccagacccugacccuguuccugaccagcggcggcgugcugcugagccuguacgugagcgccagccugagcuaccugcuguacagcgacauccugcugaaguucagcagaaccgagaucaccgcccccaucaugccccuggacugcgccaacgccagcaacgugcaggccgugaacagaagcgccaccaagggcgugaccuuccugcugcccgagcccgaguggaccuaccccagacugagcugccccggcagcaccuuccagaaggcccugcugaucagcccccacagauucggcgagaccaagggcaacagcgccccccugaucaucagagagcccuucguggccugcggccccaaggagugcaagcacuucgcccugacccacuacgccgcccagcccggcggcuacuacaacggcaccagagaggacagaaacaagcugagacaccugaucagcgugaagcugggcaagauccccaccguggagaacagcaucuuccacauggccgccuggagcggcagcgccugccacgacggcagagaguggaccuacaucggcguggacggccccgacagcaacgcccugcugaagaucaaguacggcgaggccuacaccgacaccuaccacagcuacgccaagaacauccugagaacccaggagagcgccugcaacugcaucggcggcgacugcuaccugaugaucaccgacggccccgccagcggcaucagcgagugcagauuccugaagaucagagagggcagaaucaucaaggagaucuuccccaccggcagagugaagcacaccgaggagugcaccugcggcuucgccagcaacaagaccaucgagugcgccugcagagacaacagcuacaccgccaagagacccuucgugaagcugaacguggagaccgacaccgccgagaucagacugaugugcaccgagaccuaccuggacacccccagacccaacgacggcagcaucaccggccccugcgagagcaacggcgacaagggcagcggcggcaucaagggcggcuucgugcaccagagaauggccagcaagaucggcagaugguacagcagaaccaugagcaagaccaagagaaugggcaugggccuguacgugaaguacgacggcgaccccuggaccgacagcgaggcccuggcccugagcggcgugauggugagcauggaggagcccggcugguacagcuucggcuucgagaucaaggacaagaagugcgacgugcccugcaucggcaucgagauggugcacgacggcggcaagaccaccuggcacagcgccgccaccgccaucuacugccugaugggcagcggccagcugcugugggacaccgugaccggcgugaacaugacccuguga

SEQ ID NO: 190244 - RNA, 1401 nt, Artificial Sequence; identical to SEQ ID NO: 189179
  derived and/or modified CDS sequence (opt4) from neuraminidase__InfluenzaB__AHL94095

SEQ ID NO: 190245 - RNA, 1401 nt, Artificial Sequence; identical to SEQ ID NO: 189016
  derived and/or modified CDS sequence (opt4) from neuraminidase__InfluenzaB__AHL94106

SEQ ID NO: 190246 - RNA, 1401 nt, Artificial Sequence
  derived and/or modified CDS sequence (opt4) from neuraminidase__InfluenzaB__AHL94117
augcugcccagcaccauccagaugcugacccuguuccugaccagcggcggcgugcugcugagccuguacgugagcgccagccugagcuaccugcuguacagcgacauccugcugaaguucagccccaccgagaucaccgcccccaccaugccccuggacugcgccaacgccagcaacgugcacgccgugaacagaagcgccaccaagggcgugaccuuccugcugcccgagcccgaguggaccuaccccagacugagcugccccggcagcaccuuccagaaggcccugcugaucagcccccacagauucggcgagaccaagggcaacagcgccccccugaucaucagagagcccuucaucgccugcggccccaacgagugcaagcacuucgcccugacccacuacgccgcccagcccggcggcuacuacaacggcaccagaggcgacagaaacaagcugagacaccugaucagcgugaagcugggcaagauccccaccguggagaacagcaucuuccacauggccgccuggagcggcagcgccugccacgacggcaaggaguggaccuacaucggcguggacggccccgacaacaacgcccugcugaagaucaaguacggcgaggccuacaccgacaccuaccacagcuacgccaacaacauccugagaacccaggagagcgccugcaacugcaucggcggcaacugcuaccugaugaucaccgacggcagcgccagcggcgugagcgagugcagauuccugaagaucagagagggcagaaucaucaaggagaucuuccccaccggcagagugaagcacaccgaggagugcaccugcggcuucgccagcaacaagaccaucgagugcgccugcagagacaacagcuacaccgccaagagacccuucgugaagcugaacguggagaccgacaccgccgagaucagacugaugugcaccgacaccuaccuggacacccccagacccgacgacggcagcaucaccggccccugcgagagcaacggcgacaagggcagcggcggcaucaagggcggcuucgugcaccagagaauggccagcaagaucggcagaugguacagcagaaccaugagcaagaccgagagaaagggcaugggccugcacgugaaguacgacggcgaccccuggaccgacagcgacgcccuggccuucagaggcgugauggugagcaugaaggagcccggcugguacagcuucggcuucgagaucaaggacaagaagugcgacgugcccugcaucggcaucgagauggugcacgacggcggcaaggagaccuggcacagcgccgccaccgccaucuacugccugaugggcagcggccagcugcugugggacaccgugaccggcgugaacauggcccuguga

SEQ ID NO: 190247 - RNA, 1401 nt, Artificial Sequence; identical to SEQ ID NO: 189016
  derived and/or modified CDS sequence (opt4) from neuraminidase__InfluenzaB__AHL94128

SEQ ID NO: 190248 - RNA, 1401 nt, Artificial Sequence
  derived and/or modified CDS sequence (opt4) from neuraminidase__InfluenzaB__AHL94139
augcugcccagcaccauccagacccugacccuguuccugaccagcggcggcgugcugcugagccuguacgugagcgcccugcugagcuaccugcuguacagcgacauccugcugaaguucagccccaccgagaucaccgcccccaccaugagccuggacugcgccaacgccagcaacgugcaggccgugaacagaagcgccaccaagggcgugaccuuccugcugcccgagcccgaguggaccuaccccagacugagcugccccggcagcaccuuccagagagcccugcugaucagcccccacagauucggcgagaccaagggcaacagcgccccccugaucaucagagagcccuucaucgccugcggccccaacgagugcaagcacuucgcccugacccacuacgccgcccagcccggcggcuacuacaacggcaccagaggcgacagaaacaagcugagacaccugaucagcgugaagcugggcaagauccccaccguggagaacagcaucuuccacauggccgccuggagcggcagcgccugccacgacggcaaggaguggaccuacaucggcguggacggccccgacaacgacgcccugcugaaggugaaguacggcgaggccuacaccgacaccuaccacagcuacgccaacaagauccugagaacccaggagagcgccugcaacugcaucggcggcaacugcuaccugaugaucaccgacggcagcgccagcggcgugagcgagugcagauuccugaagaucagagagggcagaaucaucaaggagaucuuccccaccggcagagugaagcacaccgaggagugcaccugcggcuucgccagcaacaagaccaucgagugcgccugcagagacaacagcuacaccgccaagagacccuucgugaagcugaacguggagaccgacaccgccgagaucaagcugaugugcaccgacaccuaccuggacacccccagacccgacgacggcagcaucaccggccccugcgagagcaacggcgacaagggcagcggcggcaucaagggcggcuucgugcaccagagaauggagagcaagaucggcagaugguacagcagaaccaugagcaagaccgagagaaugggcaugggccuguacgugaaguacgacggcgaccccugggccgacagcgacgcccuggccuucagcggcgugauggugagcaugaaggagcccggcugguacagcuucggcuucgagaucaaggacaagaagugcgacgugcccugcaucggcaucgagauggugcacgacggcggcaaggagaccuggcacagcgccgccaccgccaucuacugccugaugggcagcggccagcugcugugggacaccgugaccggcguggacauggcccuguga

SEQ ID NO: 190249 - RNA, 1401 nt, Artificial Sequence; identical to SEQ ID NO: 190206
  derived and/or modified CDS sequence (opt4) from neuraminidase__InfluenzaB__AHL94150

SEQ ID NO: 190250 - RNA, 1401 nt, Artificial Sequence
  derived and/or modified CDS sequence (opt4) from neuraminidase__InfluenzaB__AHL94161
augcugcccagcaccauccagaugcugacccuguuccugaccagcggcggcgugcugcugagccuguacgugagcgccagccugagcuaccugcuguacagcgacauccugcugaaguucagccccaccgagaucaccgcccccaccaugccccuggacugcgccaacgccagcaacgugcacgccgugaacagaagcgccaccaagggcgugaccuuccugcugcccgagcccgaguggaccuaccccagacugagcugccccggcagcaccuuccagaaggcccugcugaucagcccccacagauucggcgagaccaagggcaacagcgccccccugaucaucagagagcccuucaucgccugcggccccaacgagugcaagcacuucgcccugacccacuacgccgcccagcccggcggcuacuacaacggcaccagaggcgacagaaacaagcugagacaccugaucagcgugaagcugggcaagauccccaccguggagaacagcaucuuccacauggccgccuggagcggcagcgccugccacgacggcaaggaguggaccuacaucggcguggacggccccgacaacaacgcccugcugaagaucaaguacggcgaggccuacaccgacaccuaccacagcuacgccaacaacauccugagaacccaggagagcgccugcaacugcaucggcggcaacugcuaccugaugaucaccgacggcagcgccagcggcgugagcgagugcagauuccugaagaucagagagggcagaaucaucaaggagaucuuccccaccggcagagugaagcacaccgaggagugcaccugcggcuucgccagcaacaagaccaucgagugcgccugcagagacaacagcuacaccgccaagagacccuucgugaagcugaacguggagaccgacaccgccaagaucagacugaugugcaccgacaccuaccuggacacccccagacccgacgacggcagcaucaccggccccugcgagagcaacggcgacaagggcagcggcggcaucaagggcggcuucgugcaccagagaauggccagcaagaucggcagaugguacagcagaaccaugagcaagaccgagagaaagggcaugggccuguacgugaaguacgacggcgaccccuggaccgacagcgacgcccuggccuucagaggcgugauggugagcaugaaggagcccggcugguacagcuucggcuucgagaucaaggacaagaagugcgacgugcccugcaucggcaucgagauggugcacgacggcggcaaggagaccuggcacagcgccgccaccgccaucuacugccugaugggcagcggccagcugcugugggacaccgugaccggcguggacauggcccuguga

SEQ ID NO: 190251 - RNA, 1401 nt, Artificial Sequence; identical to SEQ ID NO: 190206
  derived and/or modified CDS sequence (opt4) from neuraminidase__InfluenzaB__AHL94183

SEQ ID NO: 190252 - RNA, 1404 nt, Artificial Sequence
  derived and/or modified CDS sequence (opt4) from neuraminidase__InfluenzaB__AHL94194
augcugcccagcaccauccagacccugacccuguuccugaccagcggcggcgugcugcugagccuguacgugagcgcccugcugagcuaccugcuguacagcgacauccugcugaaguucagccccaccgagaucaccgcccccaccaugagccuggacugcgccaacgccagcaacgugcaggccgugaacagaagcgccaccaagggcgugaccuuccugcugcugcccgagcccgaguggaccuaccccagacugagcugccccggcagcaccuuccagagagcccugcugaucagcccccacagauucggcgagaccaagggcaacagcgccccccugaucaucagagagcccuucaucgccugcggccccaacgagugcaagcacuucgcccugacccacuacgccgcccagcccggcggcuacuacaacggcaccagaggcgacagaaacaagcugagacaccugaucagcgugaagcugggcaagauccccaccguggagaacagcaucuuccacauggccgccuggagcggcagcgccugccacgacggcaaggaguggaccuacaucggcguggacggccccgacaacgacgcccugcugaaggugaaguacggcgaggccuacaccgacaccuaccacagcuacgccaacaagauccugagaacccaggagagcgccugcaacugcaucggcggcaacugcuaccugaugaucaccgacggcagcgccagcggcgugagcgagugcagauuccugaagaucagagagggcagaaucaucaaggagaucuuccccaccggcagagugaagcacaccgaggagugcaccugcggcuucgccagcaacaagaccaucgagugcgccugcagagacaacagcuacaccgccaagagacccuucgugaagcugaacguggagaccgacaccgccgagaucagacugaugugcaccgacaccuaccuggacacccccagacccgacgacggcagcaucaccggccccugcgagagcaacggcgacaagggcagcggcggcaucaagggcggcuucgugcaccagagaauggagagcaagaucggcagaugguacagcagaaccaugagcaagaccgagagaaugggcaugggccuguacgugaaguacgacggcgaccccugggccgacagcgacgcccuggccuucagcggcgugauggugagcaugaaggagcccggcugguacagcuucggcuucgagaucaaggacaagaagugcgacgugcccugcaucggcaucgagauggugcacgacggcggcaaggagaccuggcacagcgccgccaccgccaucuacugccugaugggcagcggccagcugcugugggacaccgugaccggcguggacauggcccuguga

SEQ ID NO: 190253 - RNA, 1401 nt, Artificial Sequence; identical to SEQ ID NO: 189016
  derived and/or modified CDS sequence (opt4) from neuraminidase__InfluenzaB__AHL94205

SEQ ID NO: 190254 - RNA, 1401 nt, Artificial Sequence; identical to SEQ ID NO: 189179
  derived and/or modified CDS sequence (opt4) from neuraminidase__InfluenzaB__AHL94214

SEQ ID NO: 190255 - RNA, 1401 nt, Artificial Sequence
  derived and/or modified CDS sequence (opt4) from neuraminidase__InfluenzaB__AHL94224
augcugcccagcaccauccagaugcugacccuguuccugaccagcggcggcgugcugcugagccuguacgugagcgccagccugagcuaccugcuguacagcgacauccugcugaaguucagccccaccgagaucaccgcccccaccaugccccuggacugcgccaacgccagcaacgugcacgccgugaacagaagcgccaccaagggcgugaccuuccugcugcccgagcccgaguggaccuaccccagacugagcugccccggcagcaccuuccagaaggcccugcugaucagcccccacagauucggcgagaccaagggcaacagcgccccccugaucaucagagagcccuucaucgccugcggccccaacgagugcaagcacuucgcccugacccacuacgccgcccagcccggcggcuacuacaacggcaccagaggcgacagaaacaagcugagacaccugaucagcgugaagcugggcaagauccccaccguggagaacagcaucuuccacauggccgccuggagcggcagcgccugccacgacggcaaggaguggaccuacaucggcguggacggccccgacaacaacgcccugcugaagaucaaguacggcgaggccuacaccgacaccuaccacagcuacgccaacaacauccugagaacccaggagagcgccugcaacugcaucggcggcaacugcuaccugaugaucaccgacggcagcgccagcggcgugagcgagugcagauuccugaagaucagagagggcagaaucaucaaggagaucuuccccaccggcagagugaagcacaccgaggagugcaccugcggcuucgccagcaacaagaccaucgagugcgccugcagagacaacagcuacaccgccaagagacccuucgugaagcugaacguggagaccgacaccgccgagaucagacugaugugcaccgacaccuaccuggacacccccagacccgacgacggcagcaucaccggccccugcgagagcaacggcgacaagggcagcggcggcaucaagggcggcuucgugcaccagagaauggccagcaagaucggcagaugguacagcagaaccaugagcaagaccgagagaaagggcaugggccuguacgugaaguacgacggcgaccccuggaucgacagcgacgcccuggccuucagaggcgugauggugagcaugaaggagcccggcugguacagcuucggcuucgagaucaaggacaagaagugcgacgugcccugcaucggcaucgagauggugcacgacggcggcaaggagaccuggcacagcgccgccaccgccaucuacugccugaugggcagcggccagcugcugugggacaccgugaccggcguggacauggcccuguga

SEQ ID NO: 190256 - RNA, 1401 nt, Artificial Sequence; identical to SEQ ID NO: 189016
  derived and/or modified CDS sequence (opt4) from neuraminidase__InfluenzaB__AHL94235

SEQ ID NO: 190257 - RNA, 1401 nt, Artificial Sequence; identical to SEQ ID NO: 189179
  derived and/or modified CDS sequence (opt4) from neuraminidase__InfluenzaB__AHL94246

SEQ ID NO: 190258 - RNA, 1401 nt, Artificial Sequence; identical to SEQ ID NO: 189179
  derived and/or modified CDS sequence (opt4) from neuraminidase__InfluenzaB__AHL94257

SEQ ID NO: 190259 - RNA, 1401 nt, Artificial Sequence; identical to SEQ ID NO: 188877
  derived and/or modified CDS sequence (opt4) from neuraminidase__InfluenzaB__AHL94267

SEQ ID NO: 190260 - RNA, 1401 nt, Artificial Sequence; identical to SEQ ID NO: 188877
  derived and/or modified CDS sequence (opt4) from neuraminidase__InfluenzaB__AHL94278

SEQ ID NO: 190261 - RNA, 1401 nt, Artificial Sequence; identical to SEQ ID NO: 188877
  derived and/or modified CDS sequence (opt4) from neuraminidase__InfluenzaB__AHL94299

SEQ ID NO: 190262 - RNA, 1401 nt, Artificial Sequence
  derived and/or modified CDS sequence (opt4) from neuraminidase__InfluenzaB__AHL94310
augcugcccagcaccauccagacccugacccuguuccugaccagcggcggcgugcugcugagccuguacgugagcgccagccugagcuaccugcuguacagcgacauccugcugaaguucagcagaaccgagaucaccgcccccaucaugccccuggacugcgccaacgccagcaacgugcaggccgugaacagaagcgccaccaagggcgugaccccccugcugcccgagcccgaguggaccuaccccagacugagcugccccggcagcaccuuccagaaggcccugcugaucagcccccacagauucggcgagaccaagggcaacagcgccccccugaucaucagagagcccuucaucgccugcggccccaaggagugcaagcacuucgcccugacccacuacgccgcccagcccggcggcuacuacaacggcaccagagaggacagaaacaagcugagacaccugaucagcgugaagcugggcaagauccccaccguggagaacagcaucuuccacauggccgccuggagcggcagcgccugccacgacggcagagaguggaccuacaucggcguggacggccccgacagcaacgcccugcugaagaucaaguacggcgaggccuacaccgacaccuaccacagcuacgccaagaacauccugagaacccaggagagcgccugcaacugcaucggcggcgacugcuaccugaugaucaccgacggcagcgccagcggcaucagcgagugcagauuccugaagaucagagagggcagaaucaucaaggagaucuuccccaccggcagagugaagcacaccgaggagugcaccugcggcuucgccagcaacaagaccaucgagugcgccugcagagacaacagcuacaccgccaagagacccuucgugaagcugaacguggagaccgacaccgccgagaucagacugaugugcaccgagaccuaccuggacacccccagacccaacgacggcagcaucgccggccccugcgagagcaacggcgacgagggcagcggcggcaucaagggcggcuucgugcaccagagaauggccagcaagaucggcagaugguacagcagaaccaugagcaagaccaagagaaugggcaugggccuguacgugaaguacgacggcgaccccuggaccgacagcgaggcccuggcccugagcggcgugauggugagcauggaggagcccggcugguacagcuucggcuucgagaucaaggacaagaagugcgacgugcccugcaucggcaucgagauggugcacgacggcggcaagaccaccuggcacagcgccgccaccgccaucuacugccugaugggcagcggccagcugcugugggacaccgugaccggcgugaacaugacccuguga

SEQ ID NO: 190263 - RNA, 1401 nt, Artificial Sequence; identical to SEQ ID NO: 190262
  derived and/or modified CDS sequence (opt4) from neuraminidase__InfluenzaB__AHL94321

SEQ ID NO: 190264 - RNA, 1401 nt, Artificial Sequence
  derived and/or modified CDS sequence (opt4) from neuraminidase__InfluenzaB__AHL94332
augcugcccagcaccauccagacccugacccuguuccugaccagcggcggcgugcugcugagccuguacgugagcgccagccugagcuaccugcuguacagcgacauccugcugaaguucagcagaaccgagaucaccgcccccaucaugccccuggacugcgccaacgccagcaacgugcaggccgugaacagaagcgccaccaagggcgugaccccccugcugcccgagcccgaguggaccuaccccagacugagcugccccggcagcaccuuccagaaggcccugcugaucagcccccacagauucggcgagaccaagggcaacagcgccccccugaucaucagagagcccuucaucgccugcggccccaaggagugcaagcacuucgcccugacccacuacgccgcccagcccggcggcuacuacaacggcaccagagaggacagaaacaagcugagacaccugaucagcgugaagcugggcaagauccccaccguggagaacagcaucuuccacauggccgccuggagcggcagcgccugccacgacggcagagaguggaccuacaucggcguggacggccccgacagcaacgcccugcugaagaucaaguacggcgaggccuacaccgacaccuaccacagcuacgccaagaacauccugagaacccaggagagcgccugcaacugcaucggcggcgacugcuaccugaugaucaccgacggccccgccagcggcaucagcgagugcagauuccugaagaucagagagggcagaaucaucaaggagaucuuccccaccggcagagugaagcacaccgaggagugcaccugcggcuucgccagcaacaagaccaucgagugcgccugcagagacaacagcuacaccgccaagagacccuucgugaagcugaacguggagaccgacaccgccgagaucagacugaugugcaccgagaccuaccuggacacccccagacccaacgacggcagcaucaccggccccugcgagagcaacggcgacgagggcagcggcggcaucaagggcggcuucgugcaccagagaauggccagcaagaucggcagaugguacagcagaaccaugagcaagaccaagagaaugggcaugggccuguacgugaaguacgacggcgaccccuggaccgacagcgaggcccuggcccugagcggcgugauggugagcauggaggagcccggcugguacagcuucggcuucgagaucaaggacaagaagugcgacgugcccugcaucggcaucgagauggugcacgacggcggcaagaccaccuggcacagcgccgccaccgccaucuacugccugaugggcagcggccagcugcugugggacaccgugaccggcgugaacaugacccuguga

SEQ ID NO: 190265 - RNA, 1401 nt, Artificial Sequence; identical to SEQ ID NO: 188877
  derived and/or modified CDS sequence (opt4) from neuraminidase__InfluenzaB__AHL94343

SEQ ID NO: 190266 - RNA, 1401 nt, Artificial Sequence
  derived and/or modified CDS sequence (opt4) from neuraminidase__InfluenzaB__AHL94354
augcugcccagcaccauccagacccugacccuguuccugaccagcggcggcgugcugcugagccuguacgugagcgccagccugagcuaccugcuguacagcgacauccugcugaaguucagccccaccgagaucaccgcccccaccaugccccuggacugcgccaacgccagcaacgugcaggccgugaacagaagcgccaccaagggcgugacccugcugcugcccgagcccgaguggaccuaccccagacugagcugccccggcagcaccuuccagaaggcccugcugaucagcccccacagauucggcgagaccaagggcaacagcgccccccugaucaucagagagcccuucaucgccugcggccccaacgagugcaagcacuucgcccugacccacuacgccgcccagcccggcggcuacuacaacggcaccagaggcgacagaaacaagcugagacaccugaucagcgugaagcugggcaagauccccaccguggagaacagcaucuuccacauggccgccuggagcggcagcgccugccacgacggcaaggaguggaccuacaucggcguggacggccccgacaacaacgcccugcugaaggugaaguacggcgaggccuacaccgacaccuaccacagcuacgccaacaagauccugagaacccaggagagcgccugcaacugcaucggcggcaacugcuaccugaugaucaccgacggcagcgccagcggcgugagcgagugcagauuccugaagaucagagagggcagaaucaucaaggagaucuuccccaccggcagagugaagcacaccgaggagugcaccugcggcuucgccagcaacaagaccaucgagugcgccugcagagacaacagauacaccgccaagagacccuucgugaagcugaacguggagaccgacaccgccgagaucagacugaugugcaccgacaccuaccuggacacccccagacccaacgacggcagcaucaccggccccugcgagagcgacggcgacaagggcagcggcggcaucaagggcggcuucgugcaccagagaaugaagagcaagaucggcagaugguacagcagaaccaugagcaagaccgagagaaugggcaugggccuguacgugaaguacgacggcgaccccugggccgacagcgacgcccuggccuucagcggcgugauggugagcaugaaggagcccggcugguacagcuucggcuucgagaucaaggacaagaagugcgacgugcccugcaucggcaucgagauggugcacgacggcggcaaggagaccuggcacagcgccgccaccgccaucuacugccugaugggcagcggccagcugcugugggacaccgugaccggcguggacauggcccuguga

SEQ ID NO: 190267 - RNA, 1401 nt, Artificial Sequence; identical to SEQ ID NO: 190266
  derived and/or modified CDS sequence (opt4) from neuraminidase__InfluenzaB__AHL94365

SEQ ID NO: 190268 - RNA, 1401 nt, Artificial Sequence
  derived and/or modified CDS sequence (opt4) from neuraminidase__InfluenzaB__AHL94387
augcugcccagcaccauccagacccugacccuguuccugaccagcggcggcgugcugcugagccuguacgugagcgccagccugagcuaccugcuguacagcgacauccugcugaaguucagccccaccgagaucaccgcccccaccaugccccuggacugcgccaacgccagcaccgugcaggccgugaacagaagcgccaccaagggcgugacccugcugcugcccgagcccgaguggaccuaccccagacugagcugccccggcagcaccuuccagaaggcccugcugaucagcccccacagauucggcgagaccaagggcaacagcgccccccugaucaucagagagcccuucaucgccugcggccccaacgagugcaagcacuucgcccugacccacuacgccgcccagcccggcggcuacuacaacggcaccagaggcgacagaaacaagcugagacaccugaucagcgugaagcugggcaagauccccaccguggagaacagcaucuuccacauggccgccuggagcggcagcgccugccacgacggcaaggaguggaccuaccugggcguggacggccccgacaacaacgcccugcugaaggugaaguacggcgaggccuacaccgacaccuaccacagcuacgccaacaagauccugagaacccaggagagcgccugcaacugcaucggcggcaacugcuaccugaugaucaccgacggcagcgccagcggcgugagcgagugcagauuccugaagaucagagagggcagaaucaucaaggagaucuuccccaccggcagagugaagcacaccgaggagugcaccugcggcuucgccagcaacaagaccaucgagugcgccugcagagacaacagauacaccgccaagagacccuucgugaagcugaacguggagaccgacaccgccgagaucagacugaugugcaccgacaccuaccuggacacccccagacccaacgacggcagcaucaccggccccugcgagagcgacggcgacaagggcagcggcggcaucaagggcggcuucgugcaccagagaaugaagagcaagaucggcagaugguacagcagaaccaugagcaagaccgagagaaugggcaugggccuguacgugaaguacgacggcgaccccugggccgacagcgacgcccuggccuucagcggcgugauggugagcaugaaggagcccggcugguacagcuucggcuucgagaucaaggacaagaagugcgacgugcccugcaucggcaucgagauggugcacgacggcggcaaggagaucuggcacagcgccgccaccgccaucuacugccugaugggcagcggccagcugcugugggacaccgugaccggcguggacauggcccuguga

SEQ ID NO: 190269 - RNA, 1404 nt, Artificial Sequence
  derived and/or modified CDS sequence (opt4) from neuraminidase__InfluenzaB__AHL94398
augcugcccagcaccauccagacccugacccuguuccugaccagcggcggcgugcugcugagccuguacgugagcgccagccugagcuaccugcuguacagcgacauccugcugaaguucagccccaccgagaucaccgcccccaccaugccccuggacugcgccaacgccagcaacgugcaggccgugaacagaagcgccaccaagggcgugacccugcugcugcugcccgagcccgaguggaccuaccccagacugagcugccccggcagcaccuuccagaaggcccugcugaucagcccccacagauucggcgagaccaagggcaacagcgccccccugaucaucagagagcccuucaucgccugcggccccaacgagugcaagcacuucgcccugacccacuacgccgcccagcccggcggcuacuacaacggcaccagaggcgacagaaacaagcugagacaccugaucagcgugaagcugggcaagauccccaccguggagaacagcaucuuccacauggccgccuggagcggcagcgccugccacgacggcaaggaguggaccuacaucggcguggacggccccgacaacaacgcccugcugaaggugaaguacggcgaggccuacaccgacaccuaccacagcuacgccaacaagauccugagaacccaggagagcgccugcaacugcaucggcggcaacugcuaccugaugaucaccgacggcagcgccagcggcgugagcgagugcagauuccugaagaucagagagggcagaaucaucaaggagaucuuccccaccggcagagugaagcacaccgaggagugcaccugcggcuucgccagcaacaagaccaucgagugcgccugcagagacaacagauacaccgccaagagacccuucgugaagcugaacguggagaccgacaccgccgagaucagacugaugugcaccgacaccuaccuggacacccccagacccaacgacggcagcaucaccggccccugcgagagcgacggcgacaagggcagcggcggcaucaagggcggcuucgugcaccagagaaugaagagcaagaucggcagaugguacagcagaaccaugagcaagaccgagagaaugggcaugggccuguacgugaaguacgacggcgaccccugggccgacagcgacgcccuggccuucagcggcgugauggugagcaugaaggagcccggcugguacagcuucggcuucgagaucaaggacaagaagugcgacgugcccugcaucggcaucgagauggugcacgacggcggcaaggagaccuggcacagcgccgccaccgccaucuacugccugaugggcagcggccagcugcugugggacaccgugaccggcguggacauggcccuguga

SEQ ID NO: 190270 - RNA, 1401 nt, Artificial Sequence; identical to SEQ ID NO: 190266
  derived and/or modified CDS sequence (opt4) from neuraminidase__InfluenzaB__AHL94409

SEQ ID NO: 190271 - RNA, 1401 nt, Artificial Sequence
  derived and/or modified CDS sequence (opt4) from neuraminidase__InfluenzaB__AHL94431
augcugcccagcaccauccagacccugacccuguuccugaccagcggcggcgugcugcugagccuguacgugagcgccagccugagcuaccugcuguacagcgacauccugcugaaguucagccagaccgagaucaccgcccccaucaugccccuggacugcgccaacgccagcaacgugcaggccgugaaccacagcgccgccaagggcgugacccugauccugcccgagcccgaguggaccuaccccagacugagcugccccggcagcaccuuccagaaggcccugcugaucagcccccacagauucggcgagaucaagggcaacagcgccccccugaucaucagagagcccuucaucgccugcggccccaccgagugcaagcacuucgcccugacccacuacgccgcccagcccggcggcuacuacaacggcaccagagaggacagaaacaagcugagacaccugaucagcgugaagcugggcaagauccccaccguggagaacagcaucuuccacauggccgccuggagcggcagcgccugccacgacggcaaggaguggaccuacaucggcguggacggccccgacagcaacgcccugcugaagaucaaguacggcgaggccuacaccgacaccuaccacagcuacgccaagaacauccugagaacccaggagagcgccugcaacugcaucggcggcgacugcuaccugaugaucaccgacggccccgccagcggcgugagcgagugcagauuccugaagaucagagagggcagaaucaucaaggagaucuuccccaccggcagagugaagcacaccgaggagugcaccugcggcuucgccagcaacaagaccaucgagugcgccugcagagacaacagauacaccgccaagagacccuucgugaagcugaacguggagaccgacaccgccgagaucagacugaugugcaccgagaccuaccuggacacccccagacccaacgacggcagcaucaccggccccugcgagagcgacggcgacaagggcagcggcggcaucaagggcggcuucgugcaccagagaauggccagcaagaucggcagaugguacagcagaaccaugagcaagaccaagagaaugggcaugggccuguacgugaaguacgacggcgaccccuggaccgacagcgaggcccuggcccugagcggcgugaugaucagcauggaggagcccggcugguacagcuucggcuucgagaucaaggacaagaagugcgacgugcccugcaucggcaucgagauggugcacgacggcggcaagaccaccuggcacagcgccgccaccgccaucuacugccugaugggcagcggccagcugcugugggacaccgugaccggcguggacauggcccuguga

SEQ ID NO: 190272 - RNA, 1401 nt, Artificial Sequence
  derived and/or modified CDS sequence (opt4) from neuraminidase__InfluenzaB__AHL94442
augcugcccagcaccauccagacccugacccuguuccugaccagcggcggcgugcugcugagccuguacaugagcgccagccugagcuaccugcuguacagcgacauccugcugaaguucagcagaaccgagaucaccgcccccaucaugccccuggacugcgccaacgccagcaacgugcaggccgugaacagaagcgccaccaagggcgugaccccccugcugcccgagcccgaguggaccuaccccagacugagcugccccggcagcaccuuccagaaggcccugcugaucagcccccacagauucggcgagaccaagggcaacagcgccccccugaucaucagagagcccuucaucgccugcggccccaaggagugcaagcacuucgcccugacccacuacgccgcccagcccggcggcuacuacaacggcaccagagaggacagaaacaagcugagacaccugaucagcgugaagcugggcaagauccccaccguggagaacagcaucuuccacauggccgccuggagcggcagcgccugccacgacggcagagaguggaccuacaucggcguggacggccccgacagcaacgcccugcugaagaucaaguacggcgaggccuacaccgacaccuaccacagcuacgccaagaacauccugagaacccaggagagcgccugcaacugcaucggcggcgacugcuaccugaugaucaccgacggcagcgccagcggcaucagcgagugcagauuccugaagaucagagagggcagaaucaucaaggagaucuuccccaccggcagagugaagcacaccgaggagugcaccugcggcuucgccagcaacaagaccaucgagugcgccugcagagacaacagcuacaccgccaagagacccuucgugaagcugaacguggagaccgacaccgccgagaucagacugaugugcaccgagaccuaccuggacacccccagacccaacgacggcagcaucgccggccccugcgagagcaacggcgacgagggcagcggcggcaucaagggcggcuucgugcaccagagaauggccagcaagaucggcagaugguacagcagaaccaugagcaagaccaagagaaugggcaugggccuguacgugaaguacgacggcgaccccuggaccgacagcgaggcccuggcccugagcggcgugauggugagcauggaggagcccggcugguacagcuucggcuucgagaucaaggacaagaagugcgacgugcccugcaucggcaucgagauggugcacgacggcggcaagaccaccuggcacagcgccgccaccgccaucuacugccugaugggcagcggccagcugcugugggacaccgugaccggcgugaacaugacccuguga

SEQ ID NO: 190273 - RNA, 1401 nt, Artificial Sequence; identical to SEQ ID NO: 190262
  derived and/or modified CDS sequence (opt4) from neuraminidase__InfluenzaB__AHL94464

SEQ ID NO: 190274 - RNA, 1401 nt, Artificial Sequence; identical to SEQ ID NO: 188877
  derived and/or modified CDS sequence (opt4) from neuraminidase__InfluenzaB__AHL94475

SEQ ID NO: 190275 - RNA, 1401 nt, Artificial Sequence; identical to SEQ ID NO: 190266
  derived and/or modified CDS sequence (opt4) from neuraminidase__InfluenzaB__AHL94486

SEQ ID NO: 190276 - RNA, 1401 nt, Artificial Sequence; identical to SEQ ID NO: 188877
  derived and/or modified CDS sequence (opt4) from neuraminidase__InfluenzaB__AHL94497

SEQ ID NO: 190277 - RNA, 1401 nt, Artificial Sequence; identical to SEQ ID NO: 190262
  derived and/or modified CDS sequence (opt4) from neuraminidase__InfluenzaB__AHL94508

SEQ ID NO: 190278 - RNA, 1401 nt, Artificial Sequence
  derived and/or modified CDS sequence (opt4) from neuraminidase__InfluenzaB__AHL94519
augcugcccagcaccauccagacccugacccuguuccugaccagcggcggcgugcugcugagccuguacgugagcgccagccugagcuaccugcuguacagcgacauccugcugaaguucagccccaccgagaucaccgcccccaccaugccccuggacugcgccaacgccagcaacgugcaggccgugaacagaagcgccaccaagggcgugacccugcugcugcccgagcccgaguggaccuaccccagacugagcugccccggcagcaccuuccagaaggcccugcugaucagcccccacagauucggcgagaccaagggcaacagcgccccccugaucaucagagagcccuucaucgccugcggccccaacgagugcaagcacuucgcccugacccacuacgccgcccagcccggcggcuacuacaacggcaccagaggcgacagaaacaagcugagacaccugaucagcgugaagcugggcaagauccccaccguggagaacagcaucuuccacauggccgccuggagcggcagcgccugccacgacggcaaggaguggaccuacaucggcguggacggccccgacaacaacgcccugcugaaggugaaguacggcgaggccuacaccgacaccuaccacagcuacgccaacaagauccugagaacccaggagagcgccugcaacugcaucggcggcaacugcuaccugaugaucaccgacggcagcgccagcggcgugagcgagugcagauuccugaagaucagagagggcagaaucaucaaggagaucuuccccaccggcagagugaagcacaccgaggagugcaccugcggcuucgccagcaacaagaccaucgagugcgccugcagagacaacagcuacaccgccaagagacccuucgugaagcugaacguggagaccgacaccgccgagaucagacugaugugcaccgacaccuaccuggacacccccagacccaacgacggcagcaucaccggccccugcgagagcgacggcgacaagggcagcggcggcaucaagggcggcuucgugcaccagagaauggagagcaagaucggcagaugguacagcagaaccaugagcaagaccgagagaaugggcaugggccuguacgugaaguacgacggcgaccccuggaccgacagcgacgcccuggccuucagcggcgugauggugagcaugaaggagcccggcugguacagcuucggcuucgagaucaaggacaagaagugcgacgugcccugcaucggcaucgagauggugcacgacggcggcaaggagaccuggcacagcgccgccaccgccaucuacugccugaugggcagcggccagcugcugugggacaccgugaccggcguggacauggcccuguga

SEQ ID NO: 190279 - RNA, 1401 nt, Artificial Sequence; identical to SEQ ID NO: 190262
  derived and/or modified CDS sequence (opt4) from neuraminidase__InfluenzaB__AHL94530

SEQ ID NO: 190280 - RNA, 1401 nt, Artificial Sequence; identical to SEQ ID NO: 190266
  derived and/or modified CDS sequence (opt4) from neuraminidase__InfluenzaB__AHL94541

SEQ ID NO: 190281 - RNA, 1401 nt, Artificial Sequence
  derived and/or modified CDS sequence (opt4) from neuraminidase__InfluenzaB__AHL94563
augcugcccagcaccauccagacccugacccuguuccugacccugggcggcgugcugcugagccuguacgugagcgccagccugagcuaccugcuguacagcgacauccugcugaaguucagcagaaccgagaucaccgcccccaucaugccccuggacugcgccaacgccagcaacgugcaggccgugaacagaagcgccaccaagggcgugacccugcugcugcccgagcccgaguggaccuaccccagacugagcugccccggcagcaccuuccagaaggcccugcugaucagcccccacagauucggcgagaccaagggcaacagcgccccccugaucaucagagagcccuucaucgccugcggccccaaggagugcaagcacuucgcccugacccacuacgccgcccagcccggcggcuacuacaacggcaccagagaggacagaaacaagcugagacaccugaucagcgugaagcugggcaagauccccaccguggagaacagcaucuuccacauggccgccuggagcggcagcgccugccacgacggcagagaguggaccuacaucggcguggacggccccgacagcaacgcccugcugaagaucaaguacggcgaggccuacaccgacaccuaccacagcuacgccaagaacauccugagaacccaggagagcgccugcaacugcaucggcggcgacugcuaccugaugaucaccgacggccccgccagcggcaucagcgagugcagauuccugaagaucagagagggcagaaucaucaaggagaucuuccccaccggcagagugaagcacaccgaggagugcaccugcggcuucgccagcaacaagaccaucgagugcgccugcagagacaacagcuacaccgccaagagacccuucgugaagcugaacguggagaccgacaccgccgagaucagacugaugugcaccgagaccuaccuggacacccccagacccaacgacggcagcaucaccggccccugcgagagcaacggcgacaagggcagcggcggcaucaagggcggcuucgugcaccagagaauggccagcaagaucggcagaugguacagcagaaccaugagcaagaccaagagaaugggcaugggccuguacgugaaguacgacggcgaccccuggaccgacagcgaggcccuggcccugagcggcgugauggugagcauggaggagcccggcugguacagcuucggcuucgagaucaaggacaagaagugcgacgugcccugcaucggcaucgagauggugcacgacggcggcaagaccaccuggcacagcgccgccaccgccaucuacugccugaugggcagcggccagcugcugugggacaccgugaccggcgugaacaugacccuguga

SEQ ID NO: 190282 - RNA, 1401 nt, Artificial Sequence; identical to SEQ ID NO: 190235
  derived and/or modified CDS sequence (opt4) from neuraminidase__InfluenzaB__AHL94574

SEQ ID NO: 190283 - RNA, 1401 nt, Artificial Sequence
  derived and/or modified CDS sequence (opt4) from neuraminidase__InfluenzaB__AHL94585
augcugcccagcaccauccagacccugacccuguuccugaccagcggcggcgugcugcugagccuguacgugagcgccagccugagcuaccugcuguacagcgacauccugcugaaguucagccagaccgagaucaccgcccccaucaugccccuggacugcgccaacgccagcaacgugcaggccgugaacagaagcgccgccaagggcgugacccugcugcugcccgagcccgaguggaccuaccccagacugagcugccccggcagcaccuuccagaaggcccugcugaucagcccccacagauucggcgagaucaagggcaacagcgccccccugaucaucagagagcccuucaucgccugcggccccaccgagugcaagcacuucgcccugacccacuacgccgcccagcccggcggcuacuacaacggcaccagagaggacagaaacaagcugagacaccugaucagcgugaagcugggcaagauccccaccguggagaacagcaucuuccacauggccgccuggagcggcagcgccugccacgacggcaaggaguggaccuacaucggcguggacggccccgacagcaacgcccugcugaagaucaaguacggcgaggccuacaccgacaccuaccacagcuacgccaagaacauccugagaacccaggagagcgccugcaacugcaucggcggcgacugcuaccugaugaucaccgacggccccgccagcggcgugagcgagugcagauuccugaagaucagagagggcagaaucaucaaggagaucuuccccaagggcagagugaagcacaccgaggagugcaccugcggcuucgccagcaacaagaccaucgagugcgccugcagagacaacagauacaccgccaagagacccuucgugaagcugaacguggagaccgacaccgccgagaucagacugaugugcaccgagaccuaccuggacacccccagacccaacgacggcagcaucaccggccccugcgagagcgacggcgacaagggcagcggcggcaucaagggcggcuucgugcaccagagaauggccagcaagaucggcagaugguacagcagaaccaugagcaagaccaagagaaugggcaugggccuguacgugaaguacgacggcgaccccuggaccgacagcgaggcccuggcccugagcggcgugauggugagcauggaggagcccggcugguacagcuucggcuucgagaucaaggacaagaagugcgacgugcccugcaucggcaucgagauggugcacgacggcggcaagaccaccuggcacagcgccgccaccgccaucuacugccugaugggcagcggccagcugcugugggacaccgugaccggcguggacauggcccuguga

SEQ ID NO: 190284 - RNA, 1401 nt, Artificial Sequence; identical to SEQ ID NO: 190235
  derived and/or modified CDS sequence (opt4) from neuraminidase__InfluenzaB__AHL94596

SEQ ID NO: 190285 - RNA, 1401 nt, Artificial Sequence
  derived and/or modified CDS sequence (opt4) from neuraminidase__InfluenzaB__AHL94607
augcugcccagcaccauccagacccugacccuguuccugaccagcggcggcgugcugcugagccuguacgugagcgccagccugagcuaccugcuguacagcgacauccugcugaaguucagccccaccgagaucaccgcccccaccaugccccuggacugcgccaacgccagcaacgugcaggccgugaacagaagcgccaccaagggcgugacccugcugcugcccgagcccgaguggaccuaccccagacugagcugccccggcagcaccuuccagaaggcccugcugaucagcccccacagauucggcgagaccaagggcaacagcgccccccugaucaucagagagcccuucaucgccugcggccccaacgagugcaagcacuucgcccugacccacuacgccgcccagcccggcggcuacuacaacggcaccagaggcgacagaaacaagcugagacaccugaucagcgugaagcugggcaagauccccaccguggagaacagcaucuuccacauggccgccuggagcggcagcgccugccacgacggcaaggaguggaccuacaucggcguggacggccccgacaacaacgcccugcugaaggugaaguacggcgaggccuacaccgacaccuaccacagcuacgccaacaagauccugagaacccaggagagcgccugcaacugcaucggcggcaacugcuaccugaugaucaccgacggcagcgccagcggcgugagcgagugcagauuccugaagaucagagagggcagaaucaucaaggagaucuuccccaccggcagagugaagcacaccgaggagugcaccugcggcuucgccagcaacaagaccaucgagugcgccugcagagacaacagauacaccgccaagagacccuucgugaagcugaacguggagaccgacaccgccgagaucagacugaugugcaccgacaccuaccuggacacccccagacccaacgacggcagcaucaccggccccugcgagagcgacggcgacaagggcagcggcggcaucaagggcggcuucgugcaccagagacugaagagcaagaucggcagaugguacagcagaaccaugagcaagaccgagagaaugggcaugggccuguacgugaaguacgacggcgaccccugggccgacagcgacgcccugaccuucagcggcgugauggugagcaugaaggagcccggcugguacagcuucggcuucgagaucaaggacaagaagugcgacgugcccugcaucggcaucgagauggugcacgacggcggcaaggagaccuggcacagcgccgccaccgccaucuacugccugaugggcagcggccagcugcugugggacaccgugaccggcguggacauggcccuguga

SEQ ID NO: 190286 - RNA, 1401 nt, Artificial Sequence; identical to SEQ ID NO: 190266
  derived and/or modified CDS sequence (opt4) from neuraminidase__InfluenzaB__AHL94618

SEQ ID NO: 190287 - RNA, 1401 nt, Artificial Sequence; identical to SEQ ID NO: 190262
  derived and/or modified CDS sequence (opt4) from neuraminidase__InfluenzaB__AHL94628

SEQ ID NO: 190288 - RNA, 1401 nt, Artificial Sequence; identical to SEQ ID NO: 190266
  derived and/or modified CDS sequence (opt4) from neuraminidase__InfluenzaB__AHL94639

SEQ ID NO: 190289 - RNA, 1401 nt, Artificial Sequence
  derived and/or modified CDS sequence (opt4) from neuraminidase__InfluenzaB__AHL94650
augcugcccagcaccauccagacccugacccuguuccugaccagcggcggcgugcugcugagccuguacgugagcgccagccugagcuaccugcuguacagcgacauccugcugaaguucagccccaccgagaucaccgcccccaccaugccccuggacugcgccaacgccagcaacgugcaggccgugaacagaagcgccaccaagggcgugacccugcugcugcccgagcccgaguggaccuaccccagacugagcugccccggcagcaccuuccagaaggcccugcugaucagcccccacagauucggcgagaccaagggcaacagcgccccccugaucaucagagagcccuucaucgccugcggccccaacgagugcaagcacuucgcccugacccacuacgccgcccagcccggcggcuacuacaacggcaccagaggcgacagaaacaagcugagacaccugaucagcgugaagcugggcaagauccccaccguggagaacagcaucuuccacauggccgccuggagcggcagcgccugccacgacggcaaggaguggaccuacaucggcguggacggccccgacaacaacgcccugcugaaggugaaguacggcgaggccuacaccgacaccuaccacagcuacgccaacaagauccugagaacccaggagagcgccugcaacugcaucggcggcaacugcuaccugaugaucaccgacggcagcgccagcggcgugagcgagugcagauuccugaagaucagagagggcagaaucaucagagagaucuuccccaccggcagagugaagcacaccgaggagugcaccugcggcuucgccagcaacaagaccaucgagugcgccugcagagacaacagauacaccgccaagagacccuucgugaagcugaacguggagaccgacaccgccgagaucagacugaugugcaccgacaccuaccuggacacccccagacccaacgacggcagcaucaccggccccugcgagagcgacggcgacaagggcagcggcggcaucaagggcggcuucgugcaccagagaaugaagagcaagaucggcagaugguacagcagaaccaugagcaagaccgagagaaugggcaugggccuguacgugaaguacgacggcgaccccugggccgacagcgacgcccuggccuucagcggcgugauggugagcaugaaggagcccggcugguacagcuucggcuucgagaucaaggacaagaagugcgacgugcccugcaucggcaucgagauggugcacgacggcggcaaggagaccuggcacagcgccgccaccgccaucuacugccugaugggcagcggccagcugcugugggacaccgugaccggcguggacauggcccuguga

SEQ ID NO: 190290 - RNA, 1401 nt, Artificial Sequence
  derived and/or modified CDS sequence (opt4) from neuraminidase__InfluenzaB__AHL94661
augcugcccagcaccauccagacccugacccuguuccugaccagcggcggcgugcugcugagccuguacgugagcgccagccugagcuaccugcuguacagcgacauccugcugaaguuccccagcaccgagaucaccgcccccaccaugccccuggacugcgccaacgccagcaacgugcaggccgugaacagaagcgccaccaagggcgugacccugcugcugcccgagcccgaguggaccuaccccagacugagcugccccggcagcaccuuccagaaggcccugcugaucagcccccacagauucggcgagaccaagggcaacagcgccccccugaucaucagagagcccuucaucgccugcggccccaaggagugcaagcacuucgcccugacccacuacgccgcccagcccggcggcuacuacaacggcaccagaggcgacagaaacaagcugagacaccugaucagcgugaagcugggcaagauccccaccguggagaacagcaucuuccacauggccgccuggagcggcagcgccugccacgacggcaaggaguggaccuacaucggcguggacggccccgacaacaacgcccugcugaagaucaaguacggcgaggccuacaccgacaccuaccacagcuacgccaacaacauccugagaacccaggagagcgccugcaacugcaucggcggcaacugcuaccugaugaucaccgacggcagcgccagcggcgugagcgagugcagauuccugaagaucagagagggcagaaucaucaaggagaucuuccccaccggcagaauccagcacaccgaggagugcaccugcggcuucgccagcaacaagaccaucgagugcgccugcagagacaacagcuacaccgccaagagacccuucgugaagcugaacguggagaccgacaccgccgagaucagacugaugugcaccaagaccuaccuggacacccccagacccgaggacggcagcaucaccggccccugcgagagcaacggcggcaagggcagcggcggcaucaagggcggcuucgugcaccagagaauggccagcaagaucggcagaugguacagcagaaccaugagcaagaccgagagaaagggcaugggccuguacgugaaguacaacggcgaccccugggccgacagcgacgcccugguguucagcggcgugauggugagcauggaggagcccggcugguacagcuucggcuucgagaucaaggacaagaagugcgacgugcccugcaucggcaucgagauggugcacgacggcggcaaggagaccuggcacagcgccgccaccgccaucuacugccugaugggcagcggccagcugcugugggacaccgugaccggcgugaacaugacccuguga

SEQ ID NO: 190291 - RNA, 1401 nt, Artificial Sequence
  derived and/or modified CDS sequence (opt4) from neuraminidase__InfluenzaB__AHL94672
augcugcccagcaccauccagacccugacccuguuccugaccagcggcggcgugcugcugagccuguacgugagcgccagccugagcuaccugcuguacagcgacauccugcugaaguucagcagaaccgagaucaccgcccccaucaugccccuggacugcgccaacgccagcaacgugcaggccgugaacagaagcgccaccaagggcgugaccccccugcugcccgagcccgaguggaccuaccccagacugagcugccccggcagcaccuuccagaaggcccugcugaucagcccccacagauucggcgagaccaagggcaacagcgccccccugaucaucagagagcccuucaucgccugcggccccaaggagugcaagcacuucgcccugacccacuacgccgcccagcccggcggcuacuacaacggcaccagagaggacagaaacaagcugagacaccugaucagcgugaagcugggcaagauccccaccguggagaacagcaucuuccacauggccgccuggagcggcagcgccugccacgacggcagagaguggaccuacaucggcguggacggccccgacagcaacgcccugcugaagaucaaguacggcgaggccuacaccgacaccuaccacagcuacgccaagaacauccugagaacccaggagagcgccugcaacugcaucggcggcgacugcuaccugaugaucaccgacggcagcgccagcggcaucagcgagugcagauuccugaagaucagagagggcagaaucaucaaggagaucuuccccaccggcagagugaagcacaccgaggagugcaccugcggcuucgccagcaacaagaccaucgagugcgccugcagagacaacagcuacaccgccaagagacccuucgugaagcugaacguggagaccgacaccgccgagaucagacugaugugcaccgagaccuaccuggacacccccagacccaacgacggcagcaucagcggccccugcgagagcaacggcgacgagggcagcggcggcaucaagggcggcuucgugcaccagagaauggccagcaagaucggcagaugguacagcagaaccaugagcaagaccaagagaaugggcaugggccuguacgugaaguacgacggcgaccccuggaccgacagcgaggcccuggcccugagcggcgugauggugagcauggaggagcccggcugguacagcuucggcuucgagaucaaggacaagaagugcgacgugcccugcaucggcaucgagauggugcacgacggcggcaagaccaccuggcacagcgccgccaccgccaucuacugccugaugggcagcggccagcugcugugggacaccgugaccggcgugaacaugacccuguga

SEQ ID NO: 190292 - RNA, 1401 nt, Artificial Sequence
  derived and/or modified CDS sequence (opt4) from neuraminidase__InfluenzaB__AHL94683
augcugcccagcaccauccagacccugacccuguuccugaccagcggcggcgugcugcugagccuguacgugagcgccagccugagcuaccugcuguacagcgacauccugcugaaguucagcagaaccgagaucaccgcccccaucaugccccuggacugcgccaacgccagcaacgugcaggccgugaacagaagcgccaccaagggcgugaccccccugcugcccgagcccgaguggaccuaccccagacugagcugccccggcagcaccuuccagaaggcccugcugaucagcccccacagauucggcgagaccaagggcaacagcgccccccugaucaucagagagcccuucaucgccugcggccccaaggagugcaagcacuucgcccugacccacuacgccgcccagcccggcggcuacuacaacggcaccagagaggacagaaacaagcugagacaccugaucagcgugaagcugggcaagauccccaccguggagaacagcaucuuccacauggccgccuggagcggcagcgccugccacgacggcagagaguggaccuacaucggcguggacggccccgacagcaacgcccugcugaagaucaaguacggcgaggccuacaccgacaccuaccacagcuacgccaagaacauccugagaacccaggagagcgccugcaacugcaucggcggcgacugcuaccugaugaucaccgacggcagcgccagcggcaucagcgagugcagauuccugaagaucagagagggcagaaucaucaaggagaucuuccccaccggcagagugaagcacaccgaggagugcaccugcggcuucgccagcaacaagaccaucgagugcgccugcagagacaacagcuacaccgccaagagacccuucgugaagcugaacguggagaccgacaccgccgagaucagacugaugugcaccgagaccuaccuggacacccccagacccaacgacggcagcaucaccggccccugcgagagcaacggcggcgagggcagcggcggcaucaagggcggcuucgugcaccagagaauggccagcaagaucggcagaugguacagcagaaccaugagcaagaccaagagaaugggcaugggccuguacgugaaguacgacggcgaccccuggaccgacagcgaggcccuggcccugagcggcgugauggugagcauggaggagcccggcugguacagcuucggcuucgagaucaaggacaagaagugcgacgugcccugcaucggcaucgagauggugcacgacggcggcaagaccaccuggcacagcgccgccaccgccaucuacugccugaugggcagcggccagcugcugugggacaccgugaccggcgugaacaugacccuguga

SEQ ID NO: 190293 - RNA, 1401 nt, Artificial Sequence
  derived and/or modified CDS sequence (opt4) from neuraminidase__InfluenzaB__AHL94694
augcugcccagcaccauccagacccugacccuguuccugaccagcggcggcgugcugcugagccuguacgugagcgccagccugagcuaccugcuguacagcgacauccugcugaaguucagccccaccgagaucaccgcccccaccaugccccuggacugcgccaacgccagcaacgugcaggccgugaacagaagcgccaccaagggcgugacccugcugcugcccgagcccgaguggaccuaccccagacugagcugccccggcagcaccuuccagaaggcccugcugaucagcccccacagauucggcgagaccaagggcaacagcgccccccugaucaucagagagcccuucaucgccugcggccccaacgagugcaagcacuucgcccugacccacuacgccgcccagcccggcggcuacuacaacggcaccagaggcgacagaaacaagcugagacaccugaucagcgugaagcugggcaagauccccaccguggagaacagcaucuuccacauggccgccuggagcggcagcgccugccacgacggcaaggaguggaccuacaucggcguggacggccccgacaacaacgcccugcugaaggugaaguacggcgaggccuacaccgacaccuaccacagcuacgccaacaagauccugagaacccaggagagcgccugcaacugcaucggcggcaacugcuaccugaugaucaccgacggcagcgccagcggcgugagcgagugcagauuccugaagaucagagagggcagaaucaucaaggagaucuuccccaccggcagagugaagcacaccgaggagugcaccugcggcuucgccagcaacaagaccaucgagugcgccugcagagacaacagauacaccgccaagagacccuucgugaagcugaacguggagaccgacaccgccgagaucagacugaugugcaccgacaccuaccuggacacccccagacccaacgacggcagcaucaccggccccugcgagagcgacggcgacaagggcagcggcggcaucaagggcggcuucgugcaccagagaaugaagagcaagaucggcagaugguacagcagaaccaugagcaagaccgagagaaugggcaugggccuguacgugaaguacgacggcgaccccugggccgacagcgacgcccugaccuucagcggcgugauggugagcaugaaggagcccggcugguacagcuucggcuucgagaucaaggacaagaagugcgacgugcccugcaucggcaucgagauggugcacgacggcggcaaggagaccuggcacagcgccgccaccgccaucuacugccugaugggcagcggccagcugcugugggacaccgugaccggcguggacauggcccuguga

SEQ ID NO: 190294 - RNA, 1401 nt, Artificial Sequence; identical to SEQ ID NO: 190266
  derived and/or modified CDS sequence (opt4) from neuraminidase__InfluenzaB__AHL94705

SEQ ID NO: 190295 - RNA, 1401 nt, Artificial Sequence; identical to SEQ ID NO: 188877
  derived and/or modified CDS sequence (opt4) from neuraminidase__InfluenzaB__AHL94716

SEQ ID NO: 190296 - RNA, 1401 nt, Artificial Sequence
  derived and/or modified CDS sequence (opt4) from neuraminidase__InfluenzaB__AHL94727
augcugcccagcaccauccagacccugacccuguuccugaccagcggcggcgugcugcugagccuguacgugagcgccagccugagcuaccugcuguacagcgacauccugcugaaguuccccagcaccgagaucaccgcccccaccaugccccuggacugcgccaacaccagcaacgugcaggccgugaacagaagcgccaccaagggcgugacccugcugcugcccgagcccgaguggaccuaccccagacugagcugccccggcagcaccuuccagaaggcccugcugaucagcccccacagauucggcgagaccaagggcaacagcgccccccugaucaucagagagcccuucaucgccugcggccccaaggagugcaagcacuucgcccugacccacuacgccgcccagcccggcggcuacuacaacggcaccagaggcgacagaaacaagcugagacaccugaucagcgugaagcugggcaagauccccaccguggagaacagcaucuuccacauggccgccuggagcggcagcgccugccacgacggcaaggaguggaccuacaucggcguggacggccccgacaacaacgcccugcugaagaucaaguacggcgaggccuacaccgacaccuaccacagcuacgccaacaacauccugagaacccaggagagcgccugcaacugcaucggcggcaacugcuaccugaugaucaccgacggcagcgccagcggcgugagcgagugcagauuccugaagaucagagagggcagaaucaucaaggagaucuuccccaccggcagaauccagcacaccgaggagugcaccugcggcuucgccagcaacaagaccaucgagugcgccugcagagacaacagcuacaccgccaagagacccuucgugaagcugaacguggagaccgacaccgccgagaucagacugaugugcaccaagaccuaccuggacacccccagacccgaggacggcagcaucaccggccccugcgagagcaacggcggcaagggcagcggcggcaucaagggcggcuucgugcaccagagaauggccagcaagaucggcagaugguacagcagaaccaugagcaagaccgagagaaagggcaugggccuguacgugaaguacaacggcgaccccugggccgacagcgacgcccugguguucagcggcgugauggugagcauggaggagcccggcugguacagcuucggcuucgagaucaaggacaagaagugcgacgugcccugcaucggcaucgagauggugcacgacggcggcaaggagaccuggcacagcgccgccaccgccaucuacugccugaugggcagcggccagcugcugugggacaccgugaccggcgugaacaugacccuguga

SEQ ID NO: 190297 - RNA, 1401 nt, Artificial Sequence; identical to SEQ ID NO: 188877
  derived and/or modified CDS sequence (opt4) from neuraminidase__InfluenzaB__AHL94738

SEQ ID NO: 190298 - RNA, 1401 nt, Artificial Sequence
  derived and/or modified CDS sequence (opt4) from neuraminidase__InfluenzaB__AHL94749
augcugcccagcaccauccagacccugacccuguuccugaccagcggcggcgugcugcugagccuguacgugagcgccagccugagcuaccugcuguacagcgacauccugcugaaguucagccccaccgagaucaccgcccccaccaugccccuggacugcgccaacgccagcaacgugcaggccgugaacagaagcgccaccaagggcgugacccugcugcugcccgagcccgaguggaccuaccccagacugagcugccccggcagcaccuuccagaaggcccugcugaucagcccccacagauucggcgagaccaagggcaacagcgccccccugaucaucagagagcccuucaucgccugcggccccaacgagugcaagcacuucgcccugacccacuacgccgcccagcccggcggcuacuacaacggcaccagaggcgacagaaacaagcugagacaccugaucagcgugaagcugggcaagauccccaccguggagaacagcaucuuccacauggccgccuggagcggcagcgccugccacgacggcaaggaguggaccuacaucggcguggacggccccgacaacaacgcccugcugaaggugaaguacggcgaggccuacaccgacaccuaccacagcuacgccaacaagauccugagaacccaggagagcgccugcaacugcaucggcggcaacugcuaccugaugaucaccgacggcagcgccagcggcgugagcgagugcagauuccugaagaucagagagggcagaaucaucaaggagaucuuccccaccggcagagugaagcacaccgaggagugcaccugcggcuucgccagcaacaagaccaucgagugcgccugcagagacaacagauacaccgccaagagacccuucgugaagcugaacguggagaccgacaccgccgagaucagacugaugugcaccgacaccuaccuggacacccccagacccaacgacggcagcaucaccggccccugcgagagcgacggcgacaagggcagcggcggcaucaagggcggcuucgugcaccagagaaugaagagcaagaucggcagaugguacagcagaaccaugagcaagaccgagagaaugggcaugggccuguacgugaaguacgacggcgaccccugggccgacagcgacgcccuggccuucagcggcgugauggugagcaugaaggagcccggcugguacagcuucggcuucgagaucaaggacaagaagugcgacgugcccugcaucggcguggagauggugcacgacggcggcaaggagaccuggcacagcgccgccaccgccaucuacugccugaugggcagcggccagcugcugugggacaccgugaccggcguggacauggcccuguga

SEQ ID NO: 190299 - RNA, 1401 nt, Artificial Sequence
  derived and/or modified CDS sequence (opt4) from neuraminidase__InfluenzaB__AHL94760
augcugcccagcaccauccagacccugacccuguuccugaccagcggcggcgugcugcugagccuguacgugagcgccagccugagcuaccugcuguacagcgacauccugcugaaguucagccagaccgagaucaccgcccccaucaugccccuggacugcgccaacgccagcaacgugcaggccgugaaccacagcgccgccaagggcgugacccugcugcugcccgagcccgaguggaccuaccccagacugagcugccccggcagcaccuuccagaaggcccugcugaucagcccccacagauucggcgagaucaagggcaacagcgccccccugaucaucagagagcccuucaucgccugcggccccaccgagugcaagcacuucgcccugacccacuacgccgcccagcccggcggcuacuacaacggcaccagagaggacagaaacaagcugagacaccugaucagcgugaagcugggcaagauccccaccguggagaacagcaucuuccacauggccgccuggagcggcagcgccugccacgacggcaaggaguggaccuacaucggcguggacggccccgacagcaacgcccugcugaagaucaaguacggcgaggccuacaccgacaccuaccacagcuacgccaagaacauccugagaacccaggagagcgccugcaacugcaucggcggcgacugcuaccugaugaucaccgacggccccgccagcggcgugagcgagugcagauuccugaagaucagagagggcagaaucaucaaggagaucuuccccaccggcagagugaagcacaccgaggagugcaccugcggcuucgccagcaacaagaccaucgagugcgccugcagagacaacagauacaccgccaagagacccuucgugaagcugaacguggagaccgacaccgccgagaucagacugaugugcaccgagaccuaccuggacacccccagacccaacgacggcagcaucaccggccccugcgagagcgacggcgacaagggcagcggcggcaucaagggcggcuucgugcaccagagaauggccagcaagaucggcagaugguacagcagaaccaugagcaagaccaagagaaugggcaugggccuguacgugaaguacgacggcgaccccuggaccgacagcgaggcccuggcccugagcggcgugauggugagcauggaggagcccggcugguacagcuucggcuucgagaucaaggacaagaagugcgacauccccugcaucggcaucgagauggugcacgacggcggcaagaccaccuggcacagcgccgccaccgccaucuacugccugaugggcagcggccagcugcugugggacaccgugaccggcguggacauggcccuguga

SEQ ID NO: 190300 - RNA, 1401 nt, Artificial Sequence; identical to SEQ ID NO: 190266
  derived and/or modified CDS sequence (opt4) from neuraminidase__InfluenzaB__AHL94770

SEQ ID NO: 190301 - RNA, 1401 nt, Artificial Sequence; identical to SEQ ID NO: 190264
  derived and/or modified CDS sequence (opt4) from neuraminidase__InfluenzaB__AHL94781

SEQ ID NO: 190302 - RNA, 1401 nt, Artificial Sequence; identical to SEQ ID NO: 190262
  derived and/or modified CDS sequence (opt4) from neuraminidase__InfluenzaB__AHL94791

SEQ ID NO: 190303 - RNA, 1401 nt, Artificial Sequence; identical to SEQ ID NO: 190293
  derived and/or modified CDS sequence (opt4) from neuraminidase__InfluenzaB__AHL94801

SEQ ID NO: 190304 - RNA, 1401 nt, Artificial Sequence; identical to SEQ ID NO: 190262
  derived and/or modified CDS sequence (opt4) from neuraminidase__InfluenzaB__AHL94812

SEQ ID NO: 190305 - RNA, 1401 nt, Artificial Sequence; identical to SEQ ID NO: 190262
  derived and/or modified CDS sequence (opt4) from neuraminidase__InfluenzaB__AHL94821

SEQ ID NO: 190306 - RNA, 1401 nt, Artificial Sequence; identical to SEQ ID NO: 190266
  derived and/or modified CDS sequence (opt4) from neuraminidase__InfluenzaB__AHL94831

SEQ ID NO: 190307 - RNA, 1401 nt, Artificial Sequence
  derived and/or modified CDS sequence (opt4) from neuraminidase__InfluenzaB__AHL94840
augcugcccagcaccauccagacccugacccuguuccugaccagcggcggcgugcugcugagccuguacgugagcgccagccugagcuaccugcuguacagcggcauccugcugaaguucagcagaaccgagaucaccgcccccaucaugccccuggacugcgccaacgccagcaacgugcaggccgugaacagaagcgccaccaagggcgugacccugcugcugcccgagcccgaguggaccuaccccagacugagcugccccggcagcaccuuccagaaggcccugcugaucagcccccacagauucggcgagaccaagggcaacagcgccccccugaucaucagagagcccuucaucgccugcggccccaaggagugcaagcacuucgcccugacccacuacgccgcccagcccggcggcuacuacaacggcaccagagaggacagaaacaagcugagacaccugaucagcgugaagcugggcaagauccccaccguggagaacagcaucuuccacauggccgccuggagcggcagcgccugccacgacggcagagaguggaccuacaucggcguggacggccccgacagcaacgcccugcugaagaucaaguacggcgaggccuacaccgacaccuaccacagcuacgccaagaacauccugagaacccaggagagcgccugcaacugcaucggcggcgacugcuaccugaugaucaccgacggccccgccagcggcaucagcgagugcagauuccugaagaucagagagggcagaaucaucaaggagaucuuccccaccggcagagugaagcacaccgaggagugcaccugcggcuucgccagcaacaagaccaucgagugcgccugcagagacaacagcuacaccgccaagagacccuucgugaagcugaacguggagaccgacaccgccgagaucagacugaugugcaccgagaccuaccuggacacccccagacccaacgacggcagcaucaccggccccugcgagagcaacggcgacaagggcagcggcggcaucaagggcggcuucgugcaccagagaauggccagcaagaucggcagaugguacagcagaaccaugagcaagaccaagagaaugggcaugggccuguacgugaaguacgacggcgaccccuggaccgacagcgaggcccuggcccugagcggcgugauggugagcauggaggagcccggcugguacagcuucggcuucgagaucaaggacaagaagugcgacgugcccugcaucggcaucgagauggugcacgacggcggcaagaccaccuggcacagcgccgccaccgccaucuacugccugaugggcagcggccagcugcugugggacaccgugaccggcgugaacaugacccuguga

SEQ ID NO: 190308 - RNA, 1401 nt, Artificial Sequence
  derived and/or modified CDS sequence (opt4) from neuraminidase__InfluenzaB__AHL94851
augcugcccagcaccauccagacccugacccuguuccugaccagcggcggcgugcugcugagccuguacgugagcgccagccugagcuaccugcuguacagcgacauccugcugaaguucagccagaccgagaucaccgcccccaucaugccccuggacugcaccaacgccagcaacgugcaggccgugaacagaagcgccgccaagggcgugacccugcugcugcccgagcccgaguggaccuaccccagacugagcugccccggcagcaccuuccagaaggcccugcugaucagcccccacagauucggcgagaucaagggcaacagcgccccccugaucaucagagagcccuucaucgccugcggccccaccgagugcaagcacuucgcccugacccacuacgccgcccagcccggcggcuacuacaacggcaccagagaggacagaaacaagcugagacaccugaucagcgugaagcugggcaagauccccaccguggagaacagcaucuuccacauggccgccuggagcggcagcgccugccacgacggcaaggaguggaccuacaucggcguggacggccccgacagcaacgcccugcugaagaucaaguacggcgaggccuacaccgacaccuaccacagcuacgccaagaacauccugagaacccaggagagcgccugcaacugcaucggcggcgacugcuaccugaugaucaccgacggccccgccagcggcgugagcgagugcagauuccugaagaucagagagggcagaaucaucaaggagaucuuccccaccggcagagugaagcacaccgaggagugcaccugcggcuucgccagcaacaagaccaucgagugcgccugcagagacaacagauacaccgccaagagacccuucgugaagcugaacguggagaccgacaccgccgagaucagacugaugugcaccgagaccuaccuggacacccccagacccaacgacggcagcaucaccggccccugcgagagcgacggcgacaagggcagcggcggcaucaagggcggcuucgugcaccagagaaugaccagcaagaucggcagaugguacagcagaaccaugagcaagaccaagagaaugggcaugggccuguacgugaaguacgacggcgaccccuggaccgacagcgaggcccuggcccugagcggcgugauggugagcauggaggagcccggcugguacagcuucggcuucgagaucaaggacaagaagugcgacgugcccugcaucggcaucgagauggugcacgacggcggcaagaccaccuggcacagcgccgccaccgccaucuacugccugaugggcagcggccagcugcugugggacaccgugaccggcguggacauggcccuguga

SEQ ID NO: 190309 - RNA, 1401 nt, Artificial Sequence; identical to SEQ ID NO: 188695
  derived and/or modified CDS sequence (opt4) from neuraminidase__InfluenzaB__AHL94862

SEQ ID NO: 190310 - RNA, 1401 nt, Artificial Sequence; identical to SEQ ID NO: 188877
  derived and/or modified CDS sequence (opt4) from neuraminidase__InfluenzaB__AHL94873

SEQ ID NO: 190311 - RNA, 1401 nt, Artificial Sequence; identical to SEQ ID NO: 190181
  derived and/or modified CDS sequence (opt4) from neuraminidase__InfluenzaB__AHL94884

SEQ ID NO: 190312 - RNA, 1401 nt, Artificial Sequence; identical to SEQ ID NO: 189021
  derived and/or modified CDS sequence (opt4) from neuraminidase__InfluenzaB__AHL94893

SEQ ID NO: 190313 - RNA, 1401 nt, Artificial Sequence; identical to SEQ ID NO: 189021
  derived and/or modified CDS sequence (opt4) from neuraminidase__InfluenzaB__AHL94904

SEQ ID NO: 190314 - RNA, 1401 nt, Artificial Sequence
  derived and/or modified CDS sequence (opt4) from neuraminidase__InfluenzaB__AHL94915
augcugcccagcaccauccagacccugacccuguuccugaccagcggcggcgugcugcugagccuguacgugagcgccagccugagcuaccugcuguacagcgacauccugcugaaguucagccccaccgagaucaccgcccccaccaugccccuggacugcgccaacgccagcaacgugcagguggugaacagaagcgccaccaagggcgugacccugcugcugcccgagcccgaguggaccuaccccagacugagcugccccggcagcaccuuccagaaggcccugcugaucagcccccacagauucggcgagaccaagggcaacagcgccccccugaucaucagagagcccuucaucgccugcggccccaacgagugcaagcacuucgcccugacccacuacgccgcccagcccggcggcuacuacaacggcaccagaggcgacagaaacaagcugagacaccugaucagcgugaagcugggcaagauccccaccguggagaacagcaucuuccacauggccgccuggagcggcagcgccugccacgacggcaaggaguggaccuacaucggcguggacggccccgacaacaacgcccugcugaaggugaaguacggcgaggccuacaccgacaccuaccacagcuacgccaacaagauccugagaacccaggagagcgccugcaacugcaucggcggcaacugcuaccugaugaucaccgacggcagcgccagcggcgugagcgagugcagauuccugaagaucagagagggcagaaucaucaaggagaucuuccccaccggcagagugaagcacaccgaggagugcaccugcggcuucgccagcaacaagaccaucgagugcgccugcagagacaacagcuacaccgccaagagacccuucgugaagcugaacguggagaccgacaccgccgagaucagacugaugugcaccgacaccuaccuggacacccccagacccgacgacggcagcaucaccggccccugcgagagcaacggcgacaagggcagcggcggcaucaagggcggcuucgugcaccagagaauggagagcaagaucggcagaugguacagcagaaccaugagcaagaccgagagaaugggcaugggccuguacgugaaguacgacggcgaccccugggccgacagcgacgcccuggccuucagcggcgugauggugagcaugaaggagcccggcugguacagcuucggcuucgagaucaaggacaagaagugcgacgugcccugcaucggcaucgagauggugcacgacggcggcaaggagaccuggcacagcgccgccaccgccaucuacugccugaugggcagcggccagcugcugugggacaccgugaccggcguggacauggcccuguga

SEQ ID NO: 190315 - RNA, 1401 nt, Artificial Sequence; identical to SEQ ID NO: 190181
  derived and/or modified CDS sequence (opt4) from neuraminidase__InfluenzaB__AHL94926

SEQ ID NO: 190316 - RNA, 1401 nt, Artificial Sequence
  derived and/or modified CDS sequence (opt4) from neuraminidase__InfluenzaB__AHL94937
augcugcccagcaccauccagacccugacccuguuccugaccagcggcggcgugcugcugagccuguacgugagcgccagccugagcuaccugcuguacagcgacauccugcugaaguucagccccaccgagaucaccgcccccacccugccccuggacugcgccaacgccagcaacgugcaggccgugaacagaagcgccaccaagggcgugacccugcugcugcccgagcccgaguggaccuaccccagacugagcugccccggcagcaccuuccagaaggcccugcugaucagcccccacagauucggcgagaccaagggcaacagcgccccccugaucaucagagagcccuucaucgccugcggccccaacgagugcaagcacuucgcccugacccacuacgccgcccagcccggcggcuacuacaacggcaccagaggcgacagaaacaagcugagacaccugaucagcgugaagcugggcaagauccccaccguggagaacagcaucuuccacauggccgccuggagcggcagcgccugccacgacggcaaggaguggaccuacaucggcguggacggccccgacaacaacgcccugcugaaggugaaguacggcgaggccuacaccgacaccuaccacagcuacgccaacaagauccugagaacccaggagagcgccugcaacugcaucggcggcaacugcuaccugaugaucaccgacggcagcgccagcggcgugagcgagugcagauuccugaagaucagagagggcagaaucaucaaggagaucuuccccaccggcagagugaagcacaccgaggagugcaccugcggcuucgccagcaacaagaccaucgagugcgccugcagagacaacagcuacaccgccaagagacccuucgugaagcugaacguggagaccgacaccgccgagaucagacugaugugcaccgacaccuaccuggacacccccagacccaacgacggcagcaucaccggccccugcgagagcaacggcgacaagggcagcggcggcaucaagggcggcuucgugcaccagagaauggagagcaagaucggcagaugguacagcagaaccaugagcaagaccgagagaaugggcaugggccuguacgugaaguacgacggcgaccccugggccgacagcgacgcccuggccuucagcggcgugauggugagcaugaaggagcccggcugguacagcuucggcuucgagaucaaggacaagaagugcgacgugcccugcaucggcaucgagauggugcacgacggcggcaaggagaccuggcacagcgccgccaccgccaucuacugccugaugggcagcggccagcugcugugggacaccgugaccggcguggacauggcccuguga

SEQ ID NO: 190317 - RNA, 1401 nt, Artificial Sequence; identical to SEQ ID NO: 190200
  derived and/or modified CDS sequence (opt4) from neuraminidase__InfluenzaB__AHL94948

SEQ ID NO: 190318 - RNA, 1401 nt, Artificial Sequence; identical to SEQ ID NO: 189016
  derived and/or modified CDS sequence (opt4) from neuraminidase__InfluenzaB__AHL94959

SEQ ID NO: 190319 - RNA, 1401 nt, Artificial Sequence; identical to SEQ ID NO: 189016
  derived and/or modified CDS sequence (opt4) from neuraminidase__InfluenzaB__AHL94969

SEQ ID NO: 190320 - RNA, 1401 nt, Artificial Sequence; identical to SEQ ID NO: 189016
  derived and/or modified CDS sequence (opt4) from neuraminidase__InfluenzaB__AHL94978

SEQ ID NO: 190321 - RNA, 1401 nt, Artificial Sequence
  derived and/or modified CDS sequence (opt4) from neuraminidase__InfluenzaB__AHM00990
augcugcccagcaccauccagacccugacccuguuccugaccagcggcggcgugcugcugagccuguacgugagcgccagccugagcuaccugcuguacagcgacauccugcugaaguucagccagaccgagaucaccgcccccaucaugccccuggacugcaccaacgccagcaacgugcaggccgugaaccacagcgccgccaagggcgugacccugcugcugcccgagcccgaguggaccuaccccagacugagcugccccggcagcaccuuccagaaggcccugcugaucagcccccacagauucggcgagaucaagggcaacagcgccccccugaucaucagagagcccuucaucgccugcggccccaccgagugcaagcacuucgcccugacccacuacgccgcccagcccggcggcuacuacaacggcaccagagaggacagaaacaagcugagacaccugaucagcgugaagcugggcaagauccccaccguggagaacagcaucuuccacauggccgccuggagcggcagcgccugccacgacggcaaggaguggaccuacaucggcguggacggccccgacagcaacgcccugcugaagaucaaguacggcgaggccuacaccgacaccuaccacagcuacgccaagaacauccugagaacccaggagagcgccugcaacugcaucggcggcgacugcuaccugaugaucaccgacggccccgccagcggcgugagcgagugcagauuccugaagaucagagagggcagaaucaucaaggagaucuuccccaccggcagagugaagcacaccgaggagugcaccugcggcuucgccagcaacaagaccaucgagugcgccugcagagacaacagauacaccgccaagagacccuucgugaagcugaacguggagaccgacaccgccgagaucagacugaugugcaccgagaccuaccuggacacccccagacccaacgacggcagcaucaccggccccugcgagagcgacggcgacaagggcagcggcggcaucaagggcggcuucgugcaccagagaauggccagcaagaucggcagaugguacagcagaaccaugagcaagaccaagagaaugggcaugggccuguacgugaaguacgacggcgaccccuggaccgacagcgaggcccuggcccugagcggcgugauggugagcauggaggagcccggcugguacagcuucggcuucgagaucaaggacaagaagugcgacgugcccugcaucggcaucgagauggugcacgacggcggcaagaccaccuggcacagcgccgccaccgccaucuacugccugaugggcagcggccagcugcugugggacaccgugaccggcguggacauggcccuguga

SEQ ID NO: 190322 - RNA, 1401 nt, Artificial Sequence; identical to SEQ ID NO: 190266
  derived and/or modified CDS sequence (opt4) from neuraminidase__InfluenzaB__AHM01001

SEQ ID NO: 190323 - RNA, 1401 nt, Artificial Sequence
  derived and/or modified CDS sequence (opt4) from neuraminidase__InfluenzaB__AHM01012
augcugcccagcaccauccagacccugacccuguuccugaccagcggcggcgugcugcugagccuguacgugagcgccagccugagcuaccugcuguacagcgacauccugcugaaguucagccccaccgagaucaccgcccccaccaugccccuggacugcgccaacgccagcaacgugcaggccgugaacagaagcgccaccaagggcgugacccugcugcugcccgagcccgaguggaccuaccccagacugagcugccccggcagcaccuuccagaaggcccugcugaucagcccccacagauucggcgagaccaagggcaacagcgccccccugaucaucagagagcccuucaucgccugcggccccaacgagugcaagcacuucgcccugacccacuacgccgcccagcccggcggcuacuacaacggcaccagaggcgacagaaacaagcugagacaccugaucagcgugaagcugggcaagauccccaccguggagaacagcaucuuccacauggccgccuggagcggcagcgccugccacgacggcaaggaguggaccuacaucggcguggacggccccgacaacaacgcccugcugaaggugaaguacggcgaggccuacaccgacaccuaccacagcuacgccaacaagauccugagaacccaggagagcgccugcaacugcaucggcggcaacugcuaccugaugaucaccgacggcagcgccagcggcgugagcgagugcagauuccugaagaucagagagggcagaaucaucaaggagaucuuccccaccggcagagugaagcacaccgaggagugcaccugcggcuucgccagcaacaagaccaucgagugcgccugcagagacaacagauacaccgccaagagacccuucgugaagcugaacguggagaccgacaccgccgagaucagacugaugugcaccgacaccuaccuggacacccccagacccaacgacggcagcaucaccggccccugcgagagcgacggcgacaagggcagcggcggcaucaagggcggcuucgugcaccagagaaugaagagcaagaucggcagaugguacagcagaaccaugagcaagaccgagagaaugggcaugggccuguacgugaaguacgacggcgaccccuggaccgacagcgacgcccuggccuucagcggcgugauggugagcaugaaggagcccggcugguacagcuucggcuucgagaucaaggacaagaagugcgacgugcccugcaucggcaucgagauggugcacgacggcggcaaggagaccuggcacagcgccgccaccgccaucuacugccugaugggcagcggccagcugcugugggacaccgugaccggcguggacauggcccuguga

SEQ ID NO: 190324 - RNA, 1401 nt, Artificial Sequence; identical to SEQ ID NO: 190266
  derived and/or modified CDS sequence (opt4) from neuraminidase__InfluenzaB__AHM01023

SEQ ID NO: 190325 - RNA, 1401 nt, Artificial Sequence; identical to SEQ ID NO: 190266
  derived and/or modified CDS sequence (opt4) from neuraminidase__InfluenzaB__AHM01034

SEQ ID NO: 190326 - RNA, 1401 nt, Artificial Sequence
  derived and/or modified CDS sequence (opt4) from neuraminidase__InfluenzaB__AHM01045
augcugcccagcaccauccagacccugacccuguuccugaccagcggcggcgugcugcugagccuguacgugagcgccagccugagcuaccugcuguacagcgacauccugcugaaguucagccccaccgagaucaccgcccccaccaugccccuggacugcgccaacgccagcaacgugcaggccgugaacagaagcgccaccaagggcgugacccugcugcugcccgagcccggcuggaccuaccccagacugagcugccccggcagcaccuuccagaaggcccugcugaucagcccccacagauucggcgagaccaagggcaacagcgccccccugaucaucagagagcccuucaucgccugcggccccaacgagugcaagcacuucgcccugacccacuacgccgcccagcccggcggcuacuacaacggcaccagaggcgacagaaacaagcugagacaccugaucagcgugaagcugggcaagauccccaccguggagaacagcaucuuccacauggccgccuggagcggcagcgccugccacgacggcaaggaguggaccuacaucggcguggacggccccgacaacaacgcccugcugaaggugaaguacggcgaggccuacaccgacaccuaccacagcuacgccaacaagauccugagaacccaggagagcgccugcaacugcaucggcggcaacugcuaccugaugaucaccgacggcagcgccagcggcgugagcgagugcagauuccugaagaucagagagggcagaaucaucaaggagaucuuccccaccggcagagugaagcacaccgaggagugcaccugcggcuucgccagcaacaagaccaucgagugcgccugcagagacaacagauacaccgccaagagacccuucgugaagcugaacguggagaccgacaccgccgagaucagacugaugugcaccgacaccuaccuggacacccccagacccaacgacggcagcaucaccggccccugcgagagcgacggcgacaagggcagcggcggcaucaagggcggcuucgugcaccagagaaugaagagcaagaucggcagaugguacagcagaaccaugagcaagaccgagagaaugggcaugggccuguacgugaaguacgacggcgaccccugggccgacagcgacgcccuggccuucagcggcgugauggugagcaugaaggagcccggcugguacagcuucggcuucgagaucaaggacaagaagugcgacgugcccugcaucggcaucgagauggugcacgacggcggcaaggagaccuggcacagcgccgccaccgccaucuacugccugaugggcagcggccagcugcugugggacaccguggccggcguggacauggcccuguga

SEQ ID NO: 190327 - RNA, 1401 nt, Artificial Sequence
  derived and/or modified CDS sequence (opt4) from neuraminidase__InfluenzaB__AHM01056
augcugcccagcaccacccagacccugacccuguuccugaccagcggcggcgugcugcugagccuguacgugagcgccagccugagcuaccugcuguacagcgacauccugcugaaguucagccccaccgagaucaccgcccccaccaugccccuggacugcgccaacgccagcaacgugcaggccgugaacagaagcgccaccaagggcgugacccugcugcugcccgagcccgaguggaccuaccccagacugagcugccccggcagcaccuuccagaaggcccugcugaucagcccccacagauucggcgagaccaagggcaacagcgccccccugaucaucagagagcccuucaucgccugcggccccaacgagugcaagcacuucgcccugacccacuacgccgcccagcccggcggcuacuacaacggcaccagaggcgacagaaacaagcugagacaccugaucagcgugaagcugggcaagauccccaccguggagaacagcaucuuccacauggccgccuggagcggcagcgccugccacgacggcaaggaguggaccuacaucggcguggacggccccgacaacaacgcccugcugaaggugaaguacggcgaggccuacaccgacaccuaccacagcuacgccaacaagauccugagaacccaggagagcgccugcaacugcaucggcggcaacugcuaccugaugaucaccgacggcagcgccagcggcgugagcgagugcagauuccugaagaucagagagggcagaaucaucaaggagaucuuccccaccggcagagugaagcacaccgaggagugcaccugcggcuucgccagcaacaagaccaucgagugcgccugcagagacaacagauacaccgccaagagacccuucgugaagcugaacguggagaccgacaccgccgagaucagacugaugugcaccgacaccuaccuggacacccccagacccaacgacggcagcaucaccggccccugcgagagcgacggcgacaagggcagcggcggcaucaagggcggcuucgugcaccagagaaugaagagcaagaucggcagaugguacagcagaaccaugagcaagaccgagagaaugggcaugggccuguacgugaaguacgacggcgaccccugggccgacagcgacgcccugguguucagcggcgugauggugagcaugaaggagcccggcugguacagcuucggcuucgagaucaaggacaagaagugcgacgugcccugcaucggcaucgagauggugcacgacggcggcaaggagaccuggcacagcgccgccaccgccaucuacugccugaugggcagcggccagcugcugugggacaccgugaccggcguggacauggcccuguga

SEQ ID NO: 190328 - RNA, 1401 nt, Artificial Sequence; identical to SEQ ID NO: 190266
  derived and/or modified CDS sequence (opt4) from neuraminidase__InfluenzaB__AHM01067

SEQ ID NO: 190329 - RNA, 1401 nt, Artificial Sequence; identical to SEQ ID NO: 190235
  derived and/or modified CDS sequence (opt4) from neuraminidase__InfluenzaB__AHM01078

SEQ ID NO: 190330 - RNA, 1401 nt, Artificial Sequence
  derived and/or modified CDS sequence (opt4) from neuraminidase__InfluenzaB__AHM01089
augcugcccagcaccauccagacccugacccuguuccugaccagcggcggcgugcugcugagccuguacgugagcgccagccugagcuaccugcuguacagcgacauccugcugaaguucagccccaccgagaucaccgcccccaccaugccccuggacugcgccaacgccagcaacgugcaggccgugaacagaagcgccgccaagggcgugacccugcugcugcccgagcccgaguggaccuaccccagacugagcugccccggcagcaccuuccagaaggcccugcugaucagcccccacagauucggcgagaccaagggcaacagcgccccccugaucaucagagagcccuucaucgccugcggccccaacgagugcaagcacuucgcccugacccacuacgccgcccagcccggcggcuacuacaacggcaccagaggcgacagaaacaagcugagacaccugaucagcgugaagcugggcaagauccccaccguggagaacagcaucuuccacauggccgccuggagcggcagcgccugccacgacggcaaggaguggaccuacaucggcguggacggccccgacaacaacgcccugcugaaggugaaguacggcgaggccuacaccgacaccuaccacagcuacgccaacaagauccugagaacccaggagagcgccugcaacugcaucggcggcaacugcuaccugaugaucaccgacggcagcgccagcggcgugagcgagugcagauuccugaagaucagagagggcagaaucaucaaggagaucuuccccaccggcagagugaagcacaccgaggagugcaccugcggcuucgccagcaacaagaccaucgagugcgccugcagagacaacagauacaccgccaagagacccuucgugaagcugaacguggagaccgacaccgccgagaucagacugaugugcaccgacaccuaccuggacacccccagacccaacgacggcagcaucaccggccccugcgagagcgacggcgacaagggcagcggcggcaucaagggcggcuucgugcaccagagaaugaagagcaagaucggcagaugguacagcagaaccaugagcaagaccgagagaaugggcaugggccuguacgugaaguacgacggcgaccccugggccgacagcgacgcccuggccuucagcggcgugauggugagcaugaaggagcccggcugguacagcuucggcuucgagaucaaggacaagaagugcgacgugcccugcaucggcaucgagauggugcacgacggcggcaaggagaccuggcacagcgccgccaccgccaucuacugccugaugggcagcggccagcugcugugggacaccgugaccggcguggacauggcccuguga

SEQ ID NO: 190331 - RNA, 1401 nt, Artificial Sequence; identical to SEQ ID NO: 190235
  derived and/or modified CDS sequence (opt4) from neuraminidase__InfluenzaB__AHM01100

SEQ ID NO: 190332 - RNA, 1401 nt, Artificial Sequence; identical to SEQ ID NO: 190266
  derived and/or modified CDS sequence (opt4) from neuraminidase__InfluenzaB__AHM01111

SEQ ID NO: 190333 - RNA, 1401 nt, Artificial Sequence
  derived and/or modified CDS sequence (opt4) from neuraminidase__InfluenzaB__AHM01122
augcugcccagcaccauccagacccugacccuguuccugaccagcggcggcgugcugcugagccuguacgugagcgccagccugagcuaccugcuguacagcgacauccugcugaaguucagccccaccgagaucaccgcccccaccaugccccuggacugcgccaacgccagcaacgugcaggccgugaacagaagcgccaccaagggcgugaagcugcugcugcccgagcccgaguggaccuaccccagacugagcugccccggcagcaccuuccagaaggcccugcugaucagcccccacagauucggcgagaccaagggcaacagcgccccccugaucaucagagagcccuucaucgccugcggccccaacgagugcaagcacuucgcccugacccacuacgccgcccagcccggcggcuacuacaacggcaccagaggcgacagaaacaagcugagacaccugaucagcgugaagcugggcaagauccccaccguggagaacagcaucuuccacauggccgccuggagcggcagcgccugccacgacggcaaggaguggaccuacaucggcguggacggccccgacaacaacgcccugcugaaggugaaguacggcgaggccuacaccgacaccuaccacagcuacgccaacaagauccugagaacccaggagagcgccugcaacugcaucggcggcaacugcuaccugaugaucaccgacggcagcgccagcggcgugagcgagugcagauuccugaagaucagagagggcagaaucaucaaggagaucuuccccaccggcagagugaagcacaccgaggagugcaccugcggcuucgccagcaacaagaccaucgagugcgccugcagagacaacagauacaccgccaagagacccuucgugaagcugaacguggagaccgacaccgccgagaucagacugaugugcaccgacaccuaccuggacacccccagacccaacgacggcagcaucaccggccccugcgagagcgacggcgacaagggcagcggcggcaucaagggcggcuucgugcaccagagaaugaagagcaagaucggcagaugguacagcagaaccaugagcaagaccgagagaaugggcaugggccuguacgugaaguacgacggcgaccccugggccgacagcgacgcccuggccuucagcggcgugauggugagcaugaaggagcccggcugguacagcuucggcuucgagaucaaggacaagaagugcgacgugcccugcaucggcaucgagauggugcacgacggcggcaaggagaccuggcacagcgccgccaccgccaucuacugccugaugggcagcggccagcugcugugggacaccgugaccggcguggacauggcccuguga

SEQ ID NO: 190334 - RNA, 1401 nt, Artificial Sequence; identical to SEQ ID NO: 190266
  derived and/or modified CDS sequence (opt4) from neuraminidase__InfluenzaB__AHM01133

SEQ ID NO: 190335 - RNA, 1401 nt, Artificial Sequence
  derived and/or modified CDS sequence (opt4) from neuraminidase__InfluenzaB__AHM01144
augcugcccagcaccauccagacccugacccuguuccugaccagcggcggcgugcugcugagccuguacgugagcgccagccugagcuaccugcuguacagcgacauccugcugaaguucagccccaccgagaucaccgcccccaccaugccccuggacugcgccaacgccagcaacgugcaggccgugaacagaagcgccgccaagggcgugacccugcugcugcccgagcccgaguggaccuaccccagacugagcugccccggcagcaccuuccagaaggcccugcugaucagcccccacagauucggcgagaccaagggcaacagcgccccccugaucaucagagagcccuucaucgccugcggccccaacgagugcaagcacuucgcccugacccacuacgccgcccagcccggcggcuacuacaacggcaccagaggcgacagaaacaagcugagacaccugaucagcgugaagcugggcaagauccccaccguggagaacagcaucuuccacauggccgccuggagcggcagcgccugccacgacggcaaggaguggaccuacaucggcguggacggccccgacaacaacgcccugcugaaggugaaguacggcgaggccuacaccgacaccuaccacagcuacgccaacaagauccugagaacccaggagagcgccugcaacugcaucggcggcaacugcuaccugaugaucaccgacggcagcgccagcggcaucagcgagugcagauuccugaagaucagagagggcagaaucaucaaggagaucuuccccaccggcagagugaagcacaccgaggagugcaccugcggcuucgccagcaacaagaccaucgagugcgccugcagagacaacagauacaccgccaagagacccuucgugaagcugaacguggagaccgacaccgccgagaucagacugaugugcaccgacaccuaccuggacacccccagacccaacgacggcagcaucaccggccccugcgagagcgacggcgacaagggcagcggcggcaucaagggcggcuucgugcaccagagaaugaagagcaagaucggcagaugguacagcagaaccaugagcaagaccgagagaaugggcaugggccuguacgugaaguacgacggcgaccccugggccgacagcgacgcccuggccuucagcggcgugauggugagcaugaaggagcccggcugguacagcuucggcuucgagaucaaggacaagaagugcgacgugcccugcaucggcaucgagauggugcacgacggcggcaaggagaccuggcacagcgccgccaccgccaucuacugccugaugggcagcggccagcugcugugggacaccgugaccggcguggacauggcccuguga

SEQ ID NO: 190336 - RNA, 1401 nt, Artificial Sequence; identical to SEQ ID NO: 190266
  derived and/or modified CDS sequence (opt4) from neuraminidase__InfluenzaB__AHM01166

SEQ ID NO: 190337 - RNA, 1401 nt, Artificial Sequence
  derived and/or modified CDS sequence (opt4) from neuraminidase__InfluenzaB__AHM01188
augcugcccagcaccauccagacccugacccuguuccugaccagcggcggcgugcugcugagccuguacgugagcgccagccugagcuaccugcuguacagcgacauccugcugaaguucagccccaccgagaucaccgcccccaccaugccccuggacugcgccaacgccagcaacgugcaggccgugaaccacagcgccaccaagggcgugacccugcugcugcccgagcccgaguggaccuaccccagacugagcugccccggcagcaccuuccagaaggcccugcugaucagcccccacagauucggcgagaccaagggcaacagcgccccccugaucaucagagagcccuucaucgccugcggccccaacgagugcaagcacuucgcccugacccacuacgccgcccagcccggcggcuacuacaacggcaccagaggcgacagaaacaagcugagacaccugaucagcgugaagcugggcaagauccccaccguggagaacagcaucuuccacauggccgccuggagcggcagcgccugccacgacggcaaggaguggaccuacaucggcguggacggccccgacaacaacgcccugcugaaggugaaguacggcgaggccuacaccgacaccuaccacagcuacgccaacaagauccugagaacccaggagagcgccugcaacugcaucggcggcaacugcuaccugaugaucaccgacggcagcgccagcggcgugagcgagugcagauuccugaagaucagagagggcagaaucaucaaggagaucuuccccaccggcagagugaagcacaccgaggagugcaccugcggcuucgccagcaacaagaccaucgagugcgccugcagagacaacagauacaccgccaagagacccuucgugaagcugaacguggagaccgacaccgccgagaucagacugaugugcaccgacaccuaccuggacacccccagacccaacgacggcagcaucaccggccccugcgagagcgacggcgacaagggcagcggcggcaucaagggcggcuucgugcaccagagaaugaagagcaagaucggcagaugguacagcagaaccaugagcaagaccgagagaaugggcaugggccuguacgugaaguacgacggcgaccccugggccgacagcgacgcccugguguucagcggcgugauggugagcaugaaggagcccggcugguacagcuucggcuucgagaucaaggacaagaagugcgacgugcccugcaucggcaucgagauggugcacgacggcggcaaggagaccuggcacagcgccgccaccgccaucuacugccugaugggcagcggccagcugcugugggacaccgugaccggcguggacauggcccuguga

SEQ ID NO: 190338 - RNA, 1401 nt, Artificial Sequence; identical to SEQ ID NO: 190330
  derived and/or modified CDS sequence (opt4) from neuraminidase__InfluenzaB__AHM01199

SEQ ID NO: 190339 - RNA, 1401 nt, Artificial Sequence
  derived and/or modified CDS sequence (opt4) from neuraminidase__InfluenzaB__AHM01210
augcugcccagcaccauccagacccugacccuguuccugaccagcggcggcgugcugcugagccuguacgugagcgccagccugagcuaccugcuguacagcgacauccugcugaaguucagccccaccgagaucaccgcccccaccaugccccuggacugcgccaacgccagcaacgugcaggccgugaacagaagcgccaccaagggcgugacccugcugcugcccgagcccggcuggaccuaccccagacugagcugccccggcagcaccuuccagaaggcccugcugaucagcccccacagauucggcgaggccaagggcaacagcgccccccugaucaucagagagcccuucaucgccugcggccccaacgagugcaagcacuucgcccugacccacuacgccgcccagcccggcggcuacuacaacggcaccagaggcgacagaaacaagcugagacaccugaucagcgugaagcugggcaagauccccaccguggagaacagcaucuuccacauggccgccuggagcggcagcgccugccacgacggcaaggaguggaccuacaucggcguggacggccccgacaacaacgcccugcugaaggugaaguacggcgaggccuacaccgacaccuaccacagcuacgccaacaagauccugagaacccaggagagcgccugcaacugcaucggcggcaacugcuaccugaugaucaccgacggcagcgccagcggcgugagcgagugcagauuccugaagaucagagagggcagaaucaucaaggagaucuuccccaccggcagagugaagcacaccgaggagugcaccugcggcuucgccagcaacaagaccaucgagugcgccugcagagacaacagauacaccgccaagagacccuucgugaagcugaacguggagaccgacaccgccgagaucagacugaugugcaccgacaccuaccuggacacccccagacccaacgacggcagcaucaccggccccugcgagagcgacggcgacaagggcagcggcggcaucaagggcggcuucgugcaccagagaaugaagagcaagaucggcagaugguacagcagaaccaugagcaagaccgagagaaugggcaugggccuguacgugaaguacgacggcgaccccugggccgacagcgacgcccuggccuucagcggcgugauggugagcaugaaggagcccggcugguacagcuucggcuucgagaucaaggacaagaagugcgacgugcccugcaucggcaucgagauggugcacgacggcggcaaggagaccuggcacagcgccgccaccgccaucuacugccugaugggcagcggccagcugcugugggacaccguggccggcguggacauggcccuguga

SEQ ID NO: 190340 - RNA, 1401 nt, Artificial Sequence
  derived and/or modified CDS sequence (opt4) from neuraminidase__InfluenzaB__AHM01221
augcugcccagcaccauccagacccugacccuguuccugaccagcggcggcgugcugcugagccuguacgugagcgccagccugagcuaccugcuguacagcgacauccugcugaaguucagccccaccgagaucaccgcccccaccaugccccuggacugcgccaacgccagcaacuuccaggccgugaacagaagcgccaccaagggcgugaccuuccugcugcccgagcccgaguggaccuaccccagacugagcugccccggcagcaccuuccagaaggcccugcugaucagcccccacagauucggcgagaccaagggcaacagcgccccccugaucaucagagagcccuucaucgccugcggccccaacgagugcaagcacuucgcccugacccacuacgccgcccagcccggcggcuacuacaacggcaccagaggcgacagaaacaagcugagacaccugaucagcgugaagcugggcaagauccccaccguggagaacagcaucuuccacauggccgccuggagcggcagcgccugccacgacggcaaggaguggaccuacaucggcguggacggccccgacaacaacgcccugcugaaggugaaguacggcgaggccuacaccgacaccuaccacagcuacgccaacaagauccugagaacccaggagagcgccugcaacugcaucggcggcaacugcuaccugaugaucaccgacggcagcgccagcggcgugagcgagugcagauuccugaagaucagagagggcagaaucaucaaggagaucuuccccaccggcagagugaagcacaccgaggagugcaccugcggcuucgccagcaacaagaccaucgagugcgccugcagagacaacagauacaccgccaagagacccuucgugaagcugaacguggagaccgacaccgccgagaucagacugaugugcaccgacaccuaccuggacacccccagacccaacgacggcagcaucaccggccccugcgagagcgacggcgacaagggcagcggcggcaucaagggcggcuucgugcaccagagaaugaagagcaagaucggcagaugguacagcagaaccaugagcaagaccgagagaaugggcaugggccuguacgugaaguacgacggcgaccccugggccgacagcgacgcccuggccuucagcggcgugauggugagcaugaaggagcccggcugguacagcuucggcuucgagaucaaggacaagaagugcgacgugcccugcaucggcaucgagauggugcacgacggcggcaaggagaccuggcacagcgccgccaccgccaucuacugccugaugggcagcggccagcugcugugggacaccgugaccggcguggacauggcccuguga

SEQ ID NO: 190341 - RNA, 1401 nt, Artificial Sequence; identical to SEQ ID NO: 190235
  derived and/or modified CDS sequence (opt4) from neuraminidase__InfluenzaB__AHM01232

SEQ ID NO: 190342 - RNA, 1401 nt, Artificial Sequence; identical to SEQ ID NO: 190266
  derived and/or modified CDS sequence (opt4) from neuraminidase__InfluenzaB__AHM01243

SEQ ID NO: 190343 - RNA, 1401 nt, Artificial Sequence
  derived and/or modified CDS sequence (opt4) from neuraminidase__InfluenzaB__AHM01254
augcugcccagcaccauccagacccugacccuguuccugaccagcggcggcgugcugcugagccuguacgugagcgccagccugagcuaccugcuguacagcgacauccugcugaaguucagccccaccgagaucaccgcccccaccaugccccuggacugcgccaacgccagcaacgugcaggccgugaacagaagcgccaccaagggcgugacccugcugcugcccgagcccgaguggaccuaccccagacugagcugccccggcagcaccuuccagaaggcccugcugaucagcccccacagauucggcgagaccaagggcaacagcgccccccugaucaucagagagcccuucaucgccugcggccccaacgagugcaagcacuucgcccugacccacuacgccgcccagcccggcggcuacuacaacggcaccagaggcgacagaaacaagcugagacaccugaucagcgugaagcugggcaagauccccaccguggagaacagcaucuuccacauggccgccuggagcggcagcgccugccacgacggcaaggaguggaccuacaucggcguggacggccccgacaacaacgcccugcugaaggugaaguacggcgaggccuacaccgacaccuaccacagcuacgccaacaagauccugagaacccaggagagcgccugcaacugcaucggcggcaacugcuaccugaugaucaccgacggcagcgccagcggcgugagcgagugcagauuccugaagaucagagagggcagaaucaucaaggagaucuuccccaccggcagagugaagcacaccgaggagugcaccugcggcuucgccagcaacaagaccaucgagugcgccugcagagacaacagauacaccgccaagagacccuucgugaagcugaacguggagaccgacaccgccgagaucagacugaugugcaccgacaccuaccuggacacccccagacccaacgacggcagcaucaccggccccugcgagagcgacggcgacaagggcagcggcggcaucaagggcggcuucgugcaccagagaaugaagagcaagaucggcagaugguacagcagaaccaugagcaagaccgagagaaugggcaugggccuguacgugaaguacgacggcgaccccugggccgacagcgacgcccugguguucagcggcgugauggugagcaugaaggagcccggcugguacagcuucggcuucgagaucaaggacaagaagugcgacgugcccugcaucggcaucgagauggugcacgacggcggcaaggagaccuggcacagcgccgccaccgccaucuacugccugaugggcagcggccagcugcugugggacaccgugaccggcguggacauggcccuguga

SEQ ID NO: 190344 - RNA, 1401 nt, Artificial Sequence
  derived and/or modified CDS sequence (opt4) from neuraminidase__InfluenzaB__AHM01265
augcugcccagcaccauccagacccugacccuguuccugaccagcggcggcgugcugcugagccuguacgugagcgccagccugagcuaccugcuguacagcgacauccugcugaaguucagccccaccgagaucaccgcccccaccaugccccuggacugcgccaacgccagcaacgugcaggccgugaacagaagcgccaccaagggcgugacccugcugcugcccgagcccgaguggaccuaccccagacugagcugccccggcagcaccuuccagaaggcccugcugaucagcccccacagauucggcgagaccaagggcaacagcgccccccugaucaucagagagcccuucaucgccugcggccccaacgagugcaagcacuucgcccugacccacuacgccgcccagcccggcggcuacuacaacggcaccagaggcgacagaaacaagcugagacaccugaucagcgugaagcugggcaagauccccaccguggagaacagcaucuuccacauggccgccuggagcggcagcgccugccacgacggcaaggaguggaccuacaucggcguggacggccccgacaacaacgcccugcugaaggugaaguacggcgaggccuacaccgacaccuaccacagcuacgccaacaagauccugagaacccaggagagcgccugcaacugcaucggcggcaacugcuaccugaugaucaccgacggcagcgccagcggcgugagcgagugcagauuccugaagaucagagagggcagaaucaucaaggagaucuuccccaccggcagagugaagcacaccgaggagugcaccugcggcuucgccagcaacaagaccaucgagugcgccugcagagacaacagauacaccgccaagagacccuucgugaagcugaacguggagaccgacaccgccgagaucagacugaugugcaccgacaccuaccuggacacccccagacccaacgacggcagcaucaccggccccugcgagagcgacggcgacgagggcagcggcggcaucaagggcggcuucgugcaccagagaaugaagagcaagaucggcagaugguacagcagaaccaugagcaagaccgagagaaugggcaugggccuguacgugaaguacgacggcgaccccugggccgacagcgacgcccuggccuucagcggcgugauggugagcaugaaggagcccggcugguacagcuucggcuucgagaucaaggacaagaagugcgacgugcccugcaucggcaucgagauggugcacgacggcggcaaggagaccuggcacagcgccgccaccgccaucuacugccugaugggcagcggcagacugcugugggacaccgugaccggcguggacauggcccuguga

SEQ ID NO: 190345 - RNA, 1401 nt, Artificial Sequence
  derived and/or modified CDS sequence (opt4) from neuraminidase__InfluenzaB__AHM01276
augcugcccagcaccauccagacccugacccuguuccugaccagcggcggcgugcugcugagccuguacgugagcgccagccugagcuaccugcuguacagcgacauccugcugaaguucagccagaccgagaucaccgcccccaucaugccccuggacugcaccaacgccagcaacgugcaggccgugaacagaagcgccgccaagggcgugacccugcugcugcccgagcccgaguggaccuaccccagacugagcugccccggcagcaccuuccagaaggcccugcugaucagcccccacagauucggcgagaucaagggcaacagcgccccccugaucaucagagagcccuucaucgccugcggccccaccgagugcaagcacuucgcccugacccacuacgccgcccagcccggcggcuacuacaacggcaccagagaggacagaaacaagcugagacaccugaucagcgugaagcugggcaagauccccaccguggagaacagcaucuuccacauggccgccuggagcggcagcgccugccacgacggcaaggaguggaccuacaucggcguggacggccccgacagcaacgcccugcugaagaucaaguacggcgaggccuacaccgacaccuaccacagcuacgccaagaacauccugagaacccaggagagcgccugcaacugcaucggcggcgacugcuaccugaugaucaccgacggccccgccagcggcgugagcgagugcagauuccugaagaucagagagggcagaaucaucaaggagaucuuccccaccggcagagugaagcacaccgaggagugcaccugcggcuucgccagcaacaagaccaucgagugcgccugcagagacaacagauacaccgccaagagacccuucgugaagcugaacguggagaccgacaccgccgagaucagacugaugugcaccgagaccuaccuggacacccccagacccaacgacggcagcaucaccggccccugcgagagcgacggcgacaagggcagcggcggcaucaagggcggcuucgugcaccagagaauggccagcaagaucggcagaugguacagcagaaccaugagcaagaccaagagaaugggcaugggccuguacgugaaguacgacggcgaccccuggaccgacagcgaggcccuggcccugagcggcgugauggugagcauggaggagcccggcugguacagcuucggcuucgagaucaaggacaagaagugcgacgugcccugcaucggcaucgagauggugcacgacggcggcaagaccaccuggcacagcgccgccaccgccaucuacugccugaugggcagcggccagcugcugugggacaccgugaccggcguggacauggcccuguga

SEQ ID NO: 190346 - RNA, 1401 nt, Artificial Sequence; identical to SEQ ID NO: 190330
  derived and/or modified CDS sequence (opt4) from neuraminidase__InfluenzaB__AHM01287

SEQ ID NO: 190347 - RNA, 1401 nt, Artificial Sequence; identical to SEQ ID NO: 190330
  derived and/or modified CDS sequence (opt4) from neuraminidase__InfluenzaB__AHM01298

SEQ ID NO: 190348 - RNA, 1401 nt, Artificial Sequence; identical to SEQ ID NO: 190345
  derived and/or modified CDS sequence (opt4) from neuraminidase__InfluenzaB__AHM01309

SEQ ID NO: 190349 - RNA, 1401 nt, Artificial Sequence; identical to SEQ ID NO: 190266
  derived and/or modified CDS sequence (opt4) from neuraminidase__InfluenzaB__AHM01320

SEQ ID NO: 190350 - RNA, 1401 nt, Artificial Sequence; identical to SEQ ID NO: 190330
  derived and/or modified CDS sequence (opt4) from neuraminidase__InfluenzaB__AHM01331

SEQ ID NO: 190351 - RNA, 1401 nt, Artificial Sequence; identical to SEQ ID NO: 190266
  derived and/or modified CDS sequence (opt4) from neuraminidase__InfluenzaB__AHM01342

SEQ ID NO: 190352 - RNA, 1401 nt, Artificial Sequence
  derived and/or modified CDS sequence (opt4) from neuraminidase__InfluenzaB__AHM01353
augcugcccagcaccauccagacccugacccuguuccugaccagcggcggcgugcugcugagccuguacgugagcgccagccugagcuaccugcuguacagcgacauccugcugaaguucagccccaccgagaucaccgcccccaccaugccccuggacugcgccaacgccagcaacgugcaggccgugaacagaagcgccaccaagggcgugacccugcugcugcccgagcccggcuggaccuaccccagacugagcugccccggcagcaccuuccagaaggcccugcugaucagcccccacagauucggcgagaccaagggcaacagcgccccccugaucaucagagagcccuucaucgccugcggccccaacgagugcaagcacuucgcccugacccacuacgccgcccagcccggcggcuacuacaacggcaccagaggcgacagaaacaagcugagacaccugaucagcgugaagcugggcaagauccccaccguggagaacagcaucuuccacauggccgccuggagcggcagcgccugccacgacggcaaggaguggaccuacaucggcguggacggccccgacaacaacgcccugcugaaggugaaguacggcgaggccuacaccgacaccuaccacagcuacgccaacaagauccugagaacccaggagagcgccugcaacugcaucggcggcaacugcuaccugaugaucaccgacggcagcgccagcggcgugagcgagugcagauuccugaagaucagagagggcagaaucaucaaggagaucuuccccaccggcagagugaagcacaccgaggagugcaccugcggcuucgccagcaacaagaccaucgagugcgccugcagagacaacagauacaccgccaagagacccuucgugaagcugaacguggagaccgacaccgccgagaucagacugaugugcaccgacaccuaccuggacacccccagacccaacgacggcagcaucaccggccccugcgagagcgacggcgacaagggcagcggcggcaucaagggcggcuucgugcaccagagaaugaagagcaagaucggcagaugguacagcagaaccaugagcaagaccgagagaaugggcaugggccuguacgugaaguacgacggcgaccccugggccgacagcgacgcccuggccuucagcggcgugauggugagcaugaaggagcccggcugguacagcuucggcuucgagaucaaggacaagaagugcgacgugcccugcaucggcaucgagauggugcacgacggcggcaaggagaccuggcacagcgccgccaccgccaucuacugccugaugggcagcggccagcugcugugggacaccgugaccggcguggacauggcccuguga

SEQ ID NO: 190353 - RNA, 1401 nt, Artificial Sequence
  derived and/or modified CDS sequence (opt4) from neuraminidase__InfluenzaB__AHM01364
augcugcccagcaccauccagacccugacccuguuccugaccagcggcggcgugcugcugagccuguacgugagcgccagccugagcuaccugcuguacagcgacauccugcugaaguucagccccaccgagaucaccgcccccaccaugccccuggacugcgccaacgccagcaacgugcaggccgugaacagaagcgccaccaagggcgugacccugcugcugcccgagcccgaguggaccuaccccagacugagcugccccggcagcaccuuccagaaggcccugcugaucagcccccacagauucggcgagaccaagggcaacagcgccccccugaucaucagagagcccuucaucgccugcggccccaacgagugcaagcacuucgcccugacccacuacgccgcccagcccggcggcuacuacaacggcaccagaggcgacagaaacaagcugagacaccugaucagcgugaagcugggcaagauccccaccguggagaacagcaucuuccacauggccgccuggagcggcagcgccugccacgacggcaaggaguggaccuacaucggcguggacggccccgacaacaacgcccugcugaaggugaaguacggcgaggccuacaccgacaccuaccacagcuacgccaacaagauccugagaacccaggagagcgccugcaacugcaucggcggcaacugcuaccugaugaucaccgacggcagcgccagcggcgugagcgagugcagauuccugaagaucagagagggcagaaucaucaaggagaucuuccccaccggcagagugaagcacaccgaggagugcaccugcggcuucgccagcaacaagaccaucgagugcgccugcagagacaacagauacaccgccaagagacccuucgugaagcugaacguggagaccgacaccgccgagaucagacugaugugcaccgacaccuaccuggacacccccagacccaacgacggcagcaucaccggccccugcgagagcgacggcgacgagggcagcggcggcaucaagggcggcuucgugcaccagagaaugaagagcaagaucggcagaugguacagcagaaccaugagcaagaccgagagaaugggcaugggccuguacgugaaguacgacggcgaccccugggccgacagcgacgcccuggccuucagcggcgugauggugagcaugaaggagcccggcugguacagcuucggcuucgagaucaaggacaagaagugcgacgugcccugcaucggcaucgagauggugcacgacggcggcaaggagaccuggcacagcgccgccaccgccaucuacugccugaugggcagcggccagcugcugugggacaccgugaccggcguggacauggcccuguga

SEQ ID NO: 190354 - RNA, 1401 nt, Artificial Sequence; identical to SEQ ID NO: 190345
  derived and/or modified CDS sequence (opt4) from neuraminidase__InfluenzaB__AHM01375

SEQ ID NO: 190355 - RNA, 1401 nt, Artificial Sequence; identical to SEQ ID NO: 190345
  derived and/or modified CDS sequence (opt4) from neuraminidase__InfluenzaB__AHM01386

SEQ ID NO: 190356 - RNA, 1401 nt, Artificial Sequence; identical to SEQ ID NO: 190266
  derived and/or modified CDS sequence (opt4) from neuraminidase__InfluenzaB__AHM01397

SEQ ID NO: 190357 - RNA, 1401 nt, Artificial Sequence; identical to SEQ ID NO: 190266
  derived and/or modified CDS sequence (opt4) from neuraminidase__InfluenzaB__AHM01408

SEQ ID NO: 190358 - RNA, 1401 nt, Artificial Sequence; identical to SEQ ID NO: 190266
  derived and/or modified CDS sequence (opt4) from neuraminidase__InfluenzaB__AHM01419

SEQ ID NO: 190359 - RNA, 1401 nt, Artificial Sequence
  derived and/or modified CDS sequence (opt4) from neuraminidase__InfluenzaB__AHM01430
augcugcccagcaccauccagacccugacccuguuccugaccagcggcggcgugcugcugagccuguacgugagcgccagccugagcuaccugcuguacagcgacauccugcugaaguucagccccaccgagaucaccgcccccaccaugccccuggacugcgccaacgccagcaacgugcaggccgugaacagaagcgccaccaagggcgugacccugcugcugcccgagcccgaguggaccuaccccagacugagcugccccggcagcaccuuccagaaggcccugcugaucagcccccacagauucggcgagaccaagggcaacagcgccccccugaucaucagagagcccuucaucgccugcggccccaacgagugcaagcacuucgcccugacccacuacgccgcccagcccggcggcuacuacaacggcaccagaggcgacagaaacaagcugagacaccugaucagcgugaagcugggcaagauccccaccguggagaacagcaucuuccacauggccgccuggagcggcagcgccugccacgacggcaaggaguggaccuacaucggcguggacggccccgacaacaacgcccugcugaaggugaaguacggcgaggccuacaccgacaccuaccacagcuacgccaacaagauccugagaacccaggagagcgccugcaacugcaucggcggcaacugcuaccugaugaucaccgacggcagcgccagcggcgugagcgagugcagauuccugaagaucagagagggcagaaucaucaaggagaucuuccccaccggcagagugaagcacaccgaggagugcaccugcggcuucgccagcaacaagaccaucgagugcgccugcagagacaacagauacaccgccaagagacccuucgugaagcugaacguggagaccgacaccgccgagaucagacugaugugcaccgacaccuaccuggacacccccagacccaacgacggcagcaucaccggccccugcgagagcgacggcgacgagggcagcggcggcaucaagggcggcuucgugcaccagagaaugaagagcaagaucggcagaugguacagcagaaccaugagcaagaccgagagaaugggcaugggccuguacgugaaguacgacggcgaccccugggccgacagcgacgcccuggccuucagcggcgugauggugagcaugaaggagcccggcugguacagcuucggcuucgagaucaaggacaagaagugcgacgugcccugcaucggcaucgagauggugcacgacggcggcaaggagaccuggcacagcgccgccaccgccaucuacugccugaugggcagcggcagacugcugugggacaccgccaccggcguggacauggcccuguga

SEQ ID NO: 190360 - RNA, 1401 nt, Artificial Sequence
  derived and/or modified CDS sequence (opt4) from neuraminidase__InfluenzaB__AHM01441
augcugcccagcaccauccagacccugacccuguuccugaccagcggcggcgugcugcugagccuguacgugagcgccagccugagcuaccugcuguacagcgacauccugcugaaguucagccagaccgagaucaccgcccccaccaugccccuggacugcgccaacgccagcaacgugcaggccgugaacagaagcgccgccaagggcgugacccugcugcugcccgagcccgaguggaccuaccccagacugagcugccccggcagcaccuuccagaaggcccugcugaucagcccccacagauucggcgagaucaagggcaacagcgccccccugaucaucagagagcccuucaucgccugcggccccaccgagugcaagcacuucgcccugacccacuacgccgcccagcccggcggcuacuacaacggcaccagagaggacagaaacaagcugagacaccugaucagcgugaagcugggcaagauccccaccguggagaacagcaucuuccacauggccgccuggagcggcagcgccugccacgacggcaaggaguggaccuacaucggcguggacggccccgacagcaacgcccugcugaagaucaaguacggcgaggccuacaccgacaccuaccacagcuacgccaagaacauccugagaacccaggagagcgccugcaacugcaucggcggcgacugcuaccugaugaucaccgacggccccgccagcggcgugagcgagugcagauuccugaagaucagagagggcagaaucaucaaggagaucuuccccaccggcagagugaagcacaccgaggagugcaccugcggcuucgccagcaacaagaccaucgagugcgccugcagagacaacagauacaccgccaagagacccuucgugaagcugaacguggagaccgacaccgccgagaucagacugaugugcaccgagaccuaccuggacacccccagacccaacgacggcagcaucaccggccccugcgagagcgacggcgacaagggcagcggcggcaucaagggcggcuucgugcaccagagaauggccagcaagaucggcagaugguacagcagaaccaugagcaagaccaagagaaugggcaugggccuguacgugaaguacgacggcgaccccuggaccgacagcgaggcccuggcccugagcggcgugauggugagcauggaggagcccggcugguacagcuucggcuucgagaucaaggacaagaagugcgacgugcccugcaucggcaucgagauggugcacgacggcggcaagaccaccuggcacagcgccgccaccgccaucuacugccugaugggcagcggccagcugcugugggacaccgugaccggcguggacauggcccuguga

SEQ ID NO: 190361 - RNA, 1401 nt, Artificial Sequence; identical to SEQ ID NO: 190266
  derived and/or modified CDS sequence (opt4) from neuraminidase__InfluenzaB__AHM01463

SEQ ID NO: 190362 - RNA, 1401 nt, Artificial Sequence
  derived and/or modified CDS sequence (opt4) from neuraminidase__InfluenzaB__AHM01474
augcugcccagcaccauccagacccugacccuguuccugaccagcggcggcgugcugcugagccuguacgugagcgccagccugagcuaccugcuguacagcgacauccugcugaaguucagccagaccgagaucaccgcccccaucaugccccuggacugcaucaacgccagcaacgugcaggccgugaacagaagcgccgccaagggcgugacccugcugcugcccgagcccgaguggaccuaccccagacugagcugccccggcagcaccuuccagaaggcccugcugaucagcccccacagauucggcgagaucaagggcaacagcgccccccugaucaucagagagcccuucaucgccugcggccccaccgagugcaagcacuucgcccugacccacuacgccgcccagcccggcggcuacuacaacggcaccagagaggacagaaacaagcugagacaccugaucagcgugaagcugggcaagauccccaccguggagaacagcaucuuccacauggccgccuggagcggcagcgccugccacgacggcaaggaguggaccuacaucggcguggacggccccgacagcaacgcccugcugaagaucaaguacggcgaggccuacaccgacaccuaccacagcuacgccaagaacauccugagaacccaggagagcgccugcaacugcaucggcggcgacugcuaccugaugaucaccgacggccccgccagcggcgugagcgagugcagauuccugaagaucagagagggcagaaucaucaaggagaucuuccccaccggcagagugaagcacaccgaggagugcaccugcggcuucgccagcaacaagaccaucgagugcgccugcagagacaacagauacaccgccaagagacccuucgugaagcugaacguggagaccgacaccgccgagaucagacugaugugcaccgagaccuaccuggacacccccagacccaacgacggcagcaucaccggccccugcgagagcgacggcgacaagggcagcggcggcaucaagggcggcuucgugcaccagagaauggccagcaagaucggcagaugguacagcagaaccaugagcaagaccaagagaaugggcaugggccuguacgugaaguacgacggcgaccccuggaccgacagcgaggcccuggcccugagcggcgugauggugagcauggaggagcccggcugguacagcuucggcuucgagaucaaggacaagaagugcgacgugcccugcaucggcaucgagauggugcacgacggcggcaagaccaccuggcacagcgccgccaccgccaucuacugccugaugggcagcggccagcugcugugggacaccgugaccggcguggacauggcccuguga

SEQ ID NO: 190363 - RNA, 1401 nt, Artificial Sequence
  derived and/or modified CDS sequence (opt4) from neuraminidase__InfluenzaB__AHM01485
augcugcccagcaccauccagacccugacccuguuccugaccagcggcggcgugcugcugagccuguacgugagcgccagccugagcuaccugcuguacagcgacauccugcugaaguucagccccaccgagaucaccgcccccaucaugccccuggacugcaccaacgccagcaacgugcaggccgugaacagaagcgccgccaagggcgugacccugcugcugcccgagcccgaguggaccuaccccagacugagcugccccggcagcaccuuccagaaggcccugcugaucagcccccacagauucggcgagaucaagggcaacagcgccccccugaucaucagagagcccuucaucgccugcggccccaccgagugcaagcacuucgcccugacccacuacgccgcccagcccggcggcuacuacaacggcaccagagaggacagaaacaagcugagacaccugaucagcgugaagcugggcaagauccccaccguggagaacagcaucuuccacauggccgccuggagcggcagcgccugccacgacggcaaggaguggaccuacaucggcguggacggccccgacagcaacgcccugcugaagaucaaguacggcgaggccuacaccgacaccuaccacagcuacgccaagaacauccugagaacccaggagagcgccugcaacugcaucggcggcgacugcuaccugaugaucaccgacggccccgccagcggcgugagcgagugcagauuccugaagaucagagagggcagaaucaucaaggagaucuuccccaccggcagagugaagcacaccgaggagugcaccugcggcuucgccagcaacaagaccaucgagugcgccugcagagacaacagauacaccgccaagagacccuucgugaagcugaacguggagaccgacaccgccgagaucagacugaugugcaccgagaccuaccuggacacccccagacccaacgacggcagcaucaccggccccugcgagagcgacggcgacaagggcagcggcggcaucaagggcggcuucgugcaccagagaauggccagcaagaucggcagaugguacagcagaaccaugagcaagaccaagagaaugggcaugggccuguacgugaaguacgacggcgaccccuggaccgacagcgaggcccuggcccugagcggcgugauggugagcauggaggagcccggcugguacagcuucggcuucgagaucaaggacaagaagugcgacgugcccugcaucggcaucgagauggugcacgacggcggcaagaccaccuggcacagcgccgccaccgccaucuacugccugaugggcagcggccagcugcugugggacaccgugaccggcguggacauggcccuguga

SEQ ID NO: 190364 - RNA, 1401 nt, Artificial Sequence; identical to SEQ ID NO: 190345
  derived and/or modified CDS sequence (opt4) from neuraminidase__InfluenzaB__AHM01496

SEQ ID NO: 190365 - RNA, 1401 nt, Artificial Sequence
  derived and/or modified CDS sequence (opt4) from neuraminidase__InfluenzaB__AHM01507
augcugcccagcaccauccagacccugacccuguuccugaccagcggcggcgugcugcugagccuguacgugagcgccagccugagcuaccugcuguacagcgacauccugcugaaguucagccagaccgagaucaccgcccccaucaugccccuggacugcgccaacgccagcaacgugcaggccgugaacagaagcgccgccaagggcgugacccugcugcugcccgagcccgaguggaccuaccccagacugagcugccccggcagcaccuuccagaaggcccugcugaucagcccccacagauucggcgagaucaagggcaacagcgccccccugaucgugagagagcccuucaucgccugcggccccaccgagugcaagcacuucgcccugacccacuacgccgcccagcccggcggcuacuacaacggcaccagagaggacagaaacaagcugagacaccugaucagcgugaagcugggcaagauccccaccguggagaacagcaucuuccacauggccgccuggagcggcagcgccugccacgacggcaaggaguggaccuacaucggcguggacggccccgacagcaacgcccugcugaagaucaaguacggcgaggccuacaccgacaccuaccacagcuacgccaagaacauccugagaacccaggagagcgccugcaacugcaucggcggcgacugcuaccugaugaucaccgacggccccgccagcggcgugagcgagugcagauuccugaagaucagagagggcagaaucaucaaggagaucuuccccaccggcagagugaagcacaccgaggagugcaccugcggcuucgccagcaacaagaccaucgagugcgccugcagagacaacagauacaccgccaagagacccuucgugaagcugaacguggagaccgacaccgccgagaucagacugaugugcaccgagaccuaccuggacacccccagacccaacgacggcagcaucaccggccccugcgagagcgacggcgacaagggcagcggcggcaucaagggcggcuucgugcaccagagaauggccagcaagaucggcagaugguacagcagaaccaugagcaagaccaagagaaugggcaugggccuguacgugaaguacgacggcgaccccuggaccgacagcgaggcccuggcccugagcggcgugauggugagcaucgaggagcccggcugguacagcuucggcuucgagaucaaggacaagaagugcgacgugcccugcaucggcaucgagauggugcacgacggcggcaagaccaccuggcacagcgccgccaccgccaucuacugccugaugggcagcggccagcugcugugggacaccgugaccggcguggacauggcccuguga

SEQ ID NO: 190366 - RNA, 1401 nt, Artificial Sequence; identical to SEQ ID NO: 190345
  derived and/or modified CDS sequence (opt4) from neuraminidase__InfluenzaB__AHM01518

SEQ ID NO: 190367 - RNA, 1401 nt, Artificial Sequence
  derived and/or modified CDS sequence (opt4) from neuraminidase__InfluenzaB__AHM01529
augcugcccagcaccauccagacccugacccuguuccugaccagcggcggcgugcugcugagccuguacgugagcgccagccugagcuaccugcuguacagcgacauccugcugaaguucagccagaccgagaucaccgcccccaucaugccccuggacugcaccaacgccagcaacgugcaggccgugaacagaagcgccgccaagggcgugacccugcugcugcccgagcccgaguggaccuaccccagacugagcugccccggcagcaccuuccagaaggcccugcugaucagcccccacagauucggcgagaucaagggcaacagcgccccccugaucaucagagagcccuucaucgccugcggccccaccgagugcaagcacuucgcccugacccacuacgccgcccagcccggcggcuacuacaacggcaccagagaggacagaaacaagcugagacaccugaucagcgugaagcugggcaagauccccaccguggagaacagcaucuuccacauggccgccuggagcggcagcgccugccacgacggcaaggaguggaccuacaucggcguggacggccccgacagcaacgcccugcugaagaucaaguacggcgaggccuacaccgacaccuaccacagcuacgccaagaacauccugagaacccaggagagcgccugcaacugcaucggcggcgacugcuaccugaugaucaccgacggccccgccagcggcgugagcgagugcagauuccugaagaucagagagggcagaaucaucaaggagauccugcccaccggcagagugaagcacaccgaggagugcaccugcggcuucgccagcaacaagaccaucgagugcgccugcagagacaacagauacaccgccaagagacccuucgugaagcugaacguggagaccgacaccgccgagaucagacugaugugcaccgagaccuaccuggacacccccagacccaacgacggcagcaucaccggccccugcgagagcgacggcgacaagggcagcggcggcaucaagggcggcuucgugcaccagagaauggccagcaagaucggcagaugguacagcagaaccaugagcaagaccaagagaaugggcaugggccuguacgugaaguacgacggcgaccccuggaccgacagcgaggcccuggcccugagcggcgugauggugagcauggaggagcccggcugguacagcuucggcuucgagaucaaggacaagaagugcgacgugcccugcaucggcaucgagauggugcacgacggcggcaagaccaccuggcacagcgccgccaccgccaucuacugccugaugggcagcggccagcugcugugggacaccgugaccggcguggacauggcccuguga

SEQ ID NO: 190368 - RNA, 1401 nt, Artificial Sequence; identical to SEQ ID NO: 190235
  derived and/or modified CDS sequence (opt4) from neuraminidase__InfluenzaB__AHM01540

SEQ ID NO: 190369 - RNA, 1401 nt, Artificial Sequence; identical to SEQ ID NO: 190345
  derived and/or modified CDS sequence (opt4) from neuraminidase__InfluenzaB__AHM01551

SEQ ID NO: 190370 - RNA, 1401 nt, Artificial Sequence; identical to SEQ ID NO: 190345
  derived and/or modified CDS sequence (opt4) from neuraminidase__InfluenzaB__AHM01562

SEQ ID NO: 190371 - RNA, 1401 nt, Artificial Sequence; identical to SEQ ID NO: 188852
  derived and/or modified CDS sequence (opt4) from neuraminidase__InfluenzaB__AHZ13597

SEQ ID NO: 190372 - RNA, 1404 nt, Artificial Sequence
  derived and/or modified CDS sequence (opt4) from neuraminidase__InfluenzaB__AHZ36701
augcugcccagcaccauccagaugcugacccuguuccugaccagcggcggcgugcugcugagccuguacgugagcgccagccugagcuaccugcuguacagcgacauccugcugaaguucagccccaccgagaucaccgcccccaccaugccccuggacugcgccaacgccagcaacgugcacgccgugaacagaagcgccaccaagggcgugaccuuccugcugcugcccgagcccgaguggaccuaccccagacugagcugccccggcagcaccuuccagaaggcccugcugaucagcccccacagauucggcgagaccaagggcaacagcgccccccugaucaucagagagcccuucaucgccugcggccccaacgagugcaagcacuucgcccugacccacuacgccgcccagcccggcggcuacuacaacggcaccagaggcgacagaaacaagcugagacaccugaucagcgugaagcugggcaagauccccaccguggagaacagcaucuuccacauggccgccuggagcggcagcgccugccacgacggcaaggaguggaccuacaucggcguggacggccccgacaacaacgcccugcugaagaucaaguacggcgaggccuacaccgacaccuaccacagcuacgccaacaacauccugagaacccaggagagcgccugcaacugcaucggcggcaacugcuaccugaugaucaccgacggcagcgccagcggcgugagcgagugcagauuccugaagaucagaaagggcagaaucaucaaggagaucuuccccaccggcagagugaagcacaccgaggagugcaccugcggcuucgccagcaacaagaccaucgagugcgccugcagagacaacagcuacaccgccaagagacccuucgugaagcugaacguggagaccgacaccgccgagaucagacugaugugcaccgacaccuaccuggacacccccagacccgacgacggcagcaucaccggccccugcgagagcaacggcgacaagggcagcggcggcaucaagggcggcuucgugcaccagagaauggccagcaagaucggcagaugguacagcagaaccaugagcaagaccgagagaaugggcaugggccuguacgugaaguacgacggcgaccccuggaccgacagcgacgcccuggccuucagaggcgugauggugagcaugaaggagcccggcugguacagcuucggcuucgagaucaaggacaagaagugcgacgugcccugcaucggcaucgagauggugcacgacggcggcaaggagaccuggcacagcgccgccaccgccaucuacugccugaugggcagcggccagcugcugugggacaccgugaccggcguggacauggcccuguga

SEQ ID NO: 190373 - RNA, 1404 nt, Artificial Sequence
  derived and/or modified CDS sequence (opt4) from neuraminidase__InfluenzaB__AHZ36756
augcugcccagcaccauccagaugcugacccuguuccugaccagcggcggcgugcugcugagccuguacgugagcgccagccugagcuaccugcuguacagcgacauccugcugaaguucagccccaccgagaucaccgcccccaccaugccccuggacugcgccaacgccagcaacgugcacgccgugaacagaagcgccaccaagggcgugaccuuccugcugcugcccgagcccgaguggaccuaccccagacugagcugccccggcagcaccuuccagaaggcccugcugaucagcccccacagauucggcgagaccaagggcaacagcgccccccugaucaucagagagcccuucaucgccugcggccccaacgagugcaagcacuucgcccugacccacuacgccgcccagcccggcggcuacuacaacggcaccagaggcgacagaaacaagcugagacaccugaucagcgugaagcugggcaagauccccaccguggagaacagcaucuuccacauggccgccuggagcggcagcgccugccacgacggcaaggaguggaccuacaucggcguggacggccccgacaacaacgcccugcugaagaucaaguacggcgaggccuacaccgacaccuaccacagcuacgccaacaacauccugagaacccaggagagcgccugcaacugcaucggcggcaacugcuaccugaugaucaccgacggcagcgccagcggcgugagcgagugcagauuccugaagaucagagagggcagaaucaucaaggagaucuuccccaccggcagagugaagcacaccgaggagugcaccugcggcuucgccagcaacaagaccaucgagugcgccugcagagacaacagcuacaccgccaagagacccuucgugaagcugaacguggagaccgacaccgccgagaucagacugaugugcaccgacaccuaccuggacacccccagacccgacgacggcagcaucaccggccccugcgagagcaacggcgacaagggcagcggcggcaucaagggcggcuucgugcaccagagaauggccagcaagaucggcagaugguacagcagaaccaugagcaagaccgagagaaugggcaugggccuguacgugaaguacgacggcgaccccuggaccgacagcgacgcccuggccuucagaggcgugauggugagcaugaaggagcccggcugguacagcuucggcuucgagaucaaggacaagaagugcgacgugcccugcaucggcaucgagauggugcacgacggcggcaaggagaccuggcacagcgccgccaccgccaucuacugccugaugggcagcggccagcugcugugggacaccgugaccggcguggacauggcccuguga

SEQ ID NO: 190374 - RNA, 1401 nt, Artificial Sequence
  derived and/or modified CDS sequence (opt4) from neuraminidase__InfluenzaB__AHZ36767
augcugcccagcaccauccagacccugacccuguuccugaccagcggcggcgugcugcugagccuguacgugagcgccagccugagcuaccugcuguacagcgacauccugcugaaguucagccccaccgagaucaccgcccccaccagaccccuggacugcgccaacgccagcaacgugcaggccgugaacagaagcgccaccaagggcgugacccugcugcugcccgagcccgaguggaccuaccccagacugagcugccccggcagcaccuuccagaaggcccugcugaucagcccccacagauucggcgagaccaagggcaacagcgccccccugaucaucagagagcccuucaucgccugcggccccaacgagugcaagcacuucgcccugacccacuacgccgcccagcccggcggcuacuacaacggcaccagaggcgacagaaacaagcugagacaccugaucagcgugaagcugggcaagauccccaccguggagaacagcaucuuccacauggccgccuggagcggcagcgccugccacgacggcaaggaguggaccuacaucggcguggacggccccgacaacaacgcccugcugaaggugaaguacggcgaggccuacaccgacaccuaccacagcuacgccaacaagauccugagaacccaggagagcgccugcaacugcaucggcggcaacugcuaccugaugaucaccgacggcagcgccagcggcgugagcgagugcagauuccugaagaucagagagggcagaaucaucaaggagaucuuccccaccggcagagugaagcacaccgaggagugcaccugcggcuucgccagcaacaagaccaucgagugcgccugcagagacaacagauacaccgccaagagacccuucgugaagcugaacguggagaccgacaccgccgagaucagacugaugugcaccgacaccuaccuggacacccccagacccaacgacggcagcaucaccggccccugcgagagcgacggcgacaagggcagcggcggcaucaagggcggcuucgugcaccagagaaugaagagcaagaucggcagaugguacagcagaaccaugagcaagaccgagagaaugggcaugggccuguacgugaaguacgacggcgaccccugggccgacagcgacgcccuggccuucagcggcgugauggugagcaugaaggagcccggcugguacagcuucggcuucgagaucaaggacaagaagugcgacgugcccugcaucggcaucgagauggugcacgacggcggcaaggagaccuggcacagcgccgccaccgccaucuacugccugaugggcagcggccagcugcugugggacaccgugaccggcguggacauggcccuguga

SEQ ID NO: 190375 - RNA, 1401 nt, Artificial Sequence
  derived and/or modified CDS sequence (opt4) from neuraminidase__InfluenzaB__AHZ36778
augcugcccagcaccauccagacccugacccuguuccugaccagcggcggcgugcugcugagccuguacgugagcgccagccugagcuaccugcuguacagcgacauccugcugaaguuccccagcaccgagaucaccgcccccaccaugccccuggacugcgccaacgccagcaacgugcaggccgugaacagaagcgccaccaagggcgugacccugcugcugcccgagcccgaguggaccuaccccagacugagcugccccggcagcaccuuccagaaggcccugcugaucagcccccacagauucggcgagaccaagggcaacagcgccccccugaucaucagagagcccuucaucgccugcggccccaaggagugcaagcacuucgcccugacccacuacgccgcccagcccggcggcuacuacaacggcaccagaggcgacagaaacaagcugagacaccugaucagcgugaagcugggcaagauccccaccguggagaacagcaucuuccacauggccgccuggagcggcagcgccugccacgacggcaaggaguggaccuacaucggcguggacggccccgacaacaacgcccugcugaagaucaaguacggcgaggccuacaccgacaccuaccacagcuacgccaacaacauccugagaacccaggagagcgccugcaacugcaucggcggcaacugcuaccugaugaucaccgacggcagcgccagcggcgugagcgagugcagauuccugaagaucagagagggcagaaucaucaaggagaucuuccccaccggcagaauccagcacaccgaggagugcaccugcggcuucgccagcaacaagaccaucgagugcgccugcagagacaacagcuacaccgccaagagacccuucgugaagcugaacguggagaccgacaccgccgagaucagacugaugugcaccaagaccuaccuggacacccccagacccgaggacggcagcaucaccggccccugcgagagcaacggcggcaagggcagcggcggcaucaagggcggcuucgugcaccagagaauggccagcaagaucggcagaugguacagcagaaccaugagcaagaccgagagaaagggcaugggccuguacgugaaguacaacggcgaccccugggccgacagcgacgcccugguguucagcggcgugaugaucagcauggaggagcccggcugguacagcuucggcuucgagaucaaggacaagaagugcgacgugcccugcaucggcaucgagauggugcacgacggcggcaaggagaccuggcacagcgccgccaccgccaucuacugccugaugggcagcggccagcugcugugggacaccgugaccggcgugaacaugacccuguga

SEQ ID NO: 190376 - RNA, 1401 nt, Artificial Sequence
  derived and/or modified CDS sequence (opt4) from neuraminidase__InfluenzaB__AHZ36789
augcugcccagcaccauccagacccugacccuguuccugaccagcggcggcgugcugcugagccuguacgugagcgccagccugagcuaccugcuguacagcgacauccugcugaaguucagccccaccgagaucaccgcccagaccaugccccuggacugcgccaacgccagcaacgugcaggccgugaacagaagcgccaccaagggcgugacccugcugccccccgagcccgaguggaccuaccccagacugagcugccccggcagcaccuuccagaaggcccugcugaucagcccccacagauucggcgagaccaagggcaacagcgccccccugaucaucagagagcccuucaucgccugcggccccaacgagugcaagcacuucgcccugacccacuacgccgcccagcccggcggcuacuacaacggcaccagaggcgacagaaacaagcugagacaccugaucagcgugaagcugggcaagauccccaccguggagaacagcaucuuccacauggccgccuggagcggcagcgccugccacgacggcaaggaguggaccuacaucggcguggacggccccgacaacaacgcccugcugaaggugaaguacggcgaggccuacaccgacaccuaccacagcuacgccaacaagauccugagaacccaggagagcgccugcaacugcaucggcggcaacugcuaccugaugaucaccgacggcagcgccagcggcgugagcgagugcagauuccugaagaucagagagggcagaaucaucaaggagaucuuccccaccggcagagugaagcacaccgaggagugcaccugcggcuucgccagcaacaagaccaucgagugcgccugcagagacaacagauacaccgccaagagacccuucgugaagcugaacguggagaccgacaccgccgagaucagacugaugugcaccgacaccuaccuggacacccccagacccaacgacggcagcaucaccggccccugcgagagcgacggcgacaagggcagcggcggcaucaagggcggcuucgugcaccagagaaugaagagcaagaucggcagaugguacagcagaaccaugagcaagaccgagagaaugggcaugggccuguacgugaaguacgacggcgaccccugggccgacagcgacgcccuggccuucagcggcgugauggugagcaugaaggagcccggcugguacagcuucggcuucgagaugaaggacaagaagugcgacgugcccugcaucggcaucgagauggugcacgacggcggcaaggagaccuggcacagcgccgccaccgccaucuacugccugaugggcagcggccagcugcugugggacaccgugaccggcguggacauggcccuguga

SEQ ID NO: 190377 - RNA, 1401 nt, Artificial Sequence; identical to SEQ ID NO: 190376
  derived and/or modified CDS sequence (opt4) from neuraminidase__InfluenzaB__AHZ36800

SEQ ID NO: 190378 - RNA, 1401 nt, Artificial Sequence
  derived and/or modified CDS sequence (opt4) from neuraminidase__InfluenzaB__AHZ36811
augcugcccagcaccauccagacccugacccuguuccugaccagcggcggcgugcugcugagccuguacgugagcgccagccugagcuaccugcuguacagcgacauccugcugaaguucagccagaccgagaucaccgcccccaucaugccccuggacugcaccaacgccagcaacgugcaggccgugaacagaagcgccgccaagggcgugacccugcugcugcccgagcccgaguggaccuaccccagacugagcugccccggcagcaccuuccagaaggcccugcugaucagcccccacagauucggcgagaucaagggcaacagcgccccccugaucaucagagagcccuucaucgccugcggccccaccgagugcaagcacuucgcccugacccacuacgccgcccagcccggcggcuacuacaacggcaccagagaggacagaaacaagcugagacaccugaucagcgugaagcugggcaagauccccaccguggagaacagcaucuuccacauggccgccuggagcggcagcgccugccacgacggcaaggaguggaccuacaucggcguggacggccccgacagcaacgcccugcugaagaucaaguacggcgaggccuacaccgacaccuaccacagcuacgccaagaacauccugagaacccaggagagcgccugcaacugcaucggcggcgacugcuaccugaugaucaccgacggccccgccagcggcgugagcgagugcagauuccugaagaucagagagggcagaaucaucagagagaucuuccccaccggcagagugaagcacaccgaggagugcaccugcggcuucgccagcaacaagaccaucgagugcgccugcagagacaacagauacaccgccaagagacccuucgugaagcugaacguggagaccgacaccgccgagaucagacugaugugcaccgagaccuaccuggacacccccagacccaacgacggcagcaucaccggccccugcgagagcgacggcgacaagggcagcggcggcaucaagggcggcuucgugcaccagagaauggccagcaagaucggcagaugguacagcagaaccaugagcaagaccaagagaaugggcaugggccuguacgugaaguacgacggcgaccccuggaccgacagcgaggcccuggcccugagcggcgugauggugagcauggaggagcccggcugguacagcuucggcuucgagaucaaggacaagaagugcgacgugcccugcaucggcaucgagauggugcacgacggcggcaagaccaccuggcacagcgccgccaccgccaucuacugccugaugggcagcggccagcugcugugggacaccgugaccggcguggacauggcccuguga

SEQ ID NO: 190379 - RNA, 1404 nt, Artificial Sequence; identical to SEQ ID NO: 190373
  derived and/or modified CDS sequence (opt4) from neuraminidase__InfluenzaB__AHZ36822

SEQ ID NO: 190380 - RNA, 1401 nt, Artificial Sequence
  derived and/or modified CDS sequence (opt4) from neuraminidase__InfluenzaB__AHZ36833
augcugcccagcaccauccagacccugacccuguuccugaccagcggcggcgugcugcugagccuguacgugagcgccagccugagcuaccugcuguacagcgacauccugcugaaguucagccccaccgagaucaccgcccccaccagaccccuggacugcgccaacgccagcaacgugcaggccgugaacagaagcgccaccaagggcgugacccugcugcugcccgagcccgaguggaccuaccccagacugagcugccccggcagcaccuuccagaaggcccugcugaucagcccccacagauucggcgagaccaagggcaacagcgccccccugaucaucagagagcccuucaucgccugcggccccaacgagugcaagcacuucgcccugacccacuacgccgcccagcccggcggcuacuacaacggcaccagaggcgacagaaacaagcugagacaccugaucagcgugaagcugggcaagauccccaccguggagaacagcaucuuccacauggccgccuggagcggcagcgccugccacgacggcaaggaguggaccuacaucggcguggacggccccgacaacaacgcccugcugaaggugaaguacggcgaggccuacaccgacaccuaccacagcuacgccaacaagauccugagaacccaggagagcgccugcaacugcaucggcggcaacugcuaccugaugaucaccgacggcagcgccagcggcgugagcgagugcagauuccugaaggugagagagggcagaaucaucaaggagaucuuccccaccggcagagugaagcacaccgaggagugcaccugcggcuucgccagcaacaagaccaucgagugcgccugcagagacaacagauacaccgccaagagacccuucgugaagcugaacguggagaccgacaccgccgagaucagacugaugugcaccgacaccuaccuggacacccccagacccaacgacggcagcaucaccggccccugcgagagcgacggcgacaagggcagcggcggcaucaagggcggcuucgugcaccagagaaugaagagcaagaucggcagaugguacagcagaaccaugagcaagaccgagagaaugggcaugggccuguacgugaaguacgacggcgaccccugggccgacagcgacgcccuggccuucagcggcgugauggugagcaugaaggagcccggcugguacagcuucggcuucgagaucaaggacaagaagugcgacgugcccugcaucggcaucgagauggugcacgacggcggcaaggagaccuggcacagcgccgccaccgccaucuacugccugaugggcagcggccagcugcugugggacaccgugaccggcguggacauggcccuguga

SEQ ID NO: 190381 - RNA, 1401 nt, Artificial Sequence
  derived and/or modified CDS sequence (opt4) from neuraminidase__InfluenzaB__AHZ36844
augcugcccagcaccauccagacccugacccuguuccugaccagcggcggcgugcugcugagccuguacgugagcgccagccugagcuaccugcuguacagcgacauccugcugaaguucagccccaccgagaucaccgcccccaccagaccccuggacugcgccaacgccagcaacgugcaggccgugaacagaagcgccaccaaggaggugacccugcugcugcccgagcccgaguggaccuaccccagacugagcugccccggcagcaccuuccagaaggcccugcugaucagcccccacagauucggcgagaccaagggcaacagcgccccccugaucaucagagagcccuucaucgccugcggccccaacgagugcaagcacuucgcccugacccacuacgccgcccagcccggcggcuacuacaacggcaccagaggcgacagaaacaagcugagacaccugaucagcgugaagcugggcaagauccccaccguggagaacagcaucuuccacauggccgccuggagcggcagcgccugccacgacggcaaggaguggaccuacaucggcguggacggccccgacaacaacgcccugcugaaggugaaguacggcgaggccuacaccgacaccuaccacagcuacgccaacaagauccugagaacccaggagagcgccugcaacugcaucggcggcaacugcuaccugaugaucaccgacggcagcgccagcggcgugagcgagugcagauuccugaagaucagagagggcagaaucaucaaggagaucuuccccaccggcagagugaagcacaccgaggagugcaccugcggcuucgccagcaacaagaccaucgagugcgccugcagagacaacagauacaccgccaagagacccuucgugaagcugaacguggagaccgacaccgccgagaucagacugaugugcaccgacaccuaccuggacacccccagacccaacgacggcagcaucaccggccccugcgagagcgacggcgacaagggcagcggcggcaucaagggcggcuucgugcaccagagaaugaagagcaagaucggcagaugguacagcagaaccaugagcaagaccgagagaaugggcaugggccuguacgugaaguacgacggcgaccccugggccgacagcgacgcccuggccuucagcggcgugauggugagcaugaaggagcccggcugguacagcuucggcuucgagaucaaggacaagaagugcgacgugcccugcaucggcaucgagauggugcacgacggcggcaaggagaccuggcacagcgccgccaccgccaucuacugccugaugggcagcggccagcugcugugggacaccgugaccggcguggacauggcccuguga

SEQ ID NO: 190382 - RNA, 1401 nt, Artificial Sequence
  derived and/or modified CDS sequence (opt4) from neuraminidase__InfluenzaB__AHZ36855
augcugcccagcaccauccagacccugacccuguuccugaccagcggcggcgugcugcugagccuguacgugagcgccagccugagcuaccugcuguacagcgacauccugcugaaguucagccccaccgagaucaccgugcagaccaugccccuggacugcgccaacgccagcaacgugcaggccgugaacagaagcgccaccaagggcgugacccugcugccccccgagcccgaguggaccuaccccagacugagcugccccggcagcaccuuccagaaggcccugcugaucagcccccacagauucggcgagaccaagggcaacagcgccccccugaucaucagagagcccuucaucgccugcggccccaacgagugcaagcacuucgcccugacccacuacgccgcccagcccggcggcuacuacaacggcaccagaggcgacagaaacaagcugagacaccugaucagcgugaagcugggcaagauccccaccguggagaacagcaucuuccacauggccgccuggagcggcagcgccugccacgacggcaaggaguggaccuacaucggcguggacggccccgacaacaacgcccugcugaaggugaaguacggcgaggccuacaccgacaccuaccacagcuacgccaacaagauccugagaacccaggagagcgccugcaacugcaucggcggcaacugcuaccugaugaucaccgacggcagcgccagcggcgugagcgagugcagauuccugaagaucagagagggcagaaucaucaaggagaucuuccccaccggcagagugaagcacaccgaggagugcaccugcggcuucgccagcaacaagaccaucgagugcgccugcagagacaacagauacaccgccaagagacccuucgugaagcugaacguggagaccgacaccgccgagaucagacugaugugcaccgacaccuaccuggacacccccagacccaacgacggcagcaucaccggccccugcgagagcgacggcgacaagggcagcggcggcaucaagggcggcuucgugcaccagagaaugaagagcaagaucggcagaugguacagcagaaccaugagcaagaccgagagaaugggcaugggccuguacgugaaguacgacggcgaccccugggccgacagcgacgcccuggccuucagcggcgugauggugagcaugaaggagcccggcugguacagcuucggcuucgagaugaaggacaagaagugcgacgugcccugcaucggcaucgagauggugcacgacggcggcaaggagaccuggcacagcgccgccaccgccaucuacugccugaugggcagcggccagcugcugugggacaccgugaccggcguggacauggcccuguga

SEQ ID NO: 190383 - RNA, 1404 nt, Artificial Sequence; identical to SEQ ID NO: 190373
  derived and/or modified CDS sequence (opt4) from neuraminidase__InfluenzaB__AHZ36866

SEQ ID NO: 190384 - RNA, 1401 nt, Artificial Sequence
  derived and/or modified CDS sequence (opt4) from neuraminidase__InfluenzaB__AHZ36877
augcugcccagcaccauccagacccugacccuguuccugaccagcggcggcgugcugcugagccuguacgugagcgccagccugagcuaccugcuguacagcgacauccugcugaaguucagcccccccgagaucaccgcccccaccaugccccuggacugcgccaacgccagcaacgugcaggccgugaacagaagcgccaccaagggcgugacccugcugcugcccgagcccgaguggaccuaccccagacugagcugccccggcagcaccuuccagaaggcccugcugaucagcccccacagauucggcgagaccaagggcaacagcgccccccugaucaucagagagcccuucaucgccugcggccccaacgagugcaagcacuucgcccugacccacuacgccgcccagcccggcggcuacuacaacggcaccagaggcgacagaaacaagcugagacaccugaucagcgugaagcugggcaagauccccaccguggagaacagcaucuuccacauggccgccuggagcggcagcgccugccacgacggcaaggaguggaccuacaucggcguggacggccccgacaacaacgcccugcugaaggugaaguacggcgaggccuacaccgacaccuaccacagcuacgccaacaagauccugagaacccaggagagcgccugcaacugcaucggcggcaacugcuaccugaugaucaccgacggcagcgccagcggcgugagcgagugcagauuccugaagaucagagagggcagaaucaucaaggagaucuuccccaccggcagagugaagcacaccgaggagugcaccugcggcuucgccagcaacaagaccaucgagugcgccugcagagacaacagauacaccgccaagagacccuucgugaagcugaacguggagaccgacaccgccgagaucagacugaugugcaccgacaccuaccuggacacccccagacccaacgacggcagcaucaccggccccugcgagagcgacggcgacaagggcagcggcggcaucaagggcggcuucgugcaccagagaaugaagagcaagaucggcagaugguacagcagaaccaugagcaagaccgagagaaugggcaugggccuguacgugaaguacgacggcgaccccugggccgacagcgacgcccuggccuucagcggcgugauggugagcaugaaggagcccggcugguacagcuucggcuucgagaucaaggacaagaagugcgacgugcccugcaucggcaucgagauggugcacgacggcggcaaggagaccuggcacagcgccgccaccgccaucuacugccugaugggcagcggccagcugcugugggacaccgugaccggcguggacauggcccuguga

SEQ ID NO: 190385 - RNA, 1404 nt, Artificial Sequence; identical to SEQ ID NO: 190373
  derived and/or modified CDS sequence (opt4) from neuraminidase__InfluenzaB__AHZ36888

SEQ ID NO: 190386 - RNA, 1404 nt, Artificial Sequence; identical to SEQ ID NO: 190373
  derived and/or modified CDS sequence (opt4) from neuraminidase__InfluenzaB__AHZ36899

SEQ ID NO: 190387 - RNA, 1404 nt, Artificial Sequence; identical to SEQ ID NO: 190373
  derived and/or modified CDS sequence (opt4) from neuraminidase__InfluenzaB__AHZ36910

SEQ ID NO: 190388 - RNA, 1401 nt, Artificial Sequence; identical to SEQ ID NO: 190375
  derived and/or modified CDS sequence (opt4) from neuraminidase__InfluenzaB__AHZ36921

SEQ ID NO: 190389 - RNA, 1401 nt, Artificial Sequence
  derived and/or modified CDS sequence (opt4) from neuraminidase__InfluenzaB__AHZ36932
augcugcccagcaccauccagacccugacccuguuccugaccagcggcggcgugcugcugagccuguacgugagcgccagccugagcuaccugcuguacagcgacauccugcugaaguucagccccaccgagaucaccgcccagaccaugccccuggacugcgccaacgccagcaacgugcaggccgugaacagaagcgccaccaagggcgugacccugcugccccccgagcccgaguggaccuaccccagacugagcugccccggcagcaccuuccagaaggcccugcugaucagcccccacagauucggcgagaccaagggcaacagcgccccccugaucaucagagagcccuucaucgccugcggccccaacgagugcaagcacuucgcccugacccacuacgccgcccagcccggcggcuacuacaacggcaccagaggcgacagaaacaagcugagacaccugaucagcgugaagcugggcaagauccccaccguggagaacagcaucuuccacauggccgccuggagcggcagcgccugccacgacggcaaggaguggaccuacaucggcguggacggccccgacaacaacgcccugcugaaggugaaguacggcgaggccuacaccgacaccuaccacagcuacgccaacaagauccugagaacccaggagagcgccugcaacugcaucggcggcaacugcuaccugaugaucaccgacggcagcgccagcggcgugagcgagugcagauuccugaagaucagagagggcagaaucaucaaggagaucuuccccaccggcagagugaagcacaccgaggagugcaccugcggcuucgccagcaacaagaccauggagugcgccugcagagacaacagauacaccgccaagagacccuucgugaagcugaacguggagaccgacaccgccgagaucagacugaugugcaccgacaccuaccuggacacccccagacccaacgacggcagcaucaccggccccugcgagagcgacggcgacaagggcagcggcggcaucaagggcggcuucgugcaccagagaaugaagagcaagaucggcagaugguacagcagaaccaugagcaagaccgagagaaugggcaugggccuguacgugaaguacgacggcgaccccugggccgacagcgacgcccuggccuucagcggcgugauggugagcaugaaggagcccggcugguacagcuucggcuucgagaugaaggacaagaagugcgacgugcccugcaucggcaucgagauggugcacgacggcggcaaggagaccuggcacagcgccgccaccgccaucuacugccugaugggcagcggccagcugcugugggacaccgugaccggcguggacauggcccuguga

SEQ ID NO: 190390 - RNA, 1401 nt, Artificial Sequence
  derived and/or modified CDS sequence (opt4) from neuraminidase__InfluenzaB__AHZ36943
augcugcccagcaccauccagacccugacccuguuccugaccagcggcggcgugcugcugagccuguacgugagcgccagccugagcuaccugcuguacagcgacauccugcugaaguucagccccaccgagaucaccgcccccaccaugccccuggacugcgccaacgccagcaacgugcaggccgugaacagaagcgccaccaagggcgugacccugcugccccccgagcccgaguggaccuaccccagacugagcugccccggcagcaccuuccagaaggcccugcugaucagcccccacagauucggcgagaccaagggcaacagcgccccccugaucaucagagagcccuucaucgccugcggccccaacgagugcaagcacuucgcccugacccacuacgccgcccagcccggcggcuacuacaacggcaccagaggcgacagaaacaagcugagacaccugaucagcgugaagcugggcaagauccccaccguggagaacagcaucuuccacauggccgccuggagcggcagcgccugccacgacggcaaggaguggaccuacaucggcguggacggccccgacaacaacgcccugcugaaggugaaguacggcgaggccuacaccgacaccuaccacagcuacgccaacaagauccugagaacccaggagagcgccugcaacugcaucggcggcaacugcuaccugaugaucaccgacggcagcgccagcggcgugagcgagugcagauuccugaagaucagagagggcagaaucaucaaggagaucuuccccaccggcagagugaagcacaccgaggagugcaccugcggcuucgccagcaacaagaccaucgagugcgccugcagagacaacagauacaccgccaagagacccuucgugaagcugaacguggagaccgacaccgccgagaucagacugaugugcaccgacaccuaccuggacacccccagacccaacgacggcagcaucaccggccccugcgagagcgacggcgacaagggcagcggcggcaucaagggcggcuucgugcaccagagaaugaagagcaagaucggcagaugguacagcagaaccaugagcaagaccgagagaaugggcaugggccuguacgugaaguacgacggcgaccccugggccgacagcgacgcccuggccuucagcggcgugauggugagcaugaaggagcccggcugguacagcuucggcuucgagaugaaggacagaaagugcgacgugcccugcaucggcaucgagauggugcacgacggcggcaaggagaccuggcacagcgccgccaccgccaucuacugccugaugggcagcggccagcugcugugggacaccgugaccggcguggacauggcccuguga

SEQ ID NO: 190391 - RNA, 1404 nt, Artificial Sequence; identical to SEQ ID NO: 190373
  derived and/or modified CDS sequence (opt4) from neuraminidase__InfluenzaB__AHZ36954

SEQ ID NO: 190392 - RNA, 1401 nt, Artificial Sequence
  derived and/or modified CDS sequence (opt4) from neuraminidase__InfluenzaB__AHZ36965
augcugcccagcaccauccagacccugacccuguuccugaccagcggcggcgugcugcugagccuguacgugagcgccagccugagcuaccugcuguacagcgacauccugcugaaguucagcccccccgagaucaacgcccccaccaugccccuggacugcgccaacgccagcaacgugcaggccgugaacagaagcgccaccaagggcgugacccugcugcugcccgagcccgaguggaccuaccccagacugagcugccccggcagcaccuuccagaaggcccugcugaucagcccccacagauucggcgagaccaagggcaacagcgccccccugaucaucagagagcccuucaucgccugcggccccaacgagugcaagcacuucgcccugacccacuacgccgcccagcccggcggcuacuacaacggcaccagaggcgacagaaacaagcugagacaccugaucagcgugaagcugggcaagauccccaccguggagaacagcaucuuccacauggccgccuggagcggcagcgccugccacgacggcaaggaguggaccuacaucggcguggacggccccgacaacaacgcccugcugaaggugaaguacggcgaggccuacaccgacaccuaccacagcuacgccaacaagauccugagaacccaggagagcgccugcaacugcaucggcggcaacugcuaccugaugaucaccgacggcagcgccagcggcgugagcgagugcagauuccugaagaucagagagggcagaaucaucaaggagaucuuccccaccggcagagugaagcacaccgaggagugcaccugcggcuucgccagcaacaagaccaucgagugcgccugcagagacaacagauacaccgccaagagacccuucgugaagcugaacguggagaccgacaccgccgagaucagacugaugugcaccgacaccuaccuggacacccccagacccaacgacggcagcaucaccggccccugcgagagcgacggcgacaagggcagcggcggcaucaagggcggcuucgugcaccagagaaugaagagcaagaucggcagaugguacagcagaaccaugagcaagaccgagagaaugggcaugggccuguacgugaaguacgacggcgaccccugggccgacagcgacgcccuggccuucagcggcgugauggugagcaugaaggagcccggcugguacagcuucggcuucgagaucaaggacaagaagugcgacgugcccugcaucggcaucgagauggugcacgacggcggcaaggagaccuggcacagcgccgccaccgccaucuacugccugaugggcagcggccagcugcugugggacaccgugaccggcguggacauggcccuguga

SEQ ID NO: 190393 - RNA, 1404 nt, Artificial Sequence; identical to SEQ ID NO: 190373
  derived and/or modified CDS sequence (opt4) from neuraminidase__InfluenzaB__AHZ36976

SEQ ID NO: 190394 - RNA, 1404 nt, Artificial Sequence; identical to SEQ ID NO: 190373
  derived and/or modified CDS sequence (opt4) from neuraminidase__InfluenzaB__AHZ36987

SEQ ID NO: 190395 - RNA, 1401 nt, Artificial Sequence; identical to SEQ ID NO: 190376
  derived and/or modified CDS sequence (opt4) from neuraminidase__InfluenzaB__AHZ36998

SEQ ID NO: 190396 - RNA, 1401 nt, Artificial Sequence
  derived and/or modified CDS sequence (opt4) from neuraminidase__InfluenzaB__AHZ37009
augcugcccagcaccauccagacccugacccuguuccugacccugggcggcgugcugcugagccuguacgugagcgccagccugagcuaccugcuguacagcgacauccugcugaaguucagccccaccgagaucaccgcccccaccaugccccugggcugcgccaacgccagcaacgugcaggccgugaacagaagcgccaccaagggcgugacccugcugcugcccgagcccgaguggaccuaccccagacugagcugccccggcagcaccuuccagaaggcccugcugaucagcccccacagauucggcgagaccaagggcaacagcgccccccugaucaucagagagcccuucaucgccugcggccccaacgagugcaagcacuucgcccugacccacuacgccgcccagcccggcggcuacuacaacggcaccagaggcgacagaaacaagcugagacaccugaucagcgugaagcugggcaagauccccaccguggagaacagcaucuuccacauggccgccuggagcggcagcgccugccacgacggcaaggaguggaccuacaucggcguggacggccccgacaacaacgcccugcugaaggugaaguacggcgaggccuacaccgacaccuaccacagcuacgccaacaagauccugagaacccaggagagcgccugcaacugcaucggcggcaacugcuaccugaugaucaccgacggcagcgccagcggcgugagcgagugcagauuccugaagaucagagagggcagaaucaucaaggagaucuuccccaccggcagagugaagcacaccgaggagugcaccugcggcuucgccagcaacaagaccaucgagugcgccugcagagacaacagauacaccgccaagagacccuucgugaagcugaacguggaggccgacaccgccgagaucagacugaugugcaccgacaccuaccuggacacccccagacccaacgacggcagcaucaccggccccugcgagagcgacggcgacaagggcagcggcggcaucaagggcggcuucgugcaccagagaaugaagagcaagaucggcagaugguacagcagaaccaugagcaagaccgagagaaugggcaugggccuguacgugaaguacgacggcgaccccugggccgacagcgacgcccuggccuucagcggcgugauggugagcaugaaggagcccggcugguacagcuucggcuucgagaucaaggacaagaagugcgacgugcccugcaucggcaucgagauggugcacgacggcggcaaggagaccuggcacagcgccgccaccgccaucuacugccugaugggcagcggccagcugcugugggacaccgugaccggcguggacauggcccuguga

SEQ ID NO: 190397 - RNA, 1401 nt, Artificial Sequence; identical to SEQ ID NO: 190374
  derived and/or modified CDS sequence (opt4) from neuraminidase__InfluenzaB__AHZ37020

SEQ ID NO: 190398 - RNA, 1401 nt, Artificial Sequence; identical to SEQ ID NO: 190376
  derived and/or modified CDS sequence (opt4) from neuraminidase__InfluenzaB__AHZ37031

SEQ ID NO: 190399 - RNA, 1401 nt, Artificial Sequence; identical to SEQ ID NO: 190374
  derived and/or modified CDS sequence (opt4) from neuraminidase__InfluenzaB__AHZ37042

SEQ ID NO: 190400 - RNA, 1401 nt, Artificial Sequence; identical to SEQ ID NO: 190376
  derived and/or modified CDS sequence (opt4) from neuraminidase__InfluenzaB__AHZ37064

SEQ ID NO: 190401 - RNA, 1401 nt, Artificial Sequence; identical to SEQ ID NO: 190374
  derived and/or modified CDS sequence (opt4) from neuraminidase__InfluenzaB__AHZ37075

SEQ ID NO: 190402 - RNA, 1401 nt, Artificial Sequence; identical to SEQ ID NO: 190374
  derived and/or modified CDS sequence (opt4) from neuraminidase__InfluenzaB__AHZ37086

SEQ ID NO: 190403 - RNA, 1401 nt, Artificial Sequence
  derived and/or modified CDS sequence (opt4) from neuraminidase__InfluenzaB__AHZ37097
augcugcccagcaccauccagacccugacccuguuccugaccagcggcggcgugcugcugagccuguacgugagcgccagccugagcuaccugcuguacagcgacauccugcugaaguucagccccaccgagaucaccgcccccaccaugccccuggacugcgccaacgccagcaacgugcaggccgugaacagaagcgccaccaagggcgugacccugcugccccccgagcccgaguggaccuaccccagacugagcugccccggcagcaccuuccagaaggcccugcugaucagcccccacagauucggcgagaccaagggcaacagcgccccccugaucaucagagagcccuucaucgccugcggccccaacgagugcaagcacuucgcccugacccacuacgccgcccagcccggcggcuacuacaacggcaccagaggcgacagaaacaagcugagacaccugaucagcgugaagcugggcaagauccccaccguggagaacagcaucuuccacauggccgccuggagcggcagcgccugccacgacggcaaggaguggaccuacaucggcguggacggccccgacaacaacgcccugcugaaggugaaguacggcgaggccuacaccgacaccuaccacagcuacgccaacaagauccugagaacccaggagagcgccugcaacugcaucggcggcaacugcuaccugaugaucaccgacggcagcgccagcggcgugagcgagugcagauuccugaagaucagagagggcagaaucaucaaggagaucuuccccaccggcagagugaagcacaccgaggagugcaccugcggcuucgccagcaacaagaccaucgagugcgccugcagagacaacagauacaccgccaagagacccuucgugaagcugaacguggagaccgacaccgccgagaucagacugaugugcaccgacaccuaccuggacacccccagacccaacgacggcagcaucaccggccccugcgagagcgacggcgacaagggcagcggcggcaucaagggcggcuucgugcaccagagaaugaagagcaagaucggcagaugguacagcagaaccaugagcaagaccgagagaaugggcaugggccuguacgugaaguacgacggcgaccccugggccgacagcgacgcccuggccuucagcggcgugauggugagcaugaaggagcccggcugguacagcuucggcuucgagaugaaggacaagaagugcgacgugcccugcaucggcaucgagauggugcacgacggcggcaaggagaccuggcacagcgccgccaccgccaucuacugccugaugggcagcggccagcugcugugggacaccgugaccggcguggacauggcccuguga

SEQ ID NO: 190404 - RNA, 1401 nt, Artificial Sequence; identical to SEQ ID NO: 190374
  derived and/or modified CDS sequence (opt4) from neuraminidase__InfluenzaB__AHZ37108

SEQ ID NO: 190405 - RNA, 1401 nt, Artificial Sequence
  derived and/or modified CDS sequence (opt4) from neuraminidase__InfluenzaB__AHZ41774
augcugcccagcaccauccagaugcugacccuguuccugaccagcggcggcgugcugcugagccuguacgugagcgccagccugagcuaccugcuguacagcgacauccugcugaaguucagccccaccgagaucaccgcccccaccaugccccuggacugcgccaacgccagcaacgugcacgccgugaacagaagcgccaccaagggcgugaccuuccugcugcccgagcccgaguggaccuaccccagacugagcugccccggcagcaccuuccagaaggcccugcugaucagcccccacagauucggcgagaccaagggcaacagcgccccccugaucaucagagagcccuucaucgccugcggcagcaacgagugcagacacuucgcccugacccacuacgccgcccagcccggcggcuacuacaacggcaccagaggcgacagaaacaagcugagacaccugaucagcgugaagcugggcaagauccccaccguggagaacagcaucuuccacauggccgccuggagcggcagcgccugccacgacggcaaggaguggaccuacaucggcguggacggccccgacaacaacgcccugcugaagaucaaguacggcgaggccuacaccgacaccuaccacagcuacgccaacaacauccugagaacccaggagagcgccugcaacugcaucggcggcaacugcuaccugaugaucaccgacggcagcgccagcggcgugagcgagugcagauuccugaagaucagagagggcagaaucaucaaggagaucuuccccaccggcagagugaagcacaccgaggagugcaccugcggcuucgccagcaacaagaccaucgagugcgccugcagagacaacagcuacaccgccaagagacccuucgugaagcugaacguggagaccgacaccgccgagaucagacugaugugcaccgacaccuaccuggacacccccagacccgacgacggcagcaucaccggccccugcgagagcaacggcgacaagggcagcggcggcaucaagggcggcuucgugcaccagagaauggccagcaagaucggcagaugguacagcagaaccaugagcaagaccgagagaaagggcaugggccuguacgugaaguacgacggcgaccccuggaccgacaacgacgcccuggccuucagaggcgugauggugagcaugaaggagcccggcugguacagcuucggcuucgagaucaaggacaagaagugcgacgugcccugcaucggcaucgagauggugcacgacggcggcaaggagaccuggcacagcgccgccaccgccaucuacugccugaugggcagcggccagcugcugugggacaccgugaccggcguggacauggcccuguga

SEQ ID NO: 190406 - RNA, 1401 nt, Artificial Sequence; identical to SEQ ID NO: 189016
  derived and/or modified CDS sequence (opt4) from neuraminidase__InfluenzaB__AHZ41785

SEQ ID NO: 190407 - RNA, 1401 nt, Artificial Sequence; identical to SEQ ID NO: 189016
  derived and/or modified CDS sequence (opt4) from neuraminidase__InfluenzaB__AHZ41796

SEQ ID NO: 190408 - RNA, 1401 nt, Artificial Sequence
  derived and/or modified CDS sequence (opt4) from neuraminidase__InfluenzaB__AHZ41807
augcugcccagcaccauccagaugcugacccuguuccugaccagcggcggcgugcugcugagccuguacgugagcgccagccugagcuaccugcuguacagcgacauccugcugaaguucagccccaccgagaucaccgcccccaccaugccccuggacugcgccaacgccagcaacgugcacgccgugaacagaagcgccaccaagggcgugaccuuccugcugcccgagcccgaguggaccuaccccagacugagcugccccggcagcaccuuccagaaggcccugcugaucagcccccacagauucggcgagaccaagggcaacagcgccccccugaucaucagagagcccuucaucgccugcggccccaacgagugcaagcacuucgcccugacccacuacgccgcccagcccggcggcuacuacaacggcaccagaggcgacagaaacaagcugagacaccugaucagcgugaagcugggcaagauccccaccguggagaacagcaucuuccacauggccgccuggagcggcagcgccugccacgacggcaaggaguggaccuacaucggcguggacggccccgacaacaacgcccugcugaagaucaaguacggcgaggccuacaccgacaccuaccacagcuacgccaacaacauccugagaacccaggagagcgccugcaacugcaucgagggcaacugcuaccugaugaucaccgacggcagcgccagcggcgugagcgagugcagauuccugaagaucagagagggcagaaucaucaaggagaucuuccccaccggcagagugaagcacaccgaggagugcaccugcggcuucgccagcaacaagaccaucgagugcgccugcagagacaacagcuacaccgccaagagacccuucgugaagcugaacguggagaccgacaccgccgagaucagacugaugugcaccgacaccuaccuggacacccccagacccgacgacggcagcaucaccggccccugcgagagcaacggcgacaagggcagcggcggcaucaagggcggcuucgugcaccagagaauggccagcaagaucggcagaugguacagcagaaccaugagcaagaccgagagaaagggcaugggccuguacgugaaguacgacggcgaccccuggaccgacagcgacgcccuggccuucagaggcgugauggugagcaugaaggagcccggcugguacagcuucggcuucgagaucaaggacaagaagugcgacgugcccugcaucggcaucgagauggugcacgacggcggcaaggagaccuggcacagcgccgccaccgccaucuacugccugaugggcagcggccagcugcugugggacaccgugaccggcguggacauggcccuguga

SEQ ID NO: 190409 - RNA, 1401 nt, Artificial Sequence
  derived and/or modified CDS sequence (opt4) from neuraminidase__InfluenzaB__AHZ41818
augcugcccagcaccauccagacccugacccuguuccugaccagcggcggcgugcugcugagccuguacgugagcgccagccugagcuaccugcuguacagcgacauccugcugaaguucagccccaccgagaucaccgcccccaccaugccccuggacugcgccaacgccagcaacgugcaggccgugaacagaagcgccaccaagggcgugacccugcugcugcccgagcccgaguggaccuaccccagacugagcugccccggcagcaccuuccagaaggcccugcugaucagcccccacagauucggcgagaccaagggcaacagcgccccccugaucaucagagagcccuucaucgccugcggccccaacgagugcaagcacuucgcccugacccacuacgccgcccagcccggcggcuacuacaacggcaccagaggcgacagaaacaagcugagacaccugaucagcgugaagcugggcaagauccccaccguggagaacagcaucuuccacauggccgccuggagcggcagcgccugccacgacggcaaggaguggaccuacaucggcguggacggccccgacaacaacgcccugcugaaggugaaguacggcgaggccuacaccgacaccuaccacagcuacgccaacaagauccugagaacccaggagagcgccugcaacugcaucggcggcaacugcuaccugauggugaccgacggcagcgccagcggcgugagcgagugcagauuccugaagaucagagagggcagaaucaucaaggagaucuuccccaccggcagagugaagcacaccgaggagugcaccugcggcuucgccagcaacaagaccaucgagugcgccugcagagacaacagcuacaccgccaagagacccuucgugaagcugaacguggagaccgacaccgccgagaucagacugaugugcaccgacaccuaccuggacacccccagacccgacgacggcagcaucaccggccccugcgagagcaacggcgacaagggcagcggcggcaucaagggcggcuucgugcaccagagaauggagagcaagaucggcagaugguacagcagaaccaugagcaagaccgagagaaugggcaugggccuguacgugaaguacgacggcgaccccugggccgacagcgacgcccugguguucagcggcgugauggugagcaugaaggagcccggcugguacagcuucggcuucgagaucaaggacaagaagugcgacgugcccugcaucggcaucgagauggugcacgacggcggcaaggagaccuggcacagcgccgccaccgccaucuacugccugaugggcagcggccagcugcugugggacaccgugaccggcgugaacauggcccuguga

SEQ ID NO: 190410 - RNA, 1401 nt, Artificial Sequence; identical to SEQ ID NO: 189016
  derived and/or modified CDS sequence (opt4) from neuraminidase__InfluenzaB__AHZ41829

SEQ ID NO: 190411 - RNA, 1401 nt, Artificial Sequence
  derived and/or modified CDS sequence (opt4) from neuraminidase__InfluenzaB__AHZ41840
augcugcccagcaccauccagaugcugacccuguuccugaccagcggcggcgugcugcugagccuguacgugagcgccagccugagcuaccugcuguacagcgacauccugcugaaguucagccccaccgagaucaccgcccccaccaugccccuggacugcgccaacgccagcaacgugcacgccgugaacagaagcgccaccaagggcgugaccuuccugcugcccgagcccgaguggaccuaccccagacugagcugccccggcagcaccuuccagaaggcccugcugaucagcccccacagauucggcgagaccaagggcaacagcgccccccugaucaucagagagcccuucaucgccugcggccccaacgagugcagacacuucgcccugacccacuacgccgcccagcccggcggcuacuacaacggcaccagaggcgacagaaacaagcugagacaccugaucagcgugaagcugggcaagauccccaccguggagaacagcaucuuccacauggccgccuggagcggcagcgccugccacgacggcaaggaguggaccuacaucggcguggacggccccgacaacaacgcccugcugaagaucaaguacggcgaggccuacaccgacaccuaccacagcuacgccaacaacauccugagaacccaggagagcgccugcaacugcaucggcggcaacugcuaccugaugaucaccgacggcagcgccagcggcgugagcgagugcagauuccugaagaucagagagggcagaaucaucaaggagaucuuccccaccggcagagugaagcacaccgaggagugcaccugcggcuucgccagcaacaagaccaucgagugcgccugcagagacaacagcuacaccgccaagagacccuucgugaagcugaacguggagaccgacaccgccgagaucagacugaugugcaccgacaccuaccuggacacccccagacccgacgacggcagcaucaccggccccugcgagagcaacggcgacaagggcagcggcggcaucaagggcggcuucgugcaccagagaauggccagcaagaucggcagaugguacagcagaaccaugagcaagaccgagagaaagggcaugggccuguacgugaaguacgacggcgaccccuggaccgacagcgacgcccuggccuucagaggcgugauggugagcaugaaggagcccggcugguacagcuucggcuucgagaucaaggacaagaagugcgacgugcccugcaucggcaucgagauggugcacgacggcggcaaggagaccuggcacagcgccgccaccgccaucuacugccugaugggcagcggccagcugcugugggacaccgugaccggcguggacauggcccuguga

SEQ ID NO: 190412 - RNA, 1401 nt, Artificial Sequence; identical to SEQ ID NO: 189016
  derived and/or modified CDS sequence (opt4) from neuraminidase__InfluenzaB__AHZ41851

SEQ ID NO: 190413 - RNA, 1401 nt, Artificial Sequence; identical to SEQ ID NO: 190262
  derived and/or modified CDS sequence (opt4) from neuraminidase__InfluenzaB__AHZ41862

SEQ ID NO: 190414 - RNA, 1401 nt, Artificial Sequence
  derived and/or modified CDS sequence (opt4) from neuraminidase__InfluenzaB__AHZ41873
augcugcccagcaccauccagacccugacccuguuccugaccagcggcggcgugcugcugagccuguacgugagcgccagccugagcuaccugcuguacagcgacauccugcugaaguucagccccaccgagaucaccgcccccaccaugccccuggacugcgccaacgccagcaacgcccaggccgugaacagaagcgccaccaagggcgugacccugcugcugcccgagcccgaguggaccuaccccagacugagcugccccggcagcaccuuccagaaggcccugcugaucagcccccacagauucggcgagaccaagggcaacagcgccccccugaucaucagagagcccuucaucgccugcggccccaacgagugcaagcacuucgcccugacccacuacgccgcccagcccggcggcuacuacaacggcaccagaggcgacagaaacaagcugagacaccugaucagcgugaagcugggcaagauccccaccguggagaacagcaucuuccacauggccgccuggagcggcagcgccugccacgacggcaaggaguggaccuacaucggcguggacggccccgacaacaacgcccugcugaaggugaaguacggcgaggccuacaccgacaccuaccacagcuacgccaacaagauccugagaacccaggagagcgccugcaacugcaucggcggcaacugcuaccugaugaucaccgacggcagcgccagcggcgugagcgagugcagauuccugaagaucagagagggcagaaucaucaaggagaucuuccccaccggcagagugaagcacaccgaggagugcaccugcggcuucgccagcaacaagaccaucgagugcgccugcagagacaacagauacaccgccaagagacccuucgugaagcugaacguggagaccgacaccgccgagaucagacugaugugcaccgacaccuaccuggacacccccagacccaacgacggcagcaucaccggccccugcgagagcgacggcgacaagggcagcggcggcaucaagggcggcuucgugcaccagagaaugaagagcaagaucggcagaugguacagcagaaccaugagcaagaccgagagaaugggcaugggccuguacgugaaguacgacggcgaccccugggccgacagcgacgcccugaccuucagcggcgugauggugagcaugaaggagcccggcugguacagcuucggcuucgagaucaaggacaagaagugcgacgugcccugcaucggcaucgagauggugcacgacggcggcaaggagaccuggcacagcgccgccaccgccaucuacugccugaugggcagcggccagcugcugugggacaccgugaccggcguggacauggcccuguga

SEQ ID NO: 190415 - RNA, 1401 nt, Artificial Sequence; identical to SEQ ID NO: 188852
  derived and/or modified CDS sequence (opt4) from neuraminidase__InfluenzaB__AIL94981

SEQ ID NO: 190416 - RNA, 1401 nt, Artificial Sequence; identical to SEQ ID NO: 188852
  derived and/or modified CDS sequence (opt4) from neuraminidase__InfluenzaB__AIL94992

SEQ ID NO: 190417 - RNA, 1401 nt, Artificial Sequence; identical to SEQ ID NO: 188877
  derived and/or modified CDS sequence (opt4) from neuraminidase__InfluenzaB__AIL95003

SEQ ID NO: 190418 - RNA, 1401 nt, Artificial Sequence
  derived and/or modified CDS sequence (opt4) from neuraminidase__InfluenzaB__AIL95014
augcugcccagcaccauccagacccugacccuguuccugaccagcggcggcgugcugcugagccuguacgugagcgccagccugagcuaccugcuguacagcgacauccugcugaaguucagccagaccgagaucaccgcccccaucaugccccuggacugcgccaacgccagcaacgugcaggccgugaacagaagcgccgccaagggcgugacccugcugcugcccgagcccgaguggaccuaccccagacugagcugccccggcagcaccuuccagaaggcccugcugaucagcccccacagauucggcgagaccaagggcaacagcgccccccugaucaucagagagcccuucaucgccugcggccccaccgagugcaagcacuucgcccugacccacuacgccgcccagcccggcggcuacuacaacggcaccagagaggacagaaacaagcugagacaccugaucagcgugaagcugggcaagauccccaccguggagaacagcaucuuccacauggccgccuggagcggcagcgccugccacgacggcaaggaguggaccuacaucggcguggacggccccgacagcaacgcccugcugaagaucaaguacggcgaggccuacaccgacaccuaccacagcuacgccaagaacauccugagaacccaggagagcgccugcaacugcaucggcggcgacugcuaccugaugaucaccgacggccccgccagcggcgugagcgagugcagauuccugaagaucagagagggcagaaucaucaaggagaucuuccccaccggcagagugaagcacaccgaggagugcaccugcggcuucgccagcaacaagaccaucgagugcgccugcagagacaacagcuacaccgccaagagacccuucgugaagcugaacguggagaccgacaccgccgagaucagacugaugugcaccgagaccuaccuggacacccccagacccaacgacggcagcaucaccggccccugcgagagcgacggcgacaagggcagcggcggcaucaagggcggcuucgugcaccagagaauggccagcaagaucggcagaugguacagcagaaccaugagcaagaccaagagaaugggcaugggccuguacgugaaguacgacggcgaccccuggaccgacagcgaggcccuggcccugagcggcgugauggugagcauggaggagcccggcugguacagcuucggcuucgagaucaaggacaagaagugcgacgugcccugcaucggcaucgagauggugcacgacggcggcaagaccaccuggcacagcgccgccaccgccaucuacugccugaugggcagcggccagcugcugugggacaccgugaccggcguggacaugacccuguga

SEQ ID NO: 190419 - RNA, 1401 nt, Artificial Sequence; identical to SEQ ID NO: 188877
  derived and/or modified CDS sequence (opt4) from neuraminidase__InfluenzaB__AIL95025

SEQ ID NO: 190420 - RNA, 1401 nt, Artificial Sequence
  derived and/or modified CDS sequence (opt4) from neuraminidase__InfluenzaB__AIL95036
augcugagcagcaccauccagacccugacccuguuccugaccagcggcggcgugcugcugagccuguacgugagcgccagccugagcuaccugcuguacagcgacauccugcugaaguucagccccaaggagaucaccgcccccaccaugccccuggacugcgccaacgccagcaacgugcaggccgugaaccacagcgccaccaagggcgugacccugcugcugcccgagcccgaguggaccuaccccagacugagcugccccggcagcaccuuccagaaggcccugcugaucagcccccacagauucggcgagaccaagggcaacagcgccccccugaucaucagagagcccuucaucgccugcggccccaacgagugcaagcacuucgcccugacccacuacgccgcccagcccggcggcuacuacaacggcaccagaggcgacagaaacaagcugagacaccugaucagcgugaagcugggcaagauccccaccguggagaacagcaucuuccacauggccgccuggagcggcagcgccugccacgacggcaaggaguggaccuacaucggcguggacggccccgacaacaacgcccugcugaaggugaaguacggcgaggccuacaccgacaccuaccacagcuacgccaacaagauccugagaacccaggagagcgccugcaacugcaucggcggcaacugcuaccugaugaucaccgacggcagcgccagcggcgugagcgagugcagauuccugaagaucagagagggcagaaucaucaaggagaucuuccccaccggcagagugaagcacaccgaggagugcaccugcggcuucgccagcaacaagaccaucgagugcgccugcagagacaacagcuacaccgccaagagacccuucgugaagcugaacguggagaccgacaccgccgagaucagacugaugugcaccgacaccuaccuggacacccccagacccgacgacggcagcaucaccggccccugcgagagcaacggcgacaagggcagcggcggcaucaagggcggcuucgugcaccagagaauggagagcaagaucggcagaugguacagcagaaccaugagcaagaccgagagaaugggcaugggccuguacgugaaguacgacggcgaccccugggccgacagcgacgcccuggccuucagcggcgugauggugagcaugaaggagcccggcugguacagcuucggcuucgagaucaaggacaagaagugcgacgugcccugcaucggcaucgagauggugcacgacggcggcaaggagaccuggcacagcgccgccaccgccaucuacugccugaugggcagcggccagcugcugugggacaccgugaccggcguggacauggcccuguga

SEQ ID NO: 190421 - RNA, 1401 nt, Artificial Sequence; identical to SEQ ID NO: 188877
  derived and/or modified CDS sequence (opt4) from neuraminidase__InfluenzaB__AIL95047

SEQ ID NO: 190422 - RNA, 1401 nt, Artificial Sequence; identical to SEQ ID NO: 188986
  derived and/or modified CDS sequence (opt4) from neuraminidase__InfluenzaB__AIL95058

SEQ ID NO: 190423 - RNA, 1401 nt, Artificial Sequence; identical to SEQ ID NO: 188935
  derived and/or modified CDS sequence (opt4) from neuraminidase__InfluenzaB__AIL95069

SEQ ID NO: 190424 - RNA, 1401 nt, Artificial Sequence
  derived and/or modified CDS sequence (opt4) from neuraminidase__InfluenzaB__AIL95080
augcugcccagcaccauccagacccugacccuguuccugaccagcggcggcgugcugcugagccuguacgugagcgccagccugagcuaccugcuguacagcgacauccugcugaaguucagccccaaggagaucaccgcccccaccaugccccuggacugcgccaacgccagcaacgugcaggccgugaaccacagcgccaccaagggcgugacccugcugcugcccgagcccgaguggaccuaccccagacugagcugccccggcagcaccuuccagaaggcccugcugaucagcccccacagauucggcgagaccaagggcaacagcgccccccugaucaucagagagcccuucaucgccugcggccccaacgagugcaagcacuucgcccugacccacuacgccgcccagcccggcggcuacuacaacggcaccagaggcgacagaaacaagcugagacaccugaucagcgugaagcugggcaagauccccaccguggagaacagcaucuuccacauggccgccuggagcggcagcgccugcaacgacggcaaggaguggaccuacaucggcguggacggccccgacaacaacgcccugcugaaggugaaguacggcgaggccuacaccgacaccuaccacagcuacgccaacaagauccugagaacccaggagagcgccugcaacugcaucggcggcaacugcuaccugaugaucaccgacggcagcgccagcggcgugagcgagugcagauuccugaagaucagagagggcagaaucaucaaggagaucuuccccaccggcagagugaagcacaccgaggagugcaccugcggcuucgccagcaacaagaccaucgagugcgccugcagagacaacagcuacaccgccaagagacccuucgugaagcugaacguggagaccgacaccgccgagaucagacugaugugcaccgacaccuaccuggacacccccagacccgacgacggcagcaucaccggccccugcgagagcaacggcgacaagggcagcggcggcaucaagggcggcuucgugcaccagagaauggagagcaagaucggcagaugguacagcagaaccaugagcaagaccgagagaaugggcaugggccuguacgugaaguacgacggcgaccccugggccgacagcgacgcccuggccuucagcggcgugauggugagcaugaaggagcccggcugguacagcuucggcuucgagaucaaggacaagaagugcgacgugcccugcaucggcaucgagauggugcacgacggcggcaaggagaccuggcacagcgccgccaccgccaucuacugccugaugggcagcggccagcugcugugggacaccgugaccggcguggacauggcccuguga

SEQ ID NO: 190425 - RNA, 1401 nt, Artificial Sequence; identical to SEQ ID NO: 188935
  derived and/or modified CDS sequence (opt4) from neuraminidase__InfluenzaB__AIL95091

SEQ ID NO: 190426 - RNA, 1401 nt, Artificial Sequence; identical to SEQ ID NO: 188877
  derived and/or modified CDS sequence (opt4) from neuraminidase__InfluenzaB__AIL95102

SEQ ID NO: 190427 - RNA, 1401 nt, Artificial Sequence
  derived and/or modified CDS sequence (opt4) from neuraminidase__InfluenzaB__AIL95113
augcugcccagcaccauccagacccugacccuguuccugaccagcggcggcgugcugcugagccuguacgugagcgccagccugagcuaccugcuguacagcgacauccugcugaaguucagccccaccggcaucaccgcccccaccaugccccuggacugcgccaacgccagcaacgugcaggccgugaacagaagcgccaccaagggcgugacccugcugccccccgagcccgaguggaccuaccccagacugagcugccccggcagcaccuuccagaaggcccugcugaucagcccccacagauucggcgagaccaagggcaacagcgccccccugaucaucagagagcccuucaucgccugcggccccaacgagugcaagcacuucgcccugacccacuacgccgcccagcccggcggcuacuacaacggcaccagaggcgacagaaacaagcugagacaccugaucagcgugaagcugggcaagauccccaccguggagaacagcaucuuccacauggccgccuggagcggcagcgccugccacgacggcaaggaguggaccuacaucggcguggacggccccgacaacaacgcccugcugaaggugaaguacggcgaggccuacaccgacaccuaccacagcuacgccaacaagauccugagaacccaggagagcgccugcaacugcaucggcggcaacugcuaccugaugaucaccgacggcagcgccagcggcgugagcgagugcagauuccugaagaucagagagggcagaaucaucaaggagaucuuccccaccggcagagugaagcacaccgaggagugcaccugcggcuucgccagcaacaagaccaucgagugcgccugcagagacaacagauacaccgccaagagacccuucgugaagcugaacguggagaccgacaccgccgagaucagacugaugugcaccgacaccuaccuggacacccccagacccaacgacggcagcaucaccggccccugcgagagcgacggcgacaagggcagcggcggcaucaagggcggcuucgugcaccagagaaugaagagcaagaucggcagaugguacagcagaaccaugagcaagaccgagagaaugggcaugggccuguacgugaaguacgacggcgaccccugggccgacagcgacgcccuggccuucagcggcgugauggugagcaugaaggagcccggcugguacagcuucggcuucgagaugaaggacaagaagugcgacgugcccugcaucggcaucgagauggugcacgacggcggcaaggagaccuggcacagcgccgccaccgccaucuacugccugaugggcagcggccagcugcugugggacaccgugaccggcguggacauggcccuguga

SEQ ID NO: 190428 - RNA, 1401 nt, Artificial Sequence; identical to SEQ ID NO: 190374
  derived and/or modified CDS sequence (opt4) from neuraminidase__InfluenzaB__AIL95124

SEQ ID NO: 190429 - RNA, 1401 nt, Artificial Sequence
  derived and/or modified CDS sequence (opt4) from neuraminidase__InfluenzaB__AKA54777
augcugcccagcaccauccagacccugacccuguuccugaccagcggcggcgugcugcugagccuguacgugagcgccagccugagcuaccugcuguacagcgacauccugcugaaguucagcagaaccgaggugaccgcccccaucaugccccuggacugcgccaacgccagcaacgugcaggccgugaacagaagcgccaccaagggcgugaccccccugcugcccgagcccgaguggaccuaccccagacugagcugccccggcagcaccuuccagaaggcccugcugaucagcccccacagauucggcgagaccaagggcaacagcgccccccugaucaucagagagcccuucaucgccugcggccccaaggagugcaagcacuucgcccugacccacuacgccgcccagcccggcggcuacuacaacggcaccagagaggacagaaacaagcugagacaccugaucagcgugaagcugggcaagauccccaccguggagaacagcaucuuccacauggccgccuggagcggcagcgccugccacgacggcagagaguggaccuacaucggcguggacggccccgacagcaacgcccugcugaagaucaaguacggcgaggccuacaccgacaccuaccacagcuacgccaagaacauccugagaacccaggagagcgccugcaacugcaucggcggcgacugcuaccugaugaucaccgacggccccgccagcggcaucagcgagugcagauuccugaagaucagagagggcagaaucaucaaggagaucuuccccaccggcagagugaagcacaccgaggagugcaccugcggcuucgccagcaacaagaccaucgagugcgccugcagagacaacagcuacaccgccaagagacccuucgugaagcugaacguggagaccgacaccgccgagaucagacugaugugcaccaagaccuaccuggacacccccagacccaacgacggcagcaucaccggccccugcgagagcgacggcgacgagggcagcggcggcaucaagggcggcuucgugcaccagagaauggccagcaagaccggcagaugguacagcagaaccaugagcaagaccaagagaaugggcaugggccuguacgugaaguacgacggcgaccccuggaccgacagcgaggcccuggcccugagcggcgugauggugagcauggaggagcccggcugguacagcuucggcuucgagaucaaggacaagaagugcgacgugcccugcaucggcaucgagauggugcacgacggcggcaagaccaccuggcacagcgccgccaccgccaucuacugccugaugggcagcggccagcugcugugggacaccgugaccggcgugaacaugacccuguga

SEQ ID NO: 190430 - RNA, 1401 nt, Artificial Sequence
  derived and/or modified CDS sequence (opt4) from neuraminidase__InfluenzaB__AKA54781
augcugcccagcaccauccagacccugacccuguuccugaccagcggcggcgugcugcugagccuguacgugagcgccagccugagcuaccugcuguaccuggacauccugcugaaguuccccagcaccgagaucaccgcccccaccaugccccuggacugcgccaacgccagcaacgugcaggccgugaacagaagcgccaccaagggcgugaccuuccugcugcccgagcccgaguggaccuaccccagacugagcugccccggcagcaccuuccagaaggcccugcugaucagcccccacagauucggcgagaccaagggcaacagcgccccccugaucaucagagagcccuucaucgccugcggccccaaggagugcaagcacuucgcccugacccacuacgccgcccagcccggcggcuacuacaacggcaccagaggcgacagaaacaagcugagacaccugaucagcgugaagcugggcaagauccccaccguggagaacagcaucuuccacauggccgccuggagcggcagcgccugccacgacggcaaggaguggaccuacaucggcguggacggccccgacaacaacgcccugcugaagaucaaguacggcgaggccuacaccgacaccuaccacagcuacgccaacaacauccugagaacccaggagagcgccugcaacugcaucggcggcaacugcuaccugaugaucaccgacggcagcgccagcggcgugagcgagugcagauuccugaagaucagagagggcagaaucaugaaggagaucuuccccaccggcagaacccagcacaccgaggagugcaccugcggcuucgccagcaacaagaccaucgagugcgugugcagagacaacagcuacaccgccaagagacccuucgugaagcugaacguggagaccgacaccgccgagaucagacugaugugcaccaagaccuaccuggacacccccagacccgacgacggcagcaucaccggccccugcgagagcaacggcggcaagggcagcggcggcaucaagggcggcuucgugcaccagagaauggccagcaagaucggcagaugguacagcagaaccaugagcaagaccgagagaaagggcaugggccuguacgugaaguacaacggcgaccccugggccgacagcgacgcccugaccuucagcggcgugauggugagcauggaggagcccggcugguacagcuucggcuucgagaucaaggacaagaagugcgacgugcccugcaucggcaucgagauggugcacgacggcggcaaggagaccuggcacagcgccgccaccgccaucuacugccugaugggcagcggccagcugcugugggacaccgugaccggcgugaacaugacccuguga

SEQ ID NO: 190431 - RNA, 1401 nt, Artificial Sequence
  derived and/or modified CDS sequence (opt4) from neuraminidase__InfluenzaB__AKA54783
augcugcccagcaccauccagacccugacccuguuccugaccagcggcggcgugcugcugagccuguacgugagcgccagccugagcuaccugcuguacagcgacauccugcugaaguucagcagaaccgaggugaccgcccccaucaugccccuggacugcgccaacgccagcaacgugcaggccgugaacagaagcgccaccaagggcgugaccccccuguuccccgagcccgaguggaccuaccccagacugagcugccccggcagcaccuuccagaaggcccugcugaucagcccccacagauucggcgagaccaagggcaacagcgccccccugaucaucagagagcccuucaucgccugcggccccaaggagugcaagcacuucgcccugacccacuacgccgcccagcccggcggcuacuacaacggcaccagagaggacagaaacaagcugagacaccugaucagcgugaagcugggcaagauccccaccguggagaacagcaucuuccacauggccgccuggagcggcagcgccugccacgacggcagagaguggaccuacaucggcguggacggccccgacagcaacgcccugcugaagaucaaguacggcgaggccuacaccgacaccuaccacagcuacgccaagaacauccugagaacccaggagagcgccugcaacugcaucggcggcgacugcuaccugaugaucaccgacggccccgccagcggcaucagcgagugcagauuccugaagaucagagagggcagaaucaucaaggagaucuuccccaccggcagagugaagcacaccgaggagugcaccugcggcuucgccagcaacaagaccaucgagugcgccugcagagacaacagcuacaccgccaagagacccuucgugaagcugaacguggagaccgacaccgccgagaucagacugaugugcaccaagaccuaccuggacacccccagacccaacgacggcagcaucaccggccccugcgagagcgacggcgacgagggcagcggcggcaucaagggcggcuucgugcaccagagaauggccagcaagaucggcagaugguacagcagaaccaugagcaagaccaagagaaugggcaugggccuguacgugaaguacgacggcgaccccuggaccgacagcgaggcccuggcccugagcggcgugauggugagcauggaggagcccggcugguacagcuucggcuucgagaucaaggacaagaagugcgacgugcccugcaucggcaucgagauggugcacgacggcggcaagaccaccuggcacagcgccgccaccgccaucuacugccugaugggcagcggccagcugcugugggacaccgugaccggcgugaacaugacccuguga

SEQ ID NO: 190432 - RNA, 1401 nt, Artificial Sequence
  derived and/or modified CDS sequence (opt4) from neuraminidase__InfluenzaB__AKA54785
augcugcccagcaccauccagacccugacccuguuccugaccagcggcggcgugcugcugagccuguacgugagcgccagccugagcuaccugcuguacagcgacauccugcugaaguucagcagaaccgaggugaccgcccccaucaugccccuggacugcgccaacgccagcaacgugcaggccgugaacagaagcgccaccaagggcgugaccccccugcugcccgagcccgaguggaccuaccccagacugagcugccccggcagcaccuuccagaaggcccugcugaucagcccccacagauucggcgagaccaagggcaacagcgccccccugaucaucagagagcccuucaucgccugcggccccaaggagugcaagcacuucgcccugacccacuacgccgcccagcccggcggcuacuacaacggcaccagagaggacagaaacaagcugagacaccugaucagcgugaagcugggcaagauccccaccguggagaacagcaucuuccacauggccgccuggagcggcagcgccugccacgacggcagagaguggaccuacaucggcguggacggccccgacagcaacgcccugcugaagaucaaguacggcgaggccuacaccgacaccuaccacagcuacgccaagaacauccugagaacccaggagagcgccugcaacugcaucggcggcgacugcuaccugaugaucaccgacggccccgccagcggcaucagcgagugcagauuccugaagaucagagagggcagaaucaucaaggagaucuuccccaccggcagagugaagcacaccgaggagugcaccugcggcuucgccagcaacaagaccaucgagugcgccugcagagacaacagcuacaccgccaagagacccuucgugaagcugaacguggagaccgacaccgccgagaucagacugaugugcaccaagaccuaccuggacacccccagacccaacgacggcagcaucaccggccccugcgagagcgacggcaacgagggcagcggcggcaucaagggcggcuucgugcaccagagaauggccagcaagaucggcagaugguacagcagaaccaugagcaagaccaagagaaugggcaugggccuguacgugaaguacgacggcgaccccuggaccgacagcgaggcccuggcccugagcggcgugauggugagcauggaggagcccggcugguacagcuucggcuucgagaucaaggacaagaagugcgacgugcccugcaucggcaucgagauggugcacgacggcggcaagaccaccuggcacagcgccgccaccgccaucuacugccugaugggcagcggccagcugcugugggacaccgugaccggcgugaacaugacccuguga

SEQ ID NO: 190433 - RNA, 1401 nt, Artificial Sequence
  derived and/or modified CDS sequence (opt4) from neuraminidase__InfluenzaB__AKA54787
augcugcccagcaccauccagacccugacccuguuccugaccagcggcggcgugcugcugagccuguacgugagcgccagccugagcuaccugcuguacagcgacauccugcugaaguucagccagaccgagaucaccgcccccaucaugccccuggacugcgccaacgccagcaacgugcaggccgugaaccacagcgccgccaagggcgugacccugcugcugcccgagcccgaguggaccuaccccagacugagcugccccggcagcaccuuccagaaggcccugcugaucagcccccacagauucggcgagaucaagggcaacagcgccccccugaucaucagagagcccuucaucgccugcggccccaccgagugcaagcacuucgcccugacccacuacgccgcccagcccggcggcuacuacaacggcaccagagaggacagaaacaagcugagacaccugaucagcgugaagcugggcaagauccccaccguggagaacagcaucuuccacauggccgccuggagcggcagcgccugccacgacggcaaggaguggaccuacaucggcguggacggccccgacagcaacgcccugcugaagaucaaguacggcgaggccuacaccgacaccuaccacagcuacgccaagaacauccugagaacccaggagagcgccugcaacugcaucggcggcgacugcuaccugaugaucaccgacggccccgccagcggcgugagcgagugcagauuccugaagaucagagagggcagaaucaucaaggagaucuuccccaccggcagagugaagcacaccgaggagugcaccugcggcuucgccagcaacaagaccaucgagugcgccugcagagacaacagauacaccgccaagagacccuucgugaagcugaacguggagaccgacaccgccgagaucagacugaugugcaccgagaccuaccuggacacccccagacccaacgacggcagcaucaccggccccugcgagagcgacggcgacaagggcagcggcggcaucaagggcggcuucgugcaccagagaauggccagcaagaucggcagaugguacagcagaaccaugagcaagaccaagagaaugggcaugggccuguacgugaaguacgacggcgaccccuggaccgacagcgaggcccuggcccugagcggcgugauggugagcauggaggagcccggcugguacagcuucggcuucgagaucaaggacaagaagugcgacgugcccugcaucggcaucgagauggugcacgacggcggcaagaccaccuggcacagcgccgccaccgccaucuacugccugaugggcagcggccagcugcugugggacaccgugaccggcguggacauggcccuguga

SEQ ID NO: 190434 - RNA, 1401 nt, Artificial Sequence
  derived and/or modified CDS sequence (opt4) from neuraminidase__InfluenzaB__AKA54789
augcugcccagcaccauccagacccugacccuguuccugaccagcggcggcgugcugcugagccuguacgugagcgccagccugagcuaccugcuguacagcgacauccugcugaaguucagcagaaccgaggugaccgcccccaucaugccccuggacugcgccaacgccagcaacgugcaggccgugaacagaagcgccaccaagggcgugaccccccugcugcccgagcccgaguggaccuaccccagacugagcugccccggcagcaccuuccagaaggcccugcugaucagcccccacagauucggcgagaccaagggcaacagcgccccccugaucaucagagagcccuucaucgccugcggccccaaggagugcaagcacuucgcccugacccacuacgccgcccagcccggcggcuacuacaacggcaccagagaggacagaaacaagcugagacaccugaucagcgugaagcugggcaagauccccaccguggagaacagcaucuuccacauggccgccuggagcggcagcgccugccacgacggcagagaguggaccuacaucggcguggacggccccgacagcaacgcccugcugaagaucaaguacggcgaggccuacaccgacaccuaccacagcuacgccaagaacauccugagaacccaggagagcgccugcaacugcaucggcggcgacugcuaccugaugaucaccgacggccccgccagcggcaucagcgagugcagauuccugaagaucagagagggcagaaucaucaaggagaucuuccccaccggcagagugaagcacaccgaggagugcaccugcggcuucgccagcaacaagaccaucgagugcgccugcagagacaacagcuacaccgccaagagacccuucgugaagcugaacguggagaccgacaccgccgagaucagacugaugugcaccaagaccuaccuggacacccccagacccaacgacggcagcaucaccggccccugcgagagcgacggcgacgagggcagcggcggcaucaagggcggcuucgugcaccagagaauggccagcaagaucggcagaugguacagcagaaccaugagcaagaccaagagaaugggcaugggccuguacgugaaguacgacggcgaccccuggaccgacagcgaggcccuggcccugagcggcgugauggugagcauggaggagcccggcugguacagcuucggcuucgagaucaaggacaagaagugcgacgugcccugcaucggcaucgagauggugcacgacggcggcaagaccaccuggcacagcgccgccaccgccaucuacugccugaugggcagcggccagcugcugugggacaccgugaccggcgugaacaugacccuguga

SEQ ID NO: 190435 - RNA, 1401 nt, Artificial Sequence
  derived and/or modified CDS sequence (opt4) from neuraminidase__InfluenzaB__AKA54791
augcugcccagcaccauccagacccugacccuguuccugaccagcggcggcgugcugcugagccuguacgugagcgccagccugagcuaccugcuguacagcgacauccugcugaaguucagcagaaccgaggugaccgcccccaucaugccccuggacugcgccaacgccagcaacgcccaggccgugaacagaagcgccaccaagggcgugaccccccugcugcccgagcccgaguggaccuaccccagacugagcugccccggcagcaccuuccagaaggcccugcugaucagcccccacagauucggcgagaccaagggcaacagcgccccccugaucaucagagagcccuucaucgccugcggccccaaggagugcaagcacuucgcccugacccacuacgccgcccagcccggcggcuacuacaacggcaccagagaggacagaaacaagcugagacaccugaucagcgugaagcugggcaagauccccaccguggagaacagcaucuuccacauggccgccuggagcggcagcgccugccacgacggcagagaguggaccuacaucggcguggacggccccgacagcaacgcccugcugaagaucaaguacggcgaggccuacaccgacaccuaccacagcuacgccaagaacauccugagaacccaggagagcgccugcaacugcaucggcggcgacugcuaccugaugaucaccgacggccccgccagcggcaucagcgagugcagauuccugaagaucagagagggcagaaucaucaaggagaucuuccccaccggcagagugaagcacaccgaggagugcaccugcggcuucgccagcaacaagaccaucgagugcgccugcagagacaacagcuacaccgccaagagacccuucgugaagcugaacguggagaccgacaccgccgagaucagacugaugugcaccaagaccuaccuggacacccccagacccaacgacggcagcaucaccggccccugcgagagcgacggcgacgagggcagcggcggcaucaagggcggcuucgugcaccagagaauggccagcaagaucggcagaugguacagcagaaccaugagcaagaccaagagaaugggcaugggccuguacgugaaguacgacggcgaccccuggaccgacagcgaggcccuggcccugagcggcgugauggugagcauggaggagcccggcugguacagcuucggcuucgagaucaaggacaagaagugcgacgugcccugcaucggcaucgagauggugcacgacggcggcaagaccaccuggcacagcgccgccaccgccaucuacugccugaugggcagcggccagcugcugugggacaccgugaccggcgugaacaucacccuguga

SEQ ID NO: 190436 - RNA, 1401 nt, Artificial Sequence; identical to SEQ ID NO: 190433
  derived and/or modified CDS sequence (opt4) from neuraminidase__InfluenzaB__AKA54793

SEQ ID NO: 190437 - RNA, 1401 nt, Artificial Sequence; identical to SEQ ID NO: 190433
  derived and/or modified CDS sequence (opt4) from neuraminidase__InfluenzaB__AKA54795

SEQ ID NO: 190438 - RNA, 1401 nt, Artificial Sequence; identical to SEQ ID NO: 190434
  derived and/or modified CDS sequence (opt4) from neuraminidase__InfluenzaB__AKA54797

SEQ ID NO: 190439 - RNA, 1401 nt, Artificial Sequence
  derived and/or modified CDS sequence (opt4) from neuraminidase__InfluenzaB__AKA54799
augcugcccagcaccauccagacccugacccuguuccugaccagcggcggcgugcugcugagccuguacgugagcgccagccugagcuaccugcuguacagcgacauccugcugaaguucagccagaccgagaucaccgcccccaucaugccccuggacugcgccaacgccagcaacgugcaggccgugaaccacagcgccgccaagggcgugacccugcugcugcccgagcccgaguggaccuaccccagacugagcugccccggcagcaccuuccagaaggcccugcugaucagcccccacagauucggcgagaucaagggcaacagcgccccccugaucaucagagagcccuucaucgccugcggccccaccgagugcaagcacuucgcccugacccacuacgccgcccagcccggcggcuacuacaacggcaccagagaggacagaaacaagcugagacaccugaucagcgugaagcugggcaagauccccaccguggagaacagcaucuuccacauggccgccuggagcggcagcgccugccacgacggcaaggaguggaccuacaucggcguggacggccccgacagcaacgcccugcugaagaucaaguacggcgaggccuacaccgacaccuaccacagcuacgagaagaacauccugagaacccaggagagcgccugcaacugcaucggcggcgacugcuaccugaugaucaccgacggccccgccagcggcgugagcgagugcagauuccugaagaucagagagggcagaaucaucaaggagaucuuccccaccggcagagugaagcacaccgaggagugcaccugcggcuucgccagcaacaagaccaucgagugcgccugcagagacaacagauacaccgccaagagacccuucgugaagcugaacguggagaccgacaccgccgagaucagacugaugugcaccgagaccuaccuggacacccccagacccaacgacggcagcaucaccggccccugcgagagcgacggcgacaagggcagcggcggcaucaagggcggcuucgugcaccagagaauggccagcaagaucggcagaugguacagcagaaccaugagcaagaccaagagaaugggcaugggccuguacgugaaguacgacggcgaccccuggaccgacagcgaggcccuggcccugagcggcgugauggugagcauggaggagcccggcugguacagcuucggcuucgagaucaaggacaagaagugcgacgugcccugcaucggcaucgagauggugcacgacggcggcaagaccaccuggcacagcgccgccaccgccaucuacugccugaugggcagcggccagcugcugugggacaccgugaccggcguggacauggcccuguga

SEQ ID NO: 190440 - RNA, 1401 nt, Artificial Sequence; identical to SEQ ID NO: 190434
  derived and/or modified CDS sequence (opt4) from neuraminidase__InfluenzaB__AKA54801

SEQ ID NO: 190441 - RNA, 1401 nt, Artificial Sequence
  derived and/or modified CDS sequence (opt4) from neuraminidase__InfluenzaB__AKA54803
augcugcccagcaccauccagacccugacccuguuccugaccagcggcggcgugcugcugagccuguacgugagcgccagccugagcuaccugcuguacagcgacauccugcugaaguucagcagaaccgaggugaccgcccccaucaugccccuggacugcgccaacgccagcaacgugcaggccgugaacagaagcgccaccaacggcgugaccccccugcugcccgagcccgaguggaccuaccccagacugagcugccccggcagcaccuuccagaaggcccugcugaucagcccccacagauucggcgagaccaagggcaacagcgccccccugaucaucagagagcccuucaucgccugcggccccaaggagugcaagcacuucgcccugacccacuacgccgcccagcccggcggcuacuacaacggcaccagagaggacagaaacaagcugagacaccugaucagcgugaagcugggcaagauccccaccguggagaacagcaucuuccacauggccgccuggagcggcagcgccugccacgacggcagagaguggaccuacaucggcguggacggccccgacagcaacgcccugcugaagaucaaguacggcgaggccuacaccgacaccuaccacagcuacgccaagaacauccugagaacccaggagagcgccugcaacugcaucggcggcgacugcuaccugaugaucaccgacggccccgccagcggcaucagcgagugcagauuccugaagaucagagagggcagaaucaucaaggagaucuuccccaccggcagagugaagcacaccgaggagugcaccugcggcuucgccagcaacaagaccaucgagugcgccugcagagacaacagcuacaccgccaagagacccuucgugaagcugaacguggagaccgacaccgccgagaucagacugaugugcaccaagaccuaccuggacacccccagacccaacgacggcagcaucaccggccccugcgagagcgacggcgacgagggcagcggcggcaucaagggcggcuucgugcaccagagaauggccagcaagaucggcagaugguacagcagaaccaugagcaagaccaagagaaugggcaugggccuguacgugaaguacgacggcgaccccuggaccgacagcgaggcccuggcccugagcggcgugauggugagcauggaggagcccggcugguacagcuucggcuucgagaucaaggacaagaagugcgacgugcccugcaucggcaucgagauggugcacgacggcggcaagaccaccuggcacagcgccgccaccgccaucuacugccugaugggcagcggccagcugcugugggacaccgugaccggcgugaacaugacccuguga

SEQ ID NO: 190442 - RNA, 1401 nt, Artificial Sequence; identical to SEQ ID NO: 190434
  derived and/or modified CDS sequence (opt4) from neuraminidase__InfluenzaB__AKA54805

SEQ ID NO: 190443 - RNA, 1401 nt, Artificial Sequence
  derived and/or modified CDS sequence (opt4) from neuraminidase__InfluenzaB__AKA54807
augcugcccagcaccauccagacccugacccuguuccugaccagcggcggcgugcugcugagccuguacgugagcgccagccugagcuaccugcuguacagcgacauccugcugaaguucagcagaaccgaggugaccgcccccaucaugccccuggacugcgccaacgccagcaacgugcaggccgugaacagaagcgccaccaagggcgugaccccccugcugcccgagcccgaguggaccuaccccagacugagcugccccggcagcaccuuccagaaggcccugcugaucagcccccacagauucggcgagaccaagggcaacagcgccccccugaucaucagagagcccuucaucgccugcggccccaaggagugcaagcacuucgcccugacccacuacgccgcccagcccggcggcuacuacaacggcaccagagaggacagaaacaagcugagacaccugaucagcgugaagcugggcaagauccccaccguggagaacagcaucuuccacauggccgccuggagcggcagcgccugccacgacggcagagaguggaccuacaucggcguggacggccccgacagcaacgcccugcugaagaucaaguacggcgaggccuacaccgacaccuaccacagcuacgccaagaacauccugagaacccaggagagcgccugcaacugcaucggcggcgacugcuaccugaugaucaccgacggccccgccagcggcaucagcgagugcagauuccugaagaucagagagggcagaaucaucaaggagaucuuccccaccggcagagugaagcacaccgaggagugcaccugcggcuucgccagcaacaagaccaucgagugcgccugcagagacaacagcuacaccgccaagagacccuucgugaagcugaacguggagaccgacaccgccgagaucagacugaugugcaccaagaccuaccuggacacccccagacccaacgacggcagcaucaccggccccugcgagagcgacggcgacgagggcagcggcggcaucaagggcggcuucgugcaccagagaauggccagcaagaucggcagaugguacagcagaaccaugagcaagaccaagagaaugggcaugggccuguacgugaaguacgacggcgaccccuggaccgacagcgaggcccuggcccugagcggcgugauggugagcauggaggagcccggcugguacagcuucggcuucgagaucaaggacaagaagugcgacgugcccugcaucggcaucgagauggugcacgacggcggcaagaccaccuggcacagcgccgccaccgccaucuacugccugaugggcagcggccagcugcugugggacaccgugaccggcgugaacaucacccuguga

SEQ ID NO: 190444 - RNA, 1401 nt, Artificial Sequence
  derived and/or modified CDS sequence (opt4) from neuraminidase__InfluenzaB__AKA54809
augcugcccagcaccauccagacccugacccuguuccugaccagcggcggcgugcugcugagccuguacgugagcgccagccugagcuaccugcuguacagcgacauccugcugaaguucagcagaaccgaggugaccgcccccaucaugccccuggacugcgccaacgccagcaacgugcaggccgugaacagaagcgccaccaagggcgugaccccccugcugcccgagcccgaguggaccuaccccagacugagcugccccggcagcaccuuccagaaggcccugcugaucagcccccacagauucggcgagaccaagggcaacagcgccccccugaucaucagagagcccuucaucgccugcggccccaaggagugcaagcacuucgcccugacccacuacgccgcccagcccggcggcuacuacaacggcaccagagaggacagaaacaagcugagacaccugaucagcgugaagcugggcaagauccccaccguggagaacagcaucuuccacauggccgccuggagcggcagcgccugccacgacggcagagaguggaccuacaucggcguggacggccccgacagcaacgcccugcugaagaucaaguacggcgaggccuacaccgacaccuaccacagcuacgccaagaacauccugagaacccaggagagcgccugcaacugcaucggcggcgacugcuaccugaugaucaccgacggccccgccagcggcaucagcgagugcagauuccugaagaucagagagggcagaaucaucaaggagaucuuccccaccggcagagugaagcacaccgaggagugcaccugcggcuucgccagcaacaagaccaucgagugcgccugcagagacaacagcuacaccgccaagagacccuucgugaagcugaacguggagaccgacaccgccgagaucagacugaugugcaccaagaccuaccuggacacccccagacccaacgacggcagcaucaccggccccugcgagagcgacggcgacgagggcagcggcggcaucaagggcggcuucgugcaccagagaauggccuucaagaucggcagaugguacagcagaaccaugagcaagaccaagagaaugggcaugggccuguacgugaaguacgacggcgaccccuggaccgacagcgaggcccuggcccugagcggcgugauggugagcauggaggagcccggcugguacagcuucggcuucgagaucaaggacaagaagugcgacgugcccugcaucggcaucgagauggugcacgacggcggcaagaccaccuggcacagcgccgccaccgccaucuacugccugaugggcagcggccagcugcugugggacaccgugaccggcgugaacaugacccuguga

SEQ ID NO: 190445 - RNA, 1401 nt, Artificial Sequence; identical to SEQ ID NO: 190434
  derived and/or modified CDS sequence (opt4) from neuraminidase__InfluenzaB__AKA54811

SEQ ID NO: 190446 - RNA, 1401 nt, Artificial Sequence
  derived and/or modified CDS sequence (opt4) from neuraminidase__InfluenzaB__AKA54813
augcugcccagcaccauccagacccugacccuguuccugaccagcggcggcgugcugcugagccuguacgugagcgccagccugagcuaccugcuguacagcgacauccugcugaaguucagcagaaccgaggugaccgcccccaucaugccccuggacugcgccaacgccagcaacgugcaggccgugaacagaagcgccaccaagggcgugaccccccugcugcccgagcccgaguggaccuaccccagacugagcugccccggcagcaccuuccagaaggcccugcugaucagcccccacagauucggcgagaccaagggcaacagcgccccccugaucaucagagagcccuucaucgccugcggccccaaggagugcaagcacuucgcccugacccacuacgccgcccagcccggcggcuacuacaacggcaccagagaggacagaaacaagcugagacaccugaucagcgugaagcugggcaagauccccaccguggagaacagcaucuuccacauggccgccuggagcggcagcgccugccacgacggcagagaguggaccuacaucggcguggacggccccgacagcaacgcccugcugaagaucaaguacggcgaggccuacaccgacaccuaccacagcuacgccaagaacauccugagaacccaggagagcgccugcaacugcaucggcggcgacugcuaccugaugaucaccgacggccccgccagcggcaucagcgagugcagauuccugaagaucagagagggcagaaucaucaaggagaucuuccccaccggcagagugaagcacaccgaggagugcaccugcggcuucgccagcaacaagaccaucgagugcgccugcagagacaacagcuacaccgccaagagacccuucgugaagcugaacguggagaccgacaccgccgagaucagacugaugugcaccaagaccuaccuggacacccccagacccaacgacggcagcaucaccggccccugcgagagcgacggcgacgagggcagcggcggcaucaagggcggcuucgugcaccagagaauggccagcaagaucggcagaugguacagcagaaccaugagcaagaccaagagaaugggcaugggccuguacgugaaguacgacggcgaccccuggaccgacagcgaggcccuggcccugagcggcgugauggugagcaucgaggagcccggcugguacagcuucggcuucgagaucaaggacaagaagugcgacgugcccugcaucggcaucgagauggugcacgacggcggcaagaccaccuggcacagcgccgccaccgccaucuacugccugaugggcagcggccagcugcugugggacaccgugaccggcgugaacaugacccuguga

SEQ ID NO: 190447 - RNA, 1401 nt, Artificial Sequence; identical to SEQ ID NO: 190434
  derived and/or modified CDS sequence (opt4) from neuraminidase__InfluenzaB__AKA54815

SEQ ID NO: 190448 - RNA, 1401 nt, Artificial Sequence
  derived and/or modified CDS sequence (opt4) from neuraminidase__InfluenzaB__AKA54817
augcugcccagcaccauccagacccugacccuguuccugaccagcggcggcgugcugcugagccuguacgugagcgccagccugagcuaccugcuguacagcgacauccugcugaaguucagcagaaccgaggugaccgcccccaucaugccccuggacugcgccaacgccagcaacgugcaggccgugaacagaagcgccaccaagggcgugaccccccugcugcccgagcccgaguggaccuaccccagacugagcugccccggcagcaccuuccagaaggcccugcugaucagcccccacagauucggcgagaccaagggcaacagcgccccccugaucaucagagagcccuucaucgccugcggccccaaggagugcaagcacuucgcccugacccacuacgccgcccagcccggcggcuacuacaacggcaccagagaggacagaaacaagcugagacaccugaucagcgugaagcugggcaagauccccaccguggagaacagcaucuuccacauggccgccuggagcggcagcgccugccacgacggcagagaguggaccuacaucggcguggacggccccgacagcaacgcccugcugaagaucaaguacggcgaggccuacaccgacaccuaccacagcuacgccaagaacauccugagaacccaggagagcgccugcaacugcaucggcggcgacugcuaccugaugaucaccgacggccccgccagcggcaucagcgagugcagauuccugaagaucagagagggcagaaucaucaaggagaucuuccccaccggcagagugaagcacaccgaggagugcaccugcggcuucgccagcaacaagaccaucgagugcgccugcagagacaacagcuacaccgccaagagacccuucgugaagcugaacguggagaccgacaccgccgagaucagacugaugugcaccaagaccuaccuggacacccccagacccaacgacggcagcaucaccggccccugcgagagcgacggcgacgagggcagcggcggcaucaagggcggcuucgugcaccagagaauggccagcaagaucggcagaugguacagcagaaccaugagcaagaccaagagaaugggcaugggccuguacgugaaguacgacggcgaccccuggaccgacagcgaggcccuggcccugagcggcgugauggugagcauggaggagcccggcugguacagcuucggcuucgagaucaaggacaagaagugcgacgugcccugcaucggcguggagauggugcacgacggcggcaagaccaccuggcacagcgccgccaccgccaucuacugccugaugggcagcggccagcugcugugggacaccgugaccggcgugaacaugacccuguga

SEQ ID NO: 190449 - RNA, 1401 nt, Artificial Sequence; identical to SEQ ID NO: 190434
  derived and/or modified CDS sequence (opt4) from neuraminidase__InfluenzaB__AKA54819

SEQ ID NO: 190450 - RNA, 1401 nt, Artificial Sequence; identical to SEQ ID NO: 190434
  derived and/or modified CDS sequence (opt4) from neuraminidase__InfluenzaB__AKA54821

SEQ ID NO: 190451 - RNA, 1401 nt, Artificial Sequence; identical to SEQ ID NO: 190434
  derived and/or modified CDS sequence (opt4) from neuraminidase__InfluenzaB__AKA54823

SEQ ID NO: 190452 - RNA, 1401 nt, Artificial Sequence; identical to SEQ ID NO: 190434
  derived and/or modified CDS sequence (opt4) from neuraminidase__InfluenzaB__AKA54825

SEQ ID NO: 190453 - RNA, 1401 nt, Artificial Sequence; identical to SEQ ID NO: 190434
  derived and/or modified CDS sequence (opt4) from neuraminidase__InfluenzaB__AKA54827

SEQ ID NO: 190454 - RNA, 1401 nt, Artificial Sequence
  derived and/or modified CDS sequence (opt4) from neuraminidase__InfluenzaB__AKA54829
augcugcccagcaccauccagacccugacccuguuccugaccagcggcggcgugcugcugagccuguacgugagcgccagccugagcuaccugcuguacagcgacauccugcugaagcugagcagaaccgaggugaccgcccccaucaugccccuggacugcgccaacgccagcaacgugcaggccgugaacagaagcgccaccaagggcgugaccccccugcugcccgagcccgaguggaccuaccccagacugagcugccccggcagcaccuuccagaagacccugcugaucagcccccacagauucggcgagaccaagggcaacagcgccccccugaucaucagagagcccuucaucgccugcggccccaaggagugcaagcacuucgcccugacccacuacgccgcccagcccggcggcuacuacaacggcaccagagaggacagaaacaagcugagacaccugaucagcgugaagcugggcaagauccccaccguggagaacagcaucuuccacauggccgccuggagcggcagcgccugccacgacggcagagaguggaccuacaucggcguggacggccccgacagcaacgcccugcugaagaucaaguacggcgaggccuacaccgacaccuaccacagcuacgccaagaacauccugagaacccaggagagcgccugcaacugcaucggcggcgacugcuaccugaugaucaccgacggccccgccagcggcaucagcgagugcagauuccugaagaucagagagggcagaaucaucaaggagaucuuccccaccggcagagugaagcacaccgaggagugcaccugcggcuucgccagcaacaagaccaucgagugcgccugcagagacaacagcuacaccgccaagagacccuucgugaagcugaacguggagaccgacaccgccgagaucagacugaugugcaccaagaccuaccuggacacccccagacccaacgacggcagcaucaccggccccugcgagagcgacggcgacgagggcagcggcggcaucaagggcggcuucgugcaccagagaauggccagcaagaucggcagaugguacagcagaaccaugagcaagaccaagagaaugggcaugggccuguacgugaaguacgacggcgaccccuggaccgacagcgaggcccuggcccugagcggcgugauggugagcauggaggagcccggcugguacagcuucggcuucgagaucaaggacaagaagugcgacgugcccugcaucggcaucgagauggugcacgacggcggcaagaccaccuggcacagcgccgccaccgccaucuacugccugaugggcagcggccagcugcugugggacaccgugaccggcgugaacaugacccuguga

SEQ ID NO: 190455 - RNA, 1401 nt, Artificial Sequence
  derived and/or modified CDS sequence (opt4) from neuraminidase__InfluenzaB__AKA54831
augcugcccagcaccauccagacccugacccuguuccugaccagcggcggcgugcugcugagccuguacgugagcgccagccugagcuaccugcuguacagcgacauccugcugaaguucagcagaaccgaggugaccgcccccaucaugccccuggacugcgccaacgccagcaacgugcaggccgugaacagaagcgccaccaagggcgugaccccccugcugcccgagcccgaguggaccuaccccagacugagcugccccggcagcaccuuccagaaggcccugcugaucagcccccacagauucggcgagaccaagggcaacagcgccccccugaucaucagagagcccuucaucgccugcggccccaaggagugcaagcacuucgcccugacccacuacgccgcccagcccggcggcuacuacaacggcaccagagaggacagaaacaagcugagacaccugaucagcgugaagcugggcaagauccccaccguggagaacagcaucuuccacauggccgccuggagcggcagcgccugccacgacggcagagaguggaccuacaucggcguggacggccaggacagcaacgcccugcugaagaucaaguacggcgaggccuacaccgacaccuaccacagcuacgccaagaacauccugagaacccaggagagcgccugcaacugcaucggcggcgacugcuaccugaugaucaccgacggccccgccagcggcaucagcgagugcagauuccugaagaucagagagggcagaaucaucaaggagaucuuccccaccggcagagugaagcacaccgaggagugcaccugcggcuucgccagcaacaagaccaucgagugcgccugcagagacaacagcuacaccgccaagagacccuucgugaagcugaacguggagaccgacaccgccgagaucagacugaugugcaccaagaccuaccuggacacccccagacccaacgacggcagcaucaccggccccugcgagagcgacggcgacgagggcagcggcggcaucaagggcggcuucgugcaccagagaauggccagcaagaucggcagaugguacagcagaaccaugagcaagaccaagagaaugggcaugggccuguacgugaaguacgacggcgaccccuggaccgacagcgaggcccuggcccugagcggcgugauggugagcauggaggagcccggcugguacagcuucggcuucgagaucaaggacaagaagugcgacgugcccugcaucggcaucgagauggugcacgacggcggcaagaccaccuggcacagcgccgccaccgccaucuacugccugaugggcagcggccagcugcugugggacaccgugaccggcgugaacaugacccuguga

SEQ ID NO: 190456 - RNA, 1401 nt, Artificial Sequence; identical to SEQ ID NO: 190434
  derived and/or modified CDS sequence (opt4) from neuraminidase__InfluenzaB__AKA54833

SEQ ID NO: 190457 - RNA, 1401 nt, Artificial Sequence
  derived and/or modified CDS sequence (opt4) from neuraminidase__InfluenzaB__AKA54837
augcugcccagcaccauccagacccugacccuguuccugaccagcggcggcgugcugcugagccuguacgugagcgccagccugagcuaccugcuguacagcgacauccugcugaaguucagccccaccgagaucaccgcccccaccaugccccuggacugcgccaacgccagcaacgugcaggccgugaacagaagcgccaccaagggcgugacccugcugcugcccgagcccgaguggaccuaccccagacugagcugccccggcagcaccuuccagaaggcccugcugaucagcccccacagauucggcgagaccaacggcaacagcgccccccugaucgugagagagcccuucaucgccugcggccccaacgagugcaagcacuucgcccugacccacuacgccgcccagcccggcggcuacuacaacggcaccagaggcgacagaaacaagcugagacaccugaucagcgugaagcugggcaagauccccaccguggagaacagcaucuuccacauggccgccuggagcggcagcgccugccacgacggcaaggaguggaccuacaucggcguggacggccccgacaacaacgcccugcugaaggugaaguacggcgaggccuacaccgacaccuaccacagcuacgccaacaagauccugagaacccaggagagcgccugcaacugcaucggcggcaacugcuaccugaugaucaccgacggcagcgccagcggcgugagcgagugcagauuccugaagaucagagagggcagaaucaucaaggagaucuuccccaccggcagagugaagcacaccgaggagugcaccugcggcuucgccagcaacaagaccaucgagugcgccugcagagacaacagauacaccgccaagagacccuucgugaagcugaacguggagaccgacaccgccgagaucagacugaugugcaccgacaccuaccuggacacccccagacccaacgacggcagcaucaccggccccugcgagagcgacggcaacgagggcagcggcggcaucaagggcggcuucgugcaccagagaaugaagagcaagaucggcagaugguacagcagaaccaugagcaagaccgagagaaugggcaugggccuguacgugaaguacgacggcgaccccugggccgacagcgacgcccuggccuucagcggcgugauggugagcaugaaggagcccggcugguacagcuucggcuucgagaucaaggacaagaagugcgacgugcccugcaucggcaucgagauggugcacgacggcggcaaggagaccuggcacagcgccgccaccgccaucuacugccugaugggcagcggccagcugcugugggacaccgugaccggcguggacauggcccuguga

SEQ ID NO: 190458 - RNA, 1401 nt, Artificial Sequence
  derived and/or modified CDS sequence (opt4) from neuraminidase__InfluenzaB__AKA54839
augcugcccagcaccauccagacccugacccuguuccugaccagcggcggcgugcugcugagccuguacgugagcgccagccugagcuaccugcuguacagcgacauccugcugaaguucagccccaccgagaucaccgcccccaccaugccccuggacugcgccaacgccagcaacgugcaggccgugaacagaagcgccaccaaggaggugacccugcugcugcccgagcccgaguggaccuaccccagacugagcugccccggcagcaccuuccagaaggcccugcugaucagcccccacagauucggcgagaccaagggcaacagcgccccccugaucaucagagagcccuucaucgccugcggccccaacgagugcaagcacuucgcccugacccacuacgccgcccagcccggcggcuacuacaacggcaccagaggcgacagaaacaagcugagacaccugaucagcgugaagcugggcaagauccccaccguggagaacagcaucuuccacauggccgccuggagcggcagcgccugccacgacggcaaggaguggaccuacaucggcguggacggccccgacaacaacgcccugcugaaggugaaguacggcgaggccuacaccgacaccuaccacagcuacgccaacaagauccugagaacccaggagagcgccugcaacugcaucggcggcaacugcuaccugaugaucaccgacggcagcgccagcggcgugagcgagugcagauuccugaagaucagagagggcagaaucaucaaggagaucuuccccaccggcagagugaagcacaccgaggagugcaccugcggcuucgccagcaacaagaccaucgagugcgccugcagagacaacagauacaccgccaagagacccuucgugaagcugaacguggagaccgacaccgccgagaucagacugaugugcaccgacaccuaccuggacacccccagacccaacgacggcagcaucaccggccccugcgagagcgacggcgacaagggcagcggcggcaucaagggcggcuucgugcaccagagaaugaagagcaagaucggcagaugguacagcagaaccaugagcaagaccgagagaaugggcaugggccuguacgugaaguacgacggcgaccccugggccgacagcgacgcccuggccuucagcggcgugauggugagcaugaaggagcccggcugguacagcuucggcuucgagaucaaggacaagaagugcgacgugcccugcaucggcaucgagauggugcacgacggcggcaaggagaccuggcacagcgccgccaccgccaucuacugccugaugggcagcggccagcugcugugggacaccgugaccggcguggacauggcccuguga

SEQ ID NO: 190459 - RNA, 1401 nt, Artificial Sequence
  derived and/or modified CDS sequence (opt4) from neuraminidase__InfluenzaB__AKA54841
augcugcccagcaccauccagacccugacccuguuccugaccagcggcggcgugcugcugagccuguacgugagcgccagccugagcuaccugcuguacagcgacauccugcugaaguucagccccaccgagaucaccgcccccaccaugccccuggacugcgccaacgccagcaacgugcaggccgugaacagaagcgccaccaagggcgugacccugcugcugcccgagcccgaguggaccuaccccagacugagcugccccggcagcaccuuccagaaggcccugcugaucagcccccacagauucggcgagaccaagggcaacagcgccccccugaucaucagagagcccuucaucgccugcggccccaacgagugcaagcacuucgcccugacccacuacgccgcccagcccggcggcuacuacaacggcaccagaggcgacagaaacaagcugagacaccugaucagcgugaagcugggcaagauccccaccguggagaacagcaucuuccacauggccgccuggagcggcagcgccugccacgacggcaaggaguggaccuacaucggcguggacggccccgacaacaacgcccugcugaaggugaaguacggcgaggccuacaccgacaccuaccacagcuacgccaacaagauccugagaacccaggagagcgccugcaacugcaucggcggcaacugcuaccugaugaucaccgacggcagcgccagcggcgugagcgagugcagauuccugaagaucagagagggcagaaucaucaaggagaucuuccccaccggcagagugaagcacaccgaggagugcaccugcggcuucgccagcaacaagaccaucgagugcgccugcagagacaacagauacaccgccaagagacccuucgugaagcugaacguggagaccgacaccgccgagaucagacugaugugcaccgacaccuaccuggacacccccagacccaacgacggcagcaucaccggccccugcgagagcgacggcgacgagggcagcggcggcaucaagggcggcuucgugcaccagagaaugaagagcaagaucggcagaugguacagcagaaccaugagcaagaccgagagaaugggcaugggccuguacgugaaguacgacggcgaccccugggccgacagcgacgcccuggccuucagcggcgugauggugagcgugaaggagcccggcugguacagcuucggcuucgagaucaaggacaagaagugcgacgugcccugcaucggcaucgagauggugcacgacggcggcaaggagaccuggcacagcgccgccaccgccaucuacugccugaugggcagcggccagcugcugugggacaccgugaccggcguggacaucgcccuguga

SEQ ID NO: 190460 - RNA, 1401 nt, Artificial Sequence
  derived and/or modified CDS sequence (opt4) from neuraminidase__InfluenzaB__AKA54843
augcugcccagcaccauccagacccugacccuguuccugaccagcggcggcgugcugcugagccuguacgugagcgccagccugagcuaccugcuguacagcgacauccugcugaaguucagccccaccgagaucaccgcccccaccaugccccuggacugcgccaacgccagcaacgugcaggccgugaacagaagcgccaccaagggcgugacccugcugcugcccgagcccgaguggaccuaccccagacugagcugccccggcagcaccuuccagaaggcccugcugaucagcccccacagauucggcgagaccaagggcaacagcgccccccugaucaucagagagcccuucaucgccugcggccccaacgagugcaagcacuucgcccugacccacuacgccgcccagcccggcggcuacuacaacggcaccagaggcgacagaaacaagcugagacaccugaucagcgugaagcugggcaagauccccaccguggagaacagcaucuuccacauggccgccuggagcggcagcgccugccacgacggcaaggaguggaccuacaucggcguggacggccccgacaacaacgcccugcugaaggugaaguacggcgaggccuacaccgacaccuaccacagcuacgccaacaagauccugagaacccaggagagcgccugcaacugcaucggcggcaacugcuaccugaugaucaccgacggcagcgccagcggcgugagcgagugcagauuccugaagaucagagagggcagaaucaucaaggagaucuuccccaccggcagagugaagcacaccgaggagugcaccugcggcuucgccagcaacaagaccaucgagugcgccugcagagacaacagauacaccgccaagagacccuucgugaagcugaacguggagaccgacaccgccgagaucagacugaugugcaccgacaccuaccuggacacccccagacccaacgacggcagcaucaccggccccugcgagagcgacggcgacgagggcagcggcggcaucaagggcggcuucgugcaccagagaaugaagagcaagaucggcagaugguacagcagaaccaugagcaagaccgagagaaugggcaugggccuguacgugaaguacgacggcgaccccugggccgacagcgacgcccuggccuucagcggcgugauggugagcgugaaggagcccggcugguacagcuucggcuucgagaucaaggacaagaagugcgacgugcccugcaucggcaucgagauggugcacgacggcggcaaggagaccuggcacagcgccgccaccgccaucuacugccugaugggcagcggccagcugcugugggacaccgugaccggcguggacauggcccuguga

SEQ ID NO: 190461 - RNA, 1401 nt, Artificial Sequence
  derived and/or modified CDS sequence (opt4) from neuraminidase__InfluenzaB__AKA54845
augcugcccagcaccauccagacccugacccuguuccugaccagcggcggcgugcugcugagccuguacgugagcgccagccugagcuaccugcuguacagcgacauccugcugaaguucagccccaccgagaucaccgcccccaccaugccccuggacugcgccaacgccagcaacgugcaggccgugaacagaagcgccaccaagggcgugacccugcugcugcccgagcccgaguggaccuaccccagacugagcugccccggcagcaccuuccagaaggcccugcugaucagcccccacagauucggcgagaccaacggcaacagcgccccccugaucaucagagagcccuucaucgccugcggccccaacgagugcaagcacuucgcccugacccacuacgccgcccagcccggcggcuacuacaacggcaccagaggcgacagaaacaagcugagacaccugaucagcgugaagcugggcaagauccccaccguggagaacagcaucuuccacauggccgccuggagcggcagcgccugccacgacggcaaggaguggaccuacaucggcguggacggccccgacaacaacgcccugcugaaggugaaguacggcgaggccuacaccgacaccuaccacagcuacgccaacaagauccugagaacccaggagagcgccugcaacugcaucggcggcaacugcuaccugaugaucaccgacggcagcgccagcggcgugagcgagugcagauuccugaagaucagagagggcagaaucaucaaggagaucuuccccaccggcagagugaagcacaccgaggagugcaccugcggcuucgccagcaacaagaccaucgagugcgccugcagagacaacagauacaccgccaagagacccuucgugaagcugaacguggagaccgacaccgccgagaucagacugaugugcaccgacaccuaccuggacacccccagacccaacgacggcagcaucaccggccccugcgagagcgacggcgacgagggcagcggcggcaucaagggcggcuucgugcaccagagaaugaagagcaagaucggcagaugguacagcagaaccaugagcaagaccgagagaaugggcaugggccuguacgugaaguacgacggcgaccccugggccgacagcgacgcccuggccuucagcggcgugauggugagcaugaaggagcccggcugguacagcuucggcuucgagaucaaggacaagaagugcgacgugcccugcaucggcaucgagauggugcacgacggcggcaaggagaccuggcacagcgccgccaccgccaucuacugccugaugggcagcggccagcugcugugggacaccgugaccggcguggacauggcccuguga

SEQ ID NO: 190462 - RNA, 1401 nt, Artificial Sequence; identical to SEQ ID NO: 190266
  derived and/or modified CDS sequence (opt4) from neuraminidase__InfluenzaB__AKA54847

SEQ ID NO: 190463 - RNA, 1401 nt, Artificial Sequence
  derived and/or modified CDS sequence (opt4) from neuraminidase__InfluenzaB__AKA54849
augcugcccagcaccauccagacccugacccuguuccugaccagcggcggcgugcugcugagccuguacgugagcgccagccugagcuaccugcuguacagcgacauccugcugaaguucagcagcaccgagaucaccgcccccaccaugccccuggacugcgccaacgccagcaacgugcaggccgugaacagaagcgccaccaagggcgugacccugcugcugcccgagcccgaguggaccuaccccagacugagcugccccggcagcaccuuccagaaggcccugcugaucagcccccacagauucggcgagaccaacggcaacagcgccccccugaucaucagagagcccuucaucgccugcggccccaacgagugcaagcacuucgcccugacccacuacgccgcccagcccggcggcuacuacaacggcaccagaggcgacagaaacaagcugagacaccugaucagcgugaagcugggcaagauccccaccguggagaacagcaucuuccacauggccgccuggagcggcagcgccugccacgacggcaaggaguggaccuacaucggcguggacggccccgacaacaacgcccugcugaaggugaaguacggcgaggccuacaccgacaccuaccacagcuacgccaacaagauccugagaacccaggagagcgccugcaacugcaucggcggcaacugcuaccugaugaucaccgacggcagcgccagcggcgugagcgagugcagauuccugaagaucagagagggcagaaucaucaaggagaucuuccccaccggcagagugaagcacaccgaggagugcaccugcggcuucgccagcaacaagaccaucgagugcgccugcagagacaacagauacaccgccaagagacccuucgugaagcugaacguggagaccgacaccgccgagaucagacugaugugcaccgacaccuaccuggacacccccagacccaacgacggcagcaucaccggccccugcgagagcgacggcgacgagggcggcggcggcaucaagggcggcuucgugcaccagagaaugaagagcaagaucggcagaugguacagcagaaccaugagcaagaccgagagaaugggcaugggccuguacgugaaguacgacggcgaccccugggccgacagcgacgcccuggccuucagcggcgugauggugagcaugaaggagcccggcugguacagcuucggcuucgagaucaaggacaagaagugcgacgugcccugcaucggcaucgagauggugcacgacggcggcaaggagaccuggcacagcgccgccaccgccaucuacugccugaugggcagcggccagcugcugugggacaccgugaccggcguggacauggcccuguga

SEQ ID NO: 190464 - RNA, 1401 nt, Artificial Sequence
  derived and/or modified CDS sequence (opt4) from neuraminidase__InfluenzaB__AKA54851
augcugcccagcaccauccagacccugacccuguuccugaccagcggcggcgugcugcugagccuguacgugagcgccagccugagcuaccugcuguacagcgacauccugcugaaguucagccccaccgagaucaccgcccccaccaugccccuggacugcgccaacgccagcaacgugcaggccgugaacagaagcgccaccaagggcgugacccugcugcugcccgagcccgaguggaccuaccccagacugagcugccccggcagcaccuuccagaaggcccugcugaucagcccccacagauucggcgagaccaagggcaacagcgccccccugaucaucagagagcccuucaucgccugcggccccaacgagugcaagcacuucgcccugacccacuacgccgcccagcccggcggcuacuacaacggcaccagaggcgacagaaacaagcugagacaccugaucagcgugaagcugggcaagauccccaccguggagaacagcaucuuccacauggccgccuggagcggcagcgccugccacgacggcaaggaguggaccuacaucggcguggacggccccgacaacaacgcccugcugaaggugaaguacggcgaggccuacaucgacaccuaccacagcuacgccaacaagauccugagaacccaggagagcgccugcaacugcaucggcggcaacugcuaccugaugaucaccgacggcagcgccagcggcgugagcgagugcagauuccugaagaucagagagggcagaaucaucaaggagaucuuccccaccggcagagugaagcacaccgaggagugcaccugcggcuucgccagcaacaagaccaucgagugcgccugcagagacaacagauacaccgccaagagacccuucgugaagcugaacguggagaccgacaccgccgagaucagacugaugugcaccgacaccuaccuggacacccccagacccaacgacggcagcaucaccggccccugcgagagcgacggcgacaagggcagcggcggcaucaagggcggcuucgugcaccagagaaugaagagcaagaucggcagaugguacagcagaaccaugagcaagaccgagagaaugggcaugggccuguacgugaaguacgacggcgaccccugggccgacagcgacgcccuggccuucagcggcgugauggugagcaugaaggagcccggcugguacagcuucggcuucgagaucaaggacaagaagugcgacgugcccugcaucggcaucgagauggugcacgacggcggcaaggagaccuggcacagcgccgccaccgccaucuacugccugaugggcagcggccagcugcugugggacaccgugaccggcguggacauggcccuguga

SEQ ID NO: 190465 - RNA, 1401 nt, Artificial Sequence
  derived and/or modified CDS sequence (opt4) from neuraminidase__InfluenzaB__AKA54853
augcugcccagcaccauccagacccugacccuguuccugaccagcggcggcgugcugcugagccuguacgugagcgccagccugagcuaccugcuguacagcgacauccugcugaaguucagccccaccgagaucaccgcccccaccaugccccuggacugcgccaacgccagcaacgugcaggccgugaacagaagcgccaccaagggcgugacccugcugcugcccgagcccgaguggaccuaccccagacugagcugccccggcagcaccuuccagaaggcccugcugaucagcccccacagauucggcgagaccaagggcaacagcgccccccugaucaucagagagcccuucaucgccugcggccccaacgagugcaagcacuucgcccugacccacuacgccgcccagcccggcggcuacuacaacggcaccagaggcgacagaaacaagcugagacaccugaucagcgugaagcugggcaagauccccaccguggagaacagcaucuuccacauggccgccuggagcggcagcgccugccacgacggcaaggaguggaccuacaucggcguggacggccccgacaacaacgcccugcugaaggugaaguacggcgaggccuacaccgacaccuaccacagcuacgccaacaagauccugagaacccaggagagcgccugcaacugcaucggcggcaacugcuaccugaugaucaccgacggcagcgccagcggcgugagcgagugcagauuccugaagaucagagagggcagaaucaucaaggagaucuuccccaccggcagagugaagcacaccgaggagugcaccugcggcuucgccagcaacaagaccaucgagugcgccugcagagacaacagauacaccgccaagagacccuucgugaagcugaacguggagaccgacaccgccgagaucagacugaugugcaccgacaccuaccuggacacccccagacccaacgacggcagcaucaccggccccugcgagagcgacggcgacgagggcagcggcggcgugaagggcggcuucgugcaccagagaaugaagagcaagaucggcagaugguacagcagaaccaugagcaagaccgagagaaugggcaugggccuguacgugaaguacgacggcgaccccugggccgacagcgacgcccuggccuucagcggcgugauggugagcgugaaggagcccggcugguacagcuucggcuucgagaucaaggacaagaagugcgacgugcccugcaucggcaucgagauggugcacgacggcggcaaggagaccuggcacagcgccgccaccgccaucuacugccugaugggcagcggccagcugcugugggacaccgugaccggcguggacauggcccuguga

SEQ ID NO: 190466 - RNA, 1401 nt, Artificial Sequence
  derived and/or modified CDS sequence (opt4) from neuraminidase__InfluenzaB__AKA54855
augcugcccagcaccauccagacccugacccuguuccugaccagcggcggcgugcugcugagccuguacgugagcgccagccugagcuaccugcuguacagcgacauccugcugaaguucagccccaccgagaucaccgcccccaccaugccccuggacugcgccaacgccagcaacgugcaggccgugaacagaagcgccaccaagggcgugacccugcugcugcccgagcccgaguggaccuaccccagacugagcugccccggcagcaccuuccagaaggcccugcugaucagcccccacagauucggcgagaccaagggcaacagcgccccccugaucaucagagagcccuucaucgccugcggccccaacgagugcaagcacuucgcccugacccacuacgccgcccagcccggcggcuacuacaacggcaccagaggcgacagaaacaagcugagacaccugaucagcgugaagcugggcaagauccccaccguggagaacagcaucuuccacauggccgccuggagcggcagcgccugccacgacggcaaggaguggaccuacaucggcguggacggccccgacaacaacgcccugcugaaggugaaguacggcgaggccuacaccgacaccuaccacagcuacgccaacaagauccugagaacccaggagagcgccugcaacugcaucggcggcaacugcuaccugaugaucaccgacggcagcgccagcggcgugagcgagugcagauuccugaagaucagagagggcagaaucaucaaggagaucuuccccaccggcagagugaagcacaccgaggagugcaccugcggcuucgccagcaacaagaccaucgagugcgccugcagagacaacagauacaccgccaagagacccuucgugaagcuggacguggagaccgacaccgccgagaucagacugaugugcaccgacaccuaccuggacacccccagacccaacgacggcagcaucaccggccccugcgagagcgacggcgacaagggcagcggcggcaucaagggcggcuucgugcaccagagaaugaagagcaagaucggcagaugguacagcagaaccaugagcaagaccgagagaaugggcaugggccuguacgugaaguacgacggcgaccccugggccgacagcgacgcccuggccuucagcggcgugauggugagcaugaaggagcccggcugguacagcuucggcuucgagaucaaggacaagaagugcgacgugcccugcaucggcaucgagauggugcacgacggcggcaaggagaccuggcacagcgccgccaccgccaucuacugccugaugggcagcggccagcugcugugggacaccgugaccggcguggacauggcccuguga

SEQ ID NO: 190467 - RNA, 1401 nt, Artificial Sequence
  derived and/or modified CDS sequence (opt4) from neuraminidase__InfluenzaB__AKT07927
augccccccagcaccauccagacccugacccuguuccugaccagcggcggcgugcugcugagccuguacgugagcgccagccugagcuaccugcuguacagcgacauccugcugaaguucagccccaccgagaucaccgcccccaccaugccccuggacugcgccaacgccagcaacgugcaggccgugaacagaagcgccaccaagggcgugacccugcugcugcccgagcccgaguggaccuaccccagacugagcugccccggcagcaccuuccagaaggcccugcugaucagcccccacagauucggcgagaccagaggcaacagcgccccccugaucaucagagagcccuucaucgccugcggccccaacgagugcaagcacuucgcccugacccacuacgccgcccagcccggcggcuacuacaacggcaccagaggcgacagaaacaagcugagacaccugaucagcgugaagcugggcaagauccccaccguggagaacagcaucuuccacauggccgccuggagcggcagcgccugccacgacggcaaggaguggaccuacaucggcguggacggccccgacaacaacgcccugcugaaggugaaguacggcgaggccuacaccgacaccuaccacagcuacgccaacaagauccugagaacccaggagagcgccugcaacugcaucggcggcaacugcuaccugaugaucaccgacggcagcgccagcggcgugagcgagugcagauuccugaagaucagagagggcagaaucaucaaggagaucuuccccaccggcagagugaagcacaccgaggagugcaccugcggcuucgccagcaacaagaccaucgagugcgccugcagagacaacagcuacaccgccaagagacccuucgugaagcugaacguggagaccgacaccgccgagaucagacugaugugcaccgacaccuaccuggacacccccagacccaacgacggcagcaucaccggccccugcgagagcgacggcgacaagggcagcggcggcaucaagggcggcuucgugcaccagagaauggagagcaagaucggcagaugguacagcagaaccaugagcaagaccgagagaaugggcaugggccuguacgugaaguacgacggcgaccccuggaccgacagcgacgcccuggccuucggcggcgugauggugagcaugaaggagcccggcugguacagcuucggcuucgagaucaaggacaagaagugcgacgugcccugcaucggcaucgagauggugcacgacggcggcaaggagaccuggcacagcgccgccaccgccaucuacugccugaugggcagcggccagcugcugugggacaccgugaccggcguggacauggcccuguga

SEQ ID NO: 190468 - RNA, 1401 nt, Artificial Sequence; identical to SEQ ID NO: 189179
  derived and/or modified CDS sequence (opt4) from neuraminidase__InfluenzaB__AKT07931

SEQ ID NO: 190469 - RNA, 1401 nt, Artificial Sequence
  derived and/or modified CDS sequence (opt4) from neuraminidase__InfluenzaB__AKT07933
augcugcccagcaccauccagacccugacccuguuccugaccagcggcggcgugcugcugagccuguacgugagcgccagccugagcuaccugcuguacagcgacauccugcugaaguucagccccaccgagaucaccgcccccgccaugccccuggacugcgccaacgccagcaacgugcaggccgugaacagaagcgccaccaagggcgugaccuuccugcugcccgagcccgaguggaccuaccccagacugagcugccccggcagcaccuuccagaaggcccugcugaucagcccccacagauucggcgagaccaagggcaacagcgccccccugaucaucagagagcccuucaucgccugcggccccaacgagugcaagcacuucgcccugacccacuacgccgcccagcccggcggcuacuacaacggcaccagaggcgacagaaacaagcugagacaccugaucagcgugaagcugggcaagauccccaccguggagaacagcaucuuccacauggccgccuggagcggcagcgccugccacgacggcaaggaguggaccuacaucggcguggacggccccgacaacaacgcccugcugaaggugaaguacggcgaggccuacaccgacaccuaccacagcuacgccaacaagauccugagaacccaggagagcgccugcaacugcaucggcggcaacugcuaccugaugaucaccgacggcagcgccagcggcgugagcgagugcagauuccugaagaucagagagggcagaaucaucaaggagaucuuccccaccggcagagugaagcacaccgaggagugcaccugcggcuucgccagcaacaagaccaucgagugcgccugcagagacaacagcuacaccgccaagagacccuucgugaagcugaacguggagaccgacaccgccgagaucagacugaugugcaccgacaccuaccuggacacccccagacccaacgacggcagcaucaccggccccugcgagagcgacggcgacaagggcagcggcggcaucaagggcggcuucgugcaccagagaauggagagcaagaucggcagaugguacagcagaaccaugagcaagaccgagagaaugggcaugggccuguacgugaaguacgacggcgaccccugggccgacagcgacgcccuggccuucagcggcgugauggugagcaugaaggagcccggcugguacagcuucggcuucgagaucaaggacaagaagugcgacgugcccugcaucggcaucgagauggugcacgacggcggcaaggagaccuggcacagcgccgccaccgccaucuacugccugaugggcagcggccagcugcugugggacaccgugaccggcguggacauggcccuguga

SEQ ID NO: 190470 - RNA, 1401 nt, Artificial Sequence; identical to SEQ ID NO: 189179
  derived and/or modified CDS sequence (opt4) from neuraminidase__InfluenzaB__AKT07935

SEQ ID NO: 190471 - RNA, 1401 nt, Artificial Sequence; identical to SEQ ID NO: 189179
  derived and/or modified CDS sequence (opt4) from neuraminidase__InfluenzaB__AKT07937

SEQ ID NO: 190472 - RNA, 1401 nt, Artificial Sequence; identical to SEQ ID NO: 189021
  derived and/or modified CDS sequence (opt4) from neuraminidase__InfluenzaB__AKT07939

SEQ ID NO: 190473 - RNA, 1401 nt, Artificial Sequence; identical to SEQ ID NO: 189179
  derived and/or modified CDS sequence (opt4) from neuraminidase__InfluenzaB__AKT07941

SEQ ID NO: 190474 - RNA, 1401 nt, Artificial Sequence; identical to SEQ ID NO: 189179
  derived and/or modified CDS sequence (opt4) from neuraminidase__InfluenzaB__AKT07945

SEQ ID NO: 190475 - RNA, 1401 nt, Artificial Sequence
  derived and/or modified CDS sequence (opt4) from neuraminidase__InfluenzaB__AKT07947
augcugcccagcaccauccagacccugacccuguuccugaccagcggcggcgugcugcugagccuguacgugagcgccagccugagcuaccugcuguacagcgacauccugcugaaguucagccccaccgagaucaccgcccccgccaugccccuggacugcgccaacgccagcaacgugcaggccgugaacagaagcgccaccaagggcgugacccugcugcugcccgagcccgaguggaccuaccccagacugagcugccccggcagcaccuuccagaaggcccugcugaucagcccccacagauucggcgagaccaagggcaacagcgccccccugaucaucagagagcccuucaucgccugcggccccaacgagugcaagcacuucgcccugacccacuacgccgcccagcccggcggcuacuacaacggcaccagaggcgacagaaacaagcugagacaccugaucagcgugaagcugggcaagauccccaccguggagaacagcaucuuccacauggccgccuggagcggcagcgccugccacgacggcaaggaguggaccuacaucggcguggacggccccgacaacaacgcccugcugaaggugaaguacggcgaggccuacaccgacaccuaccacagcuacgccaacaagauccugagaacccaggagagcgccugcaacugcaucggcggcaacugcuaccugaugaucaccgacggcagcgccagcggcgugagcgagugcagauuccugaagaucagagagggcagaaucaucaaggagaucuuccccaccggcagagugaagcacaccgaggagugcaccugcggcuucgccagcaacaagaccaucgagugcgccugcagagacaacagcuacaccgccaagagacccuucgugaagcugaacguggagaccgacaccgccgagaucagacugaugugcaccgacaccuaccuggacacccccagacccaacgacggcagcaucaccggccccugcgagagcgacggcgacaagggcagcggcggcaucaagggcggcuucgugcaccagagaauggagagcaagaucggcagaugguacagcagaaccaugagcaagaccgagagaaugggcaugggccuguacgugaaguacgacggcgaccccugggccgacagcgacgcccuggccuucagcggcgugauggugagcaugaaggagcccggcugguacagcuucggcuucgagaucaaggacaagaagugcgacgugcccugcaucggcguggacauggugcacgacugcggcaaggagaccuggcacagcgccgccaccgccaucuacugccugaugggcagcggccagcugcugugggacaccgugaccggcguggacauggcccuguga

SEQ ID NO: 190476 - RNA, 1401 nt, Artificial Sequence; identical to SEQ ID NO: 190434
  derived and/or modified CDS sequence (opt4) from neuraminidase__InfluenzaB__AKU40585

SEQ ID NO: 190477 - RNA, 1401 nt, Artificial Sequence; identical to SEQ ID NO: 190434
  derived and/or modified CDS sequence (opt4) from neuraminidase__InfluenzaB__AKU40596

SEQ ID NO: 190478 - RNA, 1401 nt, Artificial Sequence
  derived and/or modified CDS sequence (opt4) from neuraminidase__InfluenzaB__AKU40607
augcugcccagcaccauccagacccugacccuguuccugaccagcggcggcgugcugcugagccuguacgugagcgccagccugagcuaccugcuguacagcgacauccugcugaaguucagcagaaccgaggugaccgcccccaucaccccccuggacugcgccaacgccagcaacgcccaggccgugaacagaagcgccaccaagggcgugaccccccugcugcccgagcccgaguggaccuaccccagacugagcugccccggcagcaccuuccagaaggcccugcugaucagcccccacagauucggcgagaccaagggcaacagcgccccccugaucaucagagagcccuucaucgccugcggccccaaggagugcaagcacuucgcccugacccacuacgccgcccagcccggcggcuacuacaacggcaccagagaggacagaaacaagcugagacaccugaucagcgugaagcugggcaagauccccaccguggagaacagcaucuuccacauggccgccuggagcggcagcgccugccacgacggcagagaguggaccuacaucggcguggacggccccgacagcaacgcccugcugaagaucaaguacggcgaggccuacaccgacaccuaccacagcuacgccaagaacauccugagaacccaggagagcgccugcaacugcaucggcggcgacugcuaccugaugaucaccgacggccccgccagcggcaucagcgagugcagauuccugaagaucagagagggcagaaucaucaaggagaucuuccccaccggcagagugaagcacaccgaggagugcaccugcggcuucgccagcaacaagaccaucgagugcgccugcagagacaacagcuacaccgccaagagacccuucgugaagcugaacguggagaccgacaccgccgagaucagacugaugugcaccaagaccuaccuggacacccccagacccaacgacggcagcaucaccggccccugcgagagcgacggcgacgagggcagcggcggcaucaagggcggcuucgugcaccagagaauggccagcaagaucggcagaugguacagcagaaccaugagcaagaccaagagaaugggcaugggccuguacgugaaguacgacggcgaccccuggaccgacagcgaggcccuggcccugagcggcgugauggugagcauggaggagcccggcugguacagcuucggcuucgagaucaaggacaagaagugcgacgugcccugcaucggcaucgagauggugcacgacggcggcaagaccaccuggcacagcgccgccaccgccaucuacugccugaugggcagcggccagcugcugugggacaccgugaccggcgugaacaugacccuguga

SEQ ID NO: 190479 - RNA, 1401 nt, Artificial Sequence
  derived and/or modified CDS sequence (opt4) from neuraminidase__InfluenzaB__AKU40618
augcugcccagcaccauccagacccugacccuguuccugaccagcggcggcgugcugcugagccuguacgugagcgccagccugagcuaccugcuguacagcgacauccugcugaaguucagcagaaccgaggugaccgcccccaucaugccccuggacugcgccaacgccagcaacgugcaggccgugaacagaagcgccaccaagggcgugaccccccugcugcccgagcccgaguggaccuaccccagacugagcugccccggcagcaccuuccagaaggcccugcugaucagcccccacagauucggcgagaccaagggcaacagcgccccccugaucaucagagagcccuucaucgccugcggccccaaggagugcaagcacuucgcccugacccacuacgccgcccagcccggcggcuacuacaacggcaccagagaggacagaaacaagcugagacaccugaucagcgugaagcugggcaagauccccaccguggagaacagcaucuuccacauggccgccuggagcggcagcgccugccacgacggcagagaguggaccuacaucggcguggacggccccgacagcaacgcccugcugaagaucaaguacggcgaggccuacaccgacaccuaccacagcuacgccaagaacauccugagaacccaggagagcgccugcaacugcaucggcggcgacugcuaccugaugaucaccgacggccccgccagcggcaucagcgagugcagauuccugaagaucagagagggcagaaucaucaaggagaucuuccccaccggcagagugaagcacaccgaggagugcaccugcggcuucgccagcaacaagaccaucgagugcgccugcagagacaacagcuacaccgccaagagacccuucgugaagcugaacguggagaccgacaccgccgagaucagacugaugugcaccaagaccuaccuggacacccccagacccaacgacggcagcaucaccggccccugcgagagcgacggcgacgagggcagcggcggcaucaagggcggcuucgugcaccagagaauggccagcaagaucggcagaugguacagcagaaccaugagcaagaccaagagaaugggcaugggccuguacgugaaguacgacggcgaccccuggaccgacagcgaggcccuggcccugagcggcgugauggugagcauggaggagcccggcugguacagcuucggcuucgagaucaaggacaacaagugcgacgugcccugcaucggcaucgagauggugcacgacggcggcaagaccaccuggcacagcgccgccaccgccaucuacugccugaugggcagcggccagcugcugugggacaccgugaccggcgugaacaugacccuguga

SEQ ID NO: 190480 - RNA, 1401 nt, Artificial Sequence
  derived and/or modified CDS sequence (opt4) from neuraminidase__InfluenzaB__AKU40640
augcugcccagcaccauccagacccugacccuguuccugaccagcggcggcgugcugcugagccuguacgugagcgccagccugagcuaccugcuguacagcgacauccugcugaaguucagcagaaccgagaucgccgcccccaucaugccccuggacugcgccaacgccagcaacgugcaggccgugaacagaagcgccaccaagggcguggcccugcugcugcccgagcccgaguggaccuaccccagacugagcugccccggcagcaccuuccagaaggcccugcugaucagcccccacagauucggcgagaccaagggcaacagcgccccccugaucaucagagagcccuucaucgccugcggccccaaggagugcaagcacuucgcccugacccacuacgccgcccagcccggcggcuacuacaacggcaccagagaggacagaaacaagcugagacaccugaucagcgugaagcugggcaagauccccaccguggagaacagcaucuuccacauggccgccuggagcggcagcgccugccacgacggcagagaguggaccuacaucggcguggacggccccgacaacaacgcccugcugaagaucaaguacggcgaggccuacaccgacaccuaccacagcuacgccaagaacauccugagaacccaggagagcgccugcaacugcaucggcggcgacugcuaccugaugaucaccgacggccccgccagcggcaucagcgagugcagauuccugaagaucagagagggcagaaucaucaaggagaucuuccccaccggcagagugaagcacaccgaggagugcaccugcggcuucgccagcaacaagaccaucgagugcgccugcagagacaacagcuacaccgccaagagacccuucgugaagcugaacguggagaccgacaccgccgagaucagacugaugugcaccgagaccuaccuggacacccccagacccaacgacggcagcaucaccggccccugcgagagcaacggcgacaagggcagcggcggcaucaagggcggcuucgugcaccagagaauggccagcaagaucggcagaugguacagcagaaccaugagcaagaccaagagaaugggcaugggccuguacgugaaguacgacggcgaccccuggaccgacagcgaggcccuggcccugagcggcgugauggugagcauggaggagcccggcugguacagcuucggcuucgagaucaaggacaagaagugcgacgugcccugcaucggcaucgagauggugcacgacggcggcaagaccaccuggcacagcgccgccaccgccaucuacugccugaugggcagcggccagcugcugugggacaccgugaccggcgugaacaugacccuguga

SEQ ID NO: 190481 - RNA, 1401 nt, Artificial Sequence; identical to SEQ ID NO: 190434
  derived and/or modified CDS sequence (opt4) from neuraminidase__InfluenzaB__AKU40662

SEQ ID NO: 190482 - RNA, 1401 nt, Artificial Sequence
  derived and/or modified CDS sequence (opt4) from neuraminidase__InfluenzaB__AKU40673
augcugcccagcaccauccagacccugacccuguuccugaccagcggcggcgugcugcugagccuguacgugagcgccagccugagcuaccugcuguacagcgacauccugcugaaguucagcagaaccgaggugaccgcccccaucaugccccuggacugcgccaacgccagcaacgugcaggccgugaacagaagcgccaccaagggcgugaccccccugcugcccgagagcgaguggaccuaccccagacugagcugccccggcagcaccuuccagaaggcccugcugaucagcccccacagauucggcgagaccaagggcaacagcgccccccugaucaucagagagcccuucaucgccugcggccccaaggagugcaagcacuucgcccugacccacuacgccgcccagcccggcggcuacuacaacggcaccagagaggacagaaacaagcugagacaccugaucagcgugaagcugggcaagauccccaccguggagaacagcaucuuccacauggccgccuggagcggcagcgccugccacgacggcagagaguggaccuacaucggcguggacggccccgacagcaacgcccugcugaagaucaaguacggcgaggccuacaccgacaccuaccacagcuacgccaagaacauccugagaacccaggagagcgccugcaacugcaucggcggcgacugcuaccugaugaucaccgacggccccgccagcggcaucagcgagugcagauuccugaagaucagagagggcagaaucaucaaggagaucuuccccaccggcagagugaagcacaccgaggagugcaccugcggcuucgccagcaacaagaccaucgagugcgccugcagagacaacagcuacaccgccaagagacccuucgugaagcugaacguggagaccgacaccgccgagaucagacugaugugcaccaagaccuaccuggacacccccagacccaacgacggcagcaucaccggccccugcgagagcgacggcgacgagggcagcggcggcaucaagggcggcuucgugcaccagagaauggccagcaagaucggcagaugguacagcagaaccaugagcaagaccaagagaaugggcaugggccuguacgugaaguacgacggcgaccccuggaccgacagcgaggcccuggcccugagcggcgugauggugagcauggaggagcccggcugguacagcuucggcuucgagaucaaggacaagaagugcgacgugcccugcaucggcaucgagauggugcacgacggcggcaagaccaccuggcacagcgccgccaccgccaucuacugccugaugggcagcggccagcugcugugggacaccgugaccggcgugaacaugacccuguga

SEQ ID NO: 190483 - RNA, 1401 nt, Artificial Sequence; identical to SEQ ID NO: 190434
  derived and/or modified CDS sequence (opt4) from neuraminidase__InfluenzaB__AKU40684

SEQ ID NO: 190484 - RNA, 1401 nt, Artificial Sequence; identical to SEQ ID NO: 190434
  derived and/or modified CDS sequence (opt4) from neuraminidase__InfluenzaB__AKU40695

SEQ ID NO: 190485 - RNA, 1401 nt, Artificial Sequence; identical to SEQ ID NO: 190434
  derived and/or modified CDS sequence (opt4) from neuraminidase__InfluenzaB__AKU40706

SEQ ID NO: 190486 - RNA, 1401 nt, Artificial Sequence; identical to SEQ ID NO: 190434
  derived and/or modified CDS sequence (opt4) from neuraminidase__InfluenzaB__AKU40717

SEQ ID NO: 190487 - RNA, 1401 nt, Artificial Sequence
  derived and/or modified CDS sequence (opt4) from neuraminidase__InfluenzaB__AKU40728
augcugcccagcaccauccagacccugacccuguuccugaccagcggcggcgugcugcugagccuguacgugagcgccagccugagcuaccugcuguacagcgacauccugcugaaguucagcagaaccgaggugaccgcccccaucaugccccuggacugcgccaacgccagcaacgcccaggccgugaacagaagcgccaccaagggcgugaccccccugcugcccgagcccgaguggaccuaccccagacugagcugccccggcagcaccuuccagaaggcccugcugaucagcccccacagauucggcgagaccaagggcaacagcgccccccugaucaucagagagcccuucaucgccugcggccccaaggagugcaagcacuucgcccugacccacuacgccgcccagcccggcggcuacuacaacggcaccagagaggacagaaacaagcugagacaccugaucagcgugaagcugggcaagauccccaccguggagaacagcaucuuccacauggccgccuggagcggcagcgccugccacgacggcagagaguggaccuacaucggcguggacggccccgacagcaacgcccugcugaagaucaaguacggcgaggccuacaccgacaccuaccacagcuacgccaagaacauccugagaacccaggagagcgccugcaacugcaucggcggcgacugcuaccugaugaucaccgacggccccgccagcggcaucagcgagugcagauuccugaagaucagagagggcagaaucaucaaggagaucuuccccaccggcagagugaagcacaccgaggagugcaccugcggcuucgccagcaacaagaccaucgagugcgccugcagagacaacagcuacaccgccaagagacccuucgugaagcugaacguggagaccgacaccgccgagaucagacugaugugcaccaagaccuaccuggacacccccagacccaacgacggcagcaucaccggccccugcgagagcgacggcgacgagggcagcggcggcaucaagggcggcuucgugcaccagagaauggccagcaagaucggcagaugguacagcagaaccaugagcaagaccaagagaaugggcaugggccuguacgugaaguacgacggcgaccccuggaccgacagcgaggcccuggcccugagcggcgugauggugagcauggaggagcccggcugguacagcuucggcuucgagaucaaggacaagaagugcgacgugcccugcaucggcaucgagauggugcacgacggcggcaagaccaccuggcacagcgccgccaccgccaucuacugccugaugggcagcggccagcugcugugggacaccgugaccggcgugaacaugacccuguga

SEQ ID NO: 190488 - RNA, 1401 nt, Artificial Sequence
  derived and/or modified CDS sequence (opt4) from neuraminidase__InfluenzaB__AKU40739
augcugcccagcaccauccagacccugacccuguuccugaccagcggcggcgugcugcugagccuguacgugagcgccagccugagcuaccugcuguacagcgacauccugcugaaguucagcagaaccgaggugaccgcccccaucaugccccuggacugcgccaacgccagcaacgugcaggccgugaacagaagcgccaccaagggcgugaccccccugcugcccgagcccgaguggaccuaccccagacugagcugccccggcagcaccuuccagaaggcccugcugaucagcccccacagauucggcgagaccaagggcaacagcgccccccugaucaucagagagcccuucaucgccugcggccccaaggagugcaagcacuucgcccugacccacuacgccgcccagcccggcggcuacuacaacggcaccagagaggacagaaacaagcugagacaccugaucagcgugaagcugggcaagauccccaccguggagaacagcaucuuccacauggccgccuggagcggcagcgccugccacgacggcagagaguggaccuacaucggcguggacggccccgacagcaacgcccugcugaagaucaaguacggcgagaccuacaccgacaccuaccacagcuacgccaagaacauccugagaacccaggagagcgccugcaacugcaucggcggcgacugcuaccugaugaucaccgacggccccgccagcggcaucagcgagugcagauuccugaagaucagagagggcagaaucaucaaggagaucuuccccaccggcagagugaagcacaccgaggagugcaccugcggcuucgccagcaacaagaccaucgagugcgccugcagagacaacagcuacaccgccaagagacccuucgugaagcugaacguggagaccgacaccgccgagaucagacugaugugcaccaagaccuaccuggacacccccagacccaacgacggcagcaucaccggccccugcgagagcgacggcgacgagggcagcggcggcaucaagggcggcuucgugcaccagagaauggccagcaagaucggcagaugguacagcagaaccaugagcaagaccaagagaaugggcaugggccuguacgugaaguacgacggcgaccccuggaccgacagcgaggcccuggcccugagcggcgugauggugagcauggaggagcccggcugguacagcuucggcuucgagaucaaggacaagaagugcgacgugcccugcaucggcaucgagauggugcacgacggcggcaagaccaccuggcacagcgccgccaccgccaucuacugccugaugggcagcggccagcugcugugggacaccgugaccggcgugaacaugacccuguga

SEQ ID NO: 190489 - RNA, 1401 nt, Artificial Sequence
  derived and/or modified CDS sequence (opt4) from neuraminidase__InfluenzaB__AKU40750
augcugcccagcaccauccagacccugacccuguuccugaccagcggcggcgugcugcugagccuguacgugagcgccagccugagcuaccugcuguacagcgacauccugcugaaguucagcagaaccgaggugaccgcccccaucaugccccuggacugcgccaacgccagcaacgugcaggccgugaacagaagcgccaccaagggcgugaucccccugcugcccgagcccgaguggaccuaccccagacugagcugccccggcagcaccuuccagaaggcccugcugaucagcccccacagauucggcgagaccaagggcaacagcgccccccugaucaucagagagcccuucaucgccugcggccccaaggagugcaagcacuucgcccugacccacuacgccgcccagcccggcggcuacuacaacggcaccagagaggacagaaacaagcugagacaccugaucagcgugaagcugggcaagauccccaccguggagaacagcaucuuccacauggccgccuggagcggcagcgccugccacgacggcagagaguggaccuacaucggcguggacggccccgacagcaacgcccugcugaagaucaaguacggcgaggccuacaccgacaccuaccacagcuacgccaagaacauccugagaacccaggagagcgccugcaacugcaucggcggcgacugcuaccugaugaucaccgacggccccgccagcggcaucagcgagugcagauuccugaagaucagagagggcagaaucaucaaggagaucuuccccaccggcagagugaagcacaccgaggagugcaccugcggcuucgccagcaacaagaccaucgagugcgccugcagagacaacagcuacaccgccaagagacccuucgugaagcugaacguggagaccgacaccgccgagaucagacugaugugcaccaagaccuaccuggacacccccagacccaacgacggcagcaucaccggccccugcgagagcgacggcgacgagggcagcggcggcaucaagggcggcuucgugcaccagagaauggccagcaagaucggcagaugguacagcagaaccaugagcaagaccaagagaaugggcaugggccuguacgugaaguacgacggcgaccccuggaccgacagcgaggcccuggcccugagcggcgugauggugagcauggaggagcccggcugguacagcuucggcuucgagaucaaggacaagaagugcgacgugcccugcaucggcaucgagauggugcacgacggcggcaagaccaccuggcacagcgccgccaccgccaucuacugccugaugggcagcggccagcugcugugggacaccgugaccggcgugaacaugacccuguga

SEQ ID NO: 190490 - RNA, 1401 nt, Artificial Sequence; identical to SEQ ID NO: 190434
  derived and/or modified CDS sequence (opt4) from neuraminidase__InfluenzaB__AKU40761

SEQ ID NO: 190491 - RNA, 1401 nt, Artificial Sequence; identical to SEQ ID NO: 190434
  derived and/or modified CDS sequence (opt4) from neuraminidase__InfluenzaB__AKU40772

SEQ ID NO: 190492 - RNA, 1401 nt, Artificial Sequence; identical to SEQ ID NO: 190434
  derived and/or modified CDS sequence (opt4) from neuraminidase__InfluenzaB__AKU40783

SEQ ID NO: 190493 - RNA, 1401 nt, Artificial Sequence
  derived and/or modified CDS sequence (opt4) from neuraminidase__InfluenzaB__AKU40794
augcugcccagcaccauccagacccugacccuguuccugaccagcggcggcgugcugcugagccuguacgugagcgccagccugagcuaccugcuguacagcgacauccugcugaaguucagcagaaccgaggugaccgcccccaucaugccccuggacugcgccaacaccagcaacgugcaggccgugaacagaagcgccaccaagggcgugaccccccugcugcccgagcccgaguggaccuaccccagacugagcugccccggcagcaccuuccagaaggcccugcugaucagcccccacagauucggcgagaccaagggcaagagcgccccccugaucaucagagagcccuucaucgccugcggccccaaggagugcaagcacuucgcccugacccacuacgccgcccagcccggcggcuacuacaacggcaccagagaggacagaaacaagcugagacaccugaucagcgugaagcugggcaagauccccaccguggagaacagcaucuuccacauggccgccuggagcggcagcgccugccacgacggcagagaguggaccuacaucggcguggacggccccgacagcaacgcccugcugaagaucaaguacggcgaggccuacaccgacaccuaccacagcuacgccaagaacauccugagaacccaggagagcgccugcaacugcaucggcggcgacugcuaccugaugaucaccgacggccccgccagcggcaucagcgagugcagauuccugaagaucagagagggcagaaucaucaaggagaucuuccccaccggcagagugaagcacaccgaggagugcaccugcggcuucgccagcaacaagaccaucgagugcgccugcagagacaacagcuacaccgccaagagacccuucgugaagcugaacguggagaccgacaccgccgagaucagacugaugugcaccaagaccuaccuggacacccccagacccaacgacggcagcaucaccggccccugcgagagcgacggcgacgagggcagcggcggcaucaagggcggcuucgugcaccagagaauggccagcaagaucggcagaugguacagcagaaccaugagcaagaccaagagaaugggcaugggccuguacgugaaguacgacggcgaccccuggaccgacagcgaggcccuggcccugagcggcgugauggugagcauggaggagcccggcugguacagcuucggcuucgagaucaaggacaagaagugcgacgugcccugcaucggcaucgagauggugcacgacggcggcaagaccaccuggcacagcgccgccaccgccaucuacugccugaugggcagcggccagcugcugugggacaccgugaccggcgugaacaugacccuguga

SEQ ID NO: 190494 - RNA, 1401 nt, Artificial Sequence; identical to SEQ ID NO: 190434
  derived and/or modified CDS sequence (opt4) from neuraminidase__InfluenzaB__AKU40805

SEQ ID NO: 190495 - RNA, 1401 nt, Artificial Sequence; identical to SEQ ID NO: 190434
  derived and/or modified CDS sequence (opt4) from neuraminidase__InfluenzaB__AKU40816

SEQ ID NO: 190496 - RNA, 1401 nt, Artificial Sequence; identical to SEQ ID NO: 190434
  derived and/or modified CDS sequence (opt4) from neuraminidase__InfluenzaB__AKU40827

SEQ ID NO: 190497 - RNA, 1401 nt, Artificial Sequence; identical to SEQ ID NO: 190434
  derived and/or modified CDS sequence (opt4) from neuraminidase__InfluenzaB__AKU40838

SEQ ID NO: 190498 - RNA, 1401 nt, Artificial Sequence; identical to SEQ ID NO: 190434
  derived and/or modified CDS sequence (opt4) from neuraminidase__InfluenzaB__AKU40849

SEQ ID NO: 190499 - RNA, 1401 nt, Artificial Sequence; identical to SEQ ID NO: 190434
  derived and/or modified CDS sequence (opt4) from neuraminidase__InfluenzaB__AKU40860

SEQ ID NO: 190500 - RNA, 1401 nt, Artificial Sequence
  derived and/or modified CDS sequence (opt4) from neuraminidase__InfluenzaB__AKU40871
augcugcccagcaccauccagacccugacccuguuccugaccagcggcggcgugcugcugagccuguacgugagcgccagccugagcuaccugcuguacagcgacauccugcugaaguucagcagaaccgaggugaccgcccccaucaugccccuggacugcgccaacgccagcaacgugcaggccgugaacagaagcgccaccaagggcguggccccccugcugcccgagcccgaguggaccuaccccagacugagcugccccggcagcaccuuccagaaggcccugcugaucagcccccacagauucggcgagaccaagggcaacagcgccccccugaucaucagagagcccuucaucgccugcggccccaaggagugcaagcacuucgcccugacccacuacgccgcccagcccggcggcuacuacaacggcaccagagaggacagaaacaagcugagacaccugaucagcgugaagcugggcaagauccccaccguggagaacagcaucuuccacauggccgccuggagcggcagcgccugccacgacggcagagaguggaccuacaucggcguggacggccccgacagcaacgcccugcugaagaucaaguacggcgaggccuacaccgacaccuaccacagcuacgccaagaacauccugagaacccaggagagcgccugcaacugcaucggcggcgacugcuaccugaugaucaccgacggccccgccagcggcaucagcgagugcagauuccugaagaucagagagggcagaaucaucaaggagaucuuccccaccggcagagugaagcacaccgaggagugcaccugcggcuucgccagcaacaagaccaucgagugcgccugcagagacaacagcuacaccgccaagagacccuucgugaagcugaacguggagaccgacaccgccgagaucagacugaugugcaccaagaccuaccuggacacccccagacccaacgacggcagcaucaccggccccugcgagagcgacggcgacgagggcagcggcggcaucaagggcggcuucgugcaccagagaauggccagcaagaucggcagaugguacagcagaaccaugagcaagaccaagagaaugggcaugggccuguacgugaaguacgacggcgaccccuggaccgacagcgaggcccugacccugagcggcgugauggugagcauggaggagcccggcugguacagcuucggcuucgagaucaaggacaagaagugcgacgugcccugcaucggcaucgagauggugcacgacggcggcaagaccaccuggcacagcgccgccaccgccaucuacugccugaugggcagcggccagcugcugugggacaccgugaccggcgugaacaugacccuguga

SEQ ID NO: 190501 - RNA, 1401 nt, Artificial Sequence; identical to SEQ ID NO: 190434
  derived and/or modified CDS sequence (opt4) from neuraminidase__InfluenzaB__AKU40882

SEQ ID NO: 190502 - RNA, 1401 nt, Artificial Sequence
  derived and/or modified CDS sequence (opt4) from neuraminidase__InfluenzaB__AKU40893
augcugcccagcaccauccagacccugacccuguuccugaccagcggcggcgugcugcugagccuguacgugagcgccagccugagcuaccugcuguacagcgacauccugcugaaguucagccccaccgagaucaccgcccccaccaugccccuggacugcgccaacgccagcaacgugcaggccgugaacagaagcgccaccaagggcgugacccugcugcugcccgagcccgaguggaccuaccccagacugagcugccccggcagcaccuuccagaaggcccugcugaucagcccccacagauucggcgagaccaagggcaacagcgccccccugaucaucagagagcccuucaucgccugcggccccaacgagugcaagcacuucgcccugacccacuacgccgcccagcccggcggcuacuacaacggcaccagaggcgacagaaacaagcugagacaccugaucagcgugaagcugggcaagauccccaccguggagaacagcaucuuccacauggccgccuggagcggcagcgccugccacgacggcaaggaguggaccuacaucggcguggacggccccgacaacaacgcccugcugaaggugaaguacggcgaggccuacaccgacaccuaccacagcuacgccaacaagauccugagaacccaggagagcgccugcaacugcaucggcggcaacugcuaccugaugaucaccgacggcagcgccagcggcgugagcgagugcagauuccugaagaucagagagggcagaaucaucaaggagaucuuccccaccggcagagugaagcacaccgaggagugcaccugcggcuucgccagcaacaagaccaucgagugcgccugcagagacaacagauacaccgccaagagacccuucgugaagcugaacguggagaccgacaccgccgagaucagacugaugugcaccgacaccuaccuggacacccccagacccaacgacggcagcaucaccggccccugcgagagcgacggcgacaagggcagcggcggcaucaagggcggcuucgugcaccagagaaugaagagcaagaucggcagaugguacagcagaaccaugagcaagaccgagagaaugggcaugggccuguacgugaaguacgacggcgaccccugggccgacagcggcgcccuggccuucagcggcgugauggugagcaugaaggagcccggcugguacagcuucggcuucgagaucaaggacaagaagugcgacgugcccugcaucggcaucgagauggugcacgacggcggcaaggagaccuggcacagcgccgccaccgccaucuacugccugaugggcagcggccagcugcugugggacaccgugaccggcguggacauggcccuguga

SEQ ID NO: 190503 - RNA, 1401 nt, Artificial Sequence; identical to SEQ ID NO: 190434
  derived and/or modified CDS sequence (opt4) from neuraminidase__InfluenzaB__AKU40904

SEQ ID NO: 190504 - RNA, 1401 nt, Artificial Sequence
  derived and/or modified CDS sequence (opt4) from neuraminidase__InfluenzaB__AKU40915
augcugcccagcaccauccagacccugacccuguuccugaccagcggcggcgugcugcugagccuguacgugagcgccagccugagcuaccugcuguacagcgacauccugcugaaguucagcagaaccgaggugaccgcccccaucaugccccuggacugcgccaacgccagcaacgugcaggccgugaacagaagcgccaccaagggcgugaccccccugcugcccgagcccgaguggaccuaccccagacugagcugccccggcagcaccuuccagaaggcccugcugaucagcccccacagauucggcgagaccaagggcaacagcgccccccugaucaucagagagcccuucaucgccugcggccccaaggagugcaagcacuucgcccugacccacuacgccgcccagcccggcggcuacuacaacggcaccagagaggacagaaacaagcugagacaccugaucagcgugaagcugggcaagauccccaccguggagaacagcaucuuccacauggccgccuggagcggcagcgccugccacgacggcagagaguggaccuacaucggcguggacggccccgacagcaacgcccugcugaagaucaaguacggcgaggccuacaccgacaccuaccacagcuacgccaagaacauccugagaacccaggagagcgccugcaacugcaucggcggcgacugcuaccugaugaucaccgacggccccgccagcggcaucagcgagugcagauuccugaagaucagagagggcagaaucaucaaggagaucuuccccaccggcagagugaagcacaccgaggagugcaccugcggcuucgccagcaacaagaccaucgagugcgccugcagagacaacagcuacaccgccaagagacccuucgugaagcugaacguggagaccgacaccgccgagaucagacugaugugcaccaagaccuaccuggacacccccagacccaacgacggcagcaucaccggccccugcgagagcgacggcgacgagggcagcggcggcaucaagggcggcuucgugcaccagagaauggccagcaagaucggcagaugguacagcagaaccaugagcaagaccaagagaaugggcaugggccuguacgugaaguacgacggcgaccccuggaccgacagcgaggcccuggcccugagcggcgugauggugcccauggaggagcccggcugguacagcuucggcuucgagaucaaggacaagaagugcgacgugcccugcaucggcaucgagauggugcacgacggcggcaagaccaccuggcacagcgccgccaccgccaucuacugccugaugggcagcggccagcugcugugggacaccgugaccggcgugaacaugacccuguga

SEQ ID NO: 190505 - RNA, 1401 nt, Artificial Sequence; identical to SEQ ID NO: 190434
  derived and/or modified CDS sequence (opt4) from neuraminidase__InfluenzaB__AKU40926

SEQ ID NO: 190506 - RNA, 1401 nt, Artificial Sequence; identical to SEQ ID NO: 190488
  derived and/or modified CDS sequence (opt4) from neuraminidase__InfluenzaB__AKU40937

SEQ ID NO: 190507 - RNA, 1401 nt, Artificial Sequence; identical to SEQ ID NO: 190434
  derived and/or modified CDS sequence (opt4) from neuraminidase__InfluenzaB__AKU40948

SEQ ID NO: 190508 - RNA, 1401 nt, Artificial Sequence; identical to SEQ ID NO: 190434
  derived and/or modified CDS sequence (opt4) from neuraminidase__InfluenzaB__AKU40959

SEQ ID NO: 190509 - RNA, 1401 nt, Artificial Sequence; identical to SEQ ID NO: 190434
  derived and/or modified CDS sequence (opt4) from neuraminidase__InfluenzaB__AKU40970

SEQ ID NO: 190510 - RNA, 1401 nt, Artificial Sequence; identical to SEQ ID NO: 190434
  derived and/or modified CDS sequence (opt4) from neuraminidase__InfluenzaB__AKU40981

SEQ ID NO: 190511 - RNA, 1401 nt, Artificial Sequence; identical to SEQ ID NO: 190434
  derived and/or modified CDS sequence (opt4) from neuraminidase__InfluenzaB__AKU40991

SEQ ID NO: 190512 - RNA, 1401 nt, Artificial Sequence; identical to SEQ ID NO: 190434
  derived and/or modified CDS sequence (opt4) from neuraminidase__InfluenzaB__AKU41002

SEQ ID NO: 190513 - RNA, 1401 nt, Artificial Sequence; identical to SEQ ID NO: 190434
  derived and/or modified CDS sequence (opt4) from neuraminidase__InfluenzaB__AKU41013

SEQ ID NO: 190514 - RNA, 1401 nt, Artificial Sequence; identical to SEQ ID NO: 190434
  derived and/or modified CDS sequence (opt4) from neuraminidase__InfluenzaB__AKU41024

SEQ ID NO: 190515 - RNA, 1401 nt, Artificial Sequence; identical to SEQ ID NO: 189021
  derived and/or modified CDS sequence (opt4) from neuraminidase__InfluenzaB__EPI173278

SEQ ID NO: 190516 - RNA, 1401 nt, Artificial Sequence; identical to SEQ ID NO: 189021
  derived and/or modified CDS sequence (opt4) from neuraminidase__InfluenzaB__EPI498049

SEQ ID NO: 190517 - RNA, 1401 nt, Artificial Sequence; identical to SEQ ID NO: 189021
  derived and/or modified CDS sequence (opt4) from neuraminidase__InfluenzaB__AFH57913

SEQ ID NO: 190518 - RNA, 1401 nt, Artificial Sequence; identical to SEQ ID NO: 189021
  derived and/or modified CDS sequence (opt4) from neuraminidase__InfluenzaB__EPI827074

SEQ ID NO: 190519 - RNA, 1401 nt, Artificial Sequence; identical to SEQ ID NO: 189021
  derived and/or modified CDS sequence (opt4) from neuraminidase__InfluenzaB__EPI244698

SEQ ID NO: 190520 - RNA, 1401 nt, Artificial Sequence; identical to SEQ ID NO: 189021
  derived and/or modified CDS sequence (opt4) from neuraminidase__InfluenzaB__EPI244701

SEQ ID NO: 190521 - RNA, 1401 nt, Artificial Sequence; identical to SEQ ID NO: 190434
  derived and/or modified CDS sequence (opt4) from neuraminidase__InfluenzaB__EPI540672

SEQ ID NO: 190522 - RNA, 1401 nt, Artificial Sequence; identical to SEQ ID NO: 190434
  derived and/or modified CDS sequence (opt4) from neuraminidase__InfluenzaB__EPI829465

SEQ ID NO: 190523 - RNA, 1401 nt, Artificial Sequence
  derived and/or modified CDS sequence (opt4) from neuraminidase__InfluenzaB__EPI684428
augcugcccagcaccauccagacccugacccuguuccugaccagcggcggcgugcugcugagccuguacgugagcgccagccugagcuaccugcuguacagcgacauccugcugaaguucagcagaaccgaggugaccgcccccaccaugccccuggacugcgccaacgccagcaacgugcaggccgugaacagaagcaccaccaagggcgugaccccccuguuccccgagcccgaguggaccuaccccagacugagcugccccggcagcaccuuccagaaggcccugcugaucagcccccacagauucggcgagaccaagggcaacagcgccccccugaucaucagagagcccuucaucgccugcggccccaaggagugcaagcacuucgcccugacccacuacgccgcccagcccggcggcuacuacaacggcaccagagaggacagaaacaagcugagacaccugaucagcgugaagcugggcaagauccccaccguggagaacagcaucuuccacauggccgccuggagcggcagcgccugccacgacggcagagaguggaccuacaucggcguggacggccccgacagcaacgcccugcugaagaucaaguacggcgaggccuacaccgacaccuaccacagcuacgccaagaacauccugagaacccaggagagcgccugcaacugcaucggcggcgacugcuaccugaugaucaccgacggccccgccagcggcgugagcgagugcagauuccugaagaucagagagggcagaaucaucaaggagaucuuccccaccggcagagugaagcacaccgaggagugcaccugcggcuucgccagcaacaagaccaucgagugcgccugcagagacaacagauacaccgccaagagacccuucgugaagcugaacguggagaccgacaccgccgagaucagacugaugugcaccaagaccuaccuggacacccccagacccaacgacggcagcaucaccggccccugcgagagcgacggcgacgagggcagcggcggcaucaagggcggcuucgugcaccagagaauggccagcaagaucggcagaugguacagcagaaccaugagcaagaccaagagaaugggcaugggccuguacgugaaguacgacggcgaccccuggaccgacagcgaggcccuggcccugagcggcgugauggugagcauggaggagcccggcugguacagcuucggcuucgagaucaaggacaagaagugcgacgugcccugcaucggcaucgagauggugcacgacggcggcaagaccaccuggcacagcgccgccaccgccaucuacugccugaugggcagcggccagcugcugugggacaccgugaccggcgugaacaugacccuguga

SEQ ID NO: 190524 - RNA, 1401 nt, Artificial Sequence; identical to SEQ ID NO: 189043
  derived and/or modified CDS sequence (opt4) from neuraminidase__InfluenzaB__AFH58451

SEQ ID NO: 190525 - RNA, 1401 nt, Artificial Sequence; identical to SEQ ID NO: 189021
  derived and/or modified CDS sequence (opt4) from neuraminidase__InfluenzaB__EPI173280

SEQ ID NO: 190526 - RNA, 1401 nt, Artificial Sequence; identical to SEQ ID NO: 189021
  derived and/or modified CDS sequence (opt4) from neuraminidase__InfluenzaB__EPI186302

SEQ ID NO: 190527 - RNA, 1401 nt, Artificial Sequence
  derived and/or modified CDS sequence (opt4) from neuraminidase__InfluenzaB__EPI636339
augcugcccagcaccauccagacccugacccuguuccugaccagcggcggcgugcugcugagccuguacgugagcgccagccugagcuaccugcuguacagcgacauccugcugaaguucagccccaccgagaucaccgcccccaccaugccccuggacugcgccaacgccagcaacgugcaggccgugaacagaagcgccaccaagggcgugacccugcugcugcccgagcccgaguggaccuaccccagacugagcugccccggcagcaccuuccagaaggcccugcugaucagcccccacagauucggcgagaccaagggcaacagcgccccccugaucaucagagagcccuucguggccugcggccccaacgagugcaagcacuucgcccugacccacuacgccgcccagcccggcggcuacuacaacggcaccagaggcgacagaaacaagcugagacaccugaucagcgugaagcugggcaagauccccaccguggagaacagcaucuuccacauggccgccuggagcggcagcgccugccacgacggcaaggaguggaccuacaucggcguggacggccccgacaacaacgcccugcugaaggugaaguacggcgaggccuacaccgacaccuaccacagcuacgccaacaacauccugagaacccaggagagcgccugcaacugcaucggcggcaacugcuaccugaugaucaccgacggcagcgccagcggcgugagcgagugcagauuccugaagaucagagagggcagaaucaucaaggagaucuuccccaccggcagagugaagcacaccgaggagugcaccugcggcuucgccagcaacaagaccaucgagugcgccugcagagacaacagauacaccgccaagagacccuucgugaagcugaacguggagaccgacaccgccgagaucagacugaugugcaccgacaccuaccuggacacccccagacccaacgacggcagcaucaccggccccugcgagagcgacggcgacaagggcagcggcggcaucaagggcggcuucgugcaccagagaaugaagagcaagaucggcagaugguacagcagaaccaugagcaagaccgagagaaugggcaugggccuguacgugaaguacggcggcgaccccugggccgacagcgacgcccuggccuucagcggcgugauggugagcaugaaggagcccggcugguacagcuucggcuucgagaucaaggacaagaagugcgacgugcccugcaucggcaucgagauggugcacgacggcggcaaggagaccuggcacagcgccgccaccgccaucuacugccugaugggcagcggccagcugcugugggacaccgugaccggcguggacauggcccuguga

SEQ ID NO: 190528 - RNA, 1401 nt, Artificial Sequence; identical to SEQ ID NO: 190527
  derived and/or modified CDS sequence (opt4) from neuraminidase__InfluenzaB__EPI645996

SEQ ID NO: 190529 - RNA, 1401 nt, Artificial Sequence
  derived and/or modified CDS sequence (opt4) from neuraminidase__InfluenzaB__EPI539770
augcugcccagcaccauccagacccugacccuguuccugaccagcggcggcgugcugcugagccuguacgugagcgccagccugagcuaccugcuguacagcgacauccugcugaaguucagcagaaccgaggugaccgcccccaucaugccccuggacugcgccaacgccagcaacgcccaggccgugaacagaagcgccaccaagggcgugaccccccugcugcccgagcccgaguggaccuaccccagacugagcugccccggcagcaccuuccagaaggcccugcugaucagcccccacagauucggcgagaccaagggcaacagcgccccccugaucaucagagagcccuucaucgccugcggccccaaggagugcaagcacuucgcccugacccacuacgccgcccagcccggcggcuacuacaacggcaccagagaggacagaaacaagcugagacaccugaucagcgugaagcugggcaagauccccaccguggagaacagcaucuuccacauggccgccuggagcggcagcgccugccacgacggcagagaguggaccuacaucggcguggacggccccgacagcaacgcccugcugaagaucaaguacggcgaggccuacaccgacaccuaccacagcuacgccaagaacauccugagaacccaggagagcgccugcaacugcaucggcggcgacugcuaccugaugaucaccgacggccccgccagcggcaucagcgagugcagauuccugaagaucagagagggcagaaucaucaaggagaucuuccccaccggcagagugaagcacaccgaggagugcaccugcggcuucgccagcaacaagaccaucgagugcgccugcagagacaacagcuacaccgccaagagacccuucgugaagcugaacguggagaccgacaccgccgagaucagacugaugugcaccaagaccuaccuggacacccccagacccaacgacggcagcaucaccggccccugcgagagcgacggcgacgagggcagcggcggcaucaagggcggcuucgugcaccagagaauggccagcaagaucggcagaugguacagcagaaccaugagcaagaccaagagaaugggcaugggccuguacgugaaguacgacggcgaccccuggaccgacagcgaggcccuggcccugagcggcgugauggugagcauggaggagcccggcugguacagcuucggcuucgagaucaaggacaagaagugcgacgugcccugcaucggcaucgagauggugcacgacggcggcaagaccaccuggcacagcgccgccaccaccaucuacugccugaugggcagcggccagcugcugugggacaccgugaccggcgugaacaucacccuguga

SEQ ID NO: 190530 - RNA, 1401 nt, Artificial Sequence; identical to SEQ ID NO: 190529
  derived and/or modified CDS sequence (opt4) from neuraminidase__InfluenzaB__EPI551248

SEQ ID NO: 190531 - RNA, 1401 nt, Artificial Sequence; identical to SEQ ID NO: 190529
  derived and/or modified CDS sequence (opt4) from neuraminidase__InfluenzaB__EPI544258

SEQ ID NO: 190532 - RNA, 1401 nt, Artificial Sequence; identical to SEQ ID NO: 190434
  derived and/or modified CDS sequence (opt4) from neuraminidase__InfluenzaB__EPI592698

SEQ ID NO: 190533 - RNA, 1401 nt, Artificial Sequence; identical to SEQ ID NO: 190434
  derived and/or modified CDS sequence (opt4) from neuraminidase__InfluenzaB__EPI592706

SEQ ID NO: 190534 - RNA, 1401 nt, Artificial Sequence
  derived and/or modified CDS sequence (opt4) from neuraminidase__InfluenzaB__EPI693093
augcugcccagcaccauccagacccugacccuguuccugaccagcggcggcgugcugcugagccuguacgugagcgccagccugagcuaccugcuguacagcgacauccugcugaaguucagcagaaccgaggugaccgcccccaucaugccccuggacugcgccaacgccagcaacgugcaggccgugaacagaagcgccaccaagggcgugaccccccugcugcccgagcccgaguggaccuaccccagacugagcugccccggcagcaccuuccagaaggcccugcugaucagcccccacagauucggcgagaccaagggcaacagcgccccccugaucaucagagagcccuucaucgccugcggccccaaggagugcaagcacuucgcccugacccacuacgccgcccagcccggcggcuacuacaacggcaccagagaggacagaaacaagcugagacaccugaucagcgugaagcugggcaagauccccaccguggagaacagcaucuuccacauggccgccuggagcggcagcgccugccacgacggcagagaguggaccuacaucggcguggacggccccgacagcaacgcccugcugaagaucaaguacggcgaggccuacaccgacaccuaccacagcuacgccaagaacauccugagaacccaggagagcgccugcaacugcaucggcggcgacugcuaccugaugaucaccgacggccccgccagcggcaucagcgagugcagauuccugaagaucagagagggcagaaucaucaaggagaucuuccccaccggcagagugaagcacaccgaggagugcaccugcggcuucgccagcaacaagaccaucgagugcgccugcagagacaacagcuacaccgccaagagacccuucgugaagcugaacguggagaccgacaccgccgagaucagacugaugugcaccaagaccuaccuggacacccccagacccaacgacggcagcaucaccggccccugcgagagcgacggcgacgagggcagcggcggcaucaagggcggcuucgugcaccagagaauggagagcaagaucggcagaugguacagcagaaccaugagcaagaccaagagaaugggcaugggccuguacgugaaguacgacggcgaccccuggaccgacagcgaggcccuggcccugagcggcgugauggugagcauggaggagcccggcugguacagcuucggcuucgagaucaaggacaagaagugcgacgugcccugcaucggcaucgagauggugcacgacggcggcaagaccaccuggcacagcgccgccaccgccaucuacugccugaugggcagcggccagcugcugugggacaccgugaccggcgugaacaugacccuguga

SEQ ID NO: 190535 - RNA, 1401 nt, Artificial Sequence
  derived and/or modified CDS sequence (opt4) from neuraminidase__InfluenzaB__EPI678795
augcugcccagcaccauccagacccugacccuguuccugaccagcggcggcgugcugcugagccuguacgugagcgccagccugagcuaccugcuguacagcgacauccugcugaaguucagccccaccgagaucaccgcccccaccaugccccuggacugcgccaacgccagcaacgugcaggccgugaacagaagcgccaccaagggcgugaccuuccugcugcccgagcccgaguggaccuaccccagacugagcugccccggcagcaccuuccagaaggcccugcugaucagcccccacagauucggcgagaccaagggcaacagcgccccccugaucaucagagagcccuucguggccugcggccccaacgagugcaagcacuucgcccugacccacuacgccgcccagcccggcggcuacuacaacggcaccagaggcgacagaaacaagcugagacaccugaucagcgugaagcugggcaagauccccaccguggagaacagcaucuuccacauggccgccuggagcggcagcgccugccacgacggcaaggaguggaccuacaucggcguggacggccccgacaacaacgcccugcugaaggugaaguacggcgaggccuacaccgacaccuaccacagcuacgccaacaacauccugagaacccaggagagcgccugcaacugcaucggcggcaacugcuaccugaugaucaccgacggcagcgccagcggcgugagcgagugcagauuccugaagaucagagagggcagaaucaucaaggagaucuuccccaccggcagagugaagcacaccgaggagugcaccugcggcuucgccagcaacaagaccaucgagugcgccugcagagacaacagauacaccgccaagagacccuucgugaagcugaacguggagaccgacaccgccgagaucagacugaugugcaccgacaccuaccuggacacccccagacccaacgacggcagcaucaccggccccugcgagagcgacggcgacaagggcagcggcggcaucaagggcggcuucgugcaccagagaaugaagagcaagaucggcagaugguacagcagaaccaugagcaagaccgagagaaugggcaugggccuguacgugaaguacggcggcaaccccugggccgacagcgacgcccugaccuucagcggcgugauggugagcaugaaggagcccggcugguacagcuucggcuucgagaucaaggacaagaagugcgacgugcccugcaucggcaucgagauggugcacgacggcggcaaggagaccuggcacagcgccgccaccgccaucuacugccugaugggcagcggccagcugcugugggacaccgugaccggcguggacauggcccuguga

SEQ ID NO: 190536 - RNA, 1401 nt, Artificial Sequence; identical to SEQ ID NO: 190535
  derived and/or modified CDS sequence (opt4) from neuraminidase__InfluenzaB__EPI721063

SEQ ID NO: 190537 - RNA, 1401 nt, Artificial Sequence; identical to SEQ ID NO: 188955
  derived and/or modified CDS sequence (opt4) from neuraminidase__InfluenzaB__EPI328903

SEQ ID NO: 190538 - RNA, 1401 nt, Artificial Sequence
  derived and/or modified CDS sequence (opt4) from neuraminidase__InfluenzaB__EPI543192
augcugcccagcaccauccagacccugacccuguuccugaccagcggcggcgugcugcugagccuguacgugagcgccagccugagcuaccugcuguaccuggacauccugcugaaguuccccagcaccgagaucaccgcccccaccaugccccuggacugcgccaacgccagcaacgugcaggccgugaacagaagcgccaccaagggcgugacccugcugcugcccgagcccgaguggaccuaccccagacugagcugccccggcagcaccuuccagaaggcccugcugaucagcccccacagauucggcgagaccaagggcaacagcgccccccugaucaucagagagcccuucaucgccugcggccccaaggagugcaagcacuucgcccugacccacuacgccgcccagcccggcggcuacuacaacggcaccagaggcgacagaaacaagcugagacaccugaucagcgugaagcugggcaagauccccaccguggagaacagcaucuuccacauggccgccuggagcggcagcgccugccacgacggcaaggaguggaccuacaucggcguggacggccccgacaacaacgcccugcugaagaucaaguacggcgaggccuacaccgacaccuaccacagcuacgccaacaacauccugagaacccaggagagcgccugcaacugcaucggcggcaacugcuaccugaugaucaccgacggcagcgccagcggcgugagcgagugcagauuccugaagaucagagagggcagaaucaugaaggagaucuuccccaccggcagaacccagcacaccgaggagugcaccugcggcuucgccagcaacaagaccaucgagugcgccugcagagacaacagcuacaccgccaagagacccuucgugaagcugaacguggagaccgacaccgccgagaucagacugaugugcaccaagaccuaccuggacacccccagacccgacgacggcagcaucaccggccccugcgagagcaacggcggcaagggcagcggcggcaucaagggcggcuucgugcaccagagaauggccagcaagaucggcagaugguacagcagaaccaugagcaagaccgagagaaagggcaugggccuguacaucaaguacaacggcgaccccugggccgacagcgacgcccugaccuucagcggcgugauggugagcauggaggagcccggcugguacagcuucggcuucgagaucaaggacaagaagugcgacgugcccugcaucggcaucgagauggugcacgacggcggcaaggagaccuggcacagcgccgccaccgccaucuacugccugaugggcagcggccagcugcugugggacaccgugaccggcgugaacaugacccuguga

SEQ ID NO: 190539 - RNA, 1401 nt, Artificial Sequence; identical to SEQ ID NO: 190538
  derived and/or modified CDS sequence (opt4) from neuraminidase__InfluenzaB__EPI500360

SEQ ID NO: 190540 - RNA, 1401 nt, Artificial Sequence
  derived and/or modified CDS sequence (opt4) from neuraminidase__InfluenzaB__EPI543186
augcugcccagcaccauccagacccugacccuguuccugaccagcggcggcgugcugcugagccuguacgugagcgccagccugagcuaccugcuguacagcgacauccugcugaaguucagcagaaccgaggugaccgcccccaucaugccccuggacugcgccaacgccagcaacgugcaggccgugaacagaagcgccaccaagggcgugaccccccugcugcccgagcccgaguggaccuaccccagacugagcugccccggcagcaccuuccagaaggcccugcugaucagcccccacagauucggcgagaccaagggcaacagcgccccccugaucaucagagagcccuucaucgccugcggccccaaggagugcaagcacuucgcccugacccacuacgccgcccagcccggcggcuacuacaacggcaccagagaggacagaaacaagcugagacaccugaucagcgugaagcugggcaagauccccaccguggagaacagcaucuuccacauggccgccuggagcggcagcgccugccacgacggcagagaguggaccuacaucggcguggacggccccgacagcaacgcccugcugaagaucaaguacggcgaggccuacaccgacaccuaccacagcuacgccaagaacauccugagaacccaggagagcgccugcaacugcaucggcggcgacugcuaccugaugaucaccgacggccccgccagcggcaucagcgagugcagauuccugaagaucagagagggcagaaucaucaaggagaucuuccccaccggcagagugaagcacaccgaggagugcaccugcggcuucgccagcaacaagaccaucgagugcgccugcagagacaacagcuacaccgccaagagacccuucgugaagcugaacguggagaccgacaccgccgagaucagacugaugugcaccaagaccuaccuggacacccccagacccaacgacggcagcaucaccggccccugcgagagcgacggcgacgagggcagcggcggcaucaagggcggcuucgugcaccagagaauggccagcaagaucggcagaugguacagcagaaccaugagcaagaccaagagaaugggcaugggccuguacgugaaguacgacggcgaccccuggaccgacagcgaggcccuggcccugagcggcgugauggugagcauggaggagcccggcugguacagcuucggcuucgagaucaaggacaagaagugcgacgugcccugcaucggcaucgagauggugcacgacggcggcaagaccaccuggcacagcgccgccaccgugaucuacugccugaugggcagcggccagcugcugugggacaccgugaccggcgugaacaugacccuguga

SEQ ID NO: 190541 - RNA, 1401 nt, Artificial Sequence; identical to SEQ ID NO: 190540
  derived and/or modified CDS sequence (opt4) from neuraminidase__InfluenzaB__EPI536448

SEQ ID NO: 190542 - RNA, 1401 nt, Artificial Sequence
  derived and/or modified CDS sequence (opt4) from neuraminidase__InfluenzaB__NP_056663
augcugcccagcaccgugcagacccugacccugcugcugaccagcggcggcgugcugcugagccuguacgugagcgccagccugagcuaccugcuguacagcgacgugcugcugaaguucagcagcaccaagaccaccgcccccaccaugagccuggagugcaccaacgccagcaacgcccagaccgugaaccacagcgccaccaaggagaugaccuuccccccccccgagcccgaguggaccuaccccagacugagcugccagggcagcaccuuccagaaggcccugcugaucagcccccacagauucggcgagaucaagggcaacagcgccccccugaucaucagagagcccuucguggccugcggccccaaggagugcagacacuucgcccugacccacuacgccgcccagcccggcggcuacuacaacggcaccagaaaggacagaaacaagcugagacaccuggugagcgugaagcugggcaagauccccaccguggagaacagcaucuuccacauggccgccuggagcggcagcgccugccacgacggcagagaguggaccuacaucggcguggacggccccgacaacgacgcccuggugaagaucaaguacggcgaggccuacaccgacaccuaccacagcuacgcccacaacauccugagaacccaggagagcgccugcaacugcaucggcggcgacugcuaccugaugaucaccgacggcagcgccagcggcaucagcaagugcagauuccugaagaucagagagggcagaaucaucaaggagauccugcccaccggcagaguggagcacaccgaggagugcaccugcggcuucgccagcaacaagaccaucgagugcgccugcagagacaacagcuacaccgccaagagacccuucgugaagcugaacguggagaccgacaccgccgagaucagacugaugugcaccaagaccuaccuggacacccccagacccgacgacggcagcaucgccggccccugcgagagcaacggcgacaaguggcugggcggcaucaagggcggcuucgugcaccagagaauggccagcaagaucggcagaugguacagcagaaccaugagcaagaccaacagaaugggcauggagcuguacgugaaguacgacggcgaccccuggaccgacagcgacgcccugacccugagcggcgugauggugagcaucgaggagcccggcugguacagcuucggcuucgagaucaaggacaagaagugcgacgugcccugcaucggcaucgagauggugcacgacggcggcaaggacaccuggcacagcgccgccaccgccaucuacugccugaugggcagcggccagcugcugugggacaccgugaccggcguggacauggcccuguga

SEQ ID NO: 190543 - RNA, 1401 nt, Artificial Sequence
  derived and/or modified CDS sequence (opt4) from neuraminidase__InfluenzaB__ABG85180
augcugcccagcaccgugcagacccugacccugcugcugaccagcggcggcgugcugcugagccuguacgugagcgccagccugagcuaccugcuguacagcgacgugcugcugaaguucagcagcaccaagaccaccgcccccaccaugagccuggagugcaccaacgccagcaacgcccagaccgugaacuacagcgccaccaaggagaugaccuuccccccccccgagcccgaguggaccuaccccagacugagcugccagggcagcaccuuccagaaggcccugcugaucagcccccacagauucggcgagaucaagggcaacagcgccccccugaucaucagagagcccuucguggccugcggccccaaggagugcagacacuucgcccugacccacuacgccgcccagcccggcggcuacuaccacggcaccagaaaggacagaaacaagcugagacaccuggugagcgugaagcugggcaagauccccaccguggagaacagcaucuuccacauggccgccuggagcggcagcgccugccacgacggcagagaguggaccuacaucggcguggacggccccgacaacgacgcccuggugaagaucaaguacggcgaggccuacaccgacaccuaccacagcuacgcccacaacauccugagaacccaggagagcgccugcaacugcaucggcggcgacugcuaccugaugaucaccgacggcagcgccagcggcaucagcaagugcagauuccugaagaucagagagggcagaaucaucaaggagauccugcccaccggcagaguggagcacaccgaggagugcaccugcggcuucgccagcaacaagaccaucgagugcgccugcagagacaacagcuacaccgccaagagacccuucgugaagcugaacguggagaccgacaccgccgagaucagacugaugugcaccaagaccuaccuggacacccccagacccgacgacggcagcaucgccggccccugcgagagcaacggcgacaagggccugggcggcaucaagggcggcuucgugcaccagagaauggccuucaagaucggcagaugguacagcagaaccaugagcaagaccaacagaaugggcauggagcuguacgugaaguacgacggcgaccccuggaccgacagcgacgcccugacccugagcggcgugauggugagcaucgaggagcccggcugguacagcuucggcuucgagaucaaggacaagaagugcgacgugcccugcaucggcaucgagauggugcacgacggcggcgaggacaccuggcacagcgccgccaccgccaucuacugccugaugggcagcggccagcugcugugggacaccgugaccggcaucgacauggcccuguga

SEQ ID NO: 190544 - RNA, 1401 nt, Artificial Sequence; identical to SEQ ID NO: 190433
  derived and/or modified CDS sequence (opt4) from neuraminidase__InfluenzaB__EPI376345

SEQ ID NO: 190545 - RNA, 1401 nt, Artificial Sequence; identical to SEQ ID NO: 190433
  derived and/or modified CDS sequence (opt4) from neuraminidase__InfluenzaB__EPI368424

SEQ ID NO: 190546 - RNA, 1401 nt, Artificial Sequence
  derived and/or modified CDS sequence (opt4) from neuraminidase__InfluenzaB__EPI331150
augcugcccagcaccauccagacccugacccuguuccugaccagcggcggcgugcugcugagccuguacgugagcgccagccugagcuaccugcuguacagcgacauccugcugaaguucagccccaccgagaucaccgcccccaccaugccccuggacugcgccaacgccagcaacgugcaggccaugaacagaagcgccaccaagggcgugacccugcugcugcccgagcccgaguggaccuaccccagacugagcugccccggcagcaccuuccagaaggcccugcugaucagcccccacagauucggcgagaccaagggcaacagcgccccccugaucaucagagagcccuucaucgccugcggccccaacgagugcaagcacuucgcccugacccacuacgccgcccagcccggcggcuacuacaacggcaccagaggcgacagaaacaagcugagacaccugaucagcgugaagcugggcaagauccccaccguggagaacagcaucuuccacauggccgccuggagcggcagcgccugccacgacggcaaggaguggaccuacaucggcguggacggccccgacaacaacgcccugcugaaggugaaguacggcgaggccuacaccgacaccuaccacagcuacgccaacaagauccugagaacccaggagagcgccugcaacugcaucggcggcaacugcuaccugaugaucaccgacggcagcgccagcggcgugagcgagugcagauuccugaagaucagagagggcagaaucaucaaggagaucuuccccaccggcagagugaagcacaccgaggagugcaccugcggcuucgccagcaacaagaccaucgagugcgccugcagagacaacagcuacaccgccaagagacccuucgugaagcugaacguggagaccgacaccgccgagaucagacugaugugcaccgacaccuaccuggacacccccagacccaacgacggcagcaucaccggccccugcgagagcgacggcgacaagggcagcggcggcaucaagggcggcuucgugcaccagagaauggagagcaagaucggcagaugguacagcagaaccaugagcaagaccgagagaaugggcaugggccuguacgugaaguacgacggcgaccccugggccgacagcgacgcccuggccuucagcggcgugauggugagcaugaaggagcccggcugguacagcuucggcuucgagaucaaggacaagaagugcgacgugcccugcaucggcaucgagauggugcacgacggcggcaaggagaccuggcacagcgccgccaccgccaucuacugccugaugggcagcggccagcugcugugggacaccgugaccggcguggacauggcccuguga

SEQ ID NO: 190547 - RNA, 1401 nt, Artificial Sequence; identical to SEQ ID NO: 190546
  derived and/or modified CDS sequence (opt4) from neuraminidase__InfluenzaB__EPI358089

SEQ ID NO: 190548 - RNA, 1401 nt, Artificial Sequence; identical to SEQ ID NO: 188692
  derived and/or modified CDS sequence (opt4) from neuraminidase__InfluenzaB__ABL76698

SEQ ID NO: 190549 - RNA, 1401 nt, Artificial Sequence
  derived and/or modified CDS sequence (opt4) from neuraminidase__InfluenzaB__AAD42328
augcugcccagcaccauccagacccugacccuguuccugaccagcggcggcgugcugcugagccuguacgugagcgccagccugagcuaccugcuguacagcgacauccugcugaaguucagccccaccgagaucaccgcccccaccaugccccuggacugcgccaacgccagcaacgugcaggccgugaacagaagcgccaccaagggcaugacccugcugcugcccgagcccgaguggaccuaccccagacugagcugccccggcagcaccuuccagaaggcccugcugaucagcccccacagauucggcgagaccagaggcaacagcgccccccugaccaucagagagcccuucaucgccugcggccccaaggagugcaagcacuucgcccugacccacuacgccgcccagcccggcggcuacuacaacggcaccagagaggacagaaacaagcugagacaccugaucagcgugaagcugggcaagauccccaccguggagaacagcaucuuccacauggccgccuggagcggcagcgccugccacgacggcagagaguggaccuacaucggcguggacggccccgacagcaacgcccugaucaagaucaaguacggcgaggccuacaccgacaccuaccacagcuacgccaacaacauccugagaacccaggagagcgccugcaacugcaucggcggcgacugcuaccugaugaucaccgacggcagcgccagcggcaucagcaagugcagauuccugaagaucagagagggcagaaucaucaaggagaucuuccccaccggcagaguggagcacaccgaggagugcaccugcggcuucgccagcaacaagaccaucgagugcgccugcagagacaacagcuacaccgccaagagacccuucgugaagcugaacguggagaccgacaccgccgagaucagacugaugugcaccgagaccuaccuggacacccccagacccgacgacggcagcaucaccggccccugcgagagcaacggcgacaagggcagaggcggcaucaagggcggcuucgugcaccagagaauggccagcaagaucggcagaugguacagcagaaccaugagcaagaccaagagaaugggcauggagcuguacgugaaguacgacggcgaccccuggaucgacagcgacgcccuggcccccagcggcgugauggugagcauggaggagcccggcugguacagcuucggcuucgagaucaaggacaagaagugcgacgugcccugcaucggcaucgagauggugcacgacggcggcaagaagaccuggcacagcgccgccaccgccaucuacugccugaugggcagcggccagcugcugugggacaccgugaccggcguggacagaagcguguga

SEQ ID NO: 190550 - RNA, 1401 nt, Artificial Sequence; identical to SEQ ID NO: 190235
  derived and/or modified CDS sequence (opt4) from neuraminidase__InfluenzaB__EPI541349

SEQ ID NO: 190551 - RNA, 1401 nt, Artificial Sequence; identical to SEQ ID NO: 190434
  derived and/or modified CDS sequence (opt4) from neuraminidase__InfluenzaB__EPI541759

SEQ ID NO: 190552 - RNA, 1401 nt, Artificial Sequence; identical to SEQ ID NO: 190527
  derived and/or modified CDS sequence (opt4) from neuraminidase__InfluenzaB__EPI826201

SEQ ID NO: 190553 - RNA, 1401 nt, Artificial Sequence; identical to SEQ ID NO: 190266
  derived and/or modified CDS sequence (opt4) from neuraminidase__InfluenzaB__EPI477398

SEQ ID NO: 190554 - RNA, 1401 nt, Artificial Sequence; identical to SEQ ID NO: 190266
  derived and/or modified CDS sequence (opt4) from neuraminidase__InfluenzaB__EPI492570

SEQ ID NO: 190555 - RNA, 1401 nt, Artificial Sequence; identical to SEQ ID NO: 190266
  derived and/or modified CDS sequence (opt4) from neuraminidase__InfluenzaB__EPI498339

SEQ ID NO: 190556 - RNA, 1401 nt, Artificial Sequence; identical to SEQ ID NO: 190487
  derived and/or modified CDS sequence (opt4) from neuraminidase__InfluenzaB__EPI538118

SEQ ID NO: 190557 - RNA, 1401 nt, Artificial Sequence; identical to SEQ ID NO: 190487
  derived and/or modified CDS sequence (opt4) from neuraminidase__InfluenzaB__EPI538124

SEQ ID NO: 190558 - RNA, 1401 nt, Artificial Sequence; identical to SEQ ID NO: 190487
  derived and/or modified CDS sequence (opt4) from neuraminidase__InfluenzaB__EPI556421

SEQ ID NO: 190559 - RNA, 1401 nt, Artificial Sequence; identical to SEQ ID NO: 190487
  derived and/or modified CDS sequence (opt4) from neuraminidase__InfluenzaB__EPI614609

SEQ ID NO: 190560 - RNA, 1401 nt, Artificial Sequence; identical to SEQ ID NO: 188731
  derived and/or modified CDS sequence (opt4) from neuraminidase__InfluenzaB__BAB32609

SEQ ID NO: 190561 - RNA, 1401 nt, Artificial Sequence; identical to SEQ ID NO: 188877
  derived and/or modified CDS sequence (opt4) from neuraminidase__InfluenzaB__EPI271544

SEQ ID NO: 190562 - RNA, 1401 nt, Artificial Sequence; identical to SEQ ID NO: 188877
  derived and/or modified CDS sequence (opt4) from neuraminidase__InfluenzaB__AFH57957

SEQ ID NO: 190563 - RNA, 1401 nt, Artificial Sequence; identical to SEQ ID NO: 188877
  derived and/or modified CDS sequence (opt4) from neuraminidase__InfluenzaB__EPI294881

SEQ ID NO: 190564 - RNA, 1401 nt, Artificial Sequence; identical to SEQ ID NO: 188732
  derived and/or modified CDS sequence (opt4) from neuraminidase__InfluenzaB__ABL77259

SEQ ID NO: 190565 - RNA, 1575 nt, Artificial Sequence
  derived and/or modified CDS sequence (opt4) from glycoprotein__RABV__AB009663.2
auggugccccaggcccugcugcuggugcccauccugggcuucagccugugcuucggcaaguuccccaucuacaccauccccgacacccugggccccuggagccccaucgacauccaccaccugagcugccccaacaaccuggugguggaggacgagggcugcaccaaccugagcggcuucagcuacauggagcugaaggugggcuacaccagcgccaucaaggugaacggcuucaccugcaccggcguggugaccgaggccgagaccuacaccaacuucgugggcuacgugaccaccaccuucaagagaaagcacuucagacccacccccgacgccugcagagccgccuacaacuggaagauggccggcgaccccagauacgaggagagccugcacagccccuaccccgacuaccacuggcugagaaccgugaagaccaccaaggagagccuggugaucaucagccccagcguggccgaccuggaccccuacgacaacagccugcacagcagaguguuccccagcggcaagugcagcggcaucaccagaagcagcguguacugcagcaccaaccacgacuacaccguguggaugcccgagauccugagacugggcaccagcugcgacaucuucaccaacagcagaggcaagagagugagcaagggcagcaccaccugcggcuucaucgacgagagaggccuguacaagagccugaagggcgccugcaagcugaagcugugcggcgugcugggccugagacugauggacggcaccugggugagcaugcagaccagcaacgagaccaaguggugcccccccaaccagcuggugaaccugcacgaccugagaagcgacgagcuggagcaccuggugaucgaggagcuggugaagaagagagaggagugccuggacgcccuggagagcaucaucaccaccaagagcgugagcuucagaagacugagccaccugagaaagcuggugcccggcuucggcaaggccuacaccaucuucaacaagacccugauggaggccgaggcccacuacaagagcgugagaaccuggaacgagaucauccccagcaagggcugccugagagugggcggcagaugccacccccacgugaacggcguguucuucaacggcaucauccugggccccgacggccacgugcugauccccgagaugcagagcagccugcugcagcagcacaucgagcugcuggagagcagcgugaucccccugaugcacccccuggccgaccccuucaccguguucaaggacggcgacgagaccgaggacuucaucgaggugcaccugcccgacgugcacgagcaggugagcggcguggaccugggccugcccaacuggggcaaguacgugcugcugagcgccggcacccugaucgcccuggugcugaucaucuuccugaugaccugcugcagaaagguggacagacccgagagcacccagagaagccugagaggcaccggcagaaacgugagcgugaccagccagagcggcaaguucaucaacagcugggagagcuacaagagcggcggcgagaccggccuguga

SEQ ID NO: 190566 - RNA, 1575 nt, Artificial Sequence
  derived and/or modified CDS sequence (opt4) from glycoprotein__RABV__AB044824.1
auggugccccaggcccugcugcuggugcccauccugggcuucagcagcugcuucggcaaguuccccaucuacaccauccccgacacccugggccccuggagccccaucgacauccaccaccugagcugccccaacaaccuggugguggaggacgagggcugcaccaaccugagcggcuucagcuacauggagcugaaggugggcuacaucagcgccaucaaggugaacggcuucaccugcaccggcguggugaccgaggccgagaccuacaccaacuucgugggcuacgugaccaccaccuucaagagaaagcacuucagacccacccccgacgccugcagagccgccuacaacuggaagauggccggcgaccccagauacgaggagagccugcacagccccuaccccgacuaccacuggcugagaaccgugaagaccaccaaggagagccuggugaucaucagccccagcguggccgaccuggaccccuacgacaacagccugcacagcagaguguuccccagcggcaagugcagcggcaucaccgugagcagcguguacugcagcaccaaccacgacuacaccguguggaugcccgagagccugagacugggcaccagcugcgacaucuucaccaacagcagaggcaagagagccagcaagggcagcaagaccugcggcuucguggacgagagaggccuguacaagagccugaagggcgccugcaagcugaagcugugcggcgugcugggccugagacugauggacggcaccuggguggccaugcagaccagcaacgagaccaaguggugcccccccgaccagcuggugaaccugcacgaccugagaagcgacgagaucgagcaccuggugaucgaggagcuggugaagaagagagaggagugccuggacgcccuggagagcaucaucaccaccaagagcgugagcuucagaagacugagcuaccugagaaagcuggugcccggcuucggcaaggccuacaccaucuucaacaagacccugauggaggccgaggcccacuacaagagcgugagaaccuggaacgagaucauccccagcaagggcugccugagagugggcggcagaugccacccccacgugaacggcguguucuucaacggcaucauccugggccccgacggccacgugcugauccccgagaugcagagcagccugcugcagcagcacaucgagcugcuggagagcagcgugaucccccugaugcacccccuggccgaccccuucaccguguucaaggacggcgacgagaccgaggacuucaucgaggugcaccugcccgacgugcacgagcaggugagcggcguggaccugggccugcccaacuggggcgaguacgugcugcugagcgccggcacccugaucgcccugaugcugaucaucuuccugaugaccugcugcagaaagguggacagacccgagagcacccagagaagccugagaggcaccggcagaaacgugagcgugaccagccagagcggcaaguucauccccagcugggagagcuacaagagcggcggcgagaccggccuguga

SEQ ID NO: 190567 - RNA, 1575 nt, Artificial Sequence
  derived and/or modified CDS sequence (opt4) from glycoprotein__RABV__AB052666.1
augaucccccaggcccugcuguucgugccccugcugguguucagccugugcuucggcaaguuccccaucuacaccauccccgacaagcugggccccuggagccccaucgacauccaccaccugagcugccccaacaaccuggugguggaggacgagggcugcaccaaccugagcggcuucagcuacauggagcugaaggugggcuacaucagcgccaucaaggugaacggcuucaccugcaccggcguggugaccgaggccgagaccuacaccaacuucgugggcuacgugaccaccaccuucaagagaaagcacuucagacccacccccgacgccugcagagccgccuacaacuggaagauggccggcgaccccagauacgaggagagccugcacaaccccuaccccgacuaccacuggcugagaaccgugaagaccaccaaggagagccuggugaucaucagccccagcgugagcgaccuggaccccuacgacaagagccugcacagcagaguguuccccagcggcaagugcagcggcaucaccgugagcagcaccuacugccccaccaaccacgacuacaccaucuggaugcccgagaaccccagacugggcaccagcugcgacaucuucaccaacagcagaggcaagagagccagcaagggcagcaagaccugcggcuucguggacgagagaggccuguacaagagccugaagggcgccugcaagcugaagcugugcggcgugcugggccugagacugauggacggcaccugggccgccauccagaccagcgacgaggugaaguggugcccccccgaccagcuggugaacauccacgacuucagaagcgacgagaucgagcaccuggugguggaggagcuggugaagaagagagaggagugccuggacgcccuggagagcaucaugaccaccaagagcgugagcuucagaagacugagccaccugagaaagcuggugcccggcuucggcaaggccuacaccaucuucaacaagacccugauggaggccgacgcccacuacaagagcgugagaaccuggaacgagaucauccccagcaagggcugccugagagugggcggcagaugccacccccacgugaacggcguguucuucaacggcaucauccugggccccgacggccacgugcugauccccgagaugcagagcagccugcugcagcagcacauggagcugcuggagagcagcgugaucccccugaugcacccccuggccgaccccagcaccguguucaaggacggcgacgaggccgaggacuucguggaggugcaccugcccgacgugcacaagcaggugagcggcguggaccugggccugcccagcuggggcaaguacgugcugaugagcgugggcgccaugaucgcccugaugcugaugaucuuccugaugaccugcugcagaaaggccaacggcgccgagagcauccagcacagacugggcgagaccggcagaaaggugagcgugaccagccagagcggcagagugaucagcagcugggagagcuacaagagcggcggcgagaccaagcuguga

SEQ ID NO: 190568 - RNA, 1575 nt, Artificial Sequence
  derived and/or modified CDS sequence (opt4) from glycoprotein__RABV__AB085828.1
auggugccccaggugcugcuguucgccccccugcuggugagcccccugugcuucggcaaguuccccaucuacaccauccccgacaagcugggccccuggagccccaucgaccugcaccaccugagcugccccaacaaccuggugguggaggacgagggcugcaccaaccugagcggcuucagcuacauggagcugaaggugggcuacaucagcgccaucaaggugaacggcuucaccugcaccggcguggugaccgaggccgagaccuacaccaacuucgugggcuacgugaccaccaccuucaagagaaagcacuucagacccacccccgacgccugcagagccgccuacaacuggaagauggccggcgaccccagauacgaggagagccugcacaaccccuaccccgacuaccacuggcugagaaccgugaagaccaccaaggagagccuggugaucaucagccccagcgugaccgaccuggaccccuacgacaagagccugcacagcagaguguuccccggcggcaacugcagcggcaucaccgugagcagcaccuacugcagcaccaaccacgacuacaccaucuggaugcccgagaaccugagacugggcaccagcugcgacaucuucacccacagcagaggcaagagagccagcaagggcgacaagaccugcggcuucguggacgagagaggccuguacaagagccugaagggcgccugcaagcugaagcugugcggcgugcugggccugagacugauggacggcaccuggguggccaugcagaccagcgacgagaccaaguggugcccccccggccagcuggugaaccugcacgacuucagaagcgacgagaucgagcaccugguggaggaggagcuggugaagaagagagaggagugccuggacgcccuggagagcaucaugaccaccaagagcgugagcuucagaagacugagccaccugagaaagcuggugcccggcuucggcaaggccuacaccaucuucaacaagacccugauggaggccgacgcccacuacaagagcgugcagaccuggaacgagaucauccccagcaagggcugccugagagugggcgagagaugccacccccacgugaacggcguguucuucaacggcaucauccugggcagcgacggccacgugcugauccccgagaugcagagcagccugcugcagcagcacauggagcugcuggagagcagcgugaucccccugaugcacccccuggccgaccccagcaccguguucaaggacggcgacgagguggaggacuucguggaggugcaccugcccgacgugcacaagcaggugagcggcguggaccugggccugcccaaguggggcaaguacgugcugaugaucgccggcgcccugaucgcccugaugcugaucaucuuccugaugaccugcugcagaagagugaacagacccgagagcacccagagcaaccugggcggcaccggcagaaacgugagcgugcccagccagagcggcaaggugaucagcagcugggagagcuacaagagcggcggcgagaccagacuguga

SEQ ID NO: 190569 - RNA, 1575 nt, Artificial Sequence
  derived and/or modified CDS sequence (opt4) from glycoprotein__RABV__AB110656.1
auggugccccaggcccugcuguucgugccccugcuggccuucagcuucugcuucggcaaguuccccaucuacaccauccccgacaagcugggccccuggagccccaucgacauccaccaccugagcugccccaacaaccuggugguggaggacgagggcugcaccaaccugagcggcuucagcuacauggagcugaaggugggcuacaucagcgccaucaaggugaacggcuucaccugcaccggcguggugaccgaggccgagaccuacaccaacuucgugggcuacgugaccaccaccuucaagagaaagcacuucagacccacccccgacgccugcagaagcgccuacaacuggaagauggccggcgaccccagauacgaggagagccugcacaaccccuaccccgacuaccacuggcugagaaccgugaagaccaccaaggagagccuggugaucaucagccccagcguggccgaccuggaccccuacgacaagagccugcacagcagaguguuccccaacggcaagugcagcggcaucaccgugagcagcaccuacugcagcaccaaccacgacuacaccaucuggcugcccgagaaccccagacugggcaccagcugcgacaucuucaccaacagcagaggcaagagagccagcaagggcggcaagaccugcggcuucguggacgagagaggccuguacaagagccugaagggcgccugcaagcugaagcugugcggcgugcugggccugagacugauggacggcaccuggguggccaugcugaccagcgacgagaccaaguggugcccccccgaccagcuggugaaccugcacgacuucagaagcgacgagaucgagcaccuggugguggaggagcuggugaagaagagagaggagugccuggacgcccuggagagcaucaugaccaccaagagcgugagcuucagaagacugagccaccugagaaagcuggugcccggcuucggcaaggccuacaccaucuucaacaagacccugauggaggccgacgcccacuacaagagcaucagaaccuggaacgagaucauccccagcaagggcugccugagagugggcggcagaugccacccccacgugaacggcguguucuucaacggcaucauccugggccccgacggccacgugcugauccccgagaugcagagcagccugcugcagcagcacauggagcugcuggagagcagcgugaucccccugaugcacccccuggccgaccccagcaccguguucaaggacggcgacgaggccgaggacuucguggaggugcaccugcccgacgugcacaagcaggugagcggcguggaccugggccugcccaacuggggcaaguacgugcugaugagcgccggcgugcugaucgcccugaugcugaccaucuuccugaugaccugcugcagaagagugaacagacccgacagcacccagagaagccugggcaugaccggcagaaaggugagcgugaccagccagagcggcaaggugaucagcagcugggagagcuacaagagcggcggcgagaccagacuguga

SEQ ID NO: 190570 - RNA, 1575 nt, Artificial Sequence
  derived and/or modified CDS sequence (opt4) from glycoprotein__RABV__AB110657.1
auggugccccaggcccugcuguucgugccccugcuggccuucagcuucugcuucggcaaguuccccaucuacaccauccccgacaagcugggccccuggagccccaucgacauccaccaccugagcugccccaacaaccuggugguggaggacgagggcugcaccaaccugagcggcuucagcuacauggagcugaaggugggcuacaucagcgccaucaaggugaacggcuucaccugcaccggcguggugaccgaggccgagaccuacaccaacuucgugggcuacgugaccaccaccuucaagagaaagcacuucagacccacccccgacgccugcagaagcgccuacaacuggaagauggccggcgaccccagauacgaggagagccugcacaaccccuaccccgacuaccacuggcugagaaccgugaagaccaccaaggagagccuggugaucaucagccccagcguggccgaccuggaccccuacgacaagagccugcacagcagaguguuccccaacggcaagugcagcggcaucaccgugagcagcaccuacugcagcaccaaccacgacuacaccaucuggcugcccgagaaccccagacugggcaccagcugcgacaucuucaccaacagcagaggcaagagagccagcaagggcggcaagaccugcggcuucguggacgagagaggccuguacaagagccugaagggcgccugcaagcugaagcugugcggcgugcugggccugagacugauggacggcaccuggguggccaugcagaccagcgacgagaccaaguggugcccccccgaccagcuggugaaccugcacgacuucagaagcgacgagaucgagcaccuggugguggaggagcuggugaagaagagagaggagugccuggacgcccuggagagcaucaugaccaccaagagcgugagcuucagaagacugagccaccugagaaagcuggugcccggcuucggcaaggccuacaccaucuucaacaagacccugauggaggccgacgcccacuacaagagcaucagaaccuggaacgagaucauccccagcaagggcugccugagagugggcggcagaugccacccccacgugaacggcguguucuucaacggcaucauccugggccccgacggccacgugcugauccccgagaugcagagcagccugcugcagcagcacauggagcugcuggagagcagcgugaucccccugaugcacccccuggccgaccccagcaccguguucaaggacggcgacgaggccgaggacuucguggaggugcaccugcccgacgugcacaagcaggugagcggcguggaccugggccugcccaacuggggcaaguacgugcugaugagcgccggcgugcugaucgcccugaugcugaccaucuuccugaugaccugcugcagaagagugaacagacccgacagcacccagagaagccugggcaugaccggcagaaaggugagcgugaccagccagagcggcaaggugaucagcagcugggagagcuacaagagcggcggcgagaccagacuguga

SEQ ID NO: 190571 - RNA, 1575 nt, Artificial Sequence
  derived and/or modified CDS sequence (opt4) from glycoprotein__RABV__AB110658.1
auggugccccaggcccugcuguucgugccccugcuggccuucagcuucugcuucggcaaguuccccaucuacaccauccccgacaagcugggccccuggagccccaucgacauccaccaccugagcugccccaacaaccuggugguggaggacgagggcugcaccaaccugagcggcuucagcuacauggagcugaaggugggcuacaucagcgccaucaaggugaacggcuucaccugcaccggcguggugaccgaggccgagaccuacaccaacuucgugggcuacgugaccaccaccuucaagagaaagcacuucagacccacccccgacgccugcagaagcgccuacaacuggaagauggccggcgaccccagauacgaggagagccugcacaaccccuaccccgacuaccacuggcugagaaccgugaagaccaccaaggagagccuggugaucaucagccccagcguggccgaccuggaccccuacgacaagagccugcacagcagaguguuccccaacggcaagugcagcggcaucaccgugagcagcaccuacugcagcaccaaccacgacuacaccaucuggcugcccgagaaccccagacugggcaccagcugcgacaucuucaccaacagcagaggcaagagagccagcaagggcagcaagaccugcggcuucguggacgagagaggccuguacaagagccugaagggcgccugcaagcugaagcugugcggcgugcugggccugagacugauggacggcaccuggguggccaugcagaccagcgacgagaccaaguggugcagccccgaccagcuggugaaccugcacgacuucagaagcgacgagaucgagcaccuggugguggaggagcuggugaagaagagagaggagugccuggacgcccuggagagcaucaugaccaccaagagcgugagcuucagaagacugagccaccugagaaagcuggugcccggcuucggcaaggccuacaccaucuucaacaagacccugauggaggccgacgcccacuacaagagcaucagaaccuggaacgagaucauccccagcaagggcugccugagagugggcggcagaugccacccccacgugaacggcguguucuucaacggcaucauccugggccccgacggccacgugcugauccccgagaugcagagcagccugcugcagcagcacauggagcugcuggagagcagcgugaucccccugaugcacccccuggccgaccccagcaccguguucaaggacggcgacgaggccgaggacuucguggaggugcaccugcccgacgugcacaagcaggugagcggcguggaccugggccugcccaacuggggcaaguacgugcugaugagcgccggcgugcugaucgcccugaugcugaccaucuuccugaugaccugcugcagaagagugaacagacccgacagcacccagagaagccugggcaugaccggcagaaaggugagcgugaccagccagagcggcaaggugaucagcagcugggagagcuacaagagcggcggcgagaccagacuguga

SEQ ID NO: 190572 - RNA, 1575 nt, Artificial Sequence
  derived and/or modified CDS sequence (opt4) from glycoprotein__RABV__AB110659.1
auggugccccaggcccugcuguucgugccccugcuggccuucagcuucugcuucggcaaguuccccaucuacaccauccccgacaagcugggccccuggagccccaucgacauccaccaccugagcugccccaacaaccuggugguggaggacgagggcugcaccaaccugagcggcuucagcuacauggagcugaaggugggcuacaucagcgccaucaaggugaacggcuucaccugcaccggcguggugaccgaggccgagaccuacaccaacuucgugggcuacgugaccaccaccuucaagagaaagcacuucagacccacccccgacgccugcagaagcgccuacaacuggaagauggccggcgaccccagauacgaggagagccugcacaaccccuaccccgacuaccacuggcugagaaccgugaagaccaccaaggagagccuggugaucaucagccccagcguggccgaccuggaccccuacgacaagagccugcacagcagaguguuccccaacggcaagugcagcggcaucaccgugagcagcaccuacugcagcaccaaccacgacuacaccaucuggcugcccgagaaccccagacugggcaccagcugcgacaucuucaccaacagcagaggcaagagagccagcaagggcagcaagaccugcggcuucguggacgagagaggccuguacaagagccugaagggcgccugcaagcugaagcugugcggcgugcugggccugagacugauggacggcaccuggguggccaugcagaccagcgacgagaccaaguggugcccccccgaccagcuggugaaccugcacgacuucagaagcgacgagaucgagcaccuggugguggaggagcuggugaagaagagagaggagugccuggacgcccuggagagcaucaugaccaccaagagcgugagcuucagaagacugagccaccugagaaagcuggugcccggcuucggcaaggccuacaccaucuucaacaagacccugauggaggccgacgcccacuacaagagcaucagaaccuggaacgagaucauccccagcaagggcugccugagagugggcggcagaugccacccccacgugaacggcguguucuucuacggcaucauccugggccccgacggccacgugcugauccccgagaugcagagcagccugcugcagcagcacauggagcugcuggagagcagcgugaucccccugaugcacccccuggccgaccccagcaccguguucaaggacggcgacgaggccgaggacuucguggaggugcaccugcccgacgugcacaagcaggugagcggcguggaccugggccugcccaacuggggcaaguacgugcugaugagcgccggcgugcugaucgcccugaugcugaccaucuuccugaugaccugcugcagaagagugaacagacccgacagcacccagagaagccugggcaugaccggcagaaaggugagcgugaccagccagagcggcaaggugaucagcagcugggagagcuacaagagcggcggcgagaccagacuguga

SEQ ID NO: 190573 - RNA, 1575 nt, Artificial Sequence
  derived and/or modified CDS sequence (opt4) from glycoprotein__RABV__AB110660.1
auggugccccaggcccugcuguucgugccccugcuggccuucagcuucugcuucggcaaguuccccaucuacaccauccccgacaagcugggccccuggagccccaucgacauccaccaccugagcugccccaacaaccuggugguggaggacgagggcugcgccaaccugagcggcuucagcuacauggagcugaaggugggcuacaucagcgccaucaaggugaacggcuucaccugcaccggcguggugaccgaggccgagaccuacaccaacuucgugggcuacgugaccaccaccuucaagagaaagcacuucagacccacccccgacgccugcagaagcgccuacaacuggaagauggccggcgaccccagauacgaggagagccugcacaaccccuaccccgacuaccacuggcugagaaccgugaagaccaccaaggagagccuggugaucaucagccccagcguggccgaccuggaccccuacgacaagagccugcacagcagaguguuccccaacggcaagugcagcggcaucaccgugagcagcaccuacugcagcaccaaccacgacuacaccaucuggcugcccgagaaccccagacugggcaccagcugcgacaucuucaccaacagcagaggcaagagagccagcaagggcggcaagaccugcggcuucguggacgagagaggccuguacaagagccugaagggcgccugcaagcugaagcugugcggcgugcugggccugagacugauggacggcaccuggguggccaugcagaccagcgacgagaccaaguggugcccccccgaccagcuggugaaccugcacgacuucagaagcgacgagaucgagcaccuggugguggaggagcuggugaagaagagagaggagugccuggacgcccuggagagcaucaugaccaccaagagcgugagcuucagaggccugagccaccugagaaagcuggugcccggcuucggcaaggccuacaccaucuucaacaagacccugauggaggccgacgcccacuacaagagcaucagaaccuggaacgagaucauccccagcaagggcugccugaccgugggcggcagaugccacccccacgugaacggcguguucuucaacggcaucauccugggccccgacggccacgugcugauccccgagaugcagagcagccugcugcagcagcacauggagcugcuggagagcagcgugaucccccugaugcacccccuggccgaccccagcaccguguucaaggacggcgacgaggccgaggacuucguggaggugcaccugcccgacgugcacaagcaggugagcggcguggaccugggccugcccaacuggggcaaguacgugcugaugagcgccggcgugcugaucgcccugaugcugaccaucuuccugaugaccugcugcagaagagugaacggccccgacagcacccagagaagccugggcaugaccggcagaaaggugagcgugaccagccagagcggcaaggugaucagcagcugggagagcuacaagagcggcggcgagaccagacuguga

SEQ ID NO: 190574 - RNA, 1575 nt, Artificial Sequence
  derived and/or modified CDS sequence (opt4) from glycoprotein__RABV__AB110661.1
auggugccccaggcccugcuguucgugccccugcuggccuucagcuucugcuucggcaaguuccccaucuacaccauccccgacaagcugggccccuggagccccaucgacauccaccaccugagcugccccaacaaccuggugguggaggacgagggcugcaccaaccugagcggcuucagcuacauggagcugaaggugggcuacaucagcgccaucaaggugaacggcuucaccugcaccggcguggugaccgaggccgagaccuacaccaacuucgugggcuacgugaccaccaccuucaagagaaagcacuucagacccacccccgacgccugcagaagcgccuacaacuggaagauggccggcgaccccagauacgaggagagccugcacaaccccuaccccgacuaccacuggcugagaaccgugaagaccaccaaggagagccuggugaucaucagccccagcguggccgaccuggaccccuacgacaagagccugcacagcagaguguuccccaacggcaagugcagcggcaucaccgugagcagcaccuacugcagcaccaaccacgacuacaccaucuggcugcccgagaaccccagacugggcaccagcugcgacaucuucaccaacagcagaggcaagagagccagcaagggcggcaagaccugcggcuucguggacgagagaggccuguacaagagccugaagggcgccugcaagcugaagcugugcggcgugcugggccugacccugauggacggcaccuggguggccaugcagaccagcgacgagaccaaguggugcccccccgaccagcuggugaaccugcacgacuucagaagcgacgagaucgagcaccuggugguggaggagcuggugaagaagagagaggagugccuggacgcccuggagagcaucaugaccaccaagagcgugagcuucagaagacugagccaccugagaaagcuggugcccggcuucggcaaggccuacaccaucuucaacaagacccugauggaggccgacgcccacuacaagagcaucagaaccuggaacgagaucauccccagcaagggcugccugagagugggcggcagaugccacccccacgugaacggcguguucuuccacggcaucauccugggccccgacggccacgugcugauccccgagaugcagagcagccugcugcagcagcacauggagcugcuggagagcagcgugaucccccugaugcacccccuggccgaccccagcaccguguucaaggacggcgacgaggccgaggacuucguggaggugcaccugcccgacgugcacaagcaggugagcggcguggaccugggccugcccaacuggggcaaguacgugcugaugagcgccggcgugcugaucgcccugaugcugaccaucuuccugaugaccugcugcagaagagugaacagacccgacagcacccagagaagccugggcaugaccggcagaaaggugagcgugaccagccagagcggcaaggugaucagcagcugggagagcuacaagagcggcggcgagaccagacuguga

SEQ ID NO: 190575 - RNA, 1575 nt, Artificial Sequence
  derived and/or modified CDS sequence (opt4) from glycoprotein__RABV__AB110662.1
augauccugcaggcccugcuguucgugccccugcugaucagcagccugugccugggcaaguuccccaucuacaccauccccgacaagcugggccccuggagccccaucgacauccaccaccugagcugccccaacaaccuggugguggaggacgagggcugcaccaaccugagcggcuucagcuacauggagcugaaggugggcuacaucagcgccaucaaggugaacggcuucaccugcaccggcguggugaccgaggccgagaccuacaccaacuucgugggcuacgugaccaccaccuucaagagaaagcacuucagacccauccccgacgccugcagagccgccuacaacuggaagauggccggcgaccccagauacgaggagagccugcagaaccccuaccccgacuaccacuggcugagaaccgugaagaccaccaaggagagccugaucaucaucagccccagcguggccgaccuggaccccuacgacaagagccugcacagcagaguguuccccggcggcaagugccugggcaucaccgugagcagcaccuacugcagcaccaaccacgacuacaccaucuggaugcccgaggagcccagacugggcaccagcugcgacaucuucaccagcagcaagggcaagaaggccagcaagggcggcaagaccugcggcuucguggacgagagaggccuguacaagagccugaagggcgccugcaagcugaagcugugcggcgugcugggccugagacugauggacggcaccugggugagcauccccaccagcgacgacaccaaguggugcccccccgaccagcuggugaaccugcacgacuuccacagcgacgagaucgagcaccuggugguggaggagcuggugaagaagagagaggagugccuggacgcccuggagagcaucaugaccaccaagagcgugagcuucagaagacugagcuaccugagaaagcuggugcccggcuucggcaaggccuacaccaucuucaacaagacccugauggaggccgacgcccacuacaagagcgugagaaccuggaacgagaucauccccagcaagggcugccugaaggugagagagagaugccacccccccguggacggcguguucuucaacggcaucauccugggccccgacggcaacgugcugauccccgagaugcagagcagccugcugcagcagcacauggagcugcuggagagcagcgugaucccccugaugcacccccuggccgaccccagcaccguguucaaggagggcgacgaggccgaggacuucguggaggugcaccugcccgacgugcacaagcagaucagcggcguggaccugggccugcccagcuggggcaaguaccugcugaugaucgccggcggccuggccacccuggugcugaucaucugcagcauggccugcugcagaagaaccaagagaaccgagagcagaagaagaggcagcagagagagcgagaagaaggugaccgccaccccccagaccagaaagguggugagcagcugggagcuguacaagagcgagggcgacgccagacuguga

SEQ ID NO: 190576 - RNA, 1575 nt, Artificial Sequence
  derived and/or modified CDS sequence (opt4) from glycoprotein__RABV__AB110663.1
augauccugcaggcccugcuguucgugccccugcugaucagcagccugugccugggcaaguuccccaucuacaccauccccgacaagcugggccccuggagccccaucgacauccaccaccugagcugccccaacaaccuggugguggaggacgagggcugcaccaaccugagcggcuucagcuacauggagcugaaggugggcuacaucagcgccaucaaggugaacggcuucaccugcaccggcguggugaccgaggccgagaccuacaccaacuucgugggcuacgugaccaccaccuucaagagaaagcacuucagacccauccccgacgccugcagagccgccuacaacuggaagauggccggcgaccccagauacgaggagagccugcagaaccccuaccccgacuaccacuggcugagaaccgugaagaccaccaaggagagccugaucaucaucagccccagcguggccgaccuggaccccuacgacaagagccugcacagcagaguguuccccggcggcaagugccugggcaucaccgugagcagcaccuacugcagcaccaaccacgacuacaccaucuggaugcccgaggagcccagacugggcaccagcugcgacaucuucaccagcagcaagggcaagaaggccagcaagggcggcaagaccugcggcuucguggacgagagaggccuguacaagagccugaagggcgccugcaagcugaagcugugcggcgugcugggccugagacugauggacggcaccugggugagcauccagaccagcgacgacaccaaguggugcccccccgaccagcuggugaaccugcacgacuuccacagcgacgagaucgagcaccuggugguggaggagcuggugaagaagagagaggagugccuggacgcccuggagagcaucaugaccaccaagagcgugagcuucagaagacugagcuaccugagaaagcuggugcccggcuucggcaaggccuacaccaucuucaacaagacccugauggaggccgacgcccacuacaagagcgugagaaccuggaacgagaucauccccagcaagggcugccugaaggugagagagagaugccacccccccguggacggcguguucuucaacggcaucauccugggccccgacggcaacgugcugauccccgagaugcagagcagccugcugcagcagcacauggagcugcuggagagcagcgugaucccccugaugcacccccuggccgaccccagcaccguguucaaggagggcgacgaggccgaggacuucguggaggugcaccugcccgacgugcacaagcagaucagcggcguggaccugggccugcccagcuggggcaaguaccugcugaugaucgccggcggccuggccgcccuggugcugaucaucugcagcauggccugcugcagaagaaccaagagaaccgagagcagaagaagaggcagcggcgagagcgagaagaaggugaccgccaccccccagaccagaaagguggugagcagcugggagcuguacaagagcgagggcgacgccagacuguga

SEQ ID NO: 190577 - RNA, 1575 nt, Artificial Sequence
  derived and/or modified CDS sequence (opt4) from glycoprotein__RABV__AB110664.1
augauccugcaggcccugcuguucgugccccugcugaucagcagccugugccugggcaaguuccccaucuacaccauccccgacaagcugggccccuggagccccaucgacauccaccaccugagcugccccaacaaccuggugguggaggacgagggcugcaccaaccugagcggcuucagcuacauggagcugaaggugggcuacaucagcgccaucaaggugaacggcuucaccugcaccggcguggugaccgaggccgagaccuacaccaacuucgugggcuacgugaccaccaccuucaagagaaagcacuucagacccauccccgacgccugcagagccgccuacaacuggaagauggccggcgaccccagauacgaggagagccugcagaaccccuaccccgacuaccacuggcugagaaccgugaagaccaccaaggagagccugaucaucaucagccccagcguggccgaccuggaccccuacgacaagagccugcacagcagaguguuccccggcggcaagugccugggcaucaccgugagcagcaccuacugcagcaccaaccacgacuacaccaucuggaugcccgaggagcccagacugggcaccagcugcgacaucuucaccagcagcaagggcaagaaggccagcaagggcggcagaaccugcggcuucguggacgagagaggccuguacaagagccugaagggcgccugcaagcugaagcugugcggcgugcugggccugagacugauggacggcaccugggugagcauccagaccagcgacgacaccaaguggugcccccccgaccagcuggugaaccugcacgacuuccacagcgacgagaucgagcaccuggugguggaggagcuggugaagaagagagaggagugccuggacgcccuggagagcaucaugaccaccaagagcgugagcuucagaagacugagcuaccugagaaagcuggugcccggcuucggcaaggccuacaccaucuucaacaagacccugauggaggccgacgcccacuacaagagcgugagaaccuggaacgagaucauccccagcaaguggugccugaaggugagagagagaugccacccccccguggacggcguguucuucaacggcaucauccugggccccgacggcaacgugcugauccccgagaugcagagcagccugcugcagcagcacauggagcugcuggagagcagcgugaucccccugaugcacccccuggccgaccccagcaccguguucaaggagggcgacgaggccgaggacuucguggaggugcaccugcccgacgugcacaagcagaucagcggcguggaccugggccugcccagcuggggcaaguaccugcugaugaucgccggcggccuggccacccuggugcugaucaucugcagcauggccugcugcagaagaaccaagagaaccgagagcagaagaagaggcagcggcgagagcgagaagaaggugaccgccaccccccagaccagaaagguggugagcagcugggagcuguacaagagcgagggcgacgccagacuguga

SEQ ID NO: 190578 - RNA, 1575 nt, Artificial Sequence
  derived and/or modified CDS sequence (opt4) from glycoprotein__RABV__AB110665.1
augauccugcaggcccugcuguucgugccccugcugaucagcagccugugccugggcaaguuccccaucuacaccauccccgacaagcugggccccuggagccccaucgacauccaccaccugagcugccccaacaaccuggugguggaggacgagggcugcaccaaccugagcggcuucagcuacauggagcugaaggugggcuacaucagcgccaucaaggugagcggcuucaccugcaccggcguggugaccgaggccgagaccuacaccaacuucgugggcuacgugaccaccaccuucaagagaaagcacuucagacccauccccgacgccugcagagccgccuacaacuggaagauggccggcgaccccagauacgaggagagccugcacaaccccuaccccgacuaccacuggcugagaaccgugaagaccaccaaggagagccugaucaucaucagccccagcguggccgaccuggaccccuacgacaagagccugcacagcagaguguuccccggcggcaagugccugggcaucaccgugagcagcaccuacugcagcaccaaccacgacuacaccaucuggaugcccgaggagcccagacugggcaccagcugcgacaucuucaccagcagcaagggcaagaaggccagcaagggcggcaagaccugcggcuucguggacgagagaggccuguacaagagccugaagggcgccugcaagcugaagcugugcggcgugcugggccugagacugauggacggcaccugggugagcauccagaccagcgacaacaccaaguggugcccccccgaccagcuggugaaccugcacgacuuccacagcgacgagaucgagcaccuggugguggaggagcuggugaagaagagagaggagugccuggacgcccuggagagcaucaugaccaccaagagcgugagcuucagaagacugagcuaccugagaaagcuggugcccggcuucggcaaggccuacaccaucuucaacaagacccugauggaggccgacgcccacuacaagagcgugagaaccuggaacgagaucauccccagcaagggcugccugaaggugagagagagaugccacccccccguggacggcguguucuucaacggcaucauccugggccccgacggcaacgugcugauccccgagaugcagagcagccugcugcagcagcacauggagcugcuggagagcagcgugaucccccugaugcacccccuggccgaccccagcaccguguucaaggagggcgacgaggccgaggacuucguggaggugcaccugcccgacgugcacaagcagaucagcggcguggaccugggccugcccagcuggggcaaguaccugcugaugaucgccggcggccuggccacccuggugcugaucaucugcagcauggccugcugcagaagaaccaagagaaccgagagcagaagaagaggcagcggcgagagcgagaagaaggugaccgugaccccccagaccggcaagguggugagcagcugggagcuguacaagagcgagggcgacgccagacuguga

SEQ ID NO: 190579 - RNA, 1575 nt, Artificial Sequence
  derived and/or modified CDS sequence (opt4) from glycoprotein__RABV__AB110666.1
augauccugcaggcccugcuguucgugcccuuccugaucagcagccugugccugggcaaguuccccaucuacaccauccccgacaagcugggccccuggagccccaucgacauccaccaccugagcugccccaacaaccuggugguggaggacgagggcugcaccaaccugagcggcuucagcuacauggagcugaaggugggcuacaucagcgccaucaaggugaacggcuucaccugcaccggcguggugaccgaggccgagaccuacaccaacuucgugggcuacgugaccaccaccuucaagagaaagcacuucagacccauccccgacgccugcagagccgccuacaacuggaagauggccggcgaccccagauacgaggagagccugcagaaccccuaccccgacuaccacuggcugagaaccgugaagaccaccaaggagagccugaucaucaucagccccagcguggccgaccuggaccccuacgacaagagccugcacagcagaguguuccccggcggcaagugccugggcaucaccgugagcagcaccuacugcagcaccaaccacgacuacaccaucuggaugcccgaggagcccagacugggcaccagcugcgacaucuucaccagcagcaagggcaagaaggccagcaagggcggcaagaccugcggcuucguggacgagagaggccuguacaagagccugaagggcgccugcaagcugaagcugugcggcgugcugggccugagacugauggacggcaccugggugagcauccccaccagcgacgacaccaaguggugcccccccgaccagcuggugaaccugcacgacuuccacagcgacgagaucgagcaccuggugguggaggagcuggugaagaagagagaggagugccuggacgcccuggagagcaucaugaccaccaagagcgugagcuucagaagacugagcuaccugagaaagcuggugcccggcuucggcaaggccuacaccaucuucaacaagacccugauggaggccgacgcccacuacaagagcgugagaaccuggaacgagaucauccccagcaagggcugccugaaggugagagagagaugccacccccccguggacggcguguucuucaacggcaucauccugggccccgacggcaacgugcugauccccgagaugcagagcagccugcugcagcagcacauggagcugcuggagagcagcgugaucccccugaugcacccccuggccgaccccagcaccguguucaaggagggcgacgaggccgaggacuucguggaggugcaccugcccgacgugcacaagcagaucagcggcguggaccugggccugcccagcuggggcaaguaccugcugaugaucgccggcggccuggccacccuggugcugaucaucugcagcauggccugcugcagaagaaccaagagaaccgagagcagaagaagaggcagcggcgagagcggcgagaaggugaccaccaccccccagaccagaaagguggugagcagcugggagcuguacaagagcgagggcgacgccagacuguga

SEQ ID NO: 190580 - RNA, 1575 nt, Artificial Sequence
  derived and/or modified CDS sequence (opt4) from glycoprotein__RABV__AB110667.1
augauccugcaggcccugcuguucgugccccugcugaucagcagcagcugccugggcaaguuccccaucuacaccauccccgacaagcugggccccuggagccccaucgacauccaccaccugagcugccccaacaaccuggugguggaggacgagggcugcaccaaccugagcggcuucagcuacauggagcugaaggugggcuacaucagcgccaucaaggugaacggcuucaccugcaccggcguggugaccgaggccgagaccuacaccaacuucgugggcuacgugaccaccaccuucaagagaaagcacuuccaccccauccccgacgccugcagagccgccuacaacuggaagauggccggcgaccccagauacgaggagagccugcagaaccccuaccccgacuaccacuggcugagaaccgugaagaccaccaaggagagccugaucaucaucagccccagcguggccgaccuggaccccuacgacaagagccugcacagcagaguguuccccggcggcaagugccugggcaucaccgugagcagcaccuacugcagcaccaaccacgacuacaccaucuggaugcccgaggagcccagacugggcaccagcugcgacaucuucaccagcagcaagggcaagaaggccagcaagggcggcaagaccugcggcuucguggacgagagaggccuguacaagagccugaagggcgccugcaagcugaagcugugcggcgugcugggccugagacugauggacggcaccugggugagcauccagaccagcgacgacaccaaguggugcccccccgaccagcuggugaaccugcacgacuuccacagcgacgagaucgagcaccuggugguggaggagcuggugaagaagagagaggagugccuggacgcccuggagagcaucaugaccaccaagagcgugagcuucagaagacugagcuaccugagaaagcuggugcccggcuucggcaaggccuacaccaucuucaacaagacccugauggaggccgacgcccacuacaagagcgugagaaccuggaacgagaucauccccagcaagggcugccugaaggugagagagagaugccacccccccguggacggcguguucuucaacggcaucauccugggccccgacggcaacgugcugauccccgagaugcagagcagccugcugcagcagcacauggagcugcuggagagcagcgugaucccccugaugcacccccuggccgaccccagcaccguguucaaggagggcgacgaggccgaggacuucguggaggugcaccugcccgacgugcacaagcagaucagcggcguggaccugggccugcccagcuggggcaaguaccugcugaugaucgccggcggccuggccacccuggugcugaucaucugcagcauggccugcugcagaagaaccaagagaaccgagagcagaagaagaggcagcggcgagagcggcaagaaggccaccgccaccccccagaccagaaagguggugagcagcugggagcuguacaagagcgagggcgacgccagacuguga

SEQ ID NO: 190581 - RNA, 1575 nt, Artificial Sequence
  derived and/or modified CDS sequence (opt4) from glycoprotein__RABV__AB110668.1
augauccugcaggcccugcuguucgugccccugcugaucagcagccugugccugggcaaguuccccaucuacaccauccccgacaagcugggccccuggagccccaucgacauccaccaccugagcugccccaacaaccuggugguggaggacgagggcugcaccaaccugagcggcuucagcuacauggagcugaaggugggcuacaucagcgccaucaaggugaacggcuucaccugcaccggcguggugaccgaggccgagaccuacaccaacuucgugggcuacgugaccaccaccuucaagagaaagcacuucagacccauccccgacgccugcagagccgccuacaacuggaagauggccggcgaccccagauacgaggagagccugcagaaccccuaccccgacuaccacuggcugagaaccgugaagaccaccaaggagagccugaucaucaucagccccagcguggccgaccuggaccccuacgacaagagccugcacagcagaguguuccccggcggcaagugccugggcaucaccgugagcagcaccuacugcagcaccaaccacgacuacaccaucuggaugcccgaggagcccagacugggcaccagcugcgacaucuucaccagcagcaagggcaagaaggccagcaagggcggcaagaccugcggcuucguggacgagagaggccuguacaagagccugaagggcgccugcaagcugaagcugugcggcgugcugggccugagacugauggacggcaccugggugagcauccagaccagcgacgacaccaaguggugcccccccgaccagcuggugaaccugcacgacuuccacagcgacgagaucgagcaccuggugguggaggagcuggugaagaagagagaggagugccuggacgcccuggagagcaucaugaccaccaagagcgugagcuucagaagacugagcuaccugagaaagcuggugcccggcuucggcaaggccuacaccaucuucaacaagacccugauggaggccgacgcccacuacaagagcgugagaaccuggaacgagaucauccccagcaagggcugccugaaggugagagagagaugccacccccccguggacggcguguucuucaacggcaucauccugggccccgacggcaacgugcugauccccgagaugcagagcagccugcugcagcagcacauggagcugcuggagagcagcgugaucccccugaugcacccccuggccgaccccagcaccguguucaaggagggcgacgaggccgaggacuucguggaggugcaccugcccgacgugcacaagcagaucagcggcguggaccugggccugcccagcuggggcaaguaccugcugaugaucgccggcggccuggccgcccuggugcugaucaucugcagcauggccugcugcagaagaaccaagagaaccggcagcagaagaagaggcagcggcgagagcgagaagaaggugaccgccaccccccagaccagaaagguggugagcagcugggagcuguacaagagcgagggcgacgccagacuguga

SEQ ID NO: 190582 - RNA, 1575 nt, Artificial Sequence
  derived and/or modified CDS sequence (opt4) from glycoprotein__RABV__AB110669.1
augauccugcaggcccugcuguucgugccccugcugaucagcagccugugccugggcaaguuccccaucuacaccauccccgacaagcugggccccuggagccccaucgacauccaccaccugagcugccccaacaaccuggugguggaggacgagggcugcaccaaccugagcggcuucagcuacauggagcugaaggugggcuacaucagcgccaucaaggugaacggcuucaccugcaccggcguggugaccgaggccgagaccuacaccaacuucgugggcuacgugaccaccaccuucaagagaaagcacuucagacccauccccgacgccugcagagccgccuacaacuggaagauggccggcgaccccagauacgaggagagccugcagaaccccuaccccgacuaccacuggcugagaaccgugaagaccaccaaggagagccugaucaucaucagccccagcguggccgaccuggaccccuacgacaagagccugcacagcagaguguuccccggcggcaagugccugggcaucaccgugagcagcaccuacugcagcaccaaccacgacuacaccaucuggaugcccgaggagcccagacugggcaccagcugcgacaucuucaccagcagcaagggcaagaaggccagcaagggcggcaagaccugcggcuucguggacgagagaggccuguacaagagccugaagggcgccugcaagcugaagcugugcggcgugcugggccugagacugauggacggcaccugggugagcauccagcaccccgacgacaccaaguggugcccccccgaccagcuggugaaccugcccgacuuccccagcgacgagaucgagcaccuggugcuggaggagcuggugaagaagagagaggagugccuggacgcccuggagagcaucaugaccaccaagagcgugagcuucagaagacugagcuaccugagaaagcuggugcccggcuucggcaaggccuacaccaucuucaacaagacccugauggaggccgacgcccacuacaagagcgugagaaccuggaacgagaucauccccagcaagggcugccugaaggugagagagagaugccacccccccguggacgagguguucuucaacggcaucauccugggccccgacggcaacgugcugauccccgagaugcagagcagccugcugcagcagcacauggagcugcuggagagcagcgugaucccccugaugcacccccuggccgaccccagcaccguguucaaggagggcgacgaggccgaggacuucguggaggugcaccugcccgacgugcacaagcagaucagcggcguggaccugggccugcccagcuggggcaaguaccugcugaugaucgccggcggccuggccgcccuggugcugaucaucugcagcauggccugcugcagaagaaccaagagaaccgagagcagaagaagaggcagcggcgagagcgagaagaaggugaccgccaccccccagaacagaaagguggugagcagcugggagcuguacaagagcgagggcgacgccagacuguga

SEQ ID NO: 190583 - RNA, 1575 nt, Artificial Sequence
  derived and/or modified CDS sequence (opt4) from glycoprotein__RABV__AB128149.1
auggugccccaggcccugcugcuggugcccauccugggcuucagcagcugcuucggcaaguuccccaucuacaccauccccgacacccugggccccuggagccccaucgacauccaccaccugagcugccccaacaaccuggugguggaggacgagggcugcaccaaccugagcggcuucagcuacauggagcugaaggugggcagaaucagcgccaucaaggugaacggcuucaccugcaccggcguggugaccgaggccgagaccuacaccaacuucgugggcuacgugaccaccaccuucaagagaaagcacuucagacccacccccgacgccugcagagccgccuacaacuggaagauggccggcgaccccagauacgaggagagccugcacagccccuaccccgacuaccacuggcugagaaccgugaagaccaccaaggagagccuggugaucaucagccccagcguggccgaccuggaccccuacgacaacagccugcacagcagaguguuccccagcggcaagugcagcggcaucaccgugagcagcguguacugcagcaccaaccacgacuacaccguguggaugcccgagauccugagacugggcaccagcugcgacaucuucaccaacagcagaggcaagagagccagcaagggcagcaagaccugcggcuucguggacgagagaggccuguacaagagccugaagggcgccugcaagcugaagcugugcggcgugcugggccugagacugauggacggcaccuggguggccaugcagaccagcaacgagaccaaguggugcccccccgaccagcuggugaaccugcacgaccugagaagcgacgagaucgagcaccuggugaucgaggagcuggugaagaagagagaggagugccuggacgcccuggagagcaucaucaccaccaagagcgugagcuucagaagacugagcuaccugagaaagcuggugcccggcuucggcaaggccuacaccaucuucaacaagacccugauggaggccgaggcccacuacaagagcgugagaaccuggaacgagaucauccccagcaagggcugccugagagugggcggcagaugccacccccacgugaacggcguguucuucaacggcaucauccugggccccgacggccacgugcugauccccgagaugcagagcagccugcugcagcagcacaucgagcugcuggagagcagcgugaucccccugaugcacccccuggccgaccccuucaccguguucaaggacggcgacgagaccgaggacuucaucgaggugcaccugcccgacgugcacgagcaggugagcggcguggaccugggccugcccaacuggggcgaguacgugcugcugagcgccggcacccugaucgcccugaugcugaucaucuuccugaugaccugcugcagaaagguggacagacccgagagcacccagagaagccugagaggcaccggcagaaacgugagcgugaccagccagagcggcaaguucauccccagcugggagagcuacaagagcggcggcgagaccggccuguga

SEQ ID NO: 190584 - RNA, 1575 nt, Artificial Sequence
  derived and/or modified CDS sequence (opt4) from glycoprotein__RABV__AB285215.1
auggugccccaggcccugcuguucgccccccugcugguguucagccugugcuucggcaaguuccccaucuacaccauccccgacaagcugggccccuggagccccaucgacauccaccaccugagcugccccaacaaccuggugguggaggacgagggcugcaccaaccugagcggcuucagcuacauggagcugaaggugggcuacaucagcgccaucaaggugaacggcuucaccugcaccggcguggugaccgaggccgagaccuacaccaacuucgugggcuacgugaccaccaccuucaagagaaagcacuucagacccauccccgacgccugcagagccgccuacaacuggaagauggccggcgaccccagauacgaggagagccugcacaaccccuaccccgacuaccacuggcugagaaccgugaagaccaccaaggagagccuggugaucaucagccccagcguggccgaccuggaccccuacgacaagagccugcacagcagaguguuccccagcggcaagugcagcggcaucaccgugagcagcaccuacugcagcaccaaccacgacuacaccaucuggaugcccgagaaccccagacugggcaccagcugcgacaucuucaccaacagcagaggcaagagagccagcaagggcggcaagaccugcggcuucguggacgagagaggccuguacaagagccugaagggcgccugcaagcugaagcugugcggcgugcugggccugagacugauggacggcaccuggguggccaugcagaccagcgacgagaccaaguggugcccccccgaccagcuggugaacaugcacgacuucagaagcgacgagaucgagcaccuggugguggaggagcuggugaagaagagagaggagugccuggacgcccuggagagcaucaugaccaccaagagcgugagcuucagaagacugagccaccugagaaagcuggugcccggcuucggcaaggccuacaccaucuucaacaagacccugauggaggccgacgcccacuacaagagcgugagaaccuggaacgagaucauccccagcaagggcugccugagagugggcggcagaugccacccccacgugaacggcguguucuucaacggcaucauccugggccccgacggccacgugcugauccccgagaugcagagcagccugcugcagcagcacauggagcugcuggagagcagcgugaucccccugaugcacccccuggccgaccccagcaccguguucaaggacggcgacgaggccgaggacuucguggaggugcaccugcccgacgugcacaagcaggugagcggcguggaccugggccugcccaacuggggcaaguacgugcugcugagcgccggcacccugaucgcccugaugcugaucaucuuccugaugaccugcugcagaagagugaacagacccgagagcacccagagaagccugggcggcaccggcagaaaggugagcgugaccagccagagcggcaaggugaucagcagcugggagagcuacaagagcggcggcgagaccagacuguga

SEQ ID NO: 190585 - RNA, 1575 nt, Artificial Sequence
  derived and/or modified CDS sequence (opt4) from glycoprotein__RABV__AB362483.1
auggugccccaggcccugcuguucgugccccugcugguguucagccugugcuucggcaaguuccccaucuacaccauccccgacaagcugggccccuggagccccaucgacauccaccaccugagcugccccaacaaccuggugguggaggacgagggcugcaccaaccugagcggcuucagcuacauggagcugaaggugggcuacaucagcgccaucaaggugaacggcuucaccugcaccggcguggugaccgaggccgagaccuacaccaacuucgugggcuacgugaccaccaccuucaagagaaagcacuucagacccacccccgacgccugcagagccgccuacaacuggaagauggccggcgaccccagauacgaggagagccugcacaaccccuaccccgacuaccacuggcugagaaccgugaagaccaccaaggagagccuggugaucaucagccccagcguggccgaccuggaccccuacgacaagagccugcacagcagaguguuccccagcggcaagugcagcggcaucaccgugagcagcaccuacugcagcaccaaccacgacuacaccaucuggaugcccgagaaccccagacugggcaccagcugcgacaucuucaccaacagcagaggcaagagagccagcaagggcagcaagaccugcggcuucguggacgagagaggccuguacaagagccugaagggcgccugcaagcugaagcugugcggcgugcugggccugagacugguggacggcaccuggaucgccaugcagaccagcgacgagaucaaguggugcccccccgaccagcuggugaaccugcacgacuucagaagcgacgagaucgagcaccuggugguggaggagcuggugaagaagagagaggagugccuggacgcccuggagagcaucgugaccaccaagagcgugagcuucagaagacugagccaccugagaaagcuggugcccggcuucggcaaggccuacaccaucuucaacaagacccugauggaggccgacgcccacuacaagagcaucagaaccuggaacgagaucauccccagcaagggcugccugagagugggcggcagaugccacccccacgugaacggcguguucuucaacggcaucauccugggccccgacggccacgugcugauccccgagaugcagagcagccugcugcagcagcacauggagcugcuggagagcagcguggugccccugaugcacccccuggccgaccccagcaccguguucaaggacggcgacgaggccgaggacuucaucgaggugcaccugcccgacgugcacaagcaggugagcggcguggaccugggccugcccgacuggggcaaguacgugcugaugagcgccggcgugcugaucgcccugaugcugaucaucagccugaugaccugcugcagaggcgugcacagacccaacagcauccagcacagacugggcggcaccggcagaaaggugagcgugaccagccagagcggcaaggugaucagcagcugggagagcuacaagagcggcggcgagaccagacuguga

SEQ ID NO: 190586 - RNA, 1575 nt, Artificial Sequence
  derived and/or modified CDS sequence (opt4) from glycoprotein__RABV__AB458799.1
auggugccccaggugcugcuguucgugccccugcugguguucagcagcugcuucggcaaguuccccaucuacaccauccccgacaagcugggccccuggagccccaucgacauccaccaccugagcugccccaacaaccuggugguggaggacgagggcugcaccaaccugagcggcuucagcuacauggagcugaaggugggcuacaucagcgccaucaaggugaacggcuucaccugcaccggcguggugaccgaggccgagaccuacaccaacuucgugggcuacgugaccaccaccuucaagagaaagcacuucagacccaugcccgacgccugcagagccgccuacaacuggaagauggccggcgaccccagauacgaggagagccugcacaaccccuaccccgacuaccacuggcugagaaccgugaagaccaccaaggagagccuggugaucaucagccccagcguggccgaccuggaccccuacgacaagagccugcacagcagaguguuccccggcggcaagugcagcggcaucaccgugagcagcaccugcugcagcaccaaccacgacuacaccaucuggaugcccgagaaccccagacugggcaccagcugcgacaucuucaccaacagcagaggcaagagagccagcaagggcggcaagaccugcggcuucguggacgagagaggccuguacaagagccugaagggcgccugcaagcugaagcugugcggcgugcugggccugagacugauggacggcaccuggguggccauccagaccagcgacgagaucaaguggugcagccccgaccagcuggugaaccugcacgacuuccacagcgacgagaucgagcaccuggugguggaggagcuggugaagaagagagaggagugccuggacgcccuggagaccaucaugaccaccaagagcgugagcuucagaagacugagccaccugagaaagcuggugcccggcuucggcaaggccuacaccaucuucaacaagacccugauggaggccgacgcccacuacaagagcaucagaaccuggaacgagaucauccccagcaagggcugccugagagugggcggcagaugccacccccacgugaacggcguguucuucaacggcaucauccugggccccgacggccacgugcugauccccgagaugcagagcagccugcugcaccagcacauggagcugcuggagagcagcgugaucccccugaugcacccccuggccgaccccagcaccguguucaaggacggcgacgaggccgaggacuucguggaggugcaccugcccgacgugcacaagcagaucagcggcguggaccugggccugcccaacuggggcaaguacgugcugaucagcgccggcgcccugaccgcccugaugcugaugaucuuccugaugaccugcugcagaaaggccaacagagccgagagcauccagcacaaccccggcgagaccggcagaaaggugagcgugaccagccacaacggcagagugaucagcagcugggagagcuacaagagcggcggcgagaccaagcuguga

SEQ ID NO: 190587 - RNA, 1575 nt, Artificial Sequence
  derived and/or modified CDS sequence (opt4) from glycoprotein__RABV__AB458800.1
auggugccccaggcccugcuguucgugccccugcuggccaucccccugugcuucggcaaguuccccaucuacaccauccccgacaagcugggccccuggagccccaucgacauccaccaccugagcugccccaacaaccuggugguggaggacgagggcugcaccaaccugagcggcuucagcuacauggagcugaaggugggcuacaucagcgccaucaaggugaacggcuucaccugcaccggcguggugaccgaggccgagaccuacaccaacuucgugggcuacgugaccaccaccuucaagagaaagcacuucagacccacccccgacgccugcagaagcgccuacaacuggaagauggccggcgaccccagauacgaggagagccugcacaaccccuaccccgacuaccacuggcugagaaccgugaagaccaccaaggagagcuucgugaucaucagccccagcguggccgaccuggaccccuacgacaagagccugcacagcagaguguuccccagaggcaagugcagcggcaucaccgugagcagcaccuacugcagcaccaaccacgacuacaccaucuggaugcccgagaaccccagacugggcaccagcugcgacaucuucaccaacagcagaggcaagagagccagcaagggcagcaagaccugcggcuucguggacgagagaggccuguacaagagccugaagggcgccugcaagcugaagcugugcggcgugcugggccugagacugauggacggcaccuggguggccauccagaccagcgacgagaccaaguggugcccccccgaccagcuggugaaccugcacgacuuccacagcgacgagaucgagcaccuggugguggaggagcuggugaagaagagagaggagugccuggacgcccuggagagcaucaugaccaccaagagcgugagcuucagaagacugagccaccugagaaagcuggugcccggcuucggcaaggccuacaccaucuucaacaagacccugauggaggccgacgcccacuacaagagcgugagaaccuggaacgagaucauccccagcaagggcugccugagagugggcggcagaugccacccccacgugaacggcguguucuucaacggcaucauccugggccccgacggccacgugcugauccccgagaugcagagcagccugcugcagcagcacauggagcugcuggagagcagcgugaucccccugaugcacccccuggccgaccccagcaccguguucaaggacggcgacgaggccgaggacuucguggaggugcaccugcccgacgugcacaagcaggugagcggcguggaccugggccugcccagcuggggcaaguacgugcugaugagcgccggcauccugaccgcccugaugcugaugaucuuccugaugaccugcugcagaagaaccaacagagccgagagcauccagcacagccugggcgagaccggcagaaaggugagcgugaccagccagagcggcagagugaucagcagcugggagagcuacaagagcggcggcgagaccaagcuguga

SEQ ID NO: 190588 - RNA, 1575 nt, Artificial Sequence; identical to SEQ ID NO: 190587
  derived and/or modified CDS sequence (opt4) from glycoprotein__RABV__AB458801.1

SEQ ID NO: 190589 - RNA, 1575 nt, Artificial Sequence; identical to SEQ ID NO: 190587
  derived and/or modified CDS sequence (opt4) from glycoprotein__RABV__AB458802.1

SEQ ID NO: 190590 - RNA, 1575 nt, Artificial Sequence; identical to SEQ ID NO: 190586
  derived and/or modified CDS sequence (opt4) from glycoprotein__RABV__AB458803.1

SEQ ID NO: 190591 - RNA, 1575 nt, Artificial Sequence
  derived and/or modified CDS sequence (opt4) from glycoprotein__RABV__AB458804.1
augaucccccaggugcugcuguucgugccccugcugguguucagcagcugcuucggcaaguuccccaucuacaccauccccgacaagcugggccccuggagccccaucgacauccaccaccugagcugccccaacaaccuggugguggaggacgagggcugcaccaaccugagcggcuucagcuacauggagcugaaggugggcuacaucagcgccaucaaggugaacggcuucaccugcaccggcguggugaccgaggccgagaccuacaccaacuucgugggcuacgugaccaccaccuucaagagaaagcacuucagacccaugcccgacgccugcagagccgccuacaacuggaagauggccggcgaccccagauacgaggagagccugcacaaccccuaccccgacuaccacuggcugagaaccgugaagaccaccaaggagagccuggugaucaucagccccagcguggccgaccuggaccccuacgacaagagccugcacagcagaguguuccccggcggcaagugcagcggcaucaccgugagcagcaccugcugcagcaccaaccacgacuacaccaucuggaugcccgagaaccccagacugggcaccagcugcgacaucuucaccaacagcagaggcaagagagccagcaagggcggcaagaccugcggcuucguggacgagagaggccuguacaagagccugaagggcgccugcaagcugaagcugugcggcgugcugggccugagacugauggacggcaccuggguggccauccagaccagcgacgagaucaaguggugcagccccgaccagcuggugaaccugcacgacuuccacagcgacgagaucgagcaccuggugguggaggagcuggugaagaagagagaggagugccuggacgcccuggagaccaucaugaccaccaagagcgugagcuucagaagacugagccaccugagaaagcuggugcccggcuucggcaaggccuacaccaucuucaacaagacccugauggaggccgacgcccacuacaagagcaucagaaccuggaacgagaucauccccagcaagggcugccugagagugggcggcagaugccacccccacgugaacggcguguucuucaacggcaucauccugggccccgacggccacgugcugauccccgagaugcagagcagccugcugcaccagcacauggagcugcuggagagcagcgugaucccccugaugcacccccuggccgaccccagcaccguguucaaggacggcgacgaggccgaggacuucguggaggugcaccugcccgacgugcacaagcagaucagcggcguggaccugggccugcccaacuggggcaaguacgugcugaccagcgccggcgcccugaccgcccugaugcugaugaucuuccugaugaccugcugcagaaagaccaacagagccgagagcauccagagaagccccggcgagaccgagagaaaggugagcgugaccagccacaacggcagagugaucagcagcugggagagcuacaagagcggcggcgagaccaagcuguga

SEQ ID NO: 190592 - RNA, 1575 nt, Artificial Sequence
  derived and/or modified CDS sequence (opt4) from glycoprotein__RABV__AB458805.1
auggugccccaggugcugcuguucgugccccugcugguguucagcagcugcuucggcaaguuccccaucuacaccauccccgacaagcugggccccuggagccccaucgacauccaccaccugagcugccccaacaaccuggugguggaggacgagggcugcaccaaccugagcggcuucagcuacauggagcugaaggugggcuacaucagcgccaucaaggugaacggcuucaccugcaccggcguggugaccgaggccgagaccuacaccaacuucgugggcuacgugaccaccaccuucaagagaaagcacuucagacccacccccgacgccugcagagccgccuacaacuggaagauggccggcgaccccagauacgaggagagccugcacaaccccuaccccgacuaccacuggcugagaaccgugaagaccaccaaggagagccuggugaucaucagccccagcguggccgaccuggaccccuacgacaagagccugcacagcagaguguuccccggcggcaagugcagcggcaucaccgugagcagcaccugcugcagcaccaaccacgacuacaccaucuggaugcccgagaaccccagacugggcaccagcugcgacaucuucaccaacagcagaggcaagagagccagcaagggcggcaagaccugcggcuucguggacgagagaggccuguacaagagccugaagggcgccugcaagcugaagcugugcggcgugcugggccugagacugauggacggcaccuggguggccauccagaccagcgacgagaucaaguggugcagccccgaccagcuggugaaccugcacgacuuccacagcgacgagaucgagcaccuggugguggaggagcuggugaagaagagagaggagugccuggacgcccuggagaccaucaugaccaccaagagcgugagcuucagaagacugagccaccugagaaagcuggugcccggcuucggcaaggccuacaccaucuucaacaagacccugauggaggccgacgcccacuacaagagcaucagaaccuggaacgagaucauccccagcaagggcugccugagagugggcggcagaugccacccccacgugaacggcguguucuucaacggcaucauccugggccccgacggccacgugcugauccccgagaugcagagcagccugcugcaccagcacauggagcugcuggagagcagcgugaucccccugaugcacccccuggccgaccccagcaccguguucaaggacggcgacgaggccgaggacuucguggaggugcaccugcccgacgugcacaagcagaucagcggcguggaccugggccugcccaacuggggcaaguacgugcugaucagcgccggcgcccugaccgcccugaugcugaugaucuuccugaugaccuucugcagaaaggccaacagagccgagagcauccagcacaaccccggcgagaccggcagaaaggugagcgugaccagccacaacggcagagugaucagcagcugggagagcuacaagagcggcggcgagaccaagcuguga

SEQ ID NO: 190593 - RNA, 1575 nt, Artificial Sequence; identical to SEQ ID NO: 190587
  derived and/or modified CDS sequence (opt4) from glycoprotein__RABV__AB458806.1

SEQ ID NO: 190594 - RNA, 1575 nt, Artificial Sequence
  derived and/or modified CDS sequence (opt4) from glycoprotein__RABV__AB496676.1
augauccugcaggcccugcuguucgugccccugcugaucagcagccugugccugggcaaguuccccaucuacaccauccccgacaagcugggccccuggagccccaucgacauccaccaccugagcugccccaacaaccuggugguggaggacgagggcugcaccaaccugagcggcuucagcuacauggagcugaaggugggcuacaucagcgccaucaaggugaacggcuucaccugcaccggcguggugaccgaggccgagaccuacaccaacuucgugggcuacgugaccaccaccuucaagagaaagcacuucagacccgugcccgacgccugcagagccgccuacaacuggaagauggccggcgaccccagauacgaggagagccugcagaaccccuaccccgacuaccacuggcugagaaccgugaagaccaccaaggagagccugaucaucaucagccccagcguggccgaccuggaccccuacgacaagagccugcacagcagaguguuccccggcggcaagugccugggcaucaccgugagcagcaccuacugcagcaccaaccacgacuacaccaucuggaugcccgaggagcccagacugggcaccagcugcgacaucuucaccagcagcaagggcaagaaggccagcaagggcggcaagaccugcggcuucguggacgagagaggccuguacaagagccugaagggcgccugcaagcugaagcugugcggcgugcugggccugagacugauggacggcaccugggugagcauccagaccagcgacgacaccaaguggugcccccccgaccagcuggugaaccugcacgacuuccacagcgacgagaucgagcaccuggugguggaggagcuggugaagaagagagaggagugccuggacgcccuggagagcaucaugaccaccaagagcgugagcuucagaagacugagcuaccugagaaagcuggugcccggcuucggcaaggccuacaccaucuucaacaagacccugauggaggccgacgcccacuacaagagcgugagaaccuggaacgagaucauccccagcaagggcugccugaaggugagagagagaugccacccccccguggacggcguguucuucaacggcaucauccugggccccgacggcaacgugcugauccccgagaugcagagcagccugcugcagcagcacauggagcugcuggagagcagcgugaucccccugaugcacccccuggccgaccccagcaccguguucaaggagggcgacgaggccgaggacuucguggaggugcaccugcccgacgugcacaagcagaucagcggcguggaccugggccugcccagcuggggcaaguaccugcugaugaucgccggcggccuggccgcccuggugcugaucaucugcagcauggccugcugcagaagaaccaagagaaccgagagcagaagaagaggcagcggcgagagcgagaagaagguggccgccaccccccagaccagaaaggugaucagcagcugggagcuguacaagagcgagggcgacgccagacuguga

SEQ ID NO: 190595 - RNA, 1575 nt, Artificial Sequence
  derived and/or modified CDS sequence (opt4) from glycoprotein__RABV__AB496677.1
augauccugcaggcccugcuguucgugccccugcugaucagcagccugugccugggcaaguuccccaucuacaccauccccgacaagcugggccccuggagccccaucgacauccaccaccugagcugccccaacaaccuggugguggaggacgagggcugcaccaaccugagcggcuucagcuacauggagcugaaggugggcuacaucagcgccaucaaggugaacggcuucaccugcaccggcguggugaccgaggccgagaccuacaccaacuucgugggcuacgugaccaccaccuucaagagaaagcacuucagacccgugcccgacgccugcagagccgccuacaacuggaagaucaccggcgaccccagauacgaggagagccugcagaaccccuaccccgacuaccacuggcugagaaccgugaagaccaccaaggagagccugaucaucaucagccccagcguggccgaccuggaccccuacgacaagagccugcacagcagaguguuccccggcggcaagugccugggcaucaccgugagcagcaccuacugcagcaccaaccacgacuacaccaucuggaugcccgaggagcccagacugggcaccagcugcgacaucuucaccagcagcaagggcaagaaggccagcaagggcggcaagaccugcggcuucguggacgagagaggccuguacaagagccugaagggcgccugcaagcugaagcugugcggcgugcugggccugagacugauggacggcaccugggugagcauccagaccagcgacgacaccaaguggugcccccccgaccagcuggugaaccugcacgacuuccacagcgacgagaucgagcaccuggugguggaggagcuggugaagaagagagaggagugccuggacgcccuggagagcaucaugaccaccaagagcgugagcuucagaagacugagcuaccugagaaagcuggugcccggcuucggcaaggccuacaccaucuucaacaagacccugauggaggccgacgcccacuacaagagcgugagaaccuggaacgagaucauccccagcaagggcugccugaaggugagagagagaugccacccccccguggacggcguguucuucaacggcaucauccugggccccgacggcaacgugcugauccccgagaugcagagcagccugcugcagcagcacauggagcugcuggagagcagcgugaucccccugaugcacccccuggccgaccccagcaccguguucaaggagggcgacgaggccgaggacuucguggaggugcaccugcccgacgugcacaagcagaucagcggcguggaccugggccugcccagcuggggcaaguaccugcugaugaucgccggcggccuggccgcccuggugcugaucaucugcagcauggccugcugcagaagaaccaagagaaccgagagcagaagaagaggcagcggcgagagcgagaagaaggugaccgccaccccccagaccagaaagguggugagcagcugggagcuguacaagagcgagggcgacgccagacuguga

SEQ ID NO: 190596 - RNA, 1575 nt, Artificial Sequence
  derived and/or modified CDS sequence (opt4) from glycoprotein__RABV__AB496678.1
augauccugcaggcccugcuguucgugccccugcugaucagcagccugugccugggcaaguuccccaucuacaccauccccgacaagcugggccccuggagccccaucgacauccaccaccugagcugccccaacaaccuggugguggaggacgagggcugcaccaaccugagcggcuucagcuacauggagcugaaggugggcuacaucagcgccaucaaggugaacggcuucaccugcaccggcguggugaccgaggccgagaccuacaccaacuucgugggcuacgugaccaccaccuucaagagaaagcacuucagacccaugcccgacgccugcagagccgccuacaacuggaagaugaccggcgaccccagauacgaggagagccugcagaaccccuaccccgacuaccacuggcugagaaccgugaagaccaccaaggagagccugaucaucaucagccccagcguggccgaccuggaccccuacgacaagagccugcacagcagaguguuccccggcggcaagugccugggcaucaccgugagcagcaccuacugcagcaccaaccacgacuacaccaucuggaugcccgaggagcccagacugggcaccagcugcgacaucuucaccagcagcaagggcaagaaggccagcaagggcggcaagaccugcggcuucguggacgagagaggccuguacaagagccugaagggcgccugcaagcugaagcugugcggcgugcugggccugagacugauggacggcaccugggugagcauccagaccagcgacgacaccaaguggugcccccccgaccagcuggugaaccugcacgacuuccacagcgacgagaucgagcaccuggugguggaggagcuggugaagaagagagaggagugccuggacgcccuggagagcaucaugaccaccaagagcgugagcuucagaagacugagcuaccugagaaagcuggugcccggcuucggcaaggccuacaccaucuucaacaagacccugauggaggccgacgcccacuacaagagcgugagaaccuggaacgagaucauccccagcaagggcugccugaaggugagagagagaugccacccccccguggacggcguguucuucaacggcaucauccugggccccgacggcaacgugcugauccccgagaugcagagcagccugcugcagcagcacauggagcugcuggagagcagcgugaucccccugaugcacccccuggccgaccccagcaccguguucaaggagggcgacgaggccgaggacuucguggaggugcaccugcccgacgugcacaagcagaucagcggcguggaccugggccugcccagcuggggcaaguaccugcugaugaucgccggcggccuggccgcccuggugcugaucaucugcagcauggccugcugcagaagaaccaagagaaccgagagcagaagaagaggcagcggcgagagcgagaagaaggugaccgccaccccccagaccagaaagguggugagcagcugggagcuguacaagagcgagggcgacgccagacuguga

SEQ ID NO: 190597 - RNA, 1575 nt, Artificial Sequence
  derived and/or modified CDS sequence (opt4) from glycoprotein__RABV__AB496679.1
augauccugcaggcccugcuguucgugccccugcugaucagcagccugugccugggcaaguuccccaucuacaccauccccgacaagcugggccccuggagccccaucgacauccaccaccugagcugccccaacaaccuggugguggaggacgagggcugcaccaaccugagcggcuucagcuacauggagcugaaggugggcuacaucagcgccaucaaggugaacggcuucaccugcaccggcguggugaccgaggccgagaccuacaccaacuucgugggcuacgugaccaccaccuucaagagaaagcacuucagacccauccccgacgccugcagagccgccuacaacuggaagauggccggcgaccccagauacgaggagagccugcagaaccccuaccccgacuaccacuggcugagaaccgugaagaccaccaaggagagccugaucaucaucagccccagcguggccgaccuggaccccuacgacaagagccugcacagcagaguguuccccggcggcaagugccugggcaucaccgugagcagcaccuacugcagcaccaaccacgacuacaccaucuggaugcccgaggagcccagacugggcaccagcugcgacaucuucaccagcagcaagggcaagaaggccagcaagggcggcaagaccugcggcuucguggacgagagaggccuguacaagagccugaagggcgccugcaagcugaagcugugcggcgugcugggccugagacugauggacggcaccugggugagcauccagaccagcgacgacaccaaguggugcccccccgaccagcuggugaaccugcacgacuuccacagcgacgagaucgagcaccuggugguggaggagcuggugaagaagagagaggagugccuggacgcccuggagagcaucaugaccaccaagagcgugagcuucagaagacugagcuaccugagaaagcuggugcccggcuucggcaaggccuacaccaucuucaacaagacccugauggaggccgacgcccacuacaagagcgugagaaccuggaacgagaucauccccagcaagggcugccugaaggugagagagagaugccacccccccguggacggcguguucuucaacggcaucauccugggccccgacggcaacgugcugauccccgagaugcagagcagccugcugcagcagcacauggagcugcuggagagcagcgugaucccccugaugcacccccuggccgaccccagcaccguguucaaggagggcgacgaggccgaggacuucguggaggugcaccugcccgacgugcacaagcagaucagcggcguggaccugggccugcccagcuggggcaaguaccugcugaugaucgccggcggccuggccgcccuggugcugaucaucugcagcauggccugcugcagaagaaccaagcagaccgagagcagaagaagaggcagcggcgagagcgagaagaaggugaccgccaccccccagaccaagaagguggugagcagcugggagcuguacaagagcgagggcgacgccagacuguga

SEQ ID NO: 190598 - RNA, 1575 nt, Artificial Sequence
  derived and/or modified CDS sequence (opt4) from glycoprotein__RABV__AB496680.1
augauccugcccgcccugcuguucgugccccugcugaucagcagccugugccugggcaaguuccccaucuacaccauccccgacaagcugggccccuggagccccaucgacauccaccaccugagcugccccaacaaccuggugguggaggacgagggcugcaccaaccugagcggcuucagcuacauggagcugaaggugggcuacaucagcgccaucaaggugaacggcuucaccugcaccggcguggugaccgaggccgagaccuacaccaacuucgugggcuacgugaccaccaccuucaagagaaagcacuucagacccauccccgacgccugcagagccgccuacaacuggaagauggccggcgaccccagauacgaggagagccugcagaaccccuaccccgacuaccacuggcugagaaccgugaagaccaccaaggagagccugaucaucaucagccccagcguggccgaccuggaccccuacgacaagagccugcacagcagaguguuccccggcggcaagugccugggcaucaccgugagcagcaccuacugcagcaccaaccacgacuacaccaucuggaugcccgaggagcccagacugggcaccagcugcgacaucuucaccagcagcaagggcaagaaggccagcaagggcggcaagaccugcggcuucguggacgagagaggccuguacaagagccugaagggcgccugcaagcugaagcugugcggcgugcugggccugagacugauggacggcaccugggugagcauccagaccagcgacgacaccaaguggugcccccccgaccagcuggugaaccugcacgacuuccacagcgacgagaucgagcaccuggugguggaggagcuggugaagaagagagaggagugccuggacgcccuggagagcaucaugaccaccaagagcgugagcuucagaagacugagcuaccugagaaagcuggugcccggcuucggcaaggccuacaccaucuucaacaagacccugauggaggccgacgcccacuacaagagcgugagaaccuggaacgagaucauccccagcaagggcugccugaaggugagagagagaugccacccccccguggacggcguguucuucaacggcaucauccugggccccgacggcaacgugcugauccccgagaugcagagcagccugcugcagcagcacauggagcugcuggagagcagcgugaucccccugaugcacccccuggccgaccccagcaccguguucaaggagggcgacgaggccgaggacuucguggaggugcaccugcccgacgugcacaagcagaucagcggcguggaccugggccugcccagcuggggcaaguaccugcugaugaucgccggcggccuggccacccuggugcugaucaucugcagcauggccugcugcagaagaaccaagagaaccgagagcagaagaagaggcagcggcgagagcgagaagaaggugaccgccaccccccagaccagaaagguggugagcagcugggagcuguacaagagcgagggcgacgccagacuguga

SEQ ID NO: 190599 - RNA, 1575 nt, Artificial Sequence
  derived and/or modified CDS sequence (opt4) from glycoprotein__RABV__AB496681.1
augauccugcaggcccugcuguucgugccccugcugaucagcagccugugccugggcaaguuccccaucuacaccauccccgacaagcugggccccuggagccccaucgacauccaccaccugagcugccccaacaaccuggugguggaggacgagggcugcaccaaccugagcggcuucagcuacauggagcugaaggugggcuacaucagcgccaucaaggugaacggcuucaccugcaccggcguggugaccgaggccgagaccuacaccaacuucgugggcuacgugaccaccaccuucaagagaaagcacuucagacccauccccgacgccugcagagccgccuacaacuggaagauggccggcgaccccagauacgaggagagccugcagaaccccuaccccgaguaccacuggcugagaaccgugaagaccaccaaggagagccugaucaucaucagccccagcguggccgaccuggaccccuacgacaagagccugcacagcagaguguuccccggcggcaagugccugggcaucaccgugagcagcaccuacugcagcaccaaccacgacuacaccaucuggaugcccgaggagcccagacugggcaccagcugcgacaucuucaccagcagcaagggcaagaaggccagcaagggcggcaagaccugcggcuucguggacgagagaggccuguacaagagccugaagggcgccugcaagcugaagcugugcggcgugcugggccugagacugauggacggcaccugggugagcauccagaccagcgacgacaccaaguggugcccccccgaccagcuggugaaccugcacgacuuccacagcgacgagaucgagcaccuggugguggaggagcuggugaagaagagagaggagugccuggacgcccuggagagcaucaugaccaccaagagcgugagcuucagaagacugagcuaccugagaaagcuggugcccggcuucggcaaggccuacaccaucuucaacaagacccugauggaggccgacgcccacuacaagagcgugagaaccuggaacgagaucauccccagcaagggcugccugaaggugagagagagaugccacccccccguggacggcguguucuucaacggcaucauccugggccccgacggcaacgugcugauccccgagaugcagagcagccugcugcagcagcacauggagcugcuggagagcagcgugaucccccugaugcacccccuggccgaccccagcaccguguucaaggagggcgacgaggccgaggacuucguggaggugcaccugcccgacgugcacaagcagaucagcggcguggaccugggccugcccagcuggggcaaguaccugcugaugaucgccggcggccuggccacccuggugcugaucaucugcagcauggccugcugcagaagaaccaagagaaccgagagcagaagaagaggcagcggcgagagcgagaagaacgugaccgccaccccccagaccagaaagguggugagcagcugggagcuguacaagagcgagggcgacgccagacuguga

SEQ ID NO: 190600 - RNA, 1575 nt, Artificial Sequence
  derived and/or modified CDS sequence (opt4) from glycoprotein__RABV__AB496682.1
augauccugcaggcccugcuguucgugccccugcugaucagcagcagcugccugggcaaguuccccaucuacaccauccccgacaagcugggccccuggagccccaucgacauccaccaccugagcugccccaacaaccuggugguggaggacgagggcugcaccaaccugagcggcuucagcuacauggagcugaaggugggcuacaucagcgccaucaaggugaacggcuucaccugcaccggcguggugaccgaggccgagaccuacaccaacuucgugggcuacgugaccaccaccuucaagagaaagcacuucagacccauccccgacgccugcagagccgccuacaacuggaagauggccggcgaccccagauacgaggagagccugcagaaccccuaccccgacuaccacuggcugagaaccgugaagaccaccaaggagagccugaucaucaucagccccagcguggccgaccuggaccccuacgacaagagccugcacagcagaguguuccccggcggcaagugccugggcaucaccgugagcagcaccuacugcagcaccaaccacgacuacaccaucuggaugcccgaggagcccagacugggcaccagcugcgacaucuucaccagcagcaagggcaagaaggccagcaagggcggcaagaccugcggcuucguggacgagagaggccuguacaagagccugaagggcgccugcaagcugaagcugugcggcgugcugggccugagacugauggacggcaccugggugagcauccagaccagcgacgacaccaaguggugcccccccgaccagcuggugaaccugcacgacuuccacagcgacgagaucgagcaccuggugguggaggagcuggugaagaagagagaggagugccuggacgcccuggagagcaucaugaccaccaagagcgugagcuucagaagacugagcuaccugagaaagcuggugcccggcuucggcaaggccuacaccaucuucaacaagacccugauggaggccgacgcccacuacaagagcgugagaaccuggaacgagaucauccccagcaagggcugccugaaggugagagagagaugccacccccccguggacggcguguucuucaacggcaucauccugggccccgacggcaacgugcugauccccgagaugcagagcagccugcugcagcagcacauggagcugcuggagagcagcgugaucccccugaugcacccccuggccgaccccagcaccguguucaaggagggcgacgaggccgaggacuucguggaggugcaccugcccgacgugcacaagcagaucagcggcguggaccugggccugcccagcuggggcaaguaccugcugaugaucgccggcggccuggccacccuggugcugaucaucugcagcguggccugcugcagaagaaccaagagaaccgagagcagaagaagaggcagcggcgagagcggcaagaaggugaccaccaccccccagaccagaaagguggugagcagcugggagcuguacaagagcgagggcgacgccagacuguga

SEQ ID NO: 190601 - RNA, 1575 nt, Artificial Sequence
  derived and/or modified CDS sequence (opt4) from glycoprotein__RABV__AB496683.1
augauccugcaggcccugcuguucgugccccugcugaucagcagccugugccugggcaaguuccccaucuacaccauccccgacaagcugggccccuggagccccaucgacauccaccaccugagcugccccaacaaccuggugguggaggacgagggcugcaccaaccugagcggcuucagcuacauggagcugaaggugggcuacaucagcgccaucaaggugaacggcuucaccugcaccggcguggugaccgaggccgagaccuacaccaacuucgugggcuacgugaccaccaccuucaagagaaagcacuucagacccgugcccgacgccugcagagccgccuacaacuggaagauggccggcgaccccagauacgaggagagccugcagaaccccuaccccgacuaccacuggcugagaaccgugaagaccaccaaggagagccugaucaucaucagccccagcguggccgaccuggaccccuacgacaagagccugcacagcagaguguuccccggcggcaagugccugggcaucaccgugagcagcaccuacugcagcaccaaccacgacuacaccaucuggaugcccgaggagcccagacugggcaccagcugcgacaucuucaccagcagcaagggcaagaaggccagcaagggcggcaagaccugcggcuucguggacgagagaggccuguacaagagccugaagggcgccugcaagcugaagcugugcggcgugcugggccugagacugauggacggcaccugggugagcauccagaccagcgacgacaccaaguggugcccccccgaccagcuggugaaccugcacgacuuccacagcgacgagaucgagcaccuggugguggaggagcuggugaagaagagagaggagugccuggacgcccuggagagcaucaugaccaccaagagcgugagcuucagaagacugagcuaccugagaaagcuggugcccggcuucggcaaggccuacaccaucuucaacaagacccugauggaggccgacgcccacuacaagagcgugagaaccuggaacgagaucauccccagcaagggcugccugaaggugagagagagaugccacccccccguggacggcguguucuucaacggcaucauccugggccccgacggcaacgugcugauccccgagaugcagagcagccugcugcagcagcacauggagcugcuggagagcagcgugaucccccugaugcacccccuggccgaccccagcaccguguucaaggagggcgacgaggccgaggacuucguggaggugcaccugcccgacgugcacaagcagaucagcggcguggaccugggccugcccagcuggggcaaguaccugcugaugaucgccggcggccuggccgcccuggugcugaucaucugcagcauggccugcugcagaagaaccaagagaaccgagagcagaagaagaggcagcggcgagagcgagaagaaggugaccgccaccccccagaccagaaagguggugagcagcugggagcuguacaagagcgagggcgacgccagacuguga

SEQ ID NO: 190602 - RNA, 1575 nt, Artificial Sequence
  derived and/or modified CDS sequence (opt4) from glycoprotein__RABV__AB496684.1
augauccugcaggcccugcuguucgugccccugcugaucagcagccugugccugggcaaguuccccaucuacaccauccccgacaagcugggccccuggagccccaucgacauccaccaccugagcugccccaacaaccuggugguggaggacgagggcugcaccaaccugagcggcuucagcuacauggagcugaaggugggcuacaucagcgccaucaaggugaacggcuucaccugcaccggcguggugaccgaggccgagaccuacaccaacuucgugggcuacgugaccaccaccuucaagagaaagcacuucagacccauccccgacgccugcagagccgccuacaacuggaagauggccggcgaccccagauacgaggagagccugcagaaccccuaccccgacuaccacuggcugagaaccgugaagaccaccaaggagagccugaucaucaucagccccagcguggccgaccuggaccccuacgacaagagccugcacagcagaguguuccccggcggcaagugccugggcaucaccgugagcagcaccuacugcagcaccaaccacgacuacaccaucuggaugcccgaggagcccagacugggcaccagcugcgacaucuucaccagcagcaagggcaagaaggccagcaagggcggcaagaccugcggcuucguggacgagagaggccuguacaagagccugaagggcgccugcaagcugaagcugugcggcgugcugggccugagacugauggacggcaccugggugagcauccagaccagcgacgacaccaaguggugcccccccgaccagcuggugaaccugcacgacuuccacagcgacgagaucgagcaccuggugguggaggagcuggugaagaagagagaggagugccuggacgcccuggagagcaucaugaccaccaagagcgugagcuucagaagacugagcuaccugagaaagcuggugcccggcuucggcaaggccuacaccaucuucaacaagacccugauggaggccgacgcccacuacaagagcgugagaaccuggaacgagaucauccccagcaagggcugccugaaggugagagagagaugccacccccccguggacggcguguucuucaacggcaucauccugggccccgacggcaacgugcugauccccgagaugcagagcagccugcugcagcagcacauggagcugcuggagagcagcgugaucccccugaugcacccccuggccgaccccagcaccguguucaaggagggcgacgaggccgaggacuucguggaggugcaccugcccgacgugcacaagcagaucagcggcguggaccugggccugcccagcuggggcaaguaccugcugaugaucgccggcggccuggccgcccuggugcugaucaucugcagcauggccugcugcagaagaaccaagagaaccgagagcagaagaagaggcagcggcgagagcgagaagaaggugaccgccgccccccagaccagaaagguggugagcagcugggagcuguacaagagcgagggcgacgccagacuguga

SEQ ID NO: 190603 - RNA, 1575 nt, Artificial Sequence
  derived and/or modified CDS sequence (opt4) from glycoprotein__RABV__AB496685.1
augauccugcaggcccugcuguucgugccccugcugaucagcagccugugccugggcaaguuccccaucuacaccauccccgacaagcugggccccuggagccccaucgacauccaccaccugagcugccccaacaaccuggugguggaggacgagggcugcaccaaccugagcggcuucagcuacauggagcugaaggugggcuacaucagcgccaucaaggugaacggcuucaccugcaccggcguggugaccgaggccgagaccuacaccaacuucgugggcuacgugaccaccaccuucaagagaaagcacuucagacccauccccgacgccugcagagccgccuacaacuggaagauggccggcgaccccagauacgaggagagccugcagaaccccuaccccgacuaccacuggcugagaaccgugaagaccaccaaggagagccugaucaucaucagccccagcguggccgaccuggaccccuacgacaagagccugcacagcagaguguuccccggcggcaagugccugggcaucaccgugagcagcaccuacugcagcaccaaccacgacuacaccaucuggaugcccgaggagcccagacuggagaccagcugcgacaucuucaccagcagcaagggcaagaaggccagcaagggcggcaagaccugcggcuucguggacgagagaggccuguacaagagccugaagggcgccugcaagcugaagcugugcggcgugcugggccugagacugauggacggcaccugggugagcauccagaccagcgacgacaccaaguggugcccccccgaccagcuggugaaccugcacgacuuccacagcgacgagaucgagcaccuggugguggaggagcuggugaagaagagagaggagugccuggacgcccuggagagcaucaugaccaccaagagcgugagcuucagaagacugagcuaccugagaaagcuggugcccggcuucggcaaggccuacaccaucuucaacaagacccugauggaggccgacgcccacuacaagagcgugagaaccuggaacgagaucauccccagcaagggcugccugaaggugagagagagaugccacccccccguggacggcguguucuucaacggcaucauccugggccccgacggcaacgugcugauccccgagaugcagagcagccugcugcagcagcacauggagcugcuggagagcagcgugaucccccugaugcacccccuggccgaccccagcaccguguucaaggagggcgacgaggccgaggacuucguggaggugcaccugcccgacgugcacaagcagaucagcggcguggaccugggccugcccagcuggggcaaguaccugcugaugaucgccggcggccuggccacccuggugcugaucaucugcagcauggccugcugcagaagagccaagagaaccgagagcagaagaagaggcagcagagagagcgagaagaaggugaccgccgccccccagaccagaaagguggugagcagcugggagcuguacaagagcgagggcgacgccagacuguga

SEQ ID NO: 190604 - RNA, 1575 nt, Artificial Sequence; identical to SEQ ID NO: 190576
  derived and/or modified CDS sequence (opt4) from glycoprotein__RABV__AB496686.1

SEQ ID NO: 190605 - RNA, 1575 nt, Artificial Sequence
  derived and/or modified CDS sequence (opt4) from glycoprotein__RABV__AB496687.1
augauccugcaggcccugcuguucgugccccugcugaucagcagccugugccugggcaaguuccccaucuacaccauccccgacaagcugggccccuggagccccaucgacauccaccaccugagcugccccaacaaccuggugguggaggacgagggcugcaccaaccugagcggcuucagcuacauggagcugaaggugggcuacaucagcgccaucaaggugaacggcuucaccugcaccggcguggugaccgaggccgagaccuacaccaacuucgugggcuacgugaccaccaccuucaagagaaagcacuucagacccgugcccgacgccugcagagccgccuacaacuggaagauggccggcgaccccagauacgaggagagccugcagaaccccuaccccgacuaccacuggcugagaaccgugaagaccaccaaggagagccugaucaucaucagccccagcguggccgaccuggaccccuacgacaagagccugcacagcagaguguuccccggcggcaagugccugggcaucaccgugagcagcaccuacugcagcaccaaccacgacuacaccaucuggaugcccgaggagcccagacugggcaccagcugcgacaucuucaccagcagcaagggcaagaaggccagcaagggcggcaagaccugcggcuucguggacgagagaggccuguacaagagccugaagggcgccugcaagcugaagcugugcggcgugcugggccugagacugauggacggcaccugggugagcauccagaccagcgacgacaccaaguggugcccccccgaccagcuggugaaccugcacgacuuccacagcgacgagaucgagcaccuggugguggaggagcuggugaagaagagagaggagugccuggacgcccuggagagcaucaugaccaccaagagcgugagcuucagaagacugagcuaccugagaaagcuggugcccggcuucggcaaggccuacaccaucuucaacaagacccugauggaggccgacgcccacuacaagagcgugagaaccuggaacgagaucauccccagcaagggcugccugaaggugagagagagaugccacccccccguggacggcguguucuucaacggcaucauccugggccccgacggcaacgugcugauccccgagaugcagagcagccugcugcagcagcacauggagcugcuggagagcagcgugaucccccugaugcacccccuggccgaccccagcaccguguucaaggagggcgacgaggccgaggacuucguggaggugcaccugcccgacgugcacaagcagaucagcggcguggaccugggccugcccagcuggggcaaguaccugcugaugaucgccggcggccuggccgcccuggugcugaucaucugcagcauggccugcugcagaagaaccaagagaaccgagagcagaagaagaggcagcggcgagagcgagaagaaggugaccgccaccccccagaccagaaaggugaucagcagcugggagcuguacaagagcgagggcgacgccagacuguga

SEQ ID NO: 190606 - RNA, 1575 nt, Artificial Sequence
  derived and/or modified CDS sequence (opt4) from glycoprotein__RABV__AB496689.1
augauccugcaggcccugagauucgugccccugcugaucagcagccugugccugggcaaguuccccaucuacaccauccccgacaagcugggccccuggagccccaucgacauccaccaccugagcugccccaacaaccuggugguggaggacgagggcugcaccaaccugagcggcuucagcuacauggagcugaaggugggcuacaucagcgccaucaaggugaacggcuucaccugcaccggcguggugaccgaggccgagaccuacaccaacuucgugggcuacgugaccaccaccuucaagagaaagcacuucagacccauccccgacgccugcagagccgccuacaacuggaagauggccggcgaccccagauacgaggagagccugcagaaccccuaccccgacuaccacuggcugagaaccgugaagaccaccaaggagagccugaucaucaucagccccagcguggccgaccuggaccccuacgacaagagccugcacagcagaguguuccccggcggcaagugccugggcaucaccgugagcagcaccuacugcagcaccaaccacgacuacaccaucuggaugcccgaggagcccagacugggcaccagcugcgacaucuucaccagcagcaagggcaagaaggccagcaagggcggcaagaccugcggcuucguggacgagagaggccuguacaagagccugaagggcgccugcaagcugaagcugugcggcgugcugggccugagacugauggacggcaccugggugagcauccagaccagcgacgacaccaaguggugcccccccgaccagcuggugaaccugcacgacuuccacagcgacgagaucgagcaccuggugguggaggagcuggugaagaagagagaggagugccuggacgcccuggagagcaucaugaccaccaagagcgugagcuucagaagacugagcuaccugagaaagcuggugcccggcuucggcaaggccuacaccaucuucaacaagacccugauggaggccgacgcccacuacaagagcgugagaaccuggaacgagaucauccccagcaagggcugccugaaggugagagagagaugccacccccccguggacggcguguucuucaacggcaucauccugggccccgacggcaacgugcugauccccgagaugcagagcagccugcugcagcagcacauggagcugcuggagagcagcgugaucccccugaugcacccccuggccgaccccagcaccguguucaaggagggcgacgaggccgaggacuucguggaggugcaccugcccgacgugcacaagcagaucagcggcguggaccugggccugcccagcuggggcaaguaccugcugaugaucgccggcggccuggccgcccuggugcugaucaucugcagcauggccugcugcagaagaaccaagagaaccgagagcagaagaagaggcagcggcgagagcgagaagaaggugaccgccaccccccagaccagaaagguggugagcagcugggagcuguacaagagcgagggcgacgccagacuguga

SEQ ID NO: 190607 - RNA, 1575 nt, Artificial Sequence
  derived and/or modified CDS sequence (opt4) from glycoprotein__RABV__AB496690.1
augauccugcaggcccugcuguucgugccccugcugaucagcagccugugccugggcaaguuccccaucuacaccauccccgacaagcugggccccuggagccccaucgacauccaccaccugagcugccccaacaaccuggugguggaggacgagggcugcaccaaccugagcggcuucagcuacauggagcugaaggugggcuacaucagcgccaucaaggugaacggcuucaccugcaccggcguggugaccgaggccgagaccuacaccaacuucgugggcuacgugaccaccaccuucaagagaaagcacuucagacccauccccgacgccugcagagccgccuacaacuggaagauggccggcgaccccagauacgaggagagccugcagaaccccuaccccgacuaccacuggcugagaaccgugaagaccaccaaggagagccugaucaucaucagccccagcguggccgaccuggaccccuacgacaagagccugcacagcagaguguuccccggcggcaagugccugggcaucaccgugagcagcaccuacugcagcaccaaccacgacuacaccaucuggaugcccgaggagcccagacugggcaccagcugcgacaucuucaccagcagcaagggcaagaaggccagcaagggcggcaagaccugcggcuucguggacgagagaggccuguacaagagccugaagggcgccugcaagcugaagcugugcggcgugcugggccugagacugauggacggcaccugggugagcauccagaccagcgacgacaccaaguggugcccccccgaccagcuggugaaccugcacgacuuccacagcgacgagaucgagcaccuggugguggaggagcuggugaagaagagagaggagugccuggacgcccuggagagcaucaugaccaccaagagcgugagcuucagaagacugagcuaccugagaaagcuggugcccggcuucggcaaggccuacaccaucuucaacaagacccugauggaggccgacgcccacuacaagagcgugagaaccuggaacgagaucauccccagcaagggcugccugaaggugagagagagaugccacccccccguggacggcguguucuucaacggcaucauccugggccccgacggcaacgugcugauccccgagaugcagagcagccugcugcagcagcacauggagcugcuggagagcagcgugaucccccugaugcacccccuggccgaccccagcaccguguucaaggagggcgacgaggccgaggacuucguggaggugcaccugcccgacgugcacaagcagaucagcggcguggaccugggccugcccagcuggggcaaguaccugcugaugaucgccggcggccuggccgcccuggugcugaucaucugcagcauggccugcugcagaagaaccaagagaaccgagagcagaagaagaggcagcggcgagagcgagaagaaggugaccgccaccccccagaccagaaaggugaucagcagcugggagcuguacaagagcgagggcgacgccagacuguga

SEQ ID NO: 190608 - RNA, 1575 nt, Artificial Sequence
  derived and/or modified CDS sequence (opt4) from glycoprotein__RABV__AB496691.1
augauccugcaggcccugcuguucgugccccugcugaucagcagccugugccugggcaaguuccccaucuacaccauccccgacaagcugggccccuggagccccaucgacauccaccaccugagcugccccaacaaccuggugguggaggacgagggcugcaccaaccugagcggcuucagcuacauggagcugaaggugggcuacaucagcgccaucaaggugaacggcuucaccugcaccggcguggugaccgaggccgagaccuacaccaacuucgugggcuacgugaccaccaccuucaagagaaagcacuucagacccauccccgacgccugcagagccgccuacaacuggaagauggccggcgaccccagauacgaggagagccugcagaaccccuaccccgacuaccacuggcugagaaccgugaagaccaccaaggagagccugaucaucaucagccccagcguggccgaccuggaccccuacgacaagagccugcacagcagaguguuccccggcggcaagugccugggcaucaccgugagcagcaccuacugcagcaccaaccacgacuacaccaucuggaugcccgaggagcccagacugggcaccagcugcgacaucuucaucagcagcaagggcaagaaggccagcaagggcggcaagaccugcggcuucguggacgagagaggccuguacaagagccugaagggcgccugcaagcugaagcugugcggcgugcugggccugagacugauggacggcaccugggugagcauccagaccagcgacgacaccaaguggugcccccccgaccagcuggugaaccugcacgacuuccacagcgacgagaucgagcaccuggugguggaggagcuggugaagaagagagaggagugccuggacgcccuggagagcaucaugaccaccaagagcgugagcuucagaagacugagcuaccugagaaagcuggugcccggcuucggcaaggccuacaccaucuucaacaagacccugauggaggccgacgcccacuacaagagcgugagaaccuggaacgagaucauccccagcaagggcugccugaaggugagagagagaugccacccccccguggacggcguguucuucaacggcaucauccugggccccgacggcaacgugcugauccccgagaugcagagcagccugcugcagcagcacauggagcugcuggagagcagcgugaucccccugaugcacccccuggccgaccccagcaccguguucaaggagggcgacgaggccgaggacuucguggaggugcaccugcccgacgugcacaagcagaucagcggcguggaccugggccugcccagcuggggcaaguaccugcugaugaucgccggcggccuggccacccuggugcugaucaucugcagcauggccugcugcagaagaaccaagagaaccgagagcagaagaagaggcagcagagagagcgagaagaaggugaccgccgccccccagaccagaaagguggugagcagcugggagcuguacaagagcgagggcgacgccagacuguga

SEQ ID NO: 190609 - RNA, 1575 nt, Artificial Sequence; identical to SEQ ID NO: 190602
  derived and/or modified CDS sequence (opt4) from glycoprotein__RABV__AB496692.1

SEQ ID NO: 190610 - RNA, 1575 nt, Artificial Sequence; identical to SEQ ID NO: 190576
  derived and/or modified CDS sequence (opt4) from glycoprotein__RABV__AB496694.1

SEQ ID NO: 190611 - RNA, 1575 nt, Artificial Sequence; identical to SEQ ID NO: 190576
  derived and/or modified CDS sequence (opt4) from glycoprotein__RABV__AB496695.1

SEQ ID NO: 190612 - RNA, 1575 nt, Artificial Sequence; identical to SEQ ID NO: 190606
  derived and/or modified CDS sequence (opt4) from glycoprotein__RABV__AB496696.1

SEQ ID NO: 190613 - RNA, 1575 nt, Artificial Sequence
  derived and/or modified CDS sequence (opt4) from glycoprotein__RABV__AB496697.1
augauccugcaggcccugagauucgugccccugcugaucagcagccugugccugggcaaguuccccaucuacaccauccccgacaagcugggccccuggagccccaucgacauccaccaccugagcugccccaacaaccuggugguggaggacgagggcugcaccaaccugagcggcuucagcuacauggagcugaaggugggcuacaucagcgccaucaaggugaacggcuucaccugcaccggcguggugaccgaggccgagaccuacaccaacuucgugggcuacgugaccaccaccuucaagagaaagcacuucagacccauccccgacgccugcagagccgccuacaacuggaagauggccggcgaccccagauacgaggagagccugcagaaccccuaccccgacuaccacuggcugagaaccgugaagaccaccaaggagagccugaucaucaucagccccagcguggccgaccuggaccccuacgacaagagccugcacagcagaguguuccccggcggcaagugccugggcaucaccgugagcagcaccuacugcagcaccaaccacgacuacaccaucuggaugcccgaggagcccagacugggcaccagcugcgacaucuucaccagcagcaagggcaagaaggccagcaagggcggcaagaccugcggcuucguggacgagagaggccuguacaagagccugaagggcgccugcaagcugaagcugugcggcgugcugggccugagacugauggacggcaccugggugagcauccagaccagcgacgacaccaaguggugcccccccgaccagcuggugaaccugcacgacuuccacagcgacgagaucgagcaccuggugguggaggagcuggugaagaagagagaggagugccuggacgcccuggagagcaucaugaccaccaagagcgugagcuucagaagacugagcuaccugagaaagcuggugcccggcuucggcaaggccuacaccaucuucaacaagacccugauggaggccgacgcccacuacaagagcgugagaaccuggaacgagaucauccccagcaagggcugccugaaggugagagagagaugccacccccccguggacggcguguucuucaacggcaucauccugggccccgacggcaacgugcugauccccgagaugcagagcagccugcugcagcagcacauggagcugcuggagagcagcgugaucccccugaugcacccccuggccgaccccagcaccguguucaaggagggcgacgaggccgaggacuucguggaggugcaccugcccgacgugcacaagcagaucagcggcguggaccugggccugcccagcuggggcaaguaccugcugaugaucgccggcggccuggccgcccuggugcugaucaucugcagcauggccugcugcagaagaaccaagagaaccgagagcagaagaagaggcagcggcgagagcgagaagaaggugaccgugaccccccagaccagaaagguggugagcagcugggagcuguacaagagcgagggcgacgccagacuguga

SEQ ID NO: 190614 - RNA, 1575 nt, Artificial Sequence
  derived and/or modified CDS sequence (opt4) from glycoprotein__RABV__AB496698.1
augauccugcaggccauccuguucgugccccugcugaucagcagccugugccugggcaaguuccccaucuacaccauccccgacaagcugggccccuggagccccaucgacauccaccaccugagcugccccaacaaccuggugguggaggacgagggcugcaccaaccugagcggcuucagcuacauggagcugaaggugggcuacaucagcgccaucaaggugaacggcuucaccugcaccggcguggugaccgaggccgugaccuacaccaacuucgugggcuacgugaccaccaccuucaagagaaagcacuucagacccgugcccgacgccugcagaaccgccuacaacuggaagauggccggcgaccccagauacgaggagagccugcagaaccccuaccccgacuaccacuggcugagaaccgugaagaccaccaaggagagccugaucaucaucagccccagcguggccgaccuggaccccuacgacaagagccugcacagcagaguguuccccggcggcaagugccugggcaucaccgugagcagcaccuacugcagcaccaaccacgacuacaccaucuggaugcccgaggagcccagacugggcaccagcugcgacaucuucaccagcagcaagggcaagaaggccagcaagggcggcaagaccugcggcuucguggacgagagaggccuguacaagagccugaagggcgccugcaagcugaagcugugcggcgugcugggccugagacugauggacggcaccugggugagcauccagaccagcgacgacaccaaguggugcccccccgaccagcuggugaaccugcacgacuuccacagcgacgagaucgagcaccuggugguggaggagcuggugaagaagagagaggagugccuggacgcccuggagagcaucaugaccaccaagagcgugagcuucagaagacugagcuaccugagaaagcuggugcccggcuucggcaaggccuacaccaucuucaacaagacccugauggaggccgacgcccacuacaagagcgugagaaccuggaacgagaucauccccagcaagggcugccugaaggugagagagagaugccacccccccguggacggcguguucuucaacggcaucauccugggccccgacggcaacgugcugauccccgagaugcagagcagccugcugcagcagcacauggagcugcuggagagcagcgugaucccccugaugcacccccuggccgaccccagcaccguguucaaggagggcgacgaggccgaggacuucguggaggugcaccugcccgacgugcacaagcagaucagcggcguggaccugggccugcccagcuggggcaaguaccugcugaugaucgccggcggccuggccacccuggugcugaucaucugcagcauggccugcugcagaagaaccaagagaaccgagagcagaagaagaggcagcggcgagagcggcaagaaggugaccgccaccccccagaccagaaagguggugagcagcugggagcuguacaagagcgagggcgacgccagacuguga

SEQ ID NO: 190615 - RNA, 1575 nt, Artificial Sequence
  derived and/or modified CDS sequence (opt4) from glycoprotein__RABV__AB496699.1
augauccugcaggccauccuguucgugccccugcugaucagcagccugugccugggcaaguuccccaucuacaccauccccgacaagcugggccccuggagccccaucgacauccaccaccugagcugccccaacaaccuggugguggaggacgagggcugcaccaaccugagcggcuucagcuacauggagcugaaggugggcuacaucagcgccaucaaggugaacggcuucaccugcaccggcguggugaccgaggccgagaccuacaccaacuucgugggcuacgugaccaccaccuucaagagaaagcacuucagacccgugcccgacgccugcagaaccgccuacaacuggaagauggccggcgaccccagauacgaggagagccugcagaaccccuaccccgacuaccacuggcugagaaccgugaagaccaccaaggagagccugaucaucaucagccccagcguggccgaccuggaccccuacgacaagagccugcacagcagaguguuccccggcggcaagugccugggcaucaccgugagcagcaccuacugcagcaccaaccacgacuacaccaucuggaugcccgaggagcccagacugggcaccagcugcgacaucuucaccagcagcaagggcaagaaggccagcaagggcggcaagaccugcggcuucguggacgagagaggccuguacaagagccugaagggcgccugcaagcugaagcugugcggcgugcugggccugagacugauggacggcaccugggugagcauccagaccagcgacgacaccaaguggugcccccccgaccagcuggugaaccugcacgacuuccacagcgacgagaucgagcaccuggugguggaggagcuggugaagaagagagaggagugccuggacgcccuggagagcaucaugaccaccaagagcgugagcuucagaagacugagcuaccugagaaagcuggugcccggcuucggcaaggccuacaccaucuucaacaagacccugauggaggccgacgcccacuacaagagcgugagaaccuggaacgagaucauccccagcaagggcugccugaaggugagagagagaugccacccccccguggacggcguguucuucaacggcaucauccugggccccgacggcaacgugcugauccccgagaugcagagcagccugcugcagcagcacauggagcugcuggagagcagcgugaucccccugaugcacccccuggccgaccccagcaccguguucaaggagggcgacgaggccgaggacuucguggaggugcaccugcccgacgugcacaagcagaucagcggcguggaccugggccugcccagcuggggcagauaccugcugaugaucgccggcggccuggccacccuggugcugaucaucugcagcauggccugcugcagaagaaccaagagaaccgagagcagaagaagaggcagcggcgagagcggcaagaaggugaccgccaccccccagaccagaaagguggugagcagcugggagcuguacaagagcgagggcgacgccagacuguga

SEQ ID NO: 190616 - RNA, 1575 nt, Artificial Sequence
  derived and/or modified CDS sequence (opt4) from glycoprotein__RABV__AB496701.1
augauccugcaggccauccuguucgugccccugcugaucagcagccugugccugggcaaguuccccaucuacaccauccccgacaagcugggccccuggagccccaucgacauccaccaccugagcugccccaacaaccuggugguggaggacgagggcugcaccaaccugagcggcuucagcuacauggagcugaaggugggcuacaucagcgccaucaaggugaacggcuucaccugcaccggcguggugaccgaggccgagaccuacaccaacuucgugggcuacgugaccaccaccuucaagagaaagcacuucagacccgugcccgacgccugcagaaccgccuacaacuggaagauggccggcgaccccagauacgaggagagccugcagaaccccuaccccgacuaccacuggcugagaaccgugagaaccaccaaggagagccugaucaucaucagccccagcguggccgaccuggaccccuacgacaagagccugcacagcagaguguuccccggcggcaagugccugggcaucaccgugagcagcaccuacugcagcaccaaccacgacuacaccaucuggaugcccgaggagcccagacugggcaccagcugcgacaucuucaccagcagcaagggcaagaaggccagcaagggcggcaagaccugcggcuucguggacgagagaggccuguacaagagccugaagggcgccugcaagcugaagcugugcggcgugcugggccugagacugauggacggcaccugggugagcauccagaccagcgacgacaccaaguggugcccccccgaccagcuggugaaccugcacgacuuccacagcgacgagaucgagcaccuggugguggaggagcuggugaagaagagagaggagugccuggacgcccuggagagcaucaugaccaccaagagcgugagcuucagaagacugagcuaccugagaaagcuggugcccggcuucggcaaggccuacaccaucuucaacaagacccugauggaggccgacgcccacuacaagagcgugagaaccuggaacgagaucauccccagcaagggcugccugaaggugagagagagaugccacccccccguggacggcguguucuucaacggcaucauccugggccccgacggcaacgugcugauccccgagaugcagagcagccugcugcagcagcacauggagcugcuggagagcagcgugaucccccugaugcacccccuggccgaccccagcaccguguucaaggagggcgacgaggccgaggacuucguggaggugcaccugcccgacgugcacaagcagaucagcggcguggaccugggccugcccagcuggggcaaguaccugcugaugaucgccggcggccuggccacccuggugcugaucaucugcagcauggccugcugcagaagaaccaagagaaccgagagcagaagaagaggcagcggcgagagcggcaagaaggugaccgccaccccccagaccagaaagguggugagcagcugggagcuguacaagagcgagggcgacgccagacuguga

SEQ ID NO: 190617 - RNA, 1575 nt, Artificial Sequence
  derived and/or modified CDS sequence (opt4) from glycoprotein__RABV__AB496703.1
augauccugcaggccauccuguucgugccccugcugaucagcagccugugccugggcaaguuccccaucuacaccauccccgacaagcugggccccuggagccccaucgacauccaccaccugagcugccccaacaaccuggugguggaggacgagggcugcaccaaccugagcggcuucagcuacauggagcugaaggugggcuacaucagcgccaucaaggugaacggcuucaccugcaccggcguggugaccgaggccgagaccuacaccaacuucgugggcuacgugaccaccaccuucaagagaaagcacuucagacccgugcccgacgccugcagaaccgccuacaacuggaagauggccggcgaccccagauacgaggagagccugcagaaccccuaccccgacuaccacuggcugagaaccgugaagaccaccaaggagagccugaucaucaucagccccagcguggccgaccuggaccccuacgacaagagccugcacagcagaguguuccccggcggcaagugccugggcaucaccgugagcagcaccuacugcagcaccaaccacgacuacaccaucuggaugcccgaggagcccagacugggcaccagcugcgacaucuucaccagcagcaagggcaagaaggccagcaagggcggcagaaccugcggcuucguggacgagagaggccuguacaagagccugaagggcgccugcaagcugaagcugugcggcgugcugggccugagacugauggacggcaccugggugagcauccagaccagcgacgacaccaaguggugcccccccgaccagcuggugaaccugcacgacuuccacagcgacgagaucgagcaccuggugguggaggagcuggugaagaagagagaggagugccuggacgcccuggagagcaucaugaccaccaagagcgugagcuucagaagacugagcuaccugagaaagcuggugcccggcuucggcaaggccuacaccaucuucaacaagacccugauggaggccgacgcccacuacaagagcgugagaaccuggaacgagaucauccccagcaagggcugccugaaggugagagagagaugccacccccccguggacggcguguucuucaacggcaucauccugggccccgacggcaacgugcugauccccgagaugcagagcagccugcugcagcagcacauggagcugcuggagagcagcgugaucccccugaugcacccccuggccgaccccagcaccguguucaaggagggcgacgaggccgaggacuucguggaggugcaccugcccgacgugcacaagcagaucagcggcguggaccugggccugcccagcuggggcagauaccugcugaugaucgccggcggccuggccacccuggugcugaucaucugcagcauggccugcugcagaagaaccaagagaaccgagagcagaagaagaggcagcggcgagagcggcaagaaggugaccgccaccccccagaccagaaagguggugagcagcugggagcuguacaagagcgagggcgacgccagacuguga

SEQ ID NO: 190618 - RNA, 1575 nt, Artificial Sequence; identical to SEQ ID NO: 190614
  derived and/or modified CDS sequence (opt4) from glycoprotein__RABV__AB496705.1

SEQ ID NO: 190619 - RNA, 1575 nt, Artificial Sequence
  derived and/or modified CDS sequence (opt4) from glycoprotein__RABV__AB517659.1
auggugccccaggcccugcugcuggugccccugcuggccgugagcuucugcuucggcaaguuccccaucuacaccauccccgacaagcugggccccuggagccccaucgacauccaccaccugagcugccccaacaaccuggugguggaggacgagggcugcaccaaccugagcggcuucagcuacauggagcugaaggugggcuacaucagcgccaucaaggugaacggcuucaccugcaccggcguggugaccgaggccgagaccuacaccaacuucgugggcuacgugaccaccaccuucaagagaaagcacuucagacccacccccgacgccugcagaagcgccuacaacuggaagauggccggcgaccccagauacgaggagagccugcacaaccccuaccccgacuaccacuggcugagaaccgugaagaccaccaaggagagccuggugaucaucagccccagcguggccgaccuggaccccuacgacaagagccugcacagcagaguguuccccagcggcaagugcagcggcaucaccgugagcagcaccuacugcagcaccaaccacgacuacaccaucuggcugcccgagaaccccagacugggcaccagcugcgacaucuucaccaacagcagaggcaagagagccagcaagggcagcaagaccugcggcuucguggacgagagaggccuguacaagagccugaagggcgccugcaagcugaagcugugcggcgugcugggccugagacugauggacggcaccuggguggccaugcagaccagcgacgagaccaaguggugcccccccgaccagcuggugaaccugcacgacuucagaagcgacgagaucgagcaccuggugguggaggagcuggugaagaagagagaggagugccuggacgcccuggagagcaucaugaccaccaagagcgugagcuucagaagacugagccaccugagaaagcuggugcccggcuucggcaaggccuacaccaucuucaacaagacccugauggaggccgacgcccacuacaagagcgugagaaccuggaacgagaucauccccagcaagggcugccugagagugggcggcagaugccacccccacgugaacggcguguucuucaacggcaucauccugggccccgacggccacgugcugauccccgagaugcagagcagccugcugcagcagcacauggagcugcuggagagcagcgugaucccccugaugcacccccuggccgaccccagcaccguguucaaggacggcgacgaggccgaggacuucguggaggugcaccugcccgacgugcacaagcaggugagcggcguggaccugggccugcccaacuggggcaaguacgugcugaugagcgccggcgugcugaucgcccugaugcugaucaucuuccugaugaccugcugcagaagagugaacagacccgacagcacccagagaagcuucggcagaaccggcagaaaggugagcgugaccagccagagcggcaaggugaucagcagcugggagagcuacaagagcggcggcgagaccagacuguga

SEQ ID NO: 190620 - RNA, 1575 nt, Artificial Sequence
  derived and/or modified CDS sequence (opt4) from glycoprotein__RABV__AB517660.1
auggugccccagacccugcuguucgugccccugcugguguucagccugugcuucggcaaguuccccaucuacaccauccccgacaagcugggccccuggagccccaucgacauccaccaccugagcugccccaacaaccuggugguggaggacgagggcugcaccaaccugagcggcuucagcuacauggagcugaaggugggcuacaucagcgccaucaaggugaacggcuucaccugcaccggcguggugaccgaggccgagaccuacaccaacuucgugggcuacgugaccaccaccuucaagagaaagcacuucagacccacccccgacgccugcagagccgccuacaacuggaagauggccggcgaccccagauacgaggagagccugcacaaccccuaccccgacuaccacuggcugagaaccgugaagaccaccaaggagagccuggugaucaucagccccagcguggccgaccuggaccccuacgacaagagccugcacagcagaguguuccccagcggcaagugccugggcaucaccgugagcagcaccuacugcagcaccaaccacgacuacaccguguggagacccgagaaccccagacugggcaccagcugcgacaucuucaccaacagcagaggcaagagagccagcaagggcagcaagaccugcggcuucguggacgagagaggcugguacaagagcuggaagggcgccugcaagcugaagcugugcggcgugcugggccugagacugaucgacggcaccuggaucgccaugcagaccagcgaggagaccaaguggugcccccccgaccagcuggugaaccugcacgacuucagaagcgacgagaucgagcaccuggugguggaggagcuggugaagaagagagaggagugccuggacgcccuggagagcaucaugaccaccaagagcgugagcuucagaagacugagccaccugagaaagcuggugcccggcuucggcaaggccuacaccaucuucaacaagacccugauggaggccgacgcccacuacaagagcaucagaaccuggaacgagaucauccccagcaagggcugccugagagugggcggcaagugccacccccacgugaacggcguguucuucaacggcaucauccugggccccgacggccacgugcugauccccgagaugcagagcagccugcugcagcagcacauggagcugcuggagagcagcgugaucccccugaugcacccccuggccgaccccuacaccguguucaaggacggcgacgaggccgaggacuucguggaggugcaccugcccgacgugcacaagcuggugagcggcguggaccugggccugcccaacuggggcaaguaccugcugaugagcgugggcgugcugaucgcccugaugcugaucaucuuccugaugaccugcugcagaggcgugcacagacccgacagcgcccagcagaagcugggcggcaccggcagaagagugagcaucaccagccagggcggcagagugaucagcagcugggagagcuacaagagcggcggcgacaccagacuguga

SEQ ID NO: 190621 - RNA, 1575 nt, Artificial Sequence; identical to SEQ ID NO: 190570
  derived and/or modified CDS sequence (opt4) from glycoprotein__RABV__AB518487.1

SEQ ID NO: 190622 - RNA, 1575 nt, Artificial Sequence; identical to SEQ ID NO: 190570
  derived and/or modified CDS sequence (opt4) from glycoprotein__RABV__AB518488.1

SEQ ID NO: 190623 - RNA, 1575 nt, Artificial Sequence
  derived and/or modified CDS sequence (opt4) from glycoprotein__RABV__AB518489.1
auggugccccaggcccugcuguucgugccccugcuggccuucagcuucugcuucggcaaguuccccaucuacaccauccccgacaagcugggccccuggagccccaucgacauccaccaccugagcugccccaacaaccuggugguggaggacgagggcugcaccaaccugagcggcuucagcuacauggagcugaaggugggcuacaucagcgccaucaaggugaacggcuucaccugcaccggcguggugaccgaggccgagaccuacaccaacuucgugggcuacgugaccaccaccuucaagagaaagcacuucagacccacccccgacgccugcagaagcgccuacaacuggaagauggccggcgaccccagauacgaggagagccugcacaaccccuaccccgacuaccacuggcugagaaccgugaagaccaccaaggagagccuggugaucaucagccccagcguggccgaccuggaccccuacgacaagagccugcacagcagaguguuccccaacggcaagugcagcggcaucaccgugagcagcaccuacugcagcaccaaccacgacuacaccaucuggcugcccgagaaccccagacugggcaccagcugcgacaucuucaccaacagcagaggcaagagagccagcaagggcagcaagaccugcggcuucguggacgagagaggccuguacaagagccugaagggcgccugcaagcugaagcugugcggcgugcugggccugagacugauggacggcaccuggguggccaugcagaccagcgacgagaccaaguggugcccccccgaccagcuggugaaccugcacgacuucagaagcgacgagaucgagcaccuggugguggaggagcuggugaagaagagagaggagugccuggacgcccuggagagcaucaugaccaccaagagcgugagcuucagaagacugagccaccugagaaagcuggugcccggcuucggcaaggccuacaccaucuucaacaagacccugauggaggccgacgcccacuacaagagcaucagaaccuggaacgagaucauccccagcaagggcugccugagagugggcggcagaugccacccccacgugaacggcguguucuucaacggcaucauccugggccccgacggccacgugcugauccccgagaugcagagcagccugcugcagcagcacauggagcugcuggagagcagcgugaucccccugaugcacccccuggccgaccccagcaccguguucaaggacggcgacgaggccgaggacuucguggaggugcaccugcccgacgugcacaagcaggugagcggcguggaccugggccugcccaacuggggcaaguacgugcugaugagcgccggcgugcugaucgcccugaugcugaccaucuuccugaugaccugcugcagaagagugaacagacccgacagcacccagagaagccugggcaugaccggcagaaaggugagcgugaccagccagagcggcaaggugaucagcagcugggagagcuacaagagcggcggcgagaccagacuguga

SEQ ID NO: 190624 - RNA, 1575 nt, Artificial Sequence
  derived and/or modified CDS sequence (opt4) from glycoprotein__RABV__AB518490.1
auggugccccaggcccugcuguucgugccccugcuggccuucagcuucugcuucggcaaguuccccaucuacaccauccccgacaagcugggccccuggagccccaucgacauccaccaccugagcugccccaacaaccuggugguggaggacgagggcugcaccaaccugagcggcuucagcuacauggagcugaaggugggcuacaucagcgccaucaaggugaacggcuucaccugcaccggcguggugaccgaggccgagaccuacaccaacuucgugggcuacgugaccaccaccuucaagagaaagcacuucagacccacccccgacgccugcagaagcgccuacaacuggaagauggccggcgaccccagauacgaggagagccugcacaaccccuaccccgacuaccacuggcugagaaccgugaagaccaccaaggagagccuggugaucaucagccccagcguggccgaccuggaccccuacgacaagagccugcacagcagaguguuccccaacggcaagugcagcggcaucaccgugagcagcaccuacugcagcaccaaccacgacuacaccaucuggcugcccgagaaccccagacugggcaccagcugcgacaucuucaccaacagcagaggcaagagagccagcaagggcggcaagaccugcggcuucguggacgagagaggccuguacaagagccugaagggcgccugcaagcugaagcugugcggcgugcugggccugagacugauggacggcaccuggguggccaugcagaccagcgacgaggccaaguggugcccccccgaccagcuggugaaccugcacgacuucagaagcgacgagaucgagcaccuggugguggaggagcuggugaagaagagagaggagugccuggacgcccuggagagcaucaugaccaccaagagcgugagcuucagaagacugagccaccugagaaagcuggugcccggcuucggcaaggccuacaccaucuucaacaagacccugauggaggccgacgcccacuacaagagcaucagaaccuggaacgagaucauccccagcaagggcugccugagagugggcggcagaugccacccccacgugaacggcguguucuucaacggcaucauccugggccccgacggccacgugcugauccccgagaugcagagcagccugcugcagcagcacauggagcugcuggagagcagcgugaucccccugaugcacccccuggccgaccccagcaccguguucaaggacggcgacgaggccgaggacuucguggaggugcaccugcccgacgugcacaagcaggugagcggcguggaccugggccugcccaacuggggcaaguacgugcugaugagcgccggcgugcugaucgcccugaugcugaccaucuuccugaugaccugcugcagaagagugaacagacccgacagcacccagagaagccugggcaugaccggcagaaaggugagcgugaccagccagagcggcaaggugaucagcagcugggagagcuacaagagcggcggcgagaccagacuguga

SEQ ID NO: 190625 - RNA, 1575 nt, Artificial Sequence
  derived and/or modified CDS sequence (opt4) from glycoprotein__RABV__AB518492.1
auggugccccaggcccugcuguucgugccccugcuggccgugagcuucugcuucggcaaguuccccaucuacaccauccccgacaagcugggccccuggagccccaucgacauccaccaccugagcugccccaacaaccuggugguggaggacgagggcugcaccaaccugagcggcuucagcuacauggagcugaaggugggcuacaucagcgccaucaaggugaacggcuucaccugcaccggcguggugaccgaggccgagaccuacaccaacuucgugggcuacgugaccaccaccuucaagagaaagcacuucagacccacccccgacgccugcagaagcgccuacaacuggaagauggccggcgaccccagauacgaggagagccugcacaaccccuaccccgacuaccacuggcugagaaccgugaagaccaccaaggagagccuggugaucaucagccccagcguggccgaccuggaccccuacgacaagagccugcacagcagaguguuccccagcggcaagugcagcggcaucaccgugagcagcaccuacugcagcaccaaccacgacuacaccaucuggcugcccgagaaccccagacugggcaccagcugcgacaucuucaccaacagcagaggcaagagagccagcaagggcagcaagaccugcggcuucguggacgagagaggccuguacaagagccugaagggcgccugcaagcugaagcugugcggcgugcugggccugagacugauggacggcaccuggguggccaugcagaccagcgacgagaccaaguggugcccccccgaccagcuggugaaccugcacgacuucagaagcgacgagaucgagcaccuggugguggaggagcuggugaagaagagagaggagugccuggacgcccuggagagcaucaugaccaccaagagcgugagcuucagaagacugagccaccugagaaagcuggugcccggcuucggcaaggccuacaccaucuucaacaagacccugauggaggccgacgcccacuacaagagcgugagaaccuggaacgagaucauccccagcaagggcugccugagagugggcggcagaugccacccccacgugaacggcguguucuucaacggcaucauccugggccccgacggccacgugcugauccccgagaugcagagcagccugcugcagcagcacauggagcugcuggagagcagcgugaucccccugaugcacccccuggccgaccccagcaccguguucaaggacggcgacgaggccgaggacuucguggaggugcaccugcccgacgugcacaagcaggugagcggcguggaccugggccugcccaacuggggcaaguacgugcugaugagcgccggcgugcugaccgcccugaugcugaucaucuuccugaugaccugcugcagaagagugaacagacccgacagcacccagagaagccugggcagaaccggcagaaaggugagcgugaccagccagagcggcaaggugaucagcagcugggagagcuacaagagcggcggcgagaccagacuguga

SEQ ID NO: 190626 - RNA, 1575 nt, Artificial Sequence
  derived and/or modified CDS sequence (opt4) from glycoprotein__RABV__AB518493.1
auggugccccaggcccugcuguucgugccccugcugguguucagccugugcagcggcaaguucccccuguacaccauccccgacaagcugggccccuggagccccaucgacauccaccaccugagcugccccaacaaccuggugguggaggacgagggcugcaccaaccugagcggcuucagcuacauggagcugaaggugggcuacaucagcgccaucaaggugaacggcuucaccugcaccggcguggugaccgaggccgagaccuacaccaacuucgugggcuacgugaccaccaccuucaagagaaagcacuucagacccacccccgacgccugcagagccgccuacaacuggaagauggccggcgaccccagauacgaggagagccugcacaaccccuaccccgacuaccacuggcugagaaccgugaagaccaccaaggagagccugguggugaucagccccagcguggccgaccuggaccccuacgacaagagccugcacagcagaguguuccccagcggcaagugcagcggcaucaccgugagcagcaccuacugcagcaccaaccacgacuacaccaucuggaugcccgagaaccccagacugggcaccagcugcgacaucuucaccaacagcagaggcaagagagccagcaagggcagcaagaccugcggcuucguggacgagagaggccuguacaagagccugaagggcgccugcaagcugaagcugugcggcgugcugggccugagacugauggacggcaccuggguggccaugcagaucagcgacgagaccaaguggugcccccccgaccagcuggugaaccugcacgacuucagaagcgacgagaucgagcaccuggugguggaggagcuggugaagaagagagaggagugccuggacgcccuggagagcaucaugaccaccaagagcgugagcuucagaagacugagccaccugagaaagcuggugcccggcuucggcaaggccuacaccaucuucaacaagacccugauggaggccgacgcccacuacaagagcaucagaaccuggaacgagaucauccccagcaagggcugccugagagugggcggcagaugccacccccacgugagcggcguguucuucaacggcaucauccugggccccgacggccacgugcugauccccgagaugcagagcagccugcugcagcagcacauggagcugcuggagagcagcgugaucccccugaugcacccccuggccgaccccagcaccguguucaaggacggcgacgaggccgaggacuucguggaggugcaccugcccgacgugcacaagcaggugagcggcguggaccugggccugcccaacuggggcaaguacgugcugaugagcgccggcgcccugaucgcccugaugcugaucaucuuccugaugaccugcugcagaagagugaacagacuggacagcacccagcacagacugggcggcaccggcagaaaggugagcgugaccccccagggcggcaaggugaucagcagcugggagagcuacaagagcggcggcgagaccagacuguga

SEQ ID NO: 190627 - RNA, 1575 nt, Artificial Sequence
  derived and/or modified CDS sequence (opt4) from glycoprotein__RABV__AB518494.1
auggugccccaggcccugcuguucgugccccugcugguguucagccugugcuucggcaaguucccccuguacaccauccccgacaagcugggccccuggagccccaucgacauccaccaccugagcugccccaacaaccuggugguggaggacgagggcugcaccaaccugagcggcuucagcuacauggagcugaaggugggcuacaucagcgccaucaaggugaacggcuucaccugcaccggcguggugaccgaggccgagaccuacaccaacuucgugggcuacgugaccaccaccuucaagagaaagcacuucagacccacccccgacgccugcagagccgccuacaacuggaagauggccggcgaccccagauacgaggagagccugcacaaccccuaccccgacuaccacuggcugagaaccgugaagaccaccaaggagagccugguggugaucagccccagcguggccgaccuggaccccuacgacaagagccugcacagcagaguguuccccagcggcaagugcagcggcaucaccgugagcagcaccuacugcagcaccaaccacgacuacaccaucuggaugcccgagaaccccagacugggcaccagcugcgacaucuucaccaacagcagaggcaagagagccagcaagggcagcaagaccugcggcuucguggacgagagaggccuguacaagagccugaagggcgccugcaagcugaagcugugcggcgugcugggccugagacugauggacggcaccuggguggccaugcagaucagcgacgagaccaaguggugcccccccgaccagcuggugaaccugcacgacuucagaagcgacgagaucgagcaccuggugguggaggagcuggugaagaagagagaggagugccuggacgcccuggagagcaucaugaccaccaagagcgugagcuucagaagacugagccaccugagaaagcuggugcccggcuucggcaaggccuacaccaucuucaacaagacccugauggaggccgacgcccacuacaagagcaucagaaccuggaacgagaucauccccagcaagggcugccugagagugggcggcagaugccacccccacgugagcggcguguucuucaacggcaucauccugggccccgacggccacgugcugauccccgagaugcagagcagccugcugcagcagcacauggagcugcuggagagcagcgugaucccccugaugcacccccuggccgaccccagcaccguguucaaggacggcgacgaggccgaggacuucguggaggugcaccugcccgacgugcacaagcaggugagcggcguggaccugggccugcccaacuggggcaaguacgugcugaugagcgccggcgcccugaucgcccugauggugaucaucuuccugaugaccugcugcagaagagugaacagacuggacagcacccagcacagacugggcggcaccggcagaaaggugagcgugaccccccagggcggcaaggugaucagcagcugggagagcuacaagagcggcggcgagaccagacuguga

SEQ ID NO: 190628 - RNA, 1575 nt, Artificial Sequence; identical to SEQ ID NO: 190626
  derived and/or modified CDS sequence (opt4) from glycoprotein__RABV__AB518495.1

SEQ ID NO: 190629 - RNA, 1575 nt, Artificial Sequence
  derived and/or modified CDS sequence (opt4) from glycoprotein__RABV__AB519641.1
augauccugcaggcccugcuguucgugccccugcugaucagcagccugugccugggcaaguuccccaucuacaccauccccgacaagcugggccccuggagccccaucgacauccaccaccugagcugccccaacaaccuggugguggaggacgagggcugcaccaaccugagcggcuucagcuacauggagcugaaggugggcuacaucagcgccaucaaggugaacggcuucaccugcaccggcguggugaccgaggccgagaccuacaccaacuucgugggcuacgugaccaccaccuucaagagaaagcacuucagacccgugcccgacgccugcagagccgccuacaacuggaagauggccggcgaccccagauacgaggagagccugcagaaccccuaccccgacuaccacuggcugagaaccgugaagaccaccaaggagagccugaucaucaucagccccagcguggccgaccuggaccccuacgacaagagccugcacagcagaguguuccccggcggcaagugccugggcaucaccgugagcagcaccuacugcagcaccaaccacgacuacaccaucuggaugcccgaggagcccagacugggcaccagcugcgacaucuucaccagcagcaagggcaagaaggccagcaagggcggcaagaccugcggcuucguggacgagagaggccuguacaagagccugaagggcgccugcaagcugaagcugugcggcgugcugggccugagacugauggacggcaccugggugagcauccagaccagcgacgacaccaaguggugcccccccgaccagcuggugaaccugcacgacuuccacagcgacgagaucgagcaccuggugguggaggagcuggugaagaagagagaggagugccuggacgcccuggagagcaucaugaccaccaagagcaucagcuucagaagacugagcuaccugagaaagcuggugcccggcuucggcaaggccuacaccaucuucaacaagacccugauggaggccgacgcccacuacaagagcgugagaaccuggaacgagaucauccccagcaagggcugccugaaggugagagagagaugccacccccccguggacggcguguucuucaacggcaucauccugggccccgacggcaacgugcugauccccgagaugcagagcagccugcugcagcagcacauggagcugcuggagagcagcgugaucccccugaugcacccccuggccgaccccagcaccguguucaaggagggcgacgaggccgaggacuucguggaggugcaccugcccgacgugcacaagcagaucagcggcguggaccugggccugcccagcuggggcaaguaccugcugaugaucgccggcggccuggccgcccuggugcugaucaucugcagcauggccugcugcagaagaaccaagagaaccgagagcagaagaagaggcagcggcgagagcgagaagaaggugaccgccaccccccagaccagaaaggugaucagcagcugggagcuguacaagagcgagggcgacgccagacuguga

SEQ ID NO: 190630 - RNA, 1575 nt, Artificial Sequence
  derived and/or modified CDS sequence (opt4) from glycoprotein__RABV__AB519642.1
augauccugcaggcccugcuguucgugccccugcugaucagcagccugugccugggcaaguuccccaucuacaccauccccgacaagcugggccccuggagccccaucgacauccaccaccugagcugccccaacaaccuggugguggaggacgagggcugcaccaaccugagcggcuucagcuacauggagcugaaggugggcuacaucagcgccaucaaggugaacggcuucaccugcaccggcguggugaccgaggccgagaccuacaccaacuucgugggcuacgugaccaccaccuucaagagaaagcacuucagacccauccccgacgccugcagagccgccuacaacuggaagauggccggcgaccccagauacgaggagagccugcagaaccccuaccccgacuaccacuggcugagaaccgugaagaccaccaaggagagccugaucaucaucagccccagcguggccgaccuggaccccuacgacaagagccugcacagcagaguguuccccggcggcaagugccugggcaucaccgugagcagcaccuacugcagcaccaaccacgacuacaccaucuggaugcccgaggagcccagacugggcaccagcugcgacaucuucaccagcagcaagggcaagaaggccagcaagggcggcaagaccugcggcuucguggacgagagaggccuguacaagagccugaagggcgccugcaagcugaagcugugcggcgugcugggccugagacugauggacggcaccugggugagcauccagaccagcgacgacaccaaguggugcccccccgaccagcuggugaaccugcacgacuuccacagcgacgagaucgagcaccuggugguggaggagcuggugaagaagagagaggagugccuggacgcccuggagagcaucaugaccaccaagagcgugagcuucagaagacugagcuaccugagaaagcuggugcccggcuucggcaaggccuacaccaucuucaacaagacccugauggaggccgacgcccacuacaagagcgugagaaccuggaacgagaucauccccagcaagggcugccugaaggugagagagagaugccacccccccguggacggcguguucuucaacggcaucauccugggccccgacggcaacgugcugauccccgagaugcagagcagccugcugcagcagcacauggagcugcuggagagcagcgugaucccccugaugcacccccuggccgaccccagcaccguguucaaggagggcgacgaggccgaggacuucguggaggugcaccugcccgacgugcacaagcagaucagcggcguggaccugggccugcccagcuggggcaaguaccugcugaugaucgccggcggccuggccacccuggugcugaucaucugcagcauggccugcugcagaagaaccaagagaaccgagagcagaagaagagacagccaggagagcgagaagaaggugaccgugaccccccagaccagaaagguggugagcagcugggagcuguacaagagcgagggcgacgccagccuguga

SEQ ID NO: 190631 - RNA, 1575 nt, Artificial Sequence
  derived and/or modified CDS sequence (opt4) from glycoprotein__RABV__AB563791.1
augaucccccaggcccugcuguucgugccccugcugguguucagccugugcuucggcaaguuccccaucuacaccauccccgacaagcugggccccuggagccccaucgacauccaccaccugagcugccccaacaaccuggugguggaggacgagggcugcaccaaccugagcggcuucagcuacauggagcugaaggugggcuacaucagcgccaucaaggugaacggcuucaccugcaccggcguggugaccgaggccgagaccuacaccaacuucgugggcuacgugaccaccaccuucaagagaaagcacuucagacccacccccgacgccugcagagccgccuacaacuggaagauggccggcgaccccagauacgaggagagccugcacaaccccuaccccgacuaccacuggcugagaaccgugaagaccaccaaggagagccuggugaucaucagccccagcguggccgaccuggaccccuacgacaagagccugcacagcagaguguuccccagcggcaagugcagcggcaucaccgugagcagcaccuacugcagcaccaaccacgacuacaccaucuggaugcccgagaaccccagacugggcaccagcugcgacaucuucaccaacagcagaggcaagagagccagcaagggcagcaagaccugcggcuucguggacgagagaggccuguacaagagccugaagggcgccugcaagcugaagcugugcggcgugcugggccugagacugauggacggcaccugggccgccauccagaccagcgacgagaccaaguggugcccccccgaccagcuggugaaccugcacgacuucagaagcgacgagaucgagcaccuggugguggaggagcuggugaagaagagagaggagugccuggacgcccuggagagcaucaugaccaccaagagcgugagcuucagaagacugagccaccugagaaagcuggugcccggcuucggcaaggccuacaccaucuucaacaagacccugauggaggccgacgcccacuacaagagcgugagaaccuggaacgagaucauccccagcaagggcugccugagagugggcggcagaugccacccccacgugaacggcguguucuucaacggcaucauccugggccccgacggccacgugcugauccccgagaugcagagcagccugcugcagcagcacauggagcugcuggagagcagcgugaucccccugaugcacccccuggccgaccccagcaccguguucaaggacgacgacgaggccgaggacuucguggaggugcaccugcccgacgugcacaagcaggugagcggcguggaccugggccugcccagcuggggcaaguacgugcugaugagcgccggcgugcugaccgcccugaugcugaugaucuuccugaugaccugcugcagaagagccaacagaguggagagcgcccagcacagccugggcgagagaggcagaaaggugagcgugaccagccagagcggcagagugaucagcagcugggagagcuacaagagcggcggcgagaccaagcuguga

SEQ ID NO: 190632 - RNA, 1575 nt, Artificial Sequence
  derived and/or modified CDS sequence (opt4) from glycoprotein__RABV__AB563794.1
augaucccccaggcccugcuguucgugccccugcugguguucagccugugcuucggcaaguuccccaucuacaccauccccgacaagcugggccccuggagccccaucgacauccaccaccugagcugccccaacaaccuggugguggaggacgagggcugcaccaaccugagcggcuucagcuacauggagcugaaggugggcuacaucagcgccaucaaggugaacggcuucaccugcaccggcguggugaccgaggccgagaccuacaccaacuucgugggcuacgugaccaccaccuucaagagaaagcacuucagacccacccccgacgccugcagagccgccuacaacuggaagauggccggcgaccccagauacgaggagagccugcacaaccccuaccccgacuaccacuggcugagaaccgugaagaccaccaaggagagccuggugaucaucagccccagcguggccgaccuggaccccuacgacaagagccugcacagcagaguguuccccagcggcaagugcagcggcaucaccgugagcagcaccuacugcagcaccaaccacgacuacaccaucuggaugcccgagaaccccagacugggcaccagcugcgacaucuucaccaacagcagaggcaagagagccagcaagggcagcaagaccugcggcuucguggacgagagaggccuguacaagagccugaagggcgccugcaagcugaagcugugcggcgugcugggccugagacugauggacggcaccugggccgccauccagaccagcgacgagaccaaguggugcccccccgaccagcuggugaaccugcacgacuucagaagcgacgagaucgagcaccuggugguggaggagcuggugaagaagagagaggagugccuggacgcccuggagagcaucaugaccaccaagagcgugagcuucagaagacugagccaccugagaaagcuggugcccggcuucggcaaggccuacaccaucuucaacaagacccugauggaggccgacgcccacuacaagagcgugagaaccuggaacgagaucauccccagcaagggcugccugagagugggcggcagaugccacccccacgugaacggcguguucuucaacggcaucauccugggccccgacggccacgugcugauccccgagaugcagagcagccugcugcagcagcacauggagcugcuggagagcagcgugaucccccugaugcacccccuggccgaccccagcaccguguucaaggacgacgacgaggccgaggacuucguggaggugcaccugcccgacgugcacaagcaggugagcggcguggaccugggccugcccagcuggggcaaguacgugcugaugagcgccggcgugcugaccgcccugaugcugaugaucuuccugaugaccugcugcagaagagccaacagagccgagagcgcccagcacagccugggcgagagaggcagaaaggugagcgugaccagccagagcggcagagugaucagcagcugggagagcuacaagagcggcggcgagaccaagcuguga

SEQ ID NO: 190633 - RNA, 1575 nt, Artificial Sequence
  derived and/or modified CDS sequence (opt4) from glycoprotein__RABV__AB563797.1
augaucccccaggcccugcuguucgugccccugcugguguucagccugugcuucggcaaguuccccaucuacaccauccccgacaagcugggccccuggagccccaucgacauccaccaccugagcugccccaacaaccuggugguggaggacgagggcugcaccaaccugagcggcuucagcuacauggagcugaaggugggcuacaucagcgccaucaaggugaacggcuucaccugcaccggcguggugaccgaggccgagaccuacaccaacuucgugggcuacgugaccaccaccuucaagagaaagcacuucagacccacccccgacgccugcagagccgccuacaacuggaagauggccggcgaccccagauacgaggagagccugcacaaccccuaccccgacuaccacuggcugagaaccgugaagaccaccaaggagagccuggugaucaucagccccagcguggccgaccuggaccccuacgacaagagccugcacagcagaguguuccccagcggcaagugcagcggcaucaccgugagcagcaccuacugcagcaccaaccacgacuacaccaucuggaugcccgagaaccccagacugggcaccagcugcgacaucuucaccaacagcagaggcaagagagccagcaagggcagcaagaccugcggcuucguggacgagagaggccuguacaagagccugaagggcgccugcaagcugaagcugugcggcgugcugggccugagacugauggacggcaccugggccgccauccagaccagcgacgagaccaaguggugcccccccgaccagcuggugaaccugcacgacuucagaagcgacgagaucgagcaccuggugguggaggagcuggugaagaagagagaggagugccuggacgcccuggagagcaucaugaccaccaagagcgugagcuucagaagacugagccaccugagaaagcuggugcccggcuucggcaaggccuacaccaucuucaacaagacccugauggaggccgacgcccacuacaagagcaucagaaccuggaacgagaucauccccagcaagggcugccugagagugggcggcagaugccacccccacgugaacggcguguucuucaacggcaucauccugggccccgacggccacgugcugauccccgagaugcagagcagccugcugcagcagcacauggagcugcuggagagcagcgugaucccccugaugcacccccuggccgaccccagcaccguguucaaggacgacgacgagaccgaggacuucguggaggugcaccugcccgacgugcacaagcaggugagcggcguggaccugggccugcccagcuggggcaaguacgugcugaugagcgccggcgugcugaccgcccugaugcugaugaucuuccugaugaccugcugcagaagagccaacagaguggagagcgcccagcacagccugggcgagagaggcagaaaggugagcgugaccagccagagcggcagagugaucagcagcugggagagcuacaagagcggcggcgagaccaagcuguga

SEQ ID NO: 190634 - RNA, 1575 nt, Artificial Sequence
  derived and/or modified CDS sequence (opt4) from glycoprotein__RABV__AB563798.1
augaucccccaggcccugcuguucgugccccugcugguguucagccugugcuucggcaaguuccccaucuacaccauccccgacaagcugggccccuggagccccaucgacauccaccaccugagcugccccaacaaccuggugguggaggacgagggcugcaccaaccugagcggcuucagcuacauggagcugaaggugggcuacaucagcgccaucaaggugaacggcuucaccugcaccggcguggugaccgaggccgagaccuacaccaacuucgugggcuacgugaccaccaccuucaagagaaagcacuucagacccacccccgacgccugcagagccgccuacaacuggaagauggccggcgaccccagauacgaggagagccugcacaaccccuaccccgacuaccacuggcugagaaccgugaagaccaccaaggagagccuggugaucaucagccccagcguggccgaccuggaccccuacgacaagagccugcacagcagaguguuccccagcggcaagugcagcggcaucaccgugagcagcaccuacugcagcaccaaccacgacuacaccaucuggaugcccgagaaccccagacugggcaccagcugcgacaucuucaccaacagcagaggcaagagagccagcaagggcagcaagaccugcggcuucguggacgagagaggccuguacaagagccugaagggcgccugcaagcugaagcugugcggcgugcugggccugagacugauggacggcaccugggccgccauccagaccagcgacgagaccaaguggugcccccccgaccagcuggugaaccugcacgacuucagaagcgacgagaucgagcaccuggugguggaggagcuggugaagaagagagaggagugccuggacgcccuggagagcaucaugaccaccaagagcgugagcuucagaagacugagccaccugagaaagcuggugcccggcuucggcaaggccuacaccaucuucaacaagacccugauggaggccgacgcccacuacaagagcgugagaaccuggaacgagaucauccccagcaagggcugccugagagugggcggcagaugccacccccacgugaacggcguguucuucaacggcaucauccugggccccgacggccacgugcugauccccgagaugcagagcagccugcugcagcagcacauggagcugcuggagagcagcgugaucccccugaugcacccccuggccgaccccagcaccguguucaaggacgacgacgaggccgaggacuucguggaggugcaccugcccgacgugcacaagcaggugagcggcguggaccugggccugcccagcuggggcaaguacgugcugaugagcgccggcgugcugaccgcccugaugcugaugaucuuccugaugaccugcugcagaagagccaacagagccgagagcgcccagcacagccugggcgagggcggcagaaaggugagcgugaccagccagagcggcagagugaucagcagcugggagagcuacaagagcggcggcgagaccaagcuguga

SEQ ID NO: 190635 - RNA, 1575 nt, Artificial Sequence
  derived and/or modified CDS sequence (opt4) from glycoprotein__RABV__AB563800.1
augaucccccaggcccugcuguucgugccccugcugguguucagccugugcuucggcaaguuccccaucuacaccauccccgacaagcugggccccuggagccccaucgacauccaccaccugagcugccccaacaaccuggugguggaggacgagggcugcaccaaccugagcggcuucagcuacauggagcugaaggugggcuacaucagcgccaucaaggugaacggcuucaccugcaccggcguggugaccgaggccgagaccuacaccaacuucgugggcuacgugaccaccaccuucaagagaaagcacuucagacccacccccgacgccugcagagccgccuacaacuggaagauggccggcgaccccagauacgaggagagccugcacaaccccuaccccgacuaccacuggcugagaaccgugaagaccaccaaggagagccuggugaucaucagccccagcguggccgaccuggaccccuacgacaagagccugcacagcagaguguuccccagcggcaagugcagcggcaucaccgugagcagcaccuacugcagcaccaaccacgacuacaccaucuggaugcccgagaaccccagacugggcaccagcugcgacaucuucaccaacagcagaggcaagagagccagcaagggcagcaagaccugcggcuucguggacgagagaggccuguacaagagccugaagggcgccugcaagcugaagcugugcggcgugcugggccugagacugauggacggcaccugggccgccauccagaccagcgacgagaccaaguggugcccccccgaccagcuggugaaccugcacgacuucagaagcgacgagaucgagcaccuggugguggaggagcuggugaagaagagagaggagugccuggacgcccuggagagcaucaugaccaccaagagcgugagcuucagaagacugagccaccugagaaagcuggugcccggcuucggcaaggccuacaccaucuucaacaagacccugauggaggccgacgcccacuacaagagcgugagaaccuggaacgagaucauccccagcaagggcugccugagagugggcggcagaugccacccccacgugaacggcguguucuucaacggcaucauccugggccccgacggccacgugcugauccccgagaugcagagcagccugcugcagcagcacauggagcugcuggagagcagcgugaucccccugaugcacccccuggccgaccccagcaccguguucaaggacgacgacgaggccgaggacuucguggaggugcaccugcccgacgugcacaagcaggugagcggcguggaccugggccugcccagcuggggcaaguacgugcugaugagcgccggcgugcugaccgcccugaugcugaugaucuuccugaugaccugcugcagaagagccaacagagccgagagcgcccagcacagccugggcgagagaggcagaaaggugagcgugaccagccagagcggcagagugaucagcagcugggagagcuacaagaacggcggcgagaccaagcuguga

SEQ ID NO: 190636 - RNA, 1575 nt, Artificial Sequence
  derived and/or modified CDS sequence (opt4) from glycoprotein__RABV__AB563803.1
augaucccccaggcccugcuguucgugccccugcugguguucagccugugcuucggcaaguuccccaucuacaccauccccgacaagcugggccccuggagccccaucgacauccaccaccugagcugccccaacaaccuggugguggaggacgagggcugcaccaaccugagcggcuucagcuacauggagcugaaggugggcuacaucagcgccaucaaggugaacggcuucaccugcaccggcguggugaccgaggccgagaccuacaccaacuucgugggcuacgugaccaccaccuucaagagaaagcacuucagacccacccccgacgccugcagagccgccuacaacuggaagauggccggcgaccccagauacgaggagagccugcacaaccccuaccccgacuaccacuggcugagaaccgugaagaccaccaaggagagccuggugaucaucagccccagcguggccgaccuggaccccuacgacaagagccugcacagcagaguguuccccagcggcaagugcagcggcaucaccgugagcagcaccuacugcagcaccaaccacgacuacaccaucuggaugcccgagaaccccagacugggcaccagcugcgacaucuucaccaacagcagaggcaagagagccagcaagggcagcaagaccugcggcuucguggacgagagaggccuguacaagagccugaagggcgccugcaagcugaagcugugcggcgugcugggccugagacugauggacggcaccugggccgccauccagaccagcgacgagaccaaguggugcccccccgaccagcuggugaaccugcacgacuucagaagcgacgagaucgagcaccuggugguggaggagcuggugaagaagagagaggagugccuggacgcccuggagagcaucaugaccaccaagagcgugagcuucagaagacugagccaccugagaaagcuggugcccggcuucggcaaggccuacaccaucuucaacaagacccugauggaggccgacgcccacuacaagagcgugagaaccuggaacgagaucauccccagcaagggcugccugagagugggcggcagaugccacccccacgugaacggcguguucuucaacggcaucauccugggccccgacggccacgugcugauccccgagaugcagagcagccugcugcagcagcacauggagcugcuggagagcagcgugaucccccugaugcacccccuggccgaccccagcaccguguucaaggacgacgacgaggccgaggacuucguggaggugcaccugcccgacgugcacaagcaggugagcggcguggaccugggccugcccagcuggggcaaguacgugcugaugagcgccggcgugcugaccgcccugaugcugaugaucuuccugaugaccugcugcagaagagccaacagagccgagagcggccagcacagccugggcgagagaggcagaaaggugagcgugaccagccagagcggcagagugaucagcagcugggagagcuacaagagcggcggcgagaccaagcuguga

SEQ ID NO: 190637 - RNA, 1575 nt, Artificial Sequence; identical to SEQ ID NO: 190632
  derived and/or modified CDS sequence (opt4) from glycoprotein__RABV__AB563806.1

SEQ ID NO: 190638 - RNA, 1575 nt, Artificial Sequence
  derived and/or modified CDS sequence (opt4) from glycoprotein__RABV__AB563807.1
augaucccccaggcccugauguucgccccccugcugguguucagccugugcuucggcaaguuccccaucuacaccauccccgacaagcugggccccuggagccccaucgacauccaccaccugagcugccccaacaaccuggugguggaggacgagggcugcaccaaccugagcggcuucagcuacauggagcugaaggugggcuacaucagcgccaucaaggugaacggcuucaccugcaccggcguggugaccgaggccgagaccuacaccaacuucgugggcuacgugaccaccaccuucaagagaaagcacuucagacccacccccgacgccugcagagccgccuacaacuggaagauggccggcgaccccagauacgaggagagccugcacaaccccuaccccgacuaccacuggcugagaaccgugaagaccaccaaggagagccuggugaucaucagccccagcguggccgaccuggaccccuacgacaagagccugcacagcagaguguuccccagcggcaagugcagcggcaucaccgugagcagcaccuacugcagcaccaaccacgacuacaccaucuggaugcccgagaaccccagacugggcaccagcugcgacaucuucaccaacagcagaggcaagagagccagcaagggcagcaagaccugcggcuucguggacgagagaggccuguacaagagccugaagggcgccugcaagcugaagcugugcggcgugcugggccugagacugauggacggcaccugggccgccauccagaccagcgacgagaccaaguggugcccccccgaccagcuggugaaccugcacgacuucagaagcgacgagaucgagcaccuggugguggaggagcuggugaagaagagagaggagugccuggacgcccuggagagcaucaugaccaccaagagcgugagcuucagaagacugagccaccugagaaagcuggugcccggcuucggcaaggccuacaccaucuucaacaagacccugauggaggccgacgcccacuacaagagcgugagaaccuggaacgagaucauccccagcaagggcugccugagagugggcggcagaugccacccccacgugaacggcguguucuucaacggcaucauccugggccccgacggccacgugcugauccccgagaugcagagcagccugcugcagcagcacauggagcugcuggagagcagcgugaucccccugaugcacccccuggccgaccccagcaccguguucaaggacgacggcgaggccgaggacuucguggaggugcaccugcccgacgugcacaagcaggugagcggcguggaccugggccugcccagcuggggcaaguacgugcugaugagcgccggcgugcugaccgcccugaugcugaugaucuuccugaugaccugcugcagaagagccaacagagccgagagcgcccagcacagccugggcgagagaggcagaaaggugagcgugaccagccagagcggcagagugaucagcagcugggagagcuacaagagcggcggcgagaccagacuguga

SEQ ID NO: 190639 - RNA, 1575 nt, Artificial Sequence
  derived and/or modified CDS sequence (opt4) from glycoprotein__RABV__AB563809.1
augaucccccaggcccugcuguucgugccccugcugguguucagccugugcuucggcaaguuccccaucuacaccauccccgacaagcugggccccuggagccccaucgacauccaccaccugagcugccccaacaaccuggugguggaggacgagggcugcaccaaccugagcggcuucagcuaccuggagcugaaggugggcuacaucagcgccaucaaggugaacggcuucaccugcaccggcguggugaccgaggccgagaccuacaccaacuucgugggcuacgugaccaccaccuucaagagaaagcacuucagacccacccccgacgccugcagagccgccuacaacuggaagauggccggcgaccccagauacgaggagagccugcacaaccccuaccccgacuaccacuggcugagaaccgugaagaccaccaaggagagccuggugaucaucagccccagcguggccgaccuggaccccuacgacaagagccugcacagcagaguguuccccagcggcaagugcagcggcaucaccgugagcagcaccuacugcagcaccaaccacgacuacaccaucuggaugcccgagaaccccagacugggcaccagcugcgacaucuucaccaacagcagaggcaagagagccagcaagggcagcaagaccugcggcuucguggacgagagaggccuguacaagagccugaagggcgccugcaagcugaagcugugcggcgugcugggccugagacugauggacggcaccugggccgccauccagaccagcgacgagaccaaguggugcccccccgaccagcuggugaaccugcacgacuucagaagcgacgagaucgagcaccuggugguggaggagcuggugaagaagagagaggagugccuggacgcccuggagagcaucaugaccaccaagagcgugagcuucagaagacugagccaccugagaaagcuggugcccggcuucggcaaggccuacaccaucuucaacaagacccugauggaggccgacgcccacuacaagagcgugagaaccuggaacgagaucauccccagcaagggcugccugagagugggcggcagaugccacccccacgugaacggcguguucuucaacggcaucauccugggccccgacggccacgugcugauccccgagaugcagagcagccugcugcagcagcacauggagcugcuggagagcagcgugaucccccugaugcacccccuggccgaccccagcaccguguucaaggacgacgacgaggccgaggacuucguggaggugcaccugcccgacgugcacaagcaggugagcggcguggaccugggccugcccagcuggggcaaguacgugcugaugagcgccggcgugcugaccgcccugaugcugaugaucuuccugaugaccugcugcagaagagccaacagagccgagagcgcccagcacagccugggcgagggcggcagaaaggugagcgugaccagccagagcggcagagugaucagcagcugggagagcuacaagagcggcggcgagaccaagcuguga

SEQ ID NO: 190640 - RNA, 1575 nt, Artificial Sequence
  derived and/or modified CDS sequence (opt4) from glycoprotein__RABV__AB563812.1
augaucccccaggcccugcuguucgugccccugcugguguucagccugugcuucggcaaguuccccaucuacaccauccccgacaagcugggccccuggagccccaucgacauccaccaccugagcugccccaacaaccuggugguggaggacgagggcugcaccaaccugagcggcuucagcuacauggagcugaaggugggcuacaucagcgccaucaaggugaacggcuucaccugcaccggcguggugaccgaggccgagaccuacaccaacuucgugggcuacgugaccaccaccuucaagagaaagcacgugagacccacccccgacgccugcagagccgccuacaacuggaagauggccggcgaccccagauacgaggagagccugcacaaccccuaccccgacuaccacugggugagaaccgugaagaccaccaaggagagccuggugaucaucagccccagcguggccgaccuggaccccuacgacaagagccugcacagcagaguguuccccagcggcaagugcagcggcaucaccgugagcagcaccuacugcagcaccaaccacgacuacaccaucuggaugcccgagaaccccagacugggcaccagcugcgacaucuucaccaacagcagaggcaagagagccagcaagggcagcaagaccugcggcuucguggacgagagaggccuguacaagagccugaagggcgccugcaagcugaagcugugcggcgugcugggccugagacugauggacggcaccugggccgccauccagaccagcgacgagaccaaguggugcccccccgaccagcuggugaaccugcacgacuucagaagcgacgagaucgagcaccuggugguggaggagcuggugaagaagagagaggagugccuggacgcccuggagagcaucaugaccaccaagagcgugagcuucagaagacugagccaccugagaaagcuggugcccggcuucggcaaggccuacaccaucuucaacaagacccugauggaggccgacgcccacuacaagagcgugagaaccuggaacgagaucauccccagcaagggcugccugagagugggcggcagaugccacccccacgugaacggcguguucuucaacggcaucauccugggccccgacggccacgugcugauccccgagaugcagagcagccugcugcagcagcacauggagcugcuggagagcagcgugaucccccugaugcacccccuggccgaccccagcaccguguucaaggacgacgacgaggccgaggacuucguggaggugcaccugcccgacgugcacaagcaggugagcggcguggaccugggccugcccagcuggggcaaguacgugcugaugagcgccggcgugcugaccgcccugaugcugaugaucuuccugaugaccugcugcagaagaaccaacagagccgagagcgcccagcacagccugagagagagaggcagaaaggugagcgugaccagccagagcggcagagugaucagcagcugggagagcuacaagagcggcggcgagaccaagcuguga

SEQ ID NO: 190641 - RNA, 1575 nt, Artificial Sequence
  derived and/or modified CDS sequence (opt4) from glycoprotein__RABV__AB563813.1
augaucccccaggcccugcuguucgugccccugcugguguucagccugugcuucggcaaguuccccaucuacaccauccccgacaagcugggccccuggagccccaucgacauccaccaccugagcugccccaacaaccuggugguggaggacgagggcugcaccaaccugagcggcuucagcuacauggagcugaaggugggcuacaucagcgccaucaaggugaacggcuucaccugcaccggcguggugaccgaggccgagaccuacaccaacuucgugggcuacgugaccaccaccuucaagagaaagcacuucagacccacccccgacgccugcagagccgccuacaacuggaagauggccggcgaccccagauacgaggagagccugcacaaccccuaccccgacuaccacuggcugagaaccgugaagaccaccaaggagagccuggugaucaucagccccagcguggccgaccuggaccccuacgacaagagccugcacagcagaguguuccccagcggcaagugcagcggcaucaccgugagcagcaccuacugcagcaccaaccacgacuacaccaucuggaugcccgagaaccccagacugggcgccagcugcgacaucuucaccaacagcagaggcaagagagccagcaagggcagcaagaccugcggcuucguggacgagagaggccuguacaagagccugaagggcgccugcaagcugaagcugugcggcgugcugggccugagacugauggacggcaccugggccgccauccagaccagcgacgagaccaaguggugcccccccgaccagcuggugaaccugcacgacuucagaagcgacgagaucgagcaccuggugguggaggagcuggugaagaagagagaggagugccuggacgcccuggagagcaucaugaccaccaagagcgugagcuucagaagacugagccaccugagaaagcuggugcccggcuucggcaaggccuacaccaucuucaacaagacccugauggaggccgacgcccacuacaagagcgugagaaccuggaacgagaucauccccagcaagggcugccugagagugggcggcagaugccacccccacgugaacggcguguucuucaacggcaucauccugggccccgacggccacgugcugauccccgagaugcagagcagccugcugcagcagcacauggagcugcuggagagcagcgugaucccccugaugcacccccuggccgaccccagcaccguguucaaggacgacgacgaggccgaggacuucguggaggugcaccugcccgacgugcacaagcaggugagcggcguggaccugggccugcccagcuggggcaaguacgugcugaugagcgccggcgugcugaccgcccugaugcugaugaucuuccugaugaccugcugcagaagagccaacagaguggagagcgagcagcacagccugggccagagaggcagaaaggugagcgugaccagccagagcggcagagugaucagcagcugggagagcuacaagagcggcggcgagaccaagcuguga

SEQ ID NO: 190642 - RNA, 1575 nt, Artificial Sequence; identical to SEQ ID NO: 190631
  derived and/or modified CDS sequence (opt4) from glycoprotein__RABV__AB563816.1

SEQ ID NO: 190643 - RNA, 1575 nt, Artificial Sequence
  derived and/or modified CDS sequence (opt4) from glycoprotein__RABV__AB563817.1
augaucccccaggcccugcuguucgugccccugcugguguucagccugugcuucggcaaguuccccaucuacaccauccccgacaagcugggccccuggagccccaucgacauccaccaccugagcugccccaacaaccuggugguggaggacgagggcugcaccaaccugagcggcuucagcuacauggagcugaaggugggcuacaucagcgccaucaaggugaacggcuucaccugcaccggcguggugaccgaggccgagaccuacaccaacuucgugggcuacgugaccaccaccuucaagagaaagcacuucagacccacccccgacgccugcagagccgccuacaacuggaagauggccggcgaccccagauacgaggagagccugcacaaccccuaccccgacuaccacuggcugagaaccgugaagaccaccaaggagagccuggugaucaucagccccagcguggccgaccuggaccccuacgacaagagccugcacagcagaguguuccccagcggcaagugcagcggcaucaccgugagcagcaccuacugcagcaccaaccacgacuacaccaucuggaugcccgagaaccccagacugggcaccagcugcgacaucuucaccaacagcagaggcaagagagccagcaagggcagcaagaccugcggcuucguggacgagagaggccuguacaagagccugaagggcgccugcaagcugaagcugugcggcgugcugggccugagacugauggacggcaccugggccgccauccagaccagcgacgagaccaaguggugcccccccgaccagcuggugaaccugcacgacuucagaagcgacgagaucgagcaccuggugguggaggagcuggugaagaagagagaggagugccuggacgcccuggagagcaucaugaccaccaagagcgugagcuucagaagacugagccaccugagaaagcuggugcccggcuucggcaaggccuacaccaucuucaacaagacccugauggaggccgacgcccacuacaagagcgugagaaccuggaacgagaucauccccagcaagggcugccugagagugggcggcagaugccacccccacgugaacggcguguucuucaacggcaucauccugggccccgacggccacgugcugauccccgagaugcagagcagccugcugcagcagcacauggagcugcuggagagcagcgugaucccccugaugcacccccuggccgaccccagcaccguguucaaggacgacgacgaggccgaggacuucguggaggugcaccugcccgacgugcacaagcaggugagcggcguggaccugggccugcccagcuggggcaaguacgugcugaugagcgccggcgcccugaccgcccugaugcugaugaucuuccugaugaccugcugcagaagagccaacagagccgagagcgcccagcacagccugggcgagagaggcagaaaggugagcgugaccagccagagcggcagagugaucagcagcugggagagcuacaagagcggcggcgagaccaagcuguga

SEQ ID NO: 190644 - RNA, 1575 nt, Artificial Sequence; identical to SEQ ID NO: 190631
  derived and/or modified CDS sequence (opt4) from glycoprotein__RABV__AB563819.1

SEQ ID NO: 190645 - RNA, 1575 nt, Artificial Sequence
  derived and/or modified CDS sequence (opt4) from glycoprotein__RABV__AB563820.1
augaucccccaggcccugcuguucgugccccugcugguguucagccugugcuucggcaaguuccccaucuacaccauccccgacaagcugggccccuggagccccaucgacauccaccaccugagcugccccaacaaccuggugguggaggacgagggcugcaccaaccugagcggcuucagcuacauggagcugaaggugggcuacaucagcgccaucaaggugaacggcuucaccugcaccggcguggugaccgaggccgagaccuacaccaacuucgugggcuacgugaccaccaccuucaagagaaagcacuucagacccaugcccgacgccugcagagccgccuacaacuggaagauggccggcgaccccagauacgaggagagccugcacaaccccuaccccgacuaccacuggcugagaaccgugaagaccaccaaggagagccuggugaucaucagccccagcguggccgaccuggaccccuacgacaagagccugcacagcagaguguuccccagcggcaagugcagcggcaucaccgugagcagcaccuacugcagcaccaaccacgacuacaccaucuggaugcccgagaaccccagacugggcaccagcugcgacaucuucaucaacagcagaggcaagagagccagcaagggcagcaagaccugcggcuucguggacgagagaggccuguacaagagccugaagggcgccugcaagcugaagcugugcggcgugcugggccugagacugauggacggcaccugggccgccauccagaccagcgacgagaccaaguggugcccccccgaccagcuggugaaccugcacgacuucagaagcgacgagaucgagcaccuggugguggaggagcuggugaagaagagagaggagugccuggacgcccuggagagcaucaugaccaccaagagcgugagcuucagaagacugagccaccugagaaagcuggugcccggcuucggcaaggccuacaccaucuucaacaagacccugauggaggccgacgcccacuacaagagcgugagaaccuggaacgagaucauccccagcaagggcugccugagagugggcggcagaugccacccccacgugaacggcguguucuucaacggcaucauccugggccccgacggccacgugcugauccccgagaugcagagcagccugcugcagcagcacauggagcugcuggagagcagcgugaucccccugaugcacccccuggccgaccccagcaccguguucaaggacgacgacgaggccgaggacuucguggaggugcaccugcccgacgugcacaagcaggugagcggcguggaccugggccugcccagcuggggcaaguacgugcugaugagcgccggcgugcugaccgcccugaugcugaugaucuuccugaugaccugcugcagaagaagcaacagagccaagagcgagcagcacagccugggcgagagaggcagaaaggugagcgugaccagccagagcggcagagugaucagcagcugggagagcuacaagagaggcggcgagaccaagcuguga

SEQ ID NO: 190646 - RNA, 1575 nt, Artificial Sequence
  derived and/or modified CDS sequence (opt4) from glycoprotein__RABV__AB563821.1
augaucccccaggcccugcuguucgugccccugcugguguucagccugugcuucggcaaguuccccaucuacaccauccccgacaagcugggccccuggagccccaucgacauccaccaccugagcugccccaacaaccuggugguggaggacgagggcugcaccaaccugagcggccugagcuacauggagcugaaggugggcuacaucagcgccaucaaggugaacggcuucaccugcaccggcguggugaccgaggccgagaccuacaccaacuucgugggcuacgugaccaccaccuucaagagaaagcacuucagacccacccccgacgccugcagagccgccuacaacuggaagauggccggcgaccccagauacgaggagagccugcacaaccccuaccccgacuaccacuggcugagaaccgugaagaccaccaaggagagccuggugaucaucagccccagcguggccgaccuggaccccuacgacaagagccugcacagcagaguguuccccagcggcaagugcagcggcaucaccgugagcagcaccuacugcuucaccaaccacgacuacaccaucuggaugcccgagaaccccagacugggcaccagcugcgacaucuucaccaacagcagaggcaagagagccagcaagggcagcaagaccugcggcuucguggacgagagaggccuguacaagagccugaagggcgccugcaagcugaagcugugcggcgugcugggccugagacugauggacggcaccugggccgccauccagaccagcgacgagaccaaguggugcccccccgaccagcuggugaaccugcacgacuucagaagcgacgagaucgagcaccuggugguggaggagcuggugaagaagagagaggagugccuggacgcccuggagagcaucaugaccaccaagagcgugagcuucagaagacugagccaccugagaaagcuggugcccggcuucggcaaggccuacaccaucuucaacaagacccugauggaggccgacgcccacuacaagagcgugagaaccugggacgagaucauccccagcaagggcugccugagagugggcggcagaugccacccccacgugaacggcguguucuucaacggcaucauccugggccccgacggccacgugcugauccccgagaugcagagcagccugcugcagcagcacauggagcugcuggagagcagcgugaucccccugaugcacccccuggccgaccccagcaccguguucaaggacgacgacgaggccgaggacuucguggaggugcaccugcccgacgugcacaagcaggugagcggcguggaccugggccugcccagcuggggcaaguacgugcugaugagcgccggcgugcugaccgcccugaugcugaugaucuuccugaugaccugcugcagaagagccaacagagccgagagcgcccagcacagccugggcgagagaggcagaaaggugagcgugaccagccagagcggcagagugaucagcagcugggagagcuacaagagcggcggcgagaccaagcuguga

SEQ ID NO: 190647 - RNA, 1575 nt, Artificial Sequence; identical to SEQ ID NO: 190631
  derived and/or modified CDS sequence (opt4) from glycoprotein__RABV__AB563822.1

SEQ ID NO: 190648 - RNA, 1575 nt, Artificial Sequence
  derived and/or modified CDS sequence (opt4) from glycoprotein__RABV__AB563823.1
augaucccccaggcccugcugcuggugccccugcugguguucagccugugcuucggcaaguuccccaucuacaccauccccgacaagcugggccccuggagccccaucgacauccaccaccugagcugccccaacaaccuggugguggaggacgagggcugcaccaaccugagcggcuucagcuacauggagcugaaggugggcuacaucagcgccaucaaggugaacggcuucaccugcaccggcguggugaccgaggccgagaccuacaccaacuucgugggcuacgugaccaccaccuucaagagaaagcacuucagacccacccccgacgccugcagagccgccuacaacuggaagauggccggcgaccccagauacgaggagagccugcacaaccccuaccccgacuaccacuggcugagaaccgugaagaccaccaaggagagccuggugaucaucagccccagcguggccgaccuggaccccuacgacaagagccugcacagcagaguguuccccagcggcaagugcagcggcaucaccgugagcagcaccuacugcagcaccaaccacgacuacaccaucuggaugcccgagaaccccagacugggcaccagcugcgacaucuucaccaacagcagaggcaagagagccagcaagggcagcaagaccugcggcuucguggacgagagaggccuguacaagagccugaagggcgccugcaagcugaagcugugcggcgugcugggccugagacugauggacggcaccugggccgccauccagaccagcgacgagaccaaguggugcccccccgaccagcuggugaaccugcacgacuucagaagcgacgagaucgagcaccuggugguggaggagcuggugaagaagagagaggagugccuggacgcccuggagagcaucaugaccaccaagagcgugagcuucagaagacugagccaccugagaaagcuggugcccggcuucggcaaggccuacaccaucuucaacaagacccugauggaggccgacgcccacuacaagagcgugagaaccuggaacgagaucauccccagcaagggcugccugagagugggcggcagaugccacccccacgugaacggcguguucuucaacggcaucauccugggccccgacggccacgugcugauccccgagaugcagagcagccugcugcagcagcacauggagcugcuggagagcagcgugaucccccugaugcacccccuggccgaccccagcaccguguucaaggacgacgacgaggccgaggacuucguggaggugcaccugcccgacgugcacaagcaggugagcggcguggaccugggccugcccagcuggggcaaguacgugcugaugagcgccggcgugcugaccgcccugaugcugaugaucuuccugaugaccugcugcagaagagccaacagaguggagagcgcccagcacagccugggcgagagaggcagaaaggugagcgugaccagccagagcggcagagugaucagcagcugggagagcuacaagagcggcggcgagaccaagcuguga

SEQ ID NO: 190649 - RNA, 1575 nt, Artificial Sequence; identical to SEQ ID NO: 190631
  derived and/or modified CDS sequence (opt4) from glycoprotein__RABV__AB563824.1

SEQ ID NO: 190650 - RNA, 1575 nt, Artificial Sequence
  derived and/or modified CDS sequence (opt4) from glycoprotein__RABV__AB563826.1
augaucccccaggcccugcuguucgugccccugcugguguucagccugugcuucggcaaguuccccaucuacaccauccccgacaagcugggccccuggagccccaucgacauccaccaccugagcugccccaacaaccuggugguggaggacgagggcugcaccaaccugagcggcuucagcuacauggagcugaaggugggcuacaucagcgccaucaaggugaacggcuucaccugcaccggcguggugaccgaggccgagaccuacaccaacuucgugggcuacgugaccaccaccuucaagagaaagcacuucagacccacccccgacgccugcagagccgccuacaacuggaagauggccggcgaccccagauacgaggagagccugcacaaccccuaccccgacuaccacuggcugagaaccgugaagaccaccaaggagagccuggugaucaucagccccagcguggccgaccuggaccccuacgacaagagccugcacagcagaguguuccccagcggcaagugcagcggcaucaccgugagcagcaccuacugcagcaccaaccacgacuacaccaucuggaugcccgagaaccccagacugggcaccagcugcgacaucuucaccaacagcagaggcaagagagccagcaagggcagcaagaccugcggcuucguggacgagagaggccuguacaagagccugaagggcgccugcaagcugaagcugugcggcgugcugggccugagacugauggacggcaccugggccgccauccagaccagcgacgagaccaaguggugcccccccgaccagcuggugaaccugcacgacuucagaagcgacgagaucgagcaccuggugguggaggagcuggugaagaagagagaggagugccuggacgcccuggagagcaucaugaccaccaagagcgugagcuucagaagacugagccaccugagaaagcuggugcccggcuucggcaaggccuacaccaucuucaacaagacccugauggaggccgacgcccacuacaagagcgugagaaccuggaacgagaucauccccagcaagggcugccugagagugggcggcagaugccacccccacgugaacggcguguucuucaacggcaucauccugggccccgacggccacgugcugauccccgagaugcagagcagccugcugcagcagcacauggagcugcuggagagcagcgugaucccccugaugcacccccuggccgaccccagcagcguguucaaggacgacgacgaggccgaggacuucguggaggugcaccugcccgacgugcacaagcaggugagcggcguggaccugggccugcccagcuggggcaaguacgugcugaugagcgccggcgugcugaccgcccugaugcugaugaucuuccugaugaccugcugcagaagagccaacagaguggagagcgcccagcacagccugggcgagagaggcagaaaggugagcgugaccagccagagcggcagagugaucagcagcugggagagcuacaagagcggcggcgagaccaagcuguga

SEQ ID NO: 190651 - RNA, 1575 nt, Artificial Sequence
  derived and/or modified CDS sequence (opt4) from glycoprotein__RABV__AB563827.1
augaucccccaggcccugcuguucgugccccugcugguguucagccugugcuucggcaaguuccccaucuacaccauccccgacaagcugggccccuggagccccaucgacauccaccaccugagcugccccaacaaccuggugguggaggacgagggcugcaccaaccugagcggcuucagcuacauggagcugaaggugggcuacaucagcgccaucaaggugaacggcuucaccugcaccggcguggugaccgaggccgagaccuacaccaacuucgugggcuacgugaccaccaccuucaagagaaagcacuucagacccacccccgacgccugcagagccgccuacaacuggaagauggccggcgaccccagauacgaggagagccugcacaaccccuaccccgacuaccacuggcugagaaccgugaagaccaccaaggagagccuggugaucaucagccccagcguggccgaccuggaccccuacgacaagagccugcacagcagaguguuccccagcggcaagugcagcggcaucaccgugagcagcaccuacugcagcaccaaccacgacuacaccaucuggaugcccgagaaccccagacugggcaccagcugcgacaucuucaccaacagcagaggcaagagagccagcaagggcagcaagaccugcggcuucguggacgagagaggccuguacaagagccugaagggcgccugcaagcugaagcugugcggcgugcugggccugagacugauggacggcaccuggguggccauccagaccagcgacgagaccaaguggugcccccccgaccagcuggugaaccugcacgacuucagaagcgacgagaucgagcaccuggugguggaggagcuggugaagaagagagaggagugccuggacgcccuggagagcaucaugaccaccaagagcgugagcuucagaagacugagccaccugagaaagcuggugcccggcuucggcaaggccuacaccaucuucaacaagacccugauggaggccgacgcccacuacaagagcgugagaaccuggaacgagaucauccccagcaagggcugccugagagugggcggcagaugccacccccacgugaacggcguguucuucaacggcaucauccugggccccgacggccacgugcugauccccgagaugcagagcagccugcugcagcagcacauggagcugcuggagagcagcgugaucccccugaugcacccccuggccgaccccagcaccguguucaaggacgacgacgaggccgaggacuucguggaggugcaccugcccgacgugcacaagcaggugagcggcguggaccugggccugcccagcuggggcaaguacgugcugaugagcgccggcgugcugaccgcccugaugcugaugaucuuccugaugaccugcugcagaagagccaacagaguggagagcgcccagcacagccugggcgagagaggcagaaaggugagcgugaccagccagagcggcagagugaucagcagcugggagagcuacaagagcggcggcgagaccaagcuguga

SEQ ID NO: 190652 - RNA, 1575 nt, Artificial Sequence
  derived and/or modified CDS sequence (opt4) from glycoprotein__RABV__AB563830.1
augaucccccaggcccugcugcuggugccccugcugguguucagccugugcuucggcaaguuccccaucuacaccauccccgacaagcugggccccuggagccccaucgacauccaccaccugagcugccccaacaaccuggugguggaggacgagggcugcaccaaccugagcggcuucagcuacauggagcugaaggugggcuacaucagcgccaucaaggugaacggcuucaccugcaccggcguggugaccgaggccgagaccuacaccaacuucgugggcuacgugaccaccaccuucaagagaaagcacuucagacccacccccgacgccugcagagccgccuacaacuggaagauggccggcgaccccagauacgaggagagccugcacaaccccuaccccgacuaccacuggcugagaaccgugaagaccaccaaggagagccuggugaucaucagccccagcguggccgaccuggaccccuacgacaagagccugcacagcagaguguuccccagcggcaagugcagcggcaucaccgugagcagcaccuacugcagcaccaaccacgacuacaccaucuggaugcccgagaaccccagacugggcaccagcugcgacaucuucaccaacagcagaggcaagagagccagcaagggcagcaagaccugcggcuucguggacgagagaggccuguacaagagccugaagggcgccugcaagcugaagcugugcggcgugcugggccugagacugauggacggcaccugggccgccauccagaccagcgacgagaccaaguggugcccccccgaccagcuggugaaccugcacgacuucagaagcgacgagaucgagcaccuggugguggaggagcuggugaagaagagagaggagugccuggacgcccuggagagcaucaugaccaccaagagcgugagcuucagaagacugagccaccugagaaagcuggugcccggcuucggcaaggccuacaccaucuucaacaagacccugauggaggccgacgcccacuacaagagcgugagaaccuggaacgagaucauccccagcaagggcugccugagagugggcggcagaugccacccccacgugaacggcguguucuucaacggcaucauccugggccccgacggccacgugcugauccccgagaugcagagcagccugcugcagcagcacauggagcugcuggagagcagcgugaucccccugaugcacccccuggccgaccccagcaccguguucaaggacgacgacgaggccgaggacuucguggaggugcaccugcccgacgugcacaagcaggugagcggcguggaccugggccugcccagcuggggcaaguacgugcugaugagcgccggcauccugaccgcccugaugcugaugaucuuccugaugaccugcugcagaagagccaacagaguggagagcgcccagcacagccugggcgagagaggcagaaaggugagcgugaccagccagagcggcagagugaucagcagcugggagagcuacaagagcggcggcgagaccaagcuguga

SEQ ID NO: 190653 - RNA, 1575 nt, Artificial Sequence; identical to SEQ ID NO: 190648
  derived and/or modified CDS sequence (opt4) from glycoprotein__RABV__AB563836.1

SEQ ID NO: 190654 - RNA, 1575 nt, Artificial Sequence
  derived and/or modified CDS sequence (opt4) from glycoprotein__RABV__AB563837.1
augaucccccaggcccugcuguucgugccccugcugguguucagccugugcuucggcaaguuccccaucuacaccauccccgacaagcugggccccuggagccccaucgacauccaccaccugagcugccccaacaaccuggugguggaggacgagggcugcaccaaccugagcggcuucagcuacauggagcugaaggugggcuacaucagcgccaucaaggugaacggcuucaccugcaccggcguggugaccgaggccgagaccuacaccaacuucgugggcuacgugaccaccaccuucaagagaaagcacuucagacccacccccgacgccugcagagccgccuacaacuggaagauggccggcgaccccagauacgaggagagccugcacaaccccuaccccgacuaccacuggcugagaaccgugaagaccaccaaggagagccuggugaucaucagccccagcguggccgaccuggaccccuacgacaagagccugcacagcagaguguuccccagcggcaagugcagcggcaucaccguguucagcaccuacugcagcaccaaccacgacuacaccaucuggaugcccgagaaccccagacugggcaccagcugcgacaucuucaccaacagcagaggcaagagagccagcaagggcagcaagaccugcggcuucguggacgagagaggccuguacaagagccugaagggcgccugcaagcugaagcugugcggcgugcugggccugagacugauggacggcaccugggccgccauccagaccagcgacgagaccaaguggugcccccccgaccagcuggugaaccugcacgacuucagaagcgacgagaucgagcaccuggugguggaggagcuggugaagaagagagaggagugccuggacgcccuggagagcaucaugaccaccaagagcgugagcuucagaagacugagccaccugagaaagcuggugcccggcuucggcaaggccuacaccaucuucaacaagacccugauggaggccgacgcccacuacaagagcgugagaaccuggaacgagaucauccccagcaagggcugccugagagugggcggcagaugccacccccacgugaacggcguguucuucaacggcaucauccugggccccgacggccacgugcugauccccgagaugcagagcagccugcugcagcagcacauggagcugcuggagagcagcgugaucccccugaugcacccccuggccgaccccagcaccguguucaaggacgacgacgaggccgaggacuucguggaggugcaccugcccgacgugcacaagcaggugagcggcguggaccugggccugcccagcuggggcaaguacgugcugaugagcgccggcgugcugaccgcccugaugcugaugaucuuccugaugaccugcugcagaagagccaacagaguggagagcgcccagcacagccugggcgagagaggcagaaaggugagcgugaccagccagagcggcagagugaucagcagcugggagagcuacaagagcggcggcgagaccaagcuguga

SEQ ID NO: 190655 - RNA, 1575 nt, Artificial Sequence
  derived and/or modified CDS sequence (opt4) from glycoprotein__RABV__AB563838.1
augaucccccaggcccugcuguucgugccccugcugguguucagccugugcuucggcaaguuccccaucuacaccauccccgacaagcugggccccuggagccccaucgacauccaccaccugagcugccccaacaaccuggugguggaggacgagggcugcaccaaccugagcggcuucagcuacauggagcugaaggugggcuacaucagcgccaucaaggugaacggcuucaccugcaccggcguggugaccgaggccgagaccuacaccaacuucgugggcuacgugaccaccaccuucaagagaaagcacuucagacccacccccgacgccugcagagccgccuacaacuggaagauggccggcgaccccagauacgaggagagccugcacaaccccuaccccgacuaccacuggcugagaaccgugaagaccaccaaggagagccuggugaucaucagccccagcguggccgaccuggaccccuacgacaagagccugcacagcagaguguuccccagcggcaagugcagcggcaucaccgugagcagcaccuacugcagcaccaaccacgacuacaccaucuggaugcccgagaaccccagacugggcaccagcugcgacaucuucaccaacagcagaggcaagagagccagcaagggcagcaagaccugcggcuucguggacgagagaggccuguacaagagccugaagggcgccugcaagcugaagcugugcggcgugcugggccugagacugauggacggcaccugggccgccauccagaccagcgacgagaccaaguggugcccccccgaccagcuggugaaccugcacgacuucagaagcgacgagaucgagcaccuggugguggaggagcuggugaagaagagagaggagugccuggacgcccuggagagcaucaugaccaccaagagcgugagcuucagaagacugagccaccugagaaagcuggugcccggcuucggcaaggccuacaccaucuucaacaagacccugauggaggccgacgcccacuacaagagcgugagaaccuggaacgagaucauccccagcaagggcugccugagagugggcggcagaugccacccccacgugaacggcguguucuucaacggcaucauccugggccccgacggccacgugcugauccccgagaugcagagcagccugcugcagcagcacauggagcugcuggagagcagcgugaucccccugaugcacccccuggccgaccccagcaccguguucaaggacgacgacgaggccgaggacuucguggaggugcaccugcccgacgugcacaagcaggugagcggcguggaccugggccugcccagcuggggcaaguacgugcugaugagcgccggcgugcugaccgcccugaugcugaugaucuuccugaugaccugcugcagaagaaccaacagagccgagagcgcccagcacagccugggcgagagaggcagaaaggugagcgugaccagccagagcggcagagugaucagcagcugggagagcuacaagagcggcggcgagaccaagcuguga

SEQ ID NO: 190656 - RNA, 1575 nt, Artificial Sequence
  derived and/or modified CDS sequence (opt4) from glycoprotein__RABV__AB563839.1
augaucccccaggcccugcuguucgugccccugcugguguucagccugugcuucggcaaguuccccaucuacaccauccccgacaagcugggccccuggagccccaucgacauccaccaccugagcugccccaacaaccuggugguggaggacgagggcugcaccaaccugagcggcuucagcuacauggagcugaaggugggcuacaucagcgccaucaaggugaacggcuucaccugcaccggcguggugaccgaggccgagaccuacaccaacuucgugggcuacgugaccaccaccuucaagagaaagcacuucagacccacccccgacgccugcagagccgccuacaacuggaagauggccggcgaccccagauacgaggagagccugcacaaccccuaccccgacuaccacuggcugagaaccgugaagaccaccaaggagagccuggugaucaucagccccagcguggccgaccuggaccccuacgacaagagccugcacagcagaguguuccccagcggcaagugcagcggcaucaccgugagcagcaccuacugcagcaccaaccacgacuacaccaucuggaugcccgagaaccccagacugggcaccagcugcgacaucuucaccaacagcagaggcaagagagccagcaagggcagcaagaccugcggcuucguggacgagagaggccuguacaagagccugaagggcgccugcaagcugaagcugugcggcgugcugggccugagacugauggacggcaccugggccgccauccagaccagcgacgagaccaaguggugcccccccgaccagcuggugaaccugcacgacuucagaagcgacgagaucgagcaccuggugguggaggagcuggugaagaagagagaggagugccuggacgcccuggagagcaucaugaccaccaagagcgugagcuucagaagacugagccaccugagaaagcuggugcccggcuucggcaaggccuacaccaucuucaacaagacccugauggaggccgacgcccacuacaagagcgugagaaccuggaacgagaucauccccagcaagggcugccugagagugggcggcagaugccacccccacgugaacggcguguucuucaacggcaucauccugggccccgacggccacgugcugauccccgagaugcagagcagccugcugcagcagcacauggagcugcuggagagcagcgugaucccccugaugcacccccuggccgaccccagcaccguguucaaggacgacgacgaggccgaggacuucguggaggugcaccugcccgacgugcacaagcaggugagcggcguggaccugggccugcccagcuggggcaaguacgugcugaugugcgccggcgugcugaccgcccugaugcugaugaucuuccugaugaccugcugcagaagagccaacagagccgagagcgcccagcacagccugggcgagagaggcagaaaggugagcgugaccagccagagcggcagagugaucagcagcugggagagcuacaagagcggcggcgagaccaagcuguga

SEQ ID NO: 190657 - RNA, 1575 nt, Artificial Sequence
  derived and/or modified CDS sequence (opt4) from glycoprotein__RABV__AB563841.1
augaucccccaggcccugcuguucgugccccugcugguguucagccugugcuucggcaaguuccccaucuacaccauccccgacaagcugggccccuggagccccaucgacauccaccaccugagcugccccaacaaccuggugguggaggacgagggcugcaccaaccugagcggcuucagcuacauggagcugaaggugggcuacaucagcgccaucaaggugaacggcuucaccugcaccggcguggugaccgaggccgagaccuacaccaacuucgugggcuacgugaccaccaccuucaagagaaagcacuucagacccacccccgacgccugcagagccgccuacaacuggaagauggccggcgaccccagauacgaggagagccugcacaaccccuaccccgacuaccacuggcugagaaccgugaagaccaccaaggagagccuggugaucaucagccccagcguggccgaccuggaccccuacgacaagagccugcacagcagaguguuccccagcggcagaugcagcggcaucaccgugagcagcaccuacugcagcaccaaccacgacuacaccaucuggaugcccgagaaccccagacugggcaccagcugcgacaucuucaccaacagcagaggcaagagagccagcaagggcagcaagaccugcggcuucguggacgagagaggccuguacaagagccugaagggcgccugcaagcugaagcugugcggcgugcugggccugagacugauggacggcaccugggccgccauccagaccagcgacgagaccaaguggugcccccccgaccagcuggugaaccugcacgacuucagaagcgacgagaucgagcaccuggugguggaggagcuggugaagaagagagaggagugccuggacgcccuggagagcaucaugaccaccaagagcgugagcuucagaagacugagccaccugagaaagcuggugcccggcuucggcaaggccuacaccaucuucaacaagacccugauggaggccgacgcccacuacaagagcgugagaaccuggaacgagaucauccccagcaagggcugccugagagugggcggcagaugccacccccacgugaacggcguguucuucaacggcaucauccugggccccgacggccacgugcugauccccgagaugcagagcagccugcugcagcagcacauggagcugcuggagagcagcgugaucccccugaugcacccccuggccgaccccagcaccguguucaaggacgacgacgaggccgaggacuucguggaggugcaccugcccgacgugcacaagcaggugagcggcguggaccugggccugcccagcuggggcaaguacgugcugaugagcgccggcgugcugaccgcccugaugcugaugaucuuccugaccaccugcugcagaagagccgacagagccgagagcgcccagcacagccugggcgagagaggcagaaaggugagcgugaccagccagagcggcagagugaucagcagcugggagagcuacaagagcggcggcgagaccaagcuguga

SEQ ID NO: 190658 - RNA, 1575 nt, Artificial Sequence
  derived and/or modified CDS sequence (opt4) from glycoprotein__RABV__AB563842.1
augaucccccaggcccugcuguucgugccccugcugguguucagccugugcuucggcaaguuccccaucuacaccauccccgacaagcugggccccuggagccccaucgacauccaccaccugagcugccccaacaaccuggugguggaggacgagggcugcaccaaccugagcggcuucagcuacauggagcugaaggugggcuacaucagcgccaucaaggugaacggcuucaccugcaccggcguggugaccgaggccgagaccuacaccaacuucgugggcuacgugaccaccaccuucaagagaaagcacuucagacccacccccgacgccugcagagccgccuacaacuggaagauggccggcgaccccagauacgaggagagccugcacaaccccuaccccgacuaccacuggcugagaaccgugaagaccaccaaggagagccuggugaucaucagccccagcguggccgaccuggaccccuacgacaagagccugcacagcagaguguuccccagcggcaagugcagcggcaucaccgugagcagcaccuacugcagcaccaaccacgacuacaccaucuggaugcccgagaaccccagacugggcaccagcugcgacaucuucaccaacagcagaggcaagagagccagcaagggcagcaagaccugcggcuucguggacgagagaggccuguacaagagccugaagggcgccugcaagcugaagcugugcggcgugcugggccugagacugauggacggcaccugggccgccauccagaccagcgacgagaccaaguggugcccccccgaccagcuggugaaccugcacgacuucagaagcgacgagaucgagcaccuggugguggaggagcuggugaagaagagagaggagugccuggacgcccuggagagcaucaugaccaccaagagcgugagcuucagaagacugagccaccugagaaagcuggugcccggcuucggcaaggccuacaccaucuucaacaagacccugauggaggccgacgcccacuacaagagcgugagaaccuggaacgagaucauccccagcaagggcugccugagagugggcggcagaugccacccccacgugaacggcguguucuucaacggcaucauccugggccccgacggccacgugcugauccccgagaugcagagcagccugcugcagcagcacauggagcugcuggagagcagcgugaucccccugaugcacccccuggccgaccccagcaccguguucaaggacgacgacgaggccgaggacuucguggaggugcaccugcccgacgugcacaagcaggugagcggcguggaccugggccugcccagcuggggcaaguacgugcugaugagcgccggcgugcugaccgcccugaugcugaugaucuuccugaugaccugcugcagaagagccaacagagccgagagcgcccagcacagccugagagagagaggcagaaaggugagcgugaccagccagagcggcagagugaucagcagcugggagagcuacaagagcggcggcgagaccaagcuguga

SEQ ID NO: 190659 - RNA, 1575 nt, Artificial Sequence
  derived and/or modified CDS sequence (opt4) from glycoprotein__RABV__AB563843.1
augaucccccaggcccugcuguucgugccccugcugguguucagccugugcuucggcaaguuccccaucuacaccauccccgacaagcugggccccuggagccccaucgacauccaccaccugagcugccccaacaaccuggugguggaggacgagggcugcaccaaccugagcggcuucagcuacauggagcugaaggugggcuacaucagcgccaucaaggugaacggcuucaccugcaccggcguggugaccgaggccgagaccuacaccaacuucgugggcuacgugaccaccaccuucaagagaaagcacuucagacccacccccgacgccugcagagccgccuacaacuggaagauggccggcgaccccagauacgaggagagccugcacaaccccuaccccgacuaccacuggcugagaaccgugaagaccaccaaggagagccuggugaucaucagccccagcguggccgaccuggaccccuacgacaagagccugcacagcagaguguuccccagcggcaagugcagcggcaucaccgugagcagcaccuacugcagcaccaaccacgacuacaccaucuggaugcccgagaaccccagacugggcaccagcugcgacaucuucaccaacagcagaggcaagagagccagcaagggcagcaagaccugcggcuucguggacgagagaggccuguacaagagccugaagggcgccugcaagcugaagcugugcggcgugcugggccugagacugauggacggcaccugggccgccauccagaccagcgacgagaccaaguggugcccccccgaccagcuggugaaccugcacgacuucagaagcgacgagaucgagcaccuggugguggaggagcuggugaagaagagagaggagugccuggacgcccuggagagcaucaugaccaccaagagcgugagcuucagaagacugagccaccugagaaagcuggugcccggcuucggcaaggccuacaccaucuucaacaagacccugauggaggccgacgcccacuacaagagcgugagaaccuggaacgagaucauccccagcaagggcugccugagagugggcggcagaugccacccccacgugaacggcguguucuucaacggcaucauccugggccccgacggccacgugcugauccccgagaugcagagcagccugcugcagcagcacauggagcugcuggagagcagcgugaucccccugaugcacccccuggccgaccccagcaccguguucaaggacgacgacgaggccgaggacuucguggaggugcaccugcccgacgugcacaagcaggugagcggcguggaccugggccugcccagcuggggcaaguacgugcugaugagcgccggcgugcugaccgcccugaugcugaugaucuuccugaccaccugcugcagaagagccgacagagccgagagcgcccagcacagccugggcgagagaggcagaaaggugagcgugaccagccagagcggcagagugaucagcagcugggagagcuacaagagcggcggcgagaccaagcuguga

SEQ ID NO: 190660 - RNA, 1575 nt, Artificial Sequence; identical to SEQ ID NO: 190632
  derived and/or modified CDS sequence (opt4) from glycoprotein__RABV__AB563844.1

SEQ ID NO: 190661 - RNA, 1575 nt, Artificial Sequence
  derived and/or modified CDS sequence (opt4) from glycoprotein__RABV__AB563845.1
augaacccccaggcccugauguucgugccccugcugguguucagccugugcuucggcaaguuccccaucuacaccauccccgacaagcugggccccuggagccccaucgacauccaccaccugagcugccccaacaaccuggugguggaggacgagggcugcaccaaccugagcggcuucagcuacauggagcugaaggugggcuacaucagcgccaucaaggugaacggcuucaccugcaccggcguggugaccgaggccgagaccuacaccaacuucgugggcuacgugaccaccaccuucaagagaaagcacuucagacccacccccgacgccugcagagccgccuacaacuggaagauggccggcgaccccagauacgaggagagccugcacaaccccuaccccgacuaccacuggcugagaaccgugaagaccaccaaggagagccuggugaucaucagccccagcguggccgaccuggaccccuacgacaagagccugcacagcagaguguuccccagcggcaagugcagcggcaucaccgugagcagcaccuacugcagcaccaaccacgacuacaccaucuggaugcccgagaaccccagacugggcaccagcugcgacaucuucaccaacagcagaggcaagagagccagcaagggcagcaagaccugcggcuucguggacgagagaggccuguacaagagccugaagggcgccugcaagcugaagcugugcggcgugcugggccugagacugauggacggcaccugggccgccauccagaccagcgacgagaccaaguggugcccccccgaccagcuggugaaccugcacgacuucagaagcgacgagaucgagcaccuggugguggaggagcuggugaagaagagagaggagugccuggacgcccuggagagcaucaugaccaccaagagcgugagcuucagaagacugagccaccugagaaagcuggugcccggcuucggcaaggccuacaccaucuucaacaagacccugauggaggccgacgcccacuacaagagcgugagaaccuggaacgagaucauccccagcaagggcugccugagagugggcggcagaugccacccccacgugaacggcguguucuucaacggcaucauccugggccccgacggccacgugcugauccccgagaugcagagcagccugcugcagcagcacauggagcugcuggagagcagcgugaucccccugaugcacccccuggccgaccccagcaccguguucaaggacgacgacgaggccgaggacuucguggaggugcaccugcccgacgugcacaagcaggugagcggcguggaccugggccugcccagcuggggcaaguacgugcugaugagcgccggcgugcugaccgcccugaugcugaugaucuuccugaugaccugcugcagaagagccaacagagccgagagcgcccagcacagccugggcgagagaggcagaaaggugagcgugaccagccagagcggcagagugaucagcagcugggagagcuacaagagcggcggcgagaccaagcuguga

SEQ ID NO: 190662 - RNA, 1575 nt, Artificial Sequence
  derived and/or modified CDS sequence (opt4) from glycoprotein__RABV__AB563846.1
augaucccccaggcccugcuguucgugccccugcugguguucagccugugcuucggcaaguuccccaucuacaccauccccgacaagcugggccccuggagccccaucgacauccaccaccugagcugccccaacaaccuggugguggaggacgagggcugcaccaaccugagcggcuucagcuacauggagcugaaggugggcuacaucagcgccaucaaggugaacggcuucaccugcaccggcguggugaccgaggccgagaccuacaccaacuucgugggcuacgugaccaccaccuucaagagaaagcacuucagacccacccccgacgccugcagagccgccuacaacuggaagauggccggcgaccccagauacgaggagagccugcacaaccccuaccccgacuaccacuggcugagaaccgugaagaccaccaaggagagccuggugaucaucagccccagcguggccgaccuggaccccuacgacaagagccugcacagcagaguguuccccagcggcaagugcagcggcaucaccgugagcagcaccuacugcagcaccaaccacgacuacaccaucuggaugcccgagaaccccagacugggcaccagcugcgacaucuucaccaacagcagaggcaagagagccagcaagggcagcaagaccugcggcuucguggacgagagaggccuguacaagagccugaagggcgccugcaagcugaagcugugcggcgugcugggccugagacugauggacggcaccugggccgccauccagaccagcgacgagaccaaguggugcccccccgaccagcuggugaaccugcacgacuucagaagcgacgagaucgagcaccuggugguggaggagcuggugaagaagagagaggagugccuggacgcccuggagagcaucaugaccaccaagagcgugagcuucagaagacugagccaccugagaaagcuggugcccggcuucggcaaggccuacaccaucuucaacaagacccugauggaggccgacgcccacuacaagagcgugagaaccuggaacgagaucauccccagcaagggcugccugagagugggcggcagaugccacccccacgugaacggcguguucuucaacggcaucauccugggccccgacggccacgugcugauccccgagaugcagagcagccugcugcagcagcacauggagcugcuggagagcagcgugaucccccugaugcacccccuggccgaccccagcaccguguucaaggacgacgacgaggccgaggacuucguggaggugcaccugcccgacgugcacaagcaggugagcggcguggaccugggccugcccagcuggggcaaguacgugcugaugagcgccggcgugcugaccgcccugaugcugaugaucuuccugaccaccugcugcagaagagccaacagagccgagagcgcccagcacagccugggcgagagaggcagaaaggugagcgugaccagccagagcggcagagugaucagcagcugggagagcuacaagagcggcggcgagaccaagcuguga

SEQ ID NO: 190663 - RNA, 1575 nt, Artificial Sequence; identical to SEQ ID NO: 190662
  derived and/or modified CDS sequence (opt4) from glycoprotein__RABV__AB563847.1

SEQ ID NO: 190664 - RNA, 1575 nt, Artificial Sequence
  derived and/or modified CDS sequence (opt4) from glycoprotein__RABV__AB563848.1
augaucccccaggcccugcuguucgugccccugcugguguucagccugugcuucggcaaguuccccaucuacaccauccccgacaagcugggccccuggagccccaucgacauccaccaccugagcugccccaacaaccuggugguggaggacgagggcugcaccaaccugagcggcuucagcuacauggagcugaaggugggcuacaucagcgccaucaaggugaacggcuucaccugcaccggcguggugaccgaggccgagaccuacaccaacuucgugggcuacgugaccaccaccuucaagagaaagcacuucagacccacccccgacgccugcagagccgccuacaacuggaagauggccggcgaccccagauacgaggagagccugcacaaccccuaccccgacuaccacuggcugagaaccgugaagaccaccaaggagagccuggugaucaucagccccagcguggccgaccuggaccccuacgacaagagccugcacagcagaguguuccccagcggcaagugcagcggcaucaccgugagcagcaccuacugcagcaccaaccacgacuacaccaucuggaugcccgagaaccccagacugggcaccagcugcgacaucuucaccaacagcagaggcaagagagccagcaagggcagcaagaccugcggcuucguggacgagagaggccuguacaagagccugaagggcgccugcaagcugaagcugugcggcgugcugggccugagacugauggacggcaccugggccgccauccagaccagcgacgagaccaaguggugcccccccgaccagcuggugaaccugcacgacuucagaagcgacgagaucgagcaccuggugguggaggagcuggugaagaagagagaggagugccuggacgcccuggagagcaucaugaccaccaagagcgugagcuucagaagacugagccaccugagaaagcuggugcccggcuucggcaaggccuacaccaucuucaacaagacccugauggaggccgacgcccacuacaagagcgugagaaccuggaacgagaucauccccagcaagggcugccugagagugggcggcagaugccacccccacgugaacggcguguucuucaacggcaucauccugggccccgacggccacgugcugauccccgagaugcagagcagccugcugcagcagcacauggagcugcuggagagcagcgugaucccccugaugcacccccuggccgaccccagcaccguguucaaggacgacgacgaggccgaggacuucguggaggugcaccugcccgacgugcacaagcaggugagcggcguggaccugggccugcccagcuggggcaaguacgugcugaugagcgccggcgugcugaccgcccugaugcugaccaucuuccugaugaccugcugcagaagagccaacagagccgagagcgcccagcacagccugggcgagagaggcagaaaggugagcgugaccagccagagcggcagagugaucagcagcugggagagcuacaagagcggcggcgagaccaagcuguga

SEQ ID NO: 190665 - RNA, 1575 nt, Artificial Sequence
  derived and/or modified CDS sequence (opt4) from glycoprotein__RABV__AB563849.1
augaucccccaggcccugcuguucgugccccugcugguguucagccugugcuucggcaaguuccccaucuacaccauccccgacaagcugggccccuggagccccaucgacauccaccaccugagcugccccaacaaccuggugguggaggacgagggcugcaccaaccugagcggcuucagcuacauggagcugaaggugggcuacaucagcgccaucaaggugaacggcuucaccugcaccggcguggugaccgaggccgagaccuacaccaacuucgugggcuacgugaccaccaccuucaagagaaagcacuucagacccacccccgacgccugcagagccgccuacaacuggaagauggccggcgaccccagauacgaggagagccugcacaaccccuaccccgacuaccacuggcugagaaccgugaagaccaccaaggagagccuggugaucaucagccccagcguggccgaccuggaccccuacgacaagagccugcacagcagaguguuccccagcggcaagugcagcggcaucaccgugagcagcaccuacugcagcaccaaccacgacuacaccaucuggaugcccgagaaccccagacugggcaccagcugcgacaucuucaccaacagcagaggcaagagagccagcaagggcagcaagaccugcggcuucguggacgagagaggccuguacaagagccugaagggcgccugcaagcugaagcugugcggcgugcugggccugagacugauggacggcaccugggccgccauccagaccagcgacgagaccaaguggugcccccccgaccagcuggugaaccugcacgacuucagaagcgacgagaucgagcaccuggugguggaggagcuggugaagaagagagaggagugccuggacgcccuggagagcaucaugaccaccaagagcgugagcuucagaagacugagccaccugagaaagcuggugcccggcuucggcaaggccuacaccaucuucaacaagacccugauggaggccgacgcccacuacaagagcgugagaaccuggaacgagaucauccccagcaagggcugccugagagugggcggcagaugccacccccacgugaacggcguguucuucaacggcaucauccugggccccgacggccacgugcugauccccgagaugcagagcagccugcugcagcagcacauggagcugcuggagagcagcgugaucccccugaugcacccccuggccgaccccagcaccguguucaaggacgacgacgaggccgaggacuucguggaggugcaccugcccgacgugcacaagcaggugagcggcguggaccugggccugcccagcuggggcaaguacgugcugaugagcgccggcgugcugaccgcccugaugcugaugaucuuccugaccaccugcuacagaagagccaacagagccgagagcgcccagcacagccugggcgagaagggcagaaaggugagcgugaccagccagagcggcagagugaucagcagcugggagagcuacaagagcggcggcgagaccaagcuguga

SEQ ID NO: 190666 - RNA, 1575 nt, Artificial Sequence; identical to SEQ ID NO: 190659
  derived and/or modified CDS sequence (opt4) from glycoprotein__RABV__AB563850.1

SEQ ID NO: 190667 - RNA, 1575 nt, Artificial Sequence; identical to SEQ ID NO: 190664
  derived and/or modified CDS sequence (opt4) from glycoprotein__RABV__AB563851.1

SEQ ID NO: 190668 - RNA, 1575 nt, Artificial Sequence
  derived and/or modified CDS sequence (opt4) from glycoprotein__RABV__AB563852.1
augaacccccaggcccugauguucgugccccugcugguguucagccugugcuucggcaaguuccccaucuacaccauccccgacaagcugggccccuggagccccaucgacauccaccaccugagcugccccaacaaccuggugguggaggacgagggcugcaccaaccugagcggcuucagcuacauggagcugaaggugggcuacaucagcgccaucaaggugaacggcuucaccugcaccggcguggugaccgaggccgagaccuacaccaacuucgugggcuacgugaccaccaccuucaagagaaagcacuucagacccacccccgacgccugcagagccgccuacaacuggaagauggccggcgaccccagauacgaggagagccugcacaaccccuaccccgacuaccacuggcugagaaccgugaagaccaccaaggagagccuggugaucaucagccccagcguggccgaccuggaccccuacgacaagagccugcacagcagaguguuccccagcggcaagugcagcggcaucaccgugagcagcaccuacugcagcaccaaccacgacuacaccaucuggaugcccgagaaccccagacugggcaccagcugcgacaccuucaccaacagcagaggcaagagagccagcaagggcagcaagaccugcggcuucguggacgagagaggccuguacaagagccugaagggcgccugcaagcugaagcugugcggcgugcugggccugagacugauggacggcaccugggccgccauccagaccagcgacgagaccaaguggugcccccccgaccagcuggugaaccugcacgacuucagaagcgacgagaucgagcaccuggugguggaggagcuggugaagaagagagaggagugccuggacgcccuggagagcaucaugaccaccaagagcgugagcuucagaagacugagccaccugagaaagcuggugcccggcuucggcaaggccuacaccaucuucaacaagacccugauggaggccgacgcccacuacaagagcgugagaaccuggaacgagaucauccccagcaagggcugccugagagugggcggcagaugccacccccacgugaacggcguguucuucaacggcaucauccugggccccgacggccacgugcugauccccgagaugcagagcagccugcugcagcagcacauggagcugcuggagagcagcgugaucccccugaugcacccccuggccgaccccagcaccguguucaaggacgacgacgaggccgaggacuucguggaggugcaccugcccgacgugcacaagcaggugagcggcguggaccugggccugcccagcuggggcaaguacgugcugaugagcgccggcgugcugaccgcccugaugcugaugaucuuccugaugaccugcugcagaagagccaacagagccgagagcgcccagcacagccugggcgagagaggcagaaaggugagcgugaccagccagagcggcagagugaucagcagcugggagagcuacaagagcggcggcgagaccaagcuguga

SEQ ID NO: 190669 - RNA, 1575 nt, Artificial Sequence
  derived and/or modified CDS sequence (opt4) from glycoprotein__RABV__AB563854.1
augaucccccaggcccugauguucgugccccugcugguguucagccugugcuucggcaaguuccccaucuacaccauccccgacaagcugggccccuggagccccaucgacauccaccaccugagcugccccaacaaccuggugguggaggacgagggcugcaccaaccugagcggcuucagcuacauggagcugaaggugggcuacaucagcgccaucaaggugaacggcuucaccugcaccggcguggugaccgaggccgagaccuacaccaacuucgugggcuacgugaccaccaccuucaagagaaagcacuucagacccacccccgacgccugcagagccgccuacaacuggaagauggccggcgaccccagauacgaggagagccugcacaaccccuaccccgacuaccacuggcugagaaccgugaagaccaccaaggagagccuggugaucaucagccccagcguggccgaccuggaccccuacgacaagagccugcacagcagaguguuccccagcggcaagugcagcggcaucaccgugagcagcaccuacugcagcaccaaccacgacuacaccaucuggaugcccgagaaccccagacugggcaccagcugcgacaucuucaccaacagcagaggcaagagagccagcaagggcagcaagaccugcggcuucguggacgagagaggccuguacaagagccugaagggcgccugcaagcugaagcugugcggcgugcugggccugagacugauggacggcaccugggccgccauccagaccagcgacgagaccaaguggugcccccccgaccagcuggugaaccugcacgacuucagaagcgacgagaucgagcaccuggugguggaggagcuggugaagaagagagaggagugccuggacgcccuggagagcaucaugaccaccaagagcgugagcuucagaagacugagccaccugagaaagcuggugcccggcuucggcaaggccuacaccaucuucaacaagacccugauggaggccgacgcccacuacaagagcgugagaaccuggaacgagaucauccccagcaagggcugccugagagugggcggcagaugccacccccacgugaacggcguguucuucaacggcaucauccugggccccgacggccacgugcugauccccgagaugcagagcagccugcugcagcagcacauggagcugcuggagagcagcgugaucccccugaugcacccccuggccgaccccagcaccguguucaaggacgacgacgaggccgaggacuucguggaggugcaccugcccgacgugcacaagcaggugagcggcguggaccugggccugcccagcuggggcaaguacgugcugaugagcgccggcgugcugaccgcccugaugcugaugaucuuccugaugaccugcugcagaagagccaacagagccgagagcgcccagcacagccugggcgagagaggcagaaaggugagcgugaccagccagagcggcagagugaucagcagcugggagagcuacaagagcggcggcgagaccaagcuguga

SEQ ID NO: 190670 - RNA, 1575 nt, Artificial Sequence; identical to SEQ ID NO: 190661
  derived and/or modified CDS sequence (opt4) from glycoprotein__RABV__AB563855.1

SEQ ID NO: 190671 - RNA, 1575 nt, Artificial Sequence; identical to SEQ ID NO: 190661
  derived and/or modified CDS sequence (opt4) from glycoprotein__RABV__AB563856.1

SEQ ID NO: 190672 - RNA, 1575 nt, Artificial Sequence
  derived and/or modified CDS sequence (opt4) from glycoprotein__RABV__AB563857.1
augaacccccaggcccugauguucgugccccugcugguguucagccugugcuucggcaaguuccccaucuacaccauccccgacaagcugggccccuggagccccaucgacauccaccaccugagcugccccaacaaccuggugguggaggacgagggcugcaccaaccugagcggcuucagcuacauggagcugaaggugggcuacaucagcgccaucaaggugaacggcuucaccugcaccggcguggugaccgaggccgagaccuacaccaacuucgugggcuacgugaccaccaccuucaagagaaagcacuucagacccacccccgacgccugcagagccgccuacaacuggaagauggccggcgaccccagauacgaggagagccugcacaaccccuaccccgacuaccacuggcugagaaccgugaagaccaccaaggagagccuggugaucaucagccccagcguggccgaccuggaccccuacgacaagagccugcacagcagaguguuccccagcggcaagugcagcggcaucaccgugagcagcaccuacugcagcaccaaccacgacuacaccaucuggaugcccgagaaccccagacugggcaccagcugcgacauccugaccaacagcagaggcaagagagccagcaagggcagcaagaccugcggcuucguggacgagagaggccuguacaagagccugaagggcgccugcaagcugaagcugugcggcgugcugggccugagacugauggacggcaccugggccgccauccagaccagcgacgagaccaaguggugcccccccgaccagcuggugaaccugcacgacuucagaagcgacgagaucgagcaccuggugguggaggagcuggugaagaagagagaggagugccuggacgcccuggagagcaucaugaccaccaagagcgugagcuucagaagacugagccaccugagaaagcuggugcccggcuucggcaaggccuacaccaucuucaacaagacccugauggaggccgacgcccacuacaagagcgugagaaccuggaacgagaucauccccagcaagggcugccugagagugggcggcagaugccacccccacgugaacggcguguucuucaacggcaucauccugggccccgacggccacgugcugauccccgagaugcagagcagccugcugcagcagcacauggagcugcuggagagcagcgugaucccccugaugcacccccuggccgaccccagcaccguguucaaggacgacgacgaggccgaggacuucguggaggugcaccugcccgacgugcacaagcaggugagcggcguggaccugggccugcccagcuggggcaaguacgugcugaugagcgccggcgugcugaccgcccugaugcugaugaucuuccugaugaccugcugcagaagagccaacagagccgagagcgcccagcacagccugggcgagagaggcagaaaggugagcgugaccagccagagcggcagagugaucagcagcugggagagcuacaagagcggcggcgagaccaagcuguga

SEQ ID NO: 190673 - RNA, 1575 nt, Artificial Sequence; identical to SEQ ID NO: 190632
  derived and/or modified CDS sequence (opt4) from glycoprotein__RABV__AB563860.2

SEQ ID NO: 190674 - RNA, 1575 nt, Artificial Sequence; identical to SEQ ID NO: 190632
  derived and/or modified CDS sequence (opt4) from glycoprotein__RABV__AB563861.1

SEQ ID NO: 190675 - RNA, 1575 nt, Artificial Sequence
  derived and/or modified CDS sequence (opt4) from glycoprotein__RABV__AB563862.1
augaucccccaggcccugcuguucgugccccugcugguguucagccugugcuucggcaaguuccccaucuacaccauccccgacaagcugggccccuggagccccaucgacauccaccaccugagcugccccaacaaccuggugguggaggacgagggcugcaccaaccugagcggcuucagcuacauggagcugaaggugggcuacaucagcgccaucaaggugaacggcuucaccugcaccggcguggugaccgaggccgagaccuacaccaacuucgugggcuacgugaccaccaccuucaagagaaagcacuucagacccacccccgacgccugcagagccgccuacaacuggaagaugagcggcgaccccagauacgaggagagccugcacaaccccuaccccgacuaccacuggcugagaaccgugaagaccaccaaggagagccuggugaucaucagccccagcguggccgaccuggaccccuacgacaagagccugcacagcagaguguuccccagcggcaagugcagcggcaucaccgugagcagcaccuacugcagcaccaaccacgacuacaccaucuggaugcccgagaaccccagacugggcaccagcugcgacaucuucaccaacagcagaggcaagagagccagcaagggcagcaagaccugcggcuucguggacgagagaggccuguacaagagccugaagggcgccugcaagcugaagcugugcggcgugcugggccugagacugauggacggcaccugggccgccauccagaccagcgacgagaccaaguggugcccccccgaccagcuggugaaccugcacgacuucagaagcgacgagaucgagcaccuggugguggaggagcuggugaagaagagagaggagugccuggacgcccuggagagcaucaugaccaccaagagcgugagcuucagaagacugagccaccugagaaagcuggugcccggcuucggcaaggccuacaccaucuucaacaagacccugauggaggccgacgcccacuacaagagcgugagaaccuggaacgagaucauccccagcaagggcugccugagagugggcggcagaugccacccccacgugaacggcguguucuucaacggcaucauccugggccccgacggccacgugcugauccccgagaugcagagcagccugcugcagcagcacauggagcugcuggagagcagcgugaucccccugaugcacccccuggccgaccccagcaccguguucaaggacgacgacgaggccgaggacuucguggaggugcaccugcccgacgugcacaagcaggugagcggcguggaccugggccugcccagcuggggcaaguacgugcugaugagcgccggcgugcugaccgcccugaugcugaugaucuuccugaugaccugcugcagaagagccaacagaaccgagagcgcccagcacagccugggcgagagaggcagaaaggugagcgugaccagccagagcggcagagugaucagcagcugggagagcuacaagagcggcggcgagaccaagcuguga

SEQ ID NO: 190676 - RNA, 1575 nt, Artificial Sequence
  derived and/or modified CDS sequence (opt4) from glycoprotein__RABV__AB563863.1
augaucccccaggcccugcuguucgugccccugcugguguucagccugugcuucggcaaguuccccaucuacaccauccccgacaagcugggccccuggagccccaucgacauccaccaccugagcugccccaacaaccuggugguggaggacgagggcugcaccaaccugagcggcuucagcuacauggagcugaaggugggcuacaucagcgccaucaaggugaacggcuucaccugcaccggcguggugaccgaggccgagaccuacaccaacuucgugggcuacgugaccaccaccuucaagagaaagcacuucagacccacccccgacgccugcagagccgccuacaacuggaagauggccggcgaccccagauacgaggagagccugcacaaccccuaccccgacuaccacuggcugagaaccgugaagaccaccaaggagagccuggugaucaucagccccagcguggccgaccuggaccccuacgacaagagccugcacagcagaguguuccccagcggcaagugcagcggcaucaccgugagcagcaccuacugcagcaccaaccacgacuacaccaucuggaugcccgagaaccccagacugggcaccagcugcgacaucuucaccaacagcagaggcaagagagccagcaagggcagcaagaccugcggcuucguggacgagagaggccuguacaagagccugaagggcgccugcaagcugaagcugugcggcgugcugggccugagacugauggacggcaccugggccgccauccagaccagcgacgagaccaaguggugcccccccgaccagcuggugaaccugcacgacuucagaagcgacgagaucgagcaccuggugguggaggagcuggugaagaagagagaggagugccuggacgcccuggagagcaucaugaccaccaagagcgugagcuucagaagacugagccaccugagaaagcuggugcccggcuucggcaaggccuacaccaucuucaacaagacccugauggaggccgacgcccacuacaagagcgugagaaccuggaacgagaucauccccagcaagggcugccugagagugggcggcagaugccacccccacgugaacggcguguucuucaacggcaucauccugggccccgacggccacgugcugauccccgagaugcagagcagccugcugcagcagcacauggagcugcuggagagcagcgugaucccccugaugcacccccuggccgaccccagcaccguguucaaggacgacgacgaggccgaggacuucguggaggugcaccugcccgacgugcacaagcaggugagcggcguggaccugggccugcccagcuggggcaaguacgugcugaugagcgccggcgugcugaccgcccugaugcugaugaucuuccugaugaccugcugcagaagagccaacagagccgagagcgcccagcacagccugggcgagaagggcagaaaggugagcgugaccagccagagcggcagagugaucagcagcugggagagcuacaagagcggcggcgagaccaagcuguga

SEQ ID NO: 190677 - RNA, 1575 nt, Artificial Sequence
  derived and/or modified CDS sequence (opt4) from glycoprotein__RABV__AB563864.1
augaucccccaggcccugcuguucgugccccugcugguguucagccugugcuucggcaaguuccccaucuacaccauccccgacaagcugggccccuggagccccaucgacauccaccaccugagcugccccaacaaccuggugguggaggacgagggcugcaccaaccugagcggcuucagcuacauggagcugaaggugggcuacaucagcgccaucaaggugaacggcuucaccugcaccggcguggugaccgaggccgagaccuacaccaacuucgugggcuacgugaccaccaccuucaagagaaagcacuucagacccacccccgacgccugcagagccgccuacaacuggaagauggccggcgaccccagauacgaggagagccugcacaaccccuaccccgacuaccacuggcugagaaccgugaagaccaccaaggagagccuggugaucaucagccccagcguggccgaccuggaccccuacgacaagagccugcacagcagaguguuccccagcggcaagugcagcggcaucaccgugagcagcaccuacugcagcaccaaccacgacuacaccaucuggaugcccgagaaccccagacugggcaccagcugcgacaucuucaccaacagcagaggcaagagagccagcaagggcagcaagaccugcggcuucguggacgagagaggccuguacaagagccugaagggcgccugcaagcugaagcugugcggcgugcugggccugagacugaucgacggcaccugggccgccauccagaccagcgacgagaccaaguggugcccccccgaccagcuggugaaccugcacgacuucagaagcgacgagaucgagcaccuggugguggaggagcuggugaagaagagagaggagugccuggacgcccuggagagcaucaugaccaccaagagcgugagcuucagaagacugagccaccugagaaagcuggugcccggcuucggcaaggccuacaccaucuucaacaagacccugauggaggccgacgcccacuacaagagcgugagaaccuggaacgagaucauccccagcaagggcugccugagagugggcggcagaugccacccccacgugaacggcguguucuucaacggcaucauccugggccccgacggccacgugcugauccccgagaugcagagcagccugcugcagcagcacauggagcugcuggagagcagcgugaucccccugaugcacccccuggccgaccccagcaccguguucaaggacgacgacgaggccgaggacuucguggaggugcaccugcccgacgugcacaagcaggugagcggcguggaccugggccugcccagcuggggcaaguacgugcugaugagcgccggcgugcugaccgcccugaugcugaugaucuuccugaccaccugcugcagaagagccaacagagccgagagcgcccagcacagccugggcgagagaggcagaaaggugagcgccaccagccagagcggcagagugaucagcagcugggagagcuacaagagcggcggcgagaccaagcuguga

SEQ ID NO: 190678 - RNA, 1575 nt, Artificial Sequence
  derived and/or modified CDS sequence (opt4) from glycoprotein__RABV__AB563865.1
augaucccccaggcccugcuguucgugccccugcugguguucagccugugcuucggcaaguuccccaucuacaccauccccgacaagcugggccccuggagccccaucgacauccaccaccugagcugccccaacaaccuggugguggaggacgagggcugcaccaaccugagcggcuucagcuacauggagcugaaggugggcuacaucagcgccaucaaggugagcggcuucaccugcaccggcguggugaccgaggccgagaccuacaccaacuucgugggcuacgugaccaccaccuucaagagaaagcacuucagacccacccccgacgccugcagagccgccuacaacuggaagauggccggcgaccccagauacgaggagagccugcacaaccccuaccccgacuaccacuggcugagaaccgugaagaccaccaaggagagccuggugaucaucagccccagcguggccgaccuggaccccuacgacaagagccugcacagcagaguguuccccagcggcaagugcagcggcaucaccgugagcagcaccuacugcagcaccaaccacgacuacaccaucuggaugcccgagaaccccagacugggcaccagcugcgacaucuucaccaacagcagaggcaagagagccagcaagggcagcaagaccugcggcuucguggacgagagaggccuguacaagagccugaagggcgccugcaagcugaagcugugcggcgugcugggccugagacugauggacggcaccugggccgccauccagaccagcgacgagaccaaguggugcccccccgaccagcuggugaaccugcacgacuucagaagcgacgagaucgagcaccuggugguggaggagcuggugaagaagagagaggagugccuggacgcccuggagagcaucaugaccaccaagagcgugagcuucagaagacugagccaccugagaaagcuggugcccggcuucggcaaggccuacaccaucuucaacaagacccugauggaggccgacgcccacuacaagagcgugagaaccuggaacgagaucauccccagcaagggcugccugagagugggcggcagaugccacccccacgugaacggcguguucuucaacggcaucauccugggccccgacggccacgugcugauccccgagaugcagagcagccugcugcagcagcacauggagcugcuggagagcagcgugaucccccugaugcacccccuggccgaccccagcaccguguucaaggacgacgacgaggccgaggacuucguggaggugcaccugcccgacgugcacaagcaggugagcggcguggaccugggccugcccagcuggggcaaguacgugcugaugagcgccggcgcccugaccgcccugaugcugaugaucuuccugaugaccugcugcagaagagccaacagagccgagagcgcccagcacagccugggcgagggcggcagaaaggugagcgugaccagccagagcggcagagugaucagcagcugggagagcuacaagagcggcggcgagaccaagcuguga

SEQ ID NO: 190679 - RNA, 1575 nt, Artificial Sequence
  derived and/or modified CDS sequence (opt4) from glycoprotein__RABV__AB563867.1
augaucccccaggcccugcuguucgugccccugcugguguucagccugugcuucggcaaguuccccaucuacaccauccccgacaagcugggccccuggagccccaucgacauccaccaccugagcugccccaacaaccuggugguggaggacgagggcugcaccaaccugagcggcuucagcuacauggagcugaaggugggcuacaucagcgccaucaaggugagcggcuucaccugcaccggcguggugaccgaggccgagaccuacaccaacuucgugggcuacgugaccaccaccuucaagagaaagcacuucagacccacccccgacgccugcagagccgccuacaacuggaagauggccggcgaccccagauacgaggagagccugcacaaccccuaccccgacuaccacuggcugagaaccgugaagaccaccaaggagagccuggugaucaucagccccagcguggccgaccuggaccccuacgacaagagccugcacagcagaguguuccccagcggcaagugcagcggcaucaccgugagcagcaccuacugcagcaccaaccacgacuacaccaucuggaugcccgagaaccccagacugggcaccagcugcgacaucuucaccaacagcagaggcaagagagccagcaagggcagcaagaccugcggcuucguggacgagagaggccuguacaagagccugaagggcgccugcaagcugaagcugugcggcgugcugggccugagacugauggacggcaccugggccgccauccagaccagcgacgagaccaaguggugcccccccgaccagcuggugaaccugcacgacuucagaagcgacgagaucgagcaccuggugguggaggagcuggugaagaagagagaggagugccuggacgcccuggagagcaucaugaccaccaagagcgugagcuucagaagacugagccaccugagaaagcuggugcccggcuucggcaaggccuacaccaucuucaacaagacccugauggaggccgacgcccacuacaagagcgugagaaccuggaacgagaucauccccagcaagggcugccugagagugggcggcagaugccacccccacgugaacggcguguucuucaacggcaucauccugggccccgacggccacgugcugauccccgagaugcagagcagccugcugcagcagcacauggagcugcuggagagcagcgugaucccccugaugcacccccuggccgaccccagcaccguguucaaggacgacgacgaggccgaggacuucguggaggugcaccugcccgacgugcacaagcaggugagcggcguggaccugggccugcccagcuggggcaaguacgugcugaugagcgccggcgcccugaccgcccugaugcugaugaucuuccugaugaccugcugcagaaaggccaacagagccgagagcgcccagcacagccugggcgagggcggcagaaaggugagcgugaccagccagagcggcagagugaucagcagcugggagagcuacaagagcggcggcgagaccaagcuguga

SEQ ID NO: 190680 - RNA, 1575 nt, Artificial Sequence
  derived and/or modified CDS sequence (opt4) from glycoprotein__RABV__AB563870.1
augaucccccaggcccugcuguucgugccccugcugguguucagccugugcuucggcaaguuccccaucuacaccauccccgacaagcugggccccuggagccccaucgacauccaccaccugagcugccccaacaaccuggugguggaggacgagggcugcaccaaccugagcggcuucagcuacauggagcugaaggugggcuacaucagcgccaucaaggugaacggcuucaccugcaccggcguggugaccgaggccgagaccuacaccaacuucgugggcuacgugaccaccaccuucaagagaaagcacuucagacccacccccgacgccugcagagccgccuacaacuggaagauggccggcgaccccagauacgaggagagccugcacaaccccuaccccgacuaccacuggcugagaaccgugaagaccaccaaggagagccuggugaucaucagccccagcguggccgaccuggaccccuacgacaagagccugcacagcagaguguuccccagcggcaagugcagcggcaucaccgugagcagcaccuacugcagcaccaaccacgacuacaccaucuggaugcccgagaaccccagacugggcaccagcugcgacaucuucaccaacagcagaggcaagagagccagcaagggcagcaagaccugcggcuucguggacgagagaggccuguacaagagccugaagggcgccugcaagcugaagcugugcggcgugcugggccugagacugauggacggcaccugggccgccauccagaccagcgacgagaccaaguggugcccccccgaccagcuggugaaccugcacgacuucagaagcgacgagaucgagcaccuggugguggaggagcuggugaagaagagagaggagugccuggacgcccuggagagcaucaugaccaccaagagcgugagcuucagaagacugagccaccugagaaagcuggugcccggcuucggcaaggccuacaccaucuucaacaagacccugauggaggccgacgcccacuacaagagcgugagaaccuggaacgagaucauccccagcaagggcugccugagagugggcggcagaugccacccccacgugaacggcguguucuucaacggcaucauccugggccccgacggccacgugcugauccccgagaugcagagcagccugcugcagcagcacauggagcugcuggagagcagcgugaucccccugaugcacccccuggccgaccccagcaccguguucaaggacgacgacgaggccgaggacuucguggaggugcaccugcccgacgugcacaagcaggugagcggcguggaccugggccugcccagcuggggcaaguacgugcugaugagcgccggcgugcugaccgcccugaugcugaccaucuuccugaucaccugcugcagaagagccaacagagccgagagcgcccagcacagccugggcgagagaggcagaaaggugagcgugaccagccagagcggcagagugaucagcagcugggagagcuacaagagcggcggcgagaccaagcuguga

SEQ ID NO: 190681 - RNA, 1575 nt, Artificial Sequence; identical to SEQ ID NO: 190661
  derived and/or modified CDS sequence (opt4) from glycoprotein__RABV__AB563871.1

SEQ ID NO: 190682 - RNA, 1575 nt, Artificial Sequence; identical to SEQ ID NO: 190661
  derived and/or modified CDS sequence (opt4) from glycoprotein__RABV__AB563873.1

SEQ ID NO: 190683 - RNA, 1575 nt, Artificial Sequence
  derived and/or modified CDS sequence (opt4) from glycoprotein__RABV__AB563874.1
augaacccccaggcccugauguucgugccccugcugguguucagccugugcuucggcaaguuccccaucuacaccauccccgacaagcugggccccuggagccccaucgacauccaccaccugagcugccccaacaaccuggugguggaggacgagggcugcaccaaccugagcggcuucagcuacauggagcugaaggugggcuacaucagcgccaucaaggugaacggcuucaccugcaccggcguggugaccgaggccgagaccuacaccaacuucgugggcuacgugaccaccaccuucaagagaaagcacuucagacccacccccgacgccugcagagccgccuacaacuggaagauggccggcgaccccagauacgaggagagccugcacaaccccuaccccgacuaccacuggcugagaaccgugaagaccaccaaggagagccuggugaucaucagccccagcguggccgaccuggaccccuacgacaagagccugcacagcagaguguuccccagcggcaagugcagcggcaucaccgugagcagcaccuacugcagcaccaaccacgacuacaccaucuggaugcccgagaaccccagacugggcaccagcugcgacaucuucaccaacagcagaggcaagagagccagcaagggcagcaagaccugcggcuucguggacgagagaggccuguacaagagccugaagggcgccugcaagcugaagcugugcggcgugcugggccugagacugauggacggcaccugggccgccauccagaccagcgacgagaccaaguggugcccccccgaccagcuggugaaccugcacgacuucagaagcgacgagaucgagcaccuggugguggaggagcuggugaagaagagagaggagugccuggacgcccuggagagcaucaugaccaccaagagcgugagcuucagaagacugagccaccugagaaagcuggugcccggcuucggcaaggccuacaccaucuucaacaagacccugauggaggccgacgcccacuacaagagcgugagaaccuggaacgagaucauccccagcaagggcugccugagagugggcggcagaugccacccccacgugaacggcguguucuucaacggcaucauccugggccccgacggccacgugcugauccccgagaugcagagcagccugcugcagcagcacauggagcugcuggagagcagcgugaucccccugaugcacccccuggccgaccccagcaccguguucaaggacgacgacgaggccgaggacuucguggaggugcaccugcccgacgugcacaagcaggugagcggcguggaccugggccugagcagcuggggcaaguacgugcugaugagcgccggcgugcugaccgcccugaugcugaugaucuuccugaugaccugcugcagaagagccaacagagccgagagcgcccagcacagccugggcgagagaggcagaaaggugagcgugaccagccagagcggcagagugaucagcagcugggagagcuacaagagcggcggcgagaccaagcuguga

SEQ ID NO: 190684 - RNA, 1575 nt, Artificial Sequence
  derived and/or modified CDS sequence (opt4) from glycoprotein__RABV__AB563875.1
augaacccccaggcccugauguucgugccccugcugguguucagccugugcuucggcaaguuccccaucuacaccauccccgacaagcugggccccuggagccccaucgacauccaccaccugagcugccccaacaaccuggugguggaggacgagggcugcaccaaccugagcggcuucagcuacauggagcugaaggugggcuacaucagcgccaucaaggugaacggcuucaccugcaccggcguggugaccgaggccgagaccuacaccaacuucgugggcuacgugaccaccaccuucaagagaaagcacuucagacccacccccgacgccugcagagccgccuacaacuggaagauggccggcgaccccagauacgaggagagccugcacaaccccuaccccgacuaccacuggcugagaaccgugaagaccaccaaggagagccuggugaucaucagccccagcguggccgaccuggaccccuacgacaagagccugcacagcagaguguuccccagcggcaagugcagcggcaucaccgugagcagcaccuacugcagcaccaaccacgacuacaccaucuggaugcccgagaaccccagacugggcaccagcugcgacaucuucaccaacagcagaggcaagagagccagcaagggcagcaagaccugcggcuucguggacgagagaggccuguacaagagccugaagggcgccugcaagcugaagcugugcggcgugcugggccugagacugauggacggcaccugggccgccauccagaccagcgacgagaccaaguggugcccccccgaccagcuggugaaccugcacgacuucagaagcgacgagaucgagcaccuggugguggaggagcuggugaagaagagagaggagugccuggacgcccuggagagcaucaugaccaccaagagcgugagcuucagaagacugagccaccugagaaagcuggugcccggcuucggcaaggccuacaccaucuucaacaagacccugauggaggccgacgcccacuacaagagcgugagaaccuggaacgagaucauccccagcaagggcugccugagagugggcggcagaugccacccccacgugaacggcguguucuucaacggcaucauccugggccccgacggccacgugcugauccccgagaugcagagcagccugcugcagcagcacauggagcugcuggagagcagcgugaucccccugaugcacccccuggccgaccccagcaccguguucaaggacgacgacgaggccgaggacuucguggaggugcaccugcccgacgugcacaagcaggugagcggcguggaccugggccugcccagcuggggcaaguacgugcugaugagcgccggcgugcugaccgcccugaugcugaugaucuuccugaugaccugcugcagaagagccaacagagccgagagcgcccagcacagccugggcgagagaagaagaaaggugagcgugaccagccagagcggcagagugaucagcagcugggagagcuacaagagcggcggcgagaccaagcuguga

SEQ ID NO: 190685 - RNA, 1575 nt, Artificial Sequence
  derived and/or modified CDS sequence (opt4) from glycoprotein__RABV__AB563878.1
augaucccccaggcccugcuguucgugccccugcugguguucagccugugcuucggcaaguuccccaucuacaccauccccgacaagcugggccccuggagccccaucgacauccaccaccugagcugccccaacaaccuggugguggaggacgagggcugcaccaaccugagcggcuucagcuacauggagcugaaggugggcuacaucagcgccaucaaggugaacggcuucaccugcaccggcguggugaccgaggccgagaccuacaccaacuucgugggcuacgugaccaccaccuucaagagaaagcacuucagacccacccccgacgccugcagagccgccuacaacuggaagauggccggcgaccccagauacgaggagagccugcacaaccccuaccccgacuaccacuggcugagaaccgugaagaccaccaaggagagccuggugaucaucagccccagcguggccgaccuggaccccuacgacaagagccugcacagcagaguguuccccagcggcaagugcagcggcaucaccgugagcagcaccuacugcagcaccaaccacgacuacaccaucuggaugcccgagaaccccagacugggcaccagcugcgacaucuucaccaacagcagaggcaagagagccagcaagggcagcaagaccugcggcuucguggacgagagaggccuguacaagagccugaagggcgccugcaagcugaagcugugcggcgugcugggccugagacugauggacggcaccugggccgccauccagaccagcgacgagaccaaguggugcccccccgaccagcuggugaaccugcacgacuucagaagcgacgagaucgagcaccuggugguggaggagcuggugaagaagagagaggagugccuggacgcccuggagagcaucaugaccaccaagagcgugagcuucagaagacugagccaccugagaaagcuggugcccggcuucggcaaggccuacaccaucuucaacaagacccugauggaggccgacgcccacuacaagagcgugagaaccuggaacgagaucauccccagcaagggcugccugagagugggcggcagaugccacccccacgugaacggcguguucuucaacggcaucauccugggccccgacggccacgugcugauccccgagaugcagagcagccugcugcagcagcacauggagcugcuggagagcagcgugaucccccugaugcacccccuggccgaccccagcaccguguucaaggacgacgacgaggccgaggacuucguggaggugcaccugcccgacgugcacaagcaggugagcggcguggaccugggccugcccagcuggggcaaguacgugcugaugagcgccggcgugcugaccgcccugaugcugaugaucuuccugaccaccugcugcagaagagccaacagagccgagagcgcccagcacagccugggcgagaagggcagaaaggugagcgugaccagccagagcggcagagugaucagcagcugggagagcuacaagagcggcggcgagaccaagcuguga

SEQ ID NO: 190686 - RNA, 1575 nt, Artificial Sequence; identical to SEQ ID NO: 190632
  derived and/or modified CDS sequence (opt4) from glycoprotein__RABV__AB563879.1

SEQ ID NO: 190687 - RNA, 1575 nt, Artificial Sequence
  derived and/or modified CDS sequence (opt4) from glycoprotein__RABV__AB563881.1
augaucccccaggcccugcuguucgugccccugcugguguucagccugugcuucggcaaguuccccaucuacaccauccccgacaagcugggccccuggagccccaucgacauccaccaccugagcugccccaacaaccuggugguggaggacgagggcugcaccaaccugagcggcuucagcuaccuggagcugaaggugggcuacaucagcgccaucaaggugaacggcuucaccugcaccggcguggugaccgaggccgagaccuacaccaacuucgugggcuacgugaccaccaccuucaagagaaagcacuucagacccacccccgacgccugcagagccgccuacaacuggaagauggccggcgaccccagauacgaggagagccugcacaaccccuaccccgacuaccacuggcugagaaccgugaagaccaccaaggagagccuggugaucaucagccccagcguggccgaccuggaccccuacgacaagagccugcacagcagaguguuccccagcggcaagugcagcggcaucaccgugagcagcaccuacugcagcaccaaccacgacuacaccaucuggaugcccgagaaccccagacugggcaccagcugcgacaucuucaccaacagcagaggcaagagagccagcaagggcagcaagaccugcggcuucguggacgagagaggccuguacaagagccugaagggcgccugcaagcugaagcugugcggcgugcugggccugagacugauggacggcaccugggccgccauccagaccagcgacgagaccaaguggugcccccccgaccagcuggugaaccugcacgacuucagaagcgacgagaucgagcaccuggugguggaggagcuggugaagaagagagaggagugccuggacgcccuggagagcaucaugaccaccaagagcgugagcuucagaagacugagccaccugagaaagcuggugcccggcuucggcaaggccuacaccaucuucaacaagacccugauggaggccgacgcccacuacaagagcgugagaaccuggaacgagaucauccccagcaagggcugccugagagugggcggcagaugccacccccacgugaacggcguguucuucaacggcaucauccugggccccgacggccacgugcugauccccgagaugcagagcagccugcugcagcagcacauggagcugcuggagagcagcgugaucccccugaugcacccccuggccgaccccagcaccguguucaaggacgacgacgaggccgaggacuucguggaggugcaccugcccgacgugcacaagcaggugagcggcguggaccugggccugcccagcuggggcaaguacgugcugaugagcgccggcgugcugaccgcccugaugcugaugaucuuccugaugaccugcugcagaagagccaacagagccgacagcgcccagcacagccugggcgagggcgagagaaaggugagcgugaccagccagagcggcagagugaucagcagcugggagagcuacaagagcggcggcgagaccaagcuguga

SEQ ID NO: 190688 - RNA, 1575 nt, Artificial Sequence
  derived and/or modified CDS sequence (opt4) from glycoprotein__RABV__AB563883.1
augaucccccaggcccugcuguucgugcccuuccugguguucagccugugcuucggcaaguuccccaucuacaccauccccgacaagcugggccccuggagccccaucgacauccaccaccugagcugccccaacaaccuggugguggaggacgagggcugcaccaaccugagcggcuucagcuacauggagcugaaggugggcuacaucagcgccaucaaggugaacggcuucaccugcaccggcguggugaccgaggccgagaccuacaccaacuucgugggcuacgugaccaccaccuucaagagaaagcacuucagacccacccccgacgccugcagagccgccuacaacuggaagauggccggcgaccccagauacgaggagagccugcacaaccccuaccccgacuaccacuggcugagaaccgugaagaccaccaaggagagccuggugaucaucagccccagcguggccgaccuggaccccuacgacaagagccugcacagcagaguguuccccagcggcaagugcagcggcaucaccgugagcagcaccuacugcagcaccaaccacgacuacaccaucuggaugcccgagaaccccagacugggcaccagcugcgacaucuucaccaacagcagaggcaagagagccagcaagggcagcaagaccugcggcuucguggacgagagaggccuguacaagagccugaagggcgccugcaagcugaagcugugcggcgugcugggccugagacugauggacggcaccugggccgccauccagaccagcgacgagaccaaguggugcccccccgaccagcuggugaaccugcacgacuucagaagcgacgagaucgagcaccuggugguggaggagcuggugaagaagagagaggagugccuggacgcccuggagagcaucaugaccaccaagagcgugagcuucagaagacugagccaccugagaaagcuggugcccggcuucggcaaggccuacaccaucuucaacaagacccugauggaggccgacgcccacuacaagagcgugagaaccuggaacgagaucauccccagcaagggcugccugagagugggcggcagaugccacccccacgugaacggcguguucuucaacggcaucauccugggccccgacggccacgugcugauccccgagaugcagagcagccugcugcagcagcacauggagcugcuggagagcagcgugaucccccugaugcacccccuggccgaccccagcaccguguucaaggacgacgacgaggccgaggacuucguggaggugcaccugcccgacgugcacaagcaggugagcggcguggaccugggccugcccagcuggggcaaguacgugcugaugagcgccggcgugcugaccgcccugaugcugaccaucuuccugaugaccugcugcagaagagccaacagagccgagagcgcccagcacagccugggcgagagaggcagaaaggugagcgugaccagccagagcggcagagugaucagcagcugggagagcuacaagagcggcggcgagaccaagcuguga

SEQ ID NO: 190689 - RNA, 1575 nt, Artificial Sequence
  derived and/or modified CDS sequence (opt4) from glycoprotein__RABV__AB563884.1
augaucccccaggcccugcuguucgugccccugcugguguucagccugugcuucggcaaguuccccaucuacaccauccccgacaagcugggccccuggagccccaucgacauccaccaccugagcugccccaacaaccuggugguggaggacgagggcugcaccaaccugagcggcuucagcuacauggagcugaaggugggcuacaucagcgccaucaaggugaacggcuucaccugcaccggcguggugaccgaggccgagaccuacaccaacuucgugggcuacgugaccaccaccuucaagagaaagcacuucagacccacccccgacgccugcagagccgccuacaacuggaagauggccggcgaccccagauacgaggagagccugcacaaccccuaccccgacuaccacuggcugagaaccgugaagaccaccaaggagagccuggugaucaucagccccagcguggccgaccuggaccccuacgacaagagccugcacagcagaguguuccccagcggcaagugcagcggcaucaccgugagcagcaccuacugcagcaccaaccacgacuacaccaucuggaugcccgagaaccccagacugggcaccagcugcgacaucuucaccaacagcagaggcaagagagccagcaagggcagcaagaccugcggcuucguggacgagagaggccuguacaagagccugaagggcgccugcaagcugagacugugcggcgugcugggccugagacugauggacggcaccugggccgccauccagaccagcgacgagaccaaguggugcccccccgaccagcuggugaaccugcacgacuucagaagcgacgagaucgagcaccuggugguggaggagcuggugaagaagagagaggagugccuggacgcccuggagagcaucaugaccaccaagagcgugagcuucagaagacugagccaccugagaaagcuggugcccggcuucggcaaggccuacaccaucuucaacaagacccugauggaggccgacgcccacuacaagagcgugagaaccuggaacgagaucauccccagcaagggcugccugagagugggcggcagaugccacccccacgugaacggcguguucuucaacggcaucauccugggccccgacggccacgugcugauccccgagaugcagagcagccugcugcagcagcacauggagcugcuggagagcagcgugaucccccugaugcacccccuggccgaccccagcaccguguucaaggacgacgacgaggccgaggacuucguggaggugcaccugcccgacgugcacaagcaggugagcggcguggaccugggccugcccagcuggggcaaguacgugcugaugagcgccggcgugcugaccgcccugaugcugaugaucuuccugaugaccugcugcagaagagccaacagagccgagagcgcccagcacagccugggcgagagaggcagaaaggugagcgugaccagccagagcggcagagugaucagcagcugggagagcuacaagagcggcggcgagaccaagcuguga

SEQ ID NO: 190690 - RNA, 1575 nt, Artificial Sequence
  derived and/or modified CDS sequence (opt4) from glycoprotein__RABV__AB563886.1
augaucccccaggcccugcuguucgugccccugcugguguucagccugugcuucggcaaguuccccaucuacaccauccccgacaagcugggccccuggagccccaucgacauccaccaccugagcugccccaacaaccuggugguggaggacgagggcugcaccaaccugagcggcuucagcuacauggagcugaaggugggcuacaucagcgccaucaaggugaacggcuucaccugcaccggcguggugaccgaggccgagaccuacaccaacuucgugggcuacgugaccaccaccuucaagagaaagcacuucagacccacccccgacgccugcagagccgccuacaacuggaagauggccggcgaccccagauacgaggagagccugcacaaccccuaccccgacuaccacuggcugagaaccgugaagaccaccaaggagagccuggugaucaucagccccagcguggccgaccuggaccccuacgacaagagccugcacagcagaguguuccccagcggcaagugcagcggcaucaccgugagcagcaccuacugcagcaccaaccacgacuacaccaucuggaugcccgagaaccccagacugggcaccagcugcgacaucuucaccaacagcagaggcaagagagccagcaagggcagcaagaccugcggcuucguggacgagagaggccuguacaagagccugaagggcgccugcaagcugaagcugugcggcgugcugggccugagacugauggacggcaccugggccgccauccagaccagcgacgagaccaaguggugcccccccgaccagcuggugaaccugcacgacuucagaagcgacgagaucgagcaccuggugguggaggagcuggugaagaagagagaggagugccuggacgcccuggagagcaucaucaccaccaagagcgugagcuucagaagacugagccaccugagaaagcuggugcccggcuucggcaaggccuacaccaucuucaacaagacccugauggaggccgacgcccacuacaagagcgugagaaccuggaacgagaucauccccagcaagggcugccugagagugggcggcagaugccacccccacgugaacggcguguucuucaacggcaucauccugggccccgacggccacgugcugauccccgagaugcagagcagccugcugcagcagcacauggagcugcuggagagcagcgugaucccccugaugcacccccuggccgaccccagcaccguguucaaggacgacgacgaggccgaggacuucguggaggugcaccugcccgacgugcacaagcaggugagcggcguggaccugggccugcccagcuggggcaaguacgugcugaugagcgccggcgugcugaccgcccugaugcugaugaucuuccugaugaccugcugcagaagagccaacagaguggagagcgcccagcacagccugggcgagagaggcagaaaggugagcgugaccagccagagcggcagagugaucagcagcugggagagcuacaagagcggcggcgagaccaagcuguga

SEQ ID NO: 190691 - RNA, 1575 nt, Artificial Sequence; identical to SEQ ID NO: 190632
  derived and/or modified CDS sequence (opt4) from glycoprotein__RABV__AB563887.1

SEQ ID NO: 190692 - RNA, 1575 nt, Artificial Sequence; identical to SEQ ID NO: 190632
  derived and/or modified CDS sequence (opt4) from glycoprotein__RABV__AB563888.1

SEQ ID NO: 190693 - RNA, 1575 nt, Artificial Sequence
  derived and/or modified CDS sequence (opt4) from glycoprotein__RABV__AB563889.1
augaucccccaggcccugcuguucgugcccauccugguguucagccugugcuucggcaaguuccccaucuacaccauccccgacaagcugggccccuggagccccaucgacauccaccaccugagcugccccaacaaccuggugguggaggacgagggcugcaccaaccugagcggcuucagcuacauggagcugaaggugggcuacaucagcgccaucaaggugaacggcuucaccugcaccggcguggugaccgaggccgagaccuacaccaacuucgugggcuacgugaccaccaccuucaagagaaagcacuucagacccacccccgacgccugcagagccgccuacaacuggaagauggccggcgaccccagauacgaggagagccugcacaaccccuaccccgacuaccacuggcugagaaccgugaagaccaccaaggagagccuggugaucaucagccccagcguggccgaccuggaccccuacgacaagagccugcacagcagaguguuccccagcggcaagugcagcggcaucaccgugagcagcaccuacugcagcaccaaccacgacuacaccaucuggaugcccgagaaccccagacugggcaccagcugcgacaucuucaccaacagcagaggcaagagagccagcaagggcagcaagaccugcggcuucguggacgagagaggccuguacaagagccugaagggcgccugcaagcugaagcugugcggcgugcugggccugagacugauggacggcaccugggccgccauccagaccagcgacgagaccaaguggugcccccccgaccagcuggugaaccugcacgacuucagaagcgacgagaucgagcaccuggugguggaggagcuggugaagaagagagaggagugccuggacgcccuggagagcaucaugaccaccaagagcgugagcuucagaagacugagccaccugagaaagcuggugcccggcuucggcaaggccuacaccaucuucaacaagacccugauggaggccgacgcccacuacaagagcgugagaaccuggaacgagaucauccccagcaagggcugccugagagugggcggcagaugccacccccacgugaacggcguguucuucaacggcaucauccugggccccgacggccacgugcugauccccgagaugcagagcagccugcugcagcagcacauggagcugcuggagagcagcgugaucccccugaugcacccccuggccgaccccagcaccguguucaaggacgacgacgaggccgaggacuucguggaggugcaccugcccgacgugcacaagcaggugagcggcguggaccugggccugcccagcuggggcaaguacgugcugaugagcgccggcgugcugaccgcccugaugcugaugaucuuccugaugaccugcugcagaagagccaacagaguggagagcgcccagcacagccugggcgagagaggcagaaaggugagcgugaccagccagagcggcagagugaucagcagcugggagagcuacaagagcggcggcgagaccaagcuguga

SEQ ID NO: 190694 - RNA, 1575 nt, Artificial Sequence
  derived and/or modified CDS sequence (opt4) from glycoprotein__RABV__AB563890.1
augaucccccaggcccugcuguucgugccccugcugguguucagccugugcuucggcaaguuccccaucuacaccauccccgacaagcugggccccuggagccccaucgacauccaccaccugagcugccccaacaaccuggugguggaggacgagggcugcaccaaccugagcggcuucagcuacauggagcugaaggugggcuacaucagcgccaucaaggugaacggcuucaccugcaccggcguggugaccgaggccgagaccuacaccaacuucgugggcuacgugaccaccaccuucaagagaaagcacuucagacccaugcccgacgccugcagagccgccuacaacuggaagauggccggcgaccccagauacgaggagagccugcacaaccccuaccccgacuaccacuggcugagaaccgugaagaccaccaaggagagccuggugaucaucagccccagcguggccgaccuggaccccuacgacaagagccugcacagcagaguguuccccagcggcaagugcagcggcaucaccgugagcagcaccuacugcagcaccaaccacgacuacaccaucuggaugcccgagaaccccagacugggcaccagcugcgacaucuucaccaacagcagaggcaagagagccagcaagggcagcaagaccugcggcuucguggacgagagaggccuguacaagagccugaagggcgccugcaagcugaagcugugcggcgugcugggccugagacugauggacggcaccugggccgccauccagaccagcgacgagaccaaguggugcccccccgaccagcuggugaaccugcacgacuucagaagcgacgagaucgagcaccuggugguggaggagcuggugaagaagagagaggagugccuggacgcccuggagagcaucaugaccaccaagagcgugagcuucagaagacugagccaccugagaaagcuggugcccggcuucggcaaggccuacaccaucuucaacaagacccugauggaggccgacgcccacuacaagagcgugagaaccuggaacgagaucauccccagcaagggcugccugagagugggcggcagaugccacccccacgugaacggcguguucuucaacggcaucauccugggccccgacggccacgugcugauccccgagaugcagagcagccugcugcagcagcacauggagcugcuggagagcagcgugaucccccugaugcacccccuggccgaccccagcaccguguucaaggacgacgacgaggccgaggacuucguggaggugcaccugcccgacgugcacaagcaggugagcggcguggaccugggccugcccagcuggggcaaguacgugcugaugagcgccggcgugcugaccgugcugaugcugaugaucuucuucaugaccugcugcagaagagccaacagaguggagagcgcccagcacagccugggcgagagaggcagaaaggugagcgugaccagccagagcggcagagugaucagcagcugggagagcuacaagagcggcggcgagaccaagcuguga

SEQ ID NO: 190695 - RNA, 1575 nt, Artificial Sequence
  derived and/or modified CDS sequence (opt4) from glycoprotein__RABV__AB563891.1
augaucccccaggcccugcuguucgugccccugcugguguucagccugugcuucggcaaguuccccaucuacaccauccccgacaagcugggccccuggagccccaucgacauccaccaccugagcugccccaacaaccuggugguggaggacgagggcugcaccaaccugagcggcuucagcuacauggagcugaaggugggcuacaucagcgccaucaaggugaacggcuucaccugcaccggcguggugaccgaggccgagaccuacaccaacuucgugggcuacgugaccaccaccuucaagagaaagcacuucagacccaugcccgacgccugcagagccgccuacaacuggaagauggccggcgaccccagauacgaggagagccugcacaaccccuaccccgacuaccacuggcugagaaccgugaagaccaccaaggagagccuggugaucaucagccccagcguggccgaccuggaccccuacgacaagagccugcacagcagaguguuccccagcggcaagugcagcggcaucaccgugagcagcaccuacugcagcaccaaccacgacuacaccaucuggaugcccgagaaccccagacugggcaccagcugcgacaucuucaccaacagcagaggcaagagagccagcaagggcagcaagaccugcggcuucguggacgagagaggccuguacaagagccugaagggcgccugcaagcugaagcugugcggcgugcugggccugagacugauggacggcaccugggccgccauccagaccagcgacgagaccaaguggugcccccccgaccagcuggugaaccugcacgacuucagaagcgacgagaucgagcaccuggugguggaggagcuggugaagaagagagaggagugccuggacgcccuggagagcaucaugaccaccaagagcgugagcuucagaagacugagccaccugagaaagcuggugcccggcuucggcaaggccuacaccaucuucaacaagacccugauggaggccgacgcccacuacaagagcgugagaaccuggaacgagaucauccccagcaagggcugccugagagugggcggcagaugccacccccacgugaacggcguguucuucaacggcaucauccugggccccgacggcagagugcugauccccgagaugcagagcagccugcugcagcagcacauggagcugcuggagagcagcgugaucccccugaugcacccccuggccgaccccagcaccguguucaaggacgacgacgaggccgaggacuucguggaggugcaccugcccgacgugcacaagcaggugagcggcguggaccugggccugcccagcuggggcaaguacgugcugaugagcgccggcgugcugaccgugcugaugcugaugaucuucuucaugaccugcugcagaagagccaacagaguggagagcgcccagcacagccugggcgagagaggcagaaaggugagcgugaccagccagagcggcagagugaucagcagcugggagagcuacaagagcggcggcgagaccaagcuguga

SEQ ID NO: 190696 - RNA, 1575 nt, Artificial Sequence
  derived and/or modified CDS sequence (opt4) from glycoprotein__RABV__AB563892.1
augaucccccaggcccugcuguucgugccccugcugguguucagccugugcuucggcaaguuccccaucuacaccauccccgacaagcugggccccuggagccccaucgacauccaccaccugagcugccccaacaaccuggugguggaggacgagggcugcaccaaccugagcggcuucagcuacauggagcugaaggugggcuacaucagcgccaucaaggugaacggcuucaccugcaccggcguggugaccgaggccgagaccuacaccaacuucgugggcuacgugaccaccaccuucaagagaaagcacuucagacccacccccgacgccugcagagccgccuacaacuggaagauggccggcgaccccagauacgaggagagccugcacaaccccuaccccgacuaccacuggcugagaaccgugaagaccaccaaggagagccuggugaucaucagccccagcguggccgaccuggaccccuacgacaagagccugcacagcagaguguuccccagcggcaagugcagcggcaucaccgugagcagcaccuacugcagcaccaaccacgacuacaccaucuggaugcccgagaaccccagacugggcaccagcugcgacaucuucaccaacagcagaggcaagagagccagcaagggcagcaagaccugcggcuucguggacgagagaggccuguacaagagccugaagggcgccugcaagcugaagcugugcggcgugcugggccugagacugauggacggcaccugggccgccauccagaccagcgacgagaccaaguggugcccccccgaccagcuggugaaccugcacgacuucagaagcgacgagaucgagcaccuggugguggaggagcuggugaagaagagagaggagugccuggacgcccuggagagcaucaugaccaccaagagcgugagcuucagaagacugagccaccugagaaagcuggugcccggcuucggcaaggccuacaccaucuucaacaagacccugauggaggccgacgcccacuacaagagcgugagaaccuggaacgagaucauccccagcaagggcugccugagagugggcggcagaugccacccccacgugaacggcguguucuucaacggcaucauccugggccccgacggccacgugcugauccccgagaugcagagcagccugcugcagcagcacauggagcugcuggagagcagcgugaucccccugaugcacccccuggccgaccccagcaccguguucaaggacgacgacgaggccgaggacuucguggaggugcaccugcccgacgugcacaagcaggugagcggcguggaccugggccugcccagcuggggcaaguacgugcugaugagcgccggcgugcugaccgugcugaugcugaugaucuucuucaugaccugcugcagaagagccaacagaguggagagcgcccagcacagccugggcgagagaggcagaaaggugagcgugaccagccagagcggcagagugaucagcagcugggagagcuacaagagcggcggcgagaccaagcuguga

SEQ ID NO: 190697 - RNA, 1575 nt, Artificial Sequence; identical to SEQ ID NO: 190694
  derived and/or modified CDS sequence (opt4) from glycoprotein__RABV__AB563893.1

SEQ ID NO: 190698 - RNA, 1575 nt, Artificial Sequence; identical to SEQ ID NO: 190694
  derived and/or modified CDS sequence (opt4) from glycoprotein__RABV__AB563894.1

SEQ ID NO: 190699 - RNA, 1575 nt, Artificial Sequence
  derived and/or modified CDS sequence (opt4) from glycoprotein__RABV__AB563900.1
augaucccccaggcccugauguucgugccccugcugguguucagccugugcuucggcaaguuccccaucuacaccauccccgacaagcugggccccuggagccccaucgacauccaccaccugagcugccccaacaaccuggugguggaggacgagggcugcaccaaccugagcggcuucagcuacauggagcugaaggugggcuacaucagcgccaucaaggugaacggcuucaccugcaccggcguggugaccgaggccgagaccuacaccaacuucgugggcuacgugaccaccaccuucaagagaaagcacuucagacccaugcccgacgccugcagagccgccuacaacuggaagauggccggcgaccccagauacgaggagagccugcacaaccccuaccccgacuaccacuggcugagaaccgugaagaccaccaaggagagccuggugaucaucagccccagcguggccgaccuggaccccuacgacaagagccugcacagcagaguguuccccagcggcaagugcagcggcaugaccgugagcagcaccuacugcagcaccaaccacgacuacaccaucuggaugcccgagaaccccagacugggcaccagcugcgacaucuucaccaacagcagaggcaagagagccagcaagggcagcaagaccugcggcuucguggacgagagaggccuguacaagagccugaagggcgccugcaagcugaagcugugcggcgugcugggccugagacugauggacggcaccugggccgccauccagaccagcgacgagaccaaguggugcccccccgaccagcuggugaaccugcacgacuucagaagcgacgagaucgagcaccuggugguggaggagcuggugaagaagagagaggagugccuggacgcccuggagagcaucaugaccaccaagagcgugagcuucagaagacugagccaccugagaaagcuggugcccggcuucggcaaggccuacaccaucuucaacaagacccugauggaggccgacgcccacuacaagagcgugagaaccuggaacgagaucauccccagcaagggcugccugagagugggcggcagaugccacccccacgugaacggcguguucuucaacggcaucauccugggccccgacggccacgugcugauccccgagaugcagagcagccugcugcagcagcacauggagcugcuggagagcagcgugaucccccugaugcacccccuggccgaccccagcaccguguucaagggcgacgacgaggccgaggacuucguggaggugcaccugcccgacgugcacaagcaggugagcggcguggaccugggccugcccagcuggggcaaguacgugcugaugagcgccggcgugcugaccgcccugaugcugaugaucuuccugaugaccugcugcaagagagccaacagagccgagagcgcccaccacagccugggcgagagaggcagaaaggugagcgugaccagccagagcggcagagugaucagcagcugggagagcuacaagagcggcggcgagaccaagcuguga

SEQ ID NO: 190700 - RNA, 1575 nt, Artificial Sequence
  derived and/or modified CDS sequence (opt4) from glycoprotein__RABV__AB563901.1
augaucccccaggcccugcuguucgugccccugcugguguucagccugugcuucggcaaguuccccaucuacaccauccccgacaagcugggccccuggagccccaucgacauccaccaccugagcugccccaacaaccuggugguggaggacgagggcugcaccaaccugagcggcuucagcuacauggagcugaaggugggcuacaucagcgccaucaaggugaacggcuucaccugcaccggcguggugaccgaggccgagaccuacaccaacuucgugggcuacgugaccaccaccuucaagagaaagcacuucagacccacccccgacgccugcagagccgccuacaacuggaagauggccggcgaccccagauacgaggagagccugcacaaccccuaccccgacuaccacuggcugagaaccgugaagaccaccaaggagagccuggugaucaucagccccagcguggccgaccuggaccccuacgacaagagccugcacagcagaguguuccccagcggcaagugcagcggcaucaccgugagcagcaccuacugcagcaccaaccacgacuacaccaucuggaugcccgagaaccccagacugggcaccagcugcgacaucuucaccaacagcagaggcaagagagccagcaagggcagcaagaccugcggcuucguggacgagagaggccuguacaagagccugaagggcgccugcaagcugaagcugugcggcgugcugggccugagacugauggacggcaccugggccgccauccagaccagcgacgagaccaaguggugcccccccgaccagcuggugaaccugcacgacuucagaagcgacgagaucgagcaccuggugguggaggagcuggugaagaagagagaggagugccuggacgcccuggagagcaucaugaccaccaagagcgugagcuucagaagacugagccaccugagaaagcuggugcccggcuucggcaaggccuacaccaucuucaacaagacccugauggaggccgacgcccacuacaagagcgugagaaccuggaacgagaucauccccagcaagggcugccugagagugggcggcagaugccacccccacgugaacggcguguucuucaacggcaucauccugggccccgacggccacgugcugauccccgagaugcagagcagccugcugcagcagcacauggagcugcuggagagcagcgugaucccccugaugcacccccuggccgaccccagcaccguguucaaggacgacgacgaggccgaggacuucguggaggugcaccugcccgacgugcacaagcaggugagcggcguggaccugggccugcccagcuggggcaaguacgugcugaugagcgccggcgugcugaccgcccugaugcugaccaucuuccugaugaccugcugcagaagagccaacagagccgagagcgcccagcacagccugggcgagagaggcagaaaggugagcgugaccccccagagcggcagagugaucagcagcugggagagcuacaagagcggcggcgagaccaagcuguga

SEQ ID NO: 190701 - RNA, 1575 nt, Artificial Sequence; identical to SEQ ID NO: 190632
  derived and/or modified CDS sequence (opt4) from glycoprotein__RABV__AB563904.1

SEQ ID NO: 190702 - RNA, 1575 nt, Artificial Sequence; identical to SEQ ID NO: 190676
  derived and/or modified CDS sequence (opt4) from glycoprotein__RABV__AB563907.1

SEQ ID NO: 190703 - RNA, 1575 nt, Artificial Sequence; identical to SEQ ID NO: 190694
  derived and/or modified CDS sequence (opt4) from glycoprotein__RABV__AB563911.1

SEQ ID NO: 190704 - RNA, 1575 nt, Artificial Sequence
  derived and/or modified CDS sequence (opt4) from glycoprotein__RABV__AB563912.1
augaucccccaggcccugcuguucgugccccugcugguguucagccugugcuucggcaaguuccccaucuacaccauccccgacaagcugggccccuggagccccaucgacauccaccaccugagcugccccaacaaccuggugguggaggacgagggcugcaccaaccugagcggcuucagcuacauggagcugaaggugggcuacaucagcgccaucaaggugaacggcuucaccugcaccggcguggugaccgaggccgagaccuacaccaacuucgugggcuacgugaccaccaccuucaagagaaagcacuucagacccaugcccgacgccugcagagccgccuacaacuggaagauggccggcgaccccagauacgaggagagccugcacaaccccuaccccgacuaccacuggcugagaaccgugaagaccaccaaggagagccuggugaucaucagccccagcguggccgaccuggaccccuacgacaagagccugcacagcagaguguuccccagcggcaagugcagcggcaucaccgugagcagcaccuacugcagcaccaaccacgacuacaccaucuggaugcccgagaaccccagacugggcaccagcugcgacaucuucaccaacagcagaggcaagagagccagcaagggcagcaagaccugcggcuucguggacgagagaggccuguacaagagccugaagggcgccugcaagcugaagcugugcggcgugcugggccugagacugauggacggcaccugggccgccauccagaccagcgacgagaccaaguggugcccccccgaccagcuggugaaccugcacgacuucagaagcgacgagaucgagcaccuggugguggaggagcuggugaagaagagagaggagugccuggacgcccuggagagcaucaugaccaccaagagcgugagcuucagaagacugagccaccugagaaagcuggugcccggcuucggcaaggccuacaccaucuucaacaagacccugauggaggccgacgcccacuacaagagcgugagaaccuggaacgagaucauccccagcaagggcugccugagagugggcggcagaugccacccccacgugaacggcguguucuucaacggcaucauccugggccccgacggccacgugcugauccccgagaugcagagcagccugcugcagcagcacauggagcugcuggagagcagcgugaucccccugaugcacccccuggccgaccccagcaccguguucaaggacgacgacgaggccgaggacuucguggaggugcaccugcccgacgugcacaagcaggugagcggcguggaccugggccugcccagcuggggcaaguacgugcugaugagcaccggcgugcugaccgugcugaugcugaugaucuucuucaugaugugcugcagaagagccaacagaguggagagcgcccagcacagccugggcgagagaggcagaaaggugagcgugaccagccagagcggcagagugaucagcagcugggagagcuacaagagcggcggcgagaccaagcuguga

SEQ ID NO: 190705 - RNA, 1575 nt, Artificial Sequence; identical to SEQ ID NO: 190694
  derived and/or modified CDS sequence (opt4) from glycoprotein__RABV__AB563913.1

SEQ ID NO: 190706 - RNA, 1575 nt, Artificial Sequence
  derived and/or modified CDS sequence (opt4) from glycoprotein__RABV__AB563914.1
augaucccccaggcccugcuguucgugccccugcugguguucagccugugcuucggcaaguuccccaucuacaccauccccgacaagcugggccccuggagccccaucgacauccaccaccugagcugccccaacaaccuggugguggaggacgagggcugcaccaaccugagcggcuucagcuacauggagcugaaggugggcuacaucagcgccaucaaggugaacggcuucaccugcaccggcguggugaccgaggccgagaccuacaccaacuucgugggcuacgugaccaccaccuucaagagaaagcacuucagacccaugcccgacgccugcagagccgccuacaacuggaagauggccggcgaccccagauacgaggagagccugcacaaccccuaccccgacuaccacuggcugagaaccgugaagaccaccaaggagagccuggugaucaucagccccagcguggccgaccuggaccccuacgacaagagccugcacagcagaguguuccccagcggcaagugcagcggcaucaccgugagcagcaccuacugcagcaccaaccacgacuacaccaucuggaugcccgagaaccccagacugggcaccagcugcgacaucuucaccaacagcagaggcaagagagccagcaagggcagcaagaccugcggcuucguggacgagagaggccuguacaagagccugaagggcgccugcaagcugaagcugugcggcgugcugggccugagacugauggacggcaccugggccgccauccagaccagcgacgagaccaaguggugcccccccgaccagcuggugaaccugcacgacuucagaagcgacgagaucgagcaccuggugguggaggagcuggugaagaagagagaggagugccuggacgcccuggagagcaucaugaccaccaagagcgugagcuucagaagacugagccaccugagaaagcuggugcccggcuucggcaaggccuacaccaucuucaacaagacccugauggaggccgacgcccacuacaagagcgugagaaccuggaacgagaucauccccagcaagggcugccugagagugggcggcagaugccacccccacgugaacggcguguucuucaacggcaucauccugggccccgacggccacgugcugauccccgagaugcagagcuaccugcugcagcagcacauggagcugcuggagagcagcgugaucccccugaugcacccccuggccgaccccagcaccguguucaaggacgacgacgaggccgaggacuucguggaggugcaccugcccgacgugcacaagcaggugagcggcguggaccugggccugcccagcuggggcaaguacgugcugaugagcgccggcgugcugaccgugcugaugcugaugaucuucuucaugaccugcugcagaagagccaacagaguggagagcgcccagcacagccugggcgagagaggcagaaaggugagcgugaccagccagagcggcagagugaucagcagcugggagagcuacaagagcggcggcgagaccagacuguga

SEQ ID NO: 190707 - RNA, 1575 nt, Artificial Sequence; identical to SEQ ID NO: 190694
  derived and/or modified CDS sequence (opt4) from glycoprotein__RABV__AB563915.1

SEQ ID NO: 190708 - RNA, 1575 nt, Artificial Sequence; identical to SEQ ID NO: 190661
  derived and/or modified CDS sequence (opt4) from glycoprotein__RABV__AB563921.1

SEQ ID NO: 190709 - RNA, 1575 nt, Artificial Sequence
  derived and/or modified CDS sequence (opt4) from glycoprotein__RABV__AB563922.1
augaacccccaggcccugauguucgugccccugcugguguucagccugugcuucggcaaguuccccaucuacaccauccccgacaagcugggccccuggagccccaucgacauccaccaccugagcugccccaacaaccuggugguggaggacgagggcugcaccaaccugagcggcuucagcuacauggagcugaaggugggcuacaucagcgccaucaaggugaacggcuucaccugcaccggcguggugaccgaggccgagaccuacaccaacuucgugggcuacgugaccaccaccuucaagagaaagcacuucagacccacccccgacgccugcagagccagcuacaacuggaagauggccggcgaccccagauacgaggagagccugcacaaccccuaccccgacuaccacuggcugagaaccgugaagaccaccaaggagagccuggugaucaucagccccagcguggccgaccuggaccccuacgacaagagccugcacagcagaguguuccccagcggcaagugcagcggcaucaccgugagcagcaccuacugcagcaccaaccacgacuacaccaucuggaugcccgagaaccccagacugggcaccagcugcgacaucuucaccaacagcagaggcaagagagccagcaagggcagcaagaccugcggcuucguggacgagagaggccuguacaagagccugaagggcgccugcaagcugaagcugugcggcgugcugggccugagacugauggacggcaccugggccgccauccagaccagcgacgagaccaaguggugcccccccgaccagcuggugaaccugcacgacuucagaagcgacgagaucgagcaccuggugguggaggagcuggugaagaagagagaggagugccuggacgcccuggagagcaucaugaccaccaagagcgugagcuucagaagacugagccaccugagaaagcuggugcccggcuucggcaaggccuacaccaucuucaacaagacccugauggaggccgacgcccacuacaagagcgugagaaccuggaacgagaucauccccagcaagggcugccugagagugggcggcagaugccacccccacgugaacggcguguucuucaacggcaucauccugggccccgacggccacgugcugauccccgagaugcagagcagccugcugcagcagcacauggagcugcuggagagcagcgugaucccccugaugcacccccuggccgaccccagcaccguguucaaggacgacgacgaggccgaggacuucguggaggugcaccugcccgacgugcacaagcaggugagcggcguggaccugggccugcccagcuggggcaaguacgugcugaugagcgccggcgugcugaccgcccugaugcugaugaucuuccugaugaccugcugcagaagagccaacagagccgagagcgcccagcacagccugggcgagagaggcagaaaggugagcgugaccagccagagcggcagagugaucagcagcugggagagcuacaagagcggcggcgagaccaagcuguga

SEQ ID NO: 190710 - RNA, 1575 nt, Artificial Sequence
  derived and/or modified CDS sequence (opt4) from glycoprotein__RABV__AB563923.1
augaucccccaggcccugauguucgugccccugcugguguucagccugugcuucggcaaguuccccaucuacaccauccccgacaagcugggccccuggagccccaucgacauccaccaccugagcugccccaacaaccuggugguggaggacgagggcugcaccaaccugagcggcuucagcuacauggagcugaaggugggcuacaucagcgccaucaaggugaacggcuucaccugcaccggcguggugaccgaggccgagaccuacaccaacuucgugggcuacgugaccaccaccuucaagagaaagcacuucagacccacccccgacgccugcagagccgccuacaacuggaagauggccggcgaccccagauacgaggagagccugcacaaccccuaccccgacuaccacuggcugagaaccgugaagaccaccaaggagagccuggugaucaucagccccagcguggccgaccuggaccccuacgacaagagccugcacagcagaguguuccccagcggcaagugcagcggcaucaccgugagcagcaccuacugcagcaccaaccacgacuacaccaucuggaugcccgagaaccccagacugggcaccagcugcgacaucuucaccaacagcagaggcaagagagccagcaagggcagcaagaccugcggcuucguggacgagagaggccuguacaagagccugaagggcgccugcaagcugaagcugugcggcgugcugggccugagacugauggacggcaccugggccgccauccagaccagcgacgagaccaaguggugcccccccgaccagcuggugaaccugcacgacuucagaagcgacgagaucgagcaccuggugguggaggagcuggugagaaagagagaggagugccuggacgcccuggagagcaucaugaccaccaagagcgugagcuucagaagacugagccaccugagaaagcuggugcccggcuucggcaaggccuacaccaucuucaacaagacccugauggaggccgacgcccacuacaagagcgugagaaccuggaacgagaucauccccagcaagggcugccugagagugggcggcagaugccacccccacgugaacggcguguucuucaacggcaucauccugggccccgacggccacgugcugauccccgagaugcagagcagccugcugcagcagcacauggagcugcuggagagcagcgugaucccccugaugcacccccuggccgaccccagcaccguguucaaggacgacgacgaggccgaggacuucguggaggugcaccugcccgacgugcacaagcaggugagcggcguggaccugggccugcccagcuggggcaaguacgugcugaugagcgccggcgugcugaccgcccugaugcugaugaucuuccugaugaccugcugcagaagagccaacagagccgagagcgcccagcacagccugggcgagagaggcagaaaggugagcgugaccagccagagcggcagagugaucagcagcugggagagcuacaagagcggcggcgagaccaagcuguga

SEQ ID NO: 190711 - RNA, 1575 nt, Artificial Sequence
  derived and/or modified CDS sequence (opt4) from glycoprotein__RABV__AB563926.1
augaucccccaggcccugcuguucgugccccugcugguguucagccugugcuucggcaaguuccccaucuacaccauccccgacaagcugggccccuggagccccaucgacauccaccaccugagcugccccaacaaccuggugguggaggacgagggcugcaccaaccugagcggcuucagcuacauggagcugaaggugggcuacaucagcgccaucaaggugaacggcuucaccugcaccggcguggugaccgaggccgagaccuacaccaacuucgugggcuacgugaccaccaccuucaagagaaagcacuucagacccacccccgacgccugcagagccgccuacaacuggaagauggccggcgaccccagauacgaggagagccugcacaaccccuaccccgacuaccacuggcugagaaccgugaagaccaccaaggagagccuggugaucaucagccccagcguggccgaccuggaccccuacgacaagagccugcacagcagaguguuccccagcggcaagugcagcggcaucaccgugagcagcaccuacugcagcaccaaccacgacuacaccaucuggaugcccgagaaccccagacugggcaccagcugcgacaucuucaccaacagcagaggcaagagagccagcaagggcagcaagaccugcggcuucguggacgagagaggccuguacaagagccugaagggcgccugcaagcugaagcugugcggcgugcugggccugagacugauggacggcaccugggccgccauccagaccagcgacgagaccaaguggugcccccccgaccagcuggugaaccugcacgacuucagaagcgacgagaucgagcaccuggugguggaggagcuggugaagaagagagaggagugccuggacgcccuggagagcaucaugaccaccaagagcgugagcuucagaagacugagccaccugagaaagcuggugcccggcuucggcaaggccuacaccaucuucaacaagacccugauggaggccgacgcccacuacaagagcgugagaaccuggaacgagaucauccccagcaagggcugccugagagugggcggcagaugccacccccacgugaacggcguguucuucaacggcaucauccugggccccgacggccacgugcugauccccgagaugcagagcagccugcugcagcagcacauggagcugcuggagagcagcgugaucccccugaugcacccccuggccgaccccagcaccguguucaaggacgacgacgaggccgaggacuucguggaggugcaccugcccgacgugcacaagcaggugagcggcguggaccugggccugcccagcuggggcaaguacgugcugaugagcgccggcgugcugaccgcccugaugcugaugaucuuccugaugaccugcugcagaagagccaacagagccgagagcgcccagcacagccugggcgagggcgagagaaaggugagcgugaccagccagagcggcagagugaucagcagcugggagagcuacaagagcggcggcgagaccaagcuguga

SEQ ID NO: 190712 - RNA, 1575 nt, Artificial Sequence; identical to SEQ ID NO: 190662
  derived and/or modified CDS sequence (opt4) from glycoprotein__RABV__AB563927.1

SEQ ID NO: 190713 - RNA, 1575 nt, Artificial Sequence; identical to SEQ ID NO: 190658
  derived and/or modified CDS sequence (opt4) from glycoprotein__RABV__AB563928.1

SEQ ID NO: 190714 - RNA, 1575 nt, Artificial Sequence
  derived and/or modified CDS sequence (opt4) from glycoprotein__RABV__AB563929.1
augaucccccaggcccugcuguucgugccccugcugguguucagccugugcuucggcaaguuccccaucuacaccauccccgacaagcugggccccuggagccccaucgacauccaccaccugagcugccccaacaaccuggugguggaggacgagggcugcaccaaccugagcggcuucagcuacauggagcugaaggugggcuacaucagcgccaucaaggugaacggcuucaccugcaccggcguggugaccgaggccgagaccuacaccaacuucgugggcuacgugaccaccaccuucaagagaaagcacuucagacccacccccgacgccugcagagccgccuacaacuggaagauggccggcgaccccagauacgaggagagccugcacaaccccuaccccgacuaccacuggcugagaaccgugaagaccaccaaggagagccuggugaucaucagccccagcguggccgaccuggaccccuacgacaagagccugcacagcagaguguuccccagcggcaagugcagcggcaucaccgugagcagcaccuacugcagcaccaaccacgacuacaccaucuggaugcccgagaaccccagacugggcaccagcugcgacaucuucaccaacagcagaggcaagagagccagcaagggcagcaagaccugcggcuucguggacgagagaggccuguacaagagccugaagggcgccugcaagcugaagcugugcggcgugcugggccugagacugaucgacggcaccugggccgccauccagaccagcgacgagaccaaguggugcccccccgaccagcuggugaaccugcacgacuucagaagcgacgagaucgagcaccuggugguggaggagcuggugaagaagagagaggagugccuggacgcccuggagagcaucaugaccaccaagagcgugagcuucagaagacugagccaccugagaaagcuggugcccggcuucggcaaggccuacaccaucuucaacaagacccugauggaggccgacgcccacuacaagagcgugagaaccuggaacgagaucauccccagcaagggcugccugagagugggcggcagaugccacccccacgugaacggcguguucuucaacggcaucauccugggccccgacggccacgugcugauccccgagaugcagagcagccugcugcagcagcacauggagcugcuggagagcagcgugaucccccugaugcacccccuggccgaccccagcaccguguucaaggacgacgacgaggccgaggacuucguggaggugcaccugcccgacgugcacaagcaggugagcggcguggaccugggccugcccagcuggggcaaguacgugcugaugagcgccggcgugcugaccgcccugaugcugaugaucuuccugaccaccugcugcagaagagccaacagagccgagagcgcccagcacagccugggcgagagaggcagaaaggugagcgugaccagccagagcggcagagugaucagcagcugggagagcuacaagagcggcggcgagaccaagcuguga

SEQ ID NO: 190715 - RNA, 1575 nt, Artificial Sequence; identical to SEQ ID NO: 190664
  derived and/or modified CDS sequence (opt4) from glycoprotein__RABV__AB563930.1

SEQ ID NO: 190716 - RNA, 1575 nt, Artificial Sequence; identical to SEQ ID NO: 190658
  derived and/or modified CDS sequence (opt4) from glycoprotein__RABV__AB563931.1

SEQ ID NO: 190717 - RNA, 1575 nt, Artificial Sequence; identical to SEQ ID NO: 190693
  derived and/or modified CDS sequence (opt4) from glycoprotein__RABV__AB563933.2

SEQ ID NO: 190718 - RNA, 1575 nt, Artificial Sequence; identical to SEQ ID NO: 190632
  derived and/or modified CDS sequence (opt4) from glycoprotein__RABV__AB563934.1

SEQ ID NO: 190719 - RNA, 1575 nt, Artificial Sequence; identical to SEQ ID NO: 190664
  derived and/or modified CDS sequence (opt4) from glycoprotein__RABV__AB563937.1

SEQ ID NO: 190720 - RNA, 1575 nt, Artificial Sequence
  derived and/or modified CDS sequence (opt4) from glycoprotein__RABV__AB563938.1
augaucccccaggcccugcuguucgugccccugcugguguucagccugugcuucggcaaguuccccaucuacaccauccccgacaagcugggccccuggagccccaucgacauccaccaccugagcugccccaacaaccuggugguggaggacgagggcugcaccaaccugagcggcuucagcuacauggagcugaaggugggcuacaucagcgccaucaaggugaacggcuucaccugcaccggcguggugaccgaggccgagaccuacaccaacuucgugggcuacgugaccaccaccuucaagagaaagcacuucagacccacccccgacgccugcagagccgccuacaacuggaagauggccggcgaccccagauacgaggagagccugcacaaccccuaccccgacuaccacuggcugagaaccgugaagaccaccaaggagagccuggugaucaucagccccagcguggccgaccuggaccccuacgacaagagccugcacagcagaguguuccccagcggcaagugcagcggcaucaccgugagcagcaccuacugcagcaccaaccacgacuacaccaucuggaugcccgagaaccccagacugggcaccagcugcgacaucuucaccaacagcagaggcaagagagccagcaagggcagcaagaccugcggcuucguggacgagagaggccuguacaagagccugaagggcgccugcaagcugaagcugugcggcgugcugggccugagacugauggacggcaccugggccgccauccagaccagcgacgagaccaaguggugcccccccgaccagcuggugaaccugcacgacuucagaagcgacgagaucgagcaccuggugguggaggagcuggugaagaagagagaggagugccuggacgcccuggagagcaucaugaccaccaagagcgugagcuucagaagacugagccaccugagaaagcuggugcccggcuucggcaaggccuacaccaucuucaacaagacccugauggaggccgacgcccacuacaagagcgugagaaccuggaacgagaucauccccagcaagggcugccugagagugggcggcagaugccacccccacgugaacggcguguucuucaacggcaucauccugggccccgacggccacgugcugauccccgagaugcagagcagccugcugcagcagcacauggagcugcuggagagcagcgugaucccccugaugcacccccuggccgaccccagcaccguguucaaggacgacgacgaggccgaggacuucguggaggugcaccugcccgacgugcacaagcaggugagcggcguggaccugggccugcccagcuggggcaaguacgugcugaugagcgccggcgugcugaccgcccugaugcugaugaucuuccugaugaccugcugcaucagagccaacagagccgagagcgcccagcacagccugggcgagagaggcagaaaggugagcgugaccagccagagcggcagagugaucagcagcugggagagcuacaagagcggcggcgagaccaagcuguga

SEQ ID NO: 190721 - RNA, 1575 nt, Artificial Sequence; identical to SEQ ID NO: 190664
  derived and/or modified CDS sequence (opt4) from glycoprotein__RABV__AB563939.1

SEQ ID NO: 190722 - RNA, 1575 nt, Artificial Sequence
  derived and/or modified CDS sequence (opt4) from glycoprotein__RABV__AB563942.1
augaucccccaggcccugcuguucgugccccugcugguguucagccugugcuucggcaaguuccccaucuacaccauccccgacaagcugggccccuggagccccaucgacauccaccaccugagcugccccaacaaccuggugguggaggacgagggcugcaccaaccugagcggcuucagcuacauggagcugaaggugggcuacaucagcgccaucaaggugaacggcuucaccugcaccggcguggugaccgaggccgagaccuacaccaacuucgugggcuacgugaccaccaccuucaagagaaagcacuucagacccacccccgacgccugcagagccgccuacaacuggaagauggccggcgaccccagauacgaggagagccugcacaaccccuaccccgacuaccacuggcugagaaccgugaagaccaccaaggagagccuggugaucaucagccccagcguggccgaccuggaccccuacgacaagagccugcacagcagaguguuccccagcggcaagugcagcggcaucaccgugagcagcaccuacugcagcaccaaccacgacuacaccaucuggaugcccgagaaccccagacugggcaccagcugcgacaucuucaccaacagcagaggcaagagagccagcaagggcagcaagaccugcggcuucguggacgagagaggccuguacaagagccugaagggcgccugcaagcugaagcugugcggcgugcugggccugagacugauggacggcaccugggccgccauccagaccagcgacgagaccaaguggugcccccccgaccagcuggugaaccugcacgacuucagaagcgacgagaucgagcaccuggugguggaggagcuggugaagaagagagaggagugccuggacgcccuggagagcaucaugaccaccaagagcgugagcuucagaagacugagccaccugagaaagcuggugcccggcuucggcaaggccuacaccaucuucaacaagacccugauggaggccgacgcccacuacaagagcgugagaaccuggaacgagaucauccccagcaagggcugccugagagugggcggcagaugccacccccacgugaacggcguguucuucaacggcaucauccugggccccgacggccacgugcugauccccgagaugcagagcagccugcugcagcagcacauggagcugcuggagagcagcaucaucccccugaugcacccccuggccgaccccagcaccguguucaaggacgacgacgaggccgaggacuucguggaggugcaccugcccgacgugcacaagcaggugagcggcguggaccugggccugcccagcuggggcaaguacgugcugaugagcgccggcgugcugaccgcccugaugcugaugaucuuccugaugaccugcugcagaagaaccaacagagccgagagcgcccagcacagccugggcgagagaggcagaaaggugagcgugaccagccagagcggcagagugaucagcagcugggagagcuacaagagcggcggcgagaccaagcuguga

SEQ ID NO: 190723 - RNA, 1575 nt, Artificial Sequence
  derived and/or modified CDS sequence (opt4) from glycoprotein__RABV__AB563945.1
augaucccccaggcccugcuguucgugccccugcugguguucagccugugcuucggcaaguuccccaucuacaccauccccgacaagcugggccccuggagccccaucgacauccaccaccugagcugccccaacaaccuggugguggaggacgagggcugcaccaaccugagcggcuucagcuacauggagcugaaggugggcuacaucagcgccaucaaggugaacggcuucaccugcaccggcguggugaccgaggccgagaccuacaccaacuucgugggcuacgugaccaccaccuucaagagaaagcacuucagacccacccccgacgccugcagagccgccuacaacuggaagauggccggcgaccccagauacgaggagagccugcacaaccccuaccccgacuaccacuggcugagaaccgugaagaccaccaaggagagccuggugaucaucagccccagcguggccgaccuggaccccuacgacaagagccugcacagcagaguguuccccagcggcaagugcagcggcaucaccgugagcagcaccuacugcagcaccaaccacgacuacaccaucuggaugcccgagaaccccagacugggcaccagcugcgacaucuucaccaacagcagaggcaagagagccagcaagggcagcaagaccugcggcuucguggacgagagaggccuguacaagagccugaagggcgccugcaagcugaagcugugcggcgugcugggccugagacugauggacggcaccugggccgccauccagaccagcgacgagaccaaguggugcccccccgaccagcuggugaaccugcacgacuucagaagcgacgagaucgagcaccuggugguggaggagcuggugaagaagagagaggagugccuggacgcccuggagagcaucaugaccaccaagagcgugagcuucagaagacugagccaccugagaaagcuggugcccggcuucggcaaggccuacaccaucuucaacaagacccugauggaggccgacgcccacuacaagagcgugagaaccuggaacgagaucauccccagcaagggcugccugagagugggcggcagaugccacccccacgugaacggcguguucuucaacggcaucauccugggccccgacggccacgugcugauccccgagaugcagagcagccugcugcagcagcacauggagcugcuggagagcagcgugaucccccugaugcacccccuggccgaccccagcaccguguucaaggacgacgacgaggccgaggacuucguggaggugcaccugcccgacgugcacaagcaggugagcggcguggaccugggccugcccagcuggggcaaguacgugcugaugagcgccggcgugcugaccgcccugaugcugaugaucuuccugaugaccugcugcagaggcaccaacagagccgagagcgcccagcacagccugggcgagagaggcagaaaggugagcgugaccagccagaacggcagagugaucagcagcugggagagcuacaagagcggcggcgagaccaagcuguga

SEQ ID NO: 190724 - RNA, 1575 nt, Artificial Sequence
  derived and/or modified CDS sequence (opt4) from glycoprotein__RABV__AB563946.2
augaucccccaggcccugcuguucgugccccugcugaucagcagccugugcuucggcaaguuccccaucuacaccauccccgacaagcugggccccuggagccccaucgacauccaccaccugagcugccccaacaaccuggugguggaggacgagggcugcaccaaccugagcggcuucagcuacauggagcugaaggugggcuacaucagcgccaucaaggugaacggcuucaccugcaccggcguggugaccgaggccgagaccuacaccaacuucgugggcuacgugaccaccaccuucaagagaaagcacuucagacccacccccgacgccugcagagccgccuacaacuggaagauggccggcgaccccagauacgaggagagccugcacaaccccuaccccgacuaccacuggcugagaaccgugaagaccaccaaggagagccuggugaucaucagccccagcguggccgaccuggaccccuacgacaagagccugcacagcagaguguuccccagcggcaagugcagcggcaucaccgugagcagcaccuacugcagcaccaaccacgacuacaccaucuggaugcccgagaaccccagacugggcaccagcugcgacaucuucaccaacagcagaggcaagagagccagcaagggcagcaagaccugcggcuucguggacgagagaggccuguacaagagccugaagggcgccugcaagcugaagcugugcggcgugcugggccugagacugauggacggcaccugggccgccauccagaccagcgacgagaccaaguggugcccccccgaccagcuggugaaccugcacgacuucagaagcgacgagaucgagcaccuggugguggaggagcuggugaagaagagagaggagugccuggacgcccuggagagcaucaugaccaccaagagcgugagcuucagaagacugagccaccugagaaagcuggugcccggcuucggcaaggccuacaccaucuucaacaagacccugauggaggccgacgcccacuacaagagcgugagaaccuggaacgagaucauccccagcaagggcugccugagagugggcggcagaugccacccccacgugaacggcguguucuucaacggcaucauccugggccccgacggccacgugcugauccccgagaugcagagcagccugcugcagcagcacauggagcugcuggagagcagcgugaucccccugaugcacccccuggccgaccccagcaccguguucaaggacgacgacgaggccgaggacuucguggaggugcaccugcccgacgugcacaagcaggugagcggcguggaccugggccugcccagcuggggcaaguacgugcugaugagcgccggcgugcugaccgcccugaugcugaugaucuuccugaugaccugcugcagaagagccaacagagccgagagcgcccagcacagccugggcgagagaggcagaaaggugagcgugaccagccagagcggcagagugaucagcagcugggagagcuacaagagcggcggcgagaccaagcuguga

SEQ ID NO: 190725 - RNA, 1575 nt, Artificial Sequence; identical to SEQ ID NO: 190699
  derived and/or modified CDS sequence (opt4) from glycoprotein__RABV__AB563947.1

SEQ ID NO: 190726 - RNA, 1575 nt, Artificial Sequence
  derived and/or modified CDS sequence (opt4) from glycoprotein__RABV__AB563948.1
augaucccccaggcccugauguucgugccccugcugguguucagccugugcuucggcaaguuccccaucuacaccauccccgacaagcugggccccuggagccccaucgacauccaccaccugagcugccccaacaaccuggugguggaggacgagggcugcaccaaccugagcggcuucagcuacauggagcugaaggugggcuacaucagcgccaucaaggugaacggcuucaccugcaccggcguggugaccgaggccgagaccuacaccaacuucgugggcuacgugaccaccaccuucaagagaaagcacuucagacccaugcccgacgccugcagagccgccuacaacuggaagauggccggcgaccccagauacgaggagagccugcacaaccccuaccccgacuaccacuggcugagaaccgugaagaccaccaaggagagccuggugaucaucagccccagcguggccgaccuggaccccuacgacaagagccugcacagcagaguguuccccggcggcaagugcagcggcaugaccgugagcagcaccuacugcagcaccaaccacgacuacaccaucuggaugcccgagaaccccagacugggcaccagcugcgacaucuucaccaacagcagaggcaagagagccagcaagggcagcaagaccugcggcuucguggacgagagaggccuguacaagagccugaagggcgccugcaagcugaagcugugcggcgugcugggccugagacugauggacggcaccugggccgccauccagaccagcgacgagaccaaguggugcccccccgaccagcuggugaaccugcacgacuucagaagcgacgagaucgagcaccuggugguggaggagcuggugaagaagagagaggagugccuggacgcccuggagagcaucaugaccaccaagagcgugagcuucagaagacugagccaccugagaaagcuggugcccggcuucggcaaggccuacaccaucuucaacaagacccugauggaggccgacgcccacuacaagagcgugagaaccuggaacgagaucauccccagcaagggcugccugagagugggcggcagaugccacccccacgugaacggcguguucuucaacggcaucauccugggccccgacggccacgugcugauccccgagaugcagagcagccugcugcagcagcacauggagcugcuggagagcagcgugaucccccugaugcacccccuggccgaccccagcaccguguucaagggcgacgacgaggccgaggacuucguggaggugcaccugcccgacgugcacaagcaggugagcggcguggaccugggccugcccagcuggggcaaguacgugcugaugagcgccggcgugcugaccgcccugaugcugaugaucuuccugaugaccugcugcaagagagccaacagagccgagagcgcccaccacagccugggcgagagaggcagaaaggugagcgugaccagccagagcggcagagugaucagcagcugggagagcuacaagagcggcggcgagaccaagcuguga

SEQ ID NO: 190727 - RNA, 1575 nt, Artificial Sequence
  derived and/or modified CDS sequence (opt4) from glycoprotein__RABV__AB563949.1
augaucccccaggcccugauguucgugccccugcugguguucagccugugcuucggcaaguuccccaucuacaccauccccgacaagcugggccccuggagccccaucgacauccaccaccugagcugccccaacaaccuggugguggaggacgagggcugcaccaaccugagcggcuucagcuacauggagcugaaggugggcuacaucagcgccaucaaggugaacggcuucaccugcaccggcguggugaccgaggccgagaccuacaccaacuucgugggcuacgugaccaccaccuucaagagaaagcacuucagacccaugcccgacgccugcagagccgccuacaacuggaagauggccggcgaccccagauacgaggagagccugcacaaccccuaccccgacuaccacuggcugagaaccgugaagaccaccaaggagagccuggugaucaucagccccagcguggccgaccuggaccccuacgacaagagccugcacagcagaguguuccccagcggcaagugcagcggcaugaccgugagcagcaccuacugcagcaccaaccacgacuacaccaucuggaugcccgagaaccccagacugggcaccagcugcgacaucuucaccaacagcagaggcaagagagccagcaagggcagcaagaccugcggcuucguggacgagagaggccuguacaagagccugaagggcgccugcaagcugaagcugugcggcgugcugggccugagacugauggacggcaccugggccgccauccagaccagcgacgagaccaaguggugcccccccgaccagcuggugaaccugcacgacuucagaagcgacgagaucgagcaccuggugguggaggagcuggugaagaagagagaggagugccuggacgcccuggagagcaucaugaccaccaagagcgugagcuucagaagacugagccaccugagaaagcuggugcccggcuucggcaaggccuacaccaucuucaacaagacccugauggaggccgacgcccacuacaagagcgugagaaccuggaacgagaucauccccagcaagggcugccugagagugggcggcagaugccacccccacgugaacggcguguucuucaacggcaucauccugggccccgacggccacgugcugauccccgagaugcagagcagccugcugcagcagcacauggagcugcuggagagcagcgugaucccccugaugcacccccuggccgaccccagcaccguguucaagggcgacgacgaggccgaggacuucguggaggugcaccugcccgacgugcacaagcaggugagcggcguggaccugggccugcccagcuggggcaaguacgugcugaugagcgccggcgugcugaccgcccugaugcugaugaucuuccugaugaccugcugcaagagagccaacagagccgagagcgcccaccacaaccugggcgagagaggcagaaaggugagcgugaccagccagagcggcagagugaucagcagcugggagagcuacaagagcggcggcgagaccaagcuguga

SEQ ID NO: 190728 - RNA, 1575 nt, Artificial Sequence
  derived and/or modified CDS sequence (opt4) from glycoprotein__RABV__AB563950.1
augaucccccaggcccugauguucgugccccugcugguguucagccugugcuucggcaaguuccccaucuacaccauccccgacaagcugggccccuggagccccaucgacauccaccaccugagcugccccaacaaccuggugguggaggacgagggcugcaccaaccugagcggcuucagcuacauggagcugaaggugggcuacaucagcgccaucaaggugaacggcuucaccugcaccggcguggugaccgaggccgagaccuacaccaacuucgugggcuacgugaccaccaccuucaagagaaagcacuucagacccaugcccgacgccugcagagccgccuacaacuggaagauggccggcgaccccagauacgaggagagccugcacaaccccuaccccgacuaccacuggcugagaaccgugaagaccaccaaggagagccuggugaucaucagccccagcguggccgaccuggaccccuacgacaagagccugcacagcagaguguuccccagcggcaagugcagcggcaucaccgugagcagcaccuacugcagcaccaaccacgacuacaccaucuggaugcccgagaaccccagacugggcaccagcugcgacaucuucaccaacagcagaggcaagagagccagcaagggcagcaagaccugcggcuucguggacgagagaggccuguacaagagccugaagggcgccugcaagcugaagcugugcggcgugcugggccugagacugauggacggcaccugggccgccauccagaccagcgacgagaccaaguggugcccccccgaccagcuggugaaccugcacgacuucagaagcgacgagaucgagcaccuggugguggaggagcuggugaagaagagagaggagugccuggacgcccuggagagcaucaugaccaccaagagcgugagcuucagaagacugagccaccugagaaagcuggugcccggcuucggcaaggccuacaccaucuucaacaagacccugauggaggccgacgcccacuacaagagcgugagaaccuggaacgagaucauccccagcaagggcugccugagagugggcggcagaugccacccccacgugaacggcguguucuucaacggcaucauccugggccccgacggccacgugcugauccccgagaugcagagcagccugcugcagcagcacauggagcugcuggagagcagcgugaucccccugaugcacccccuggccgaccccagcaccguguucaagggcgacgacgaggccgaggacuucguggaggugcaccugcccgacgugcacaagcaggugagcggcguggaccugggccugcccagcuggggcaaguacgugcugaugagcgccggcgugcugaccgcccugaugcugaugaucuuccugaugaccugcugcaagagagccaacagagccgagagcgcccaccacagccugggcgagagaggcagaaaggugagcgugaccagccagagcggcagagugaucagcagcugggagagcuacaagagcggcggcgagaccaagcuguga

SEQ ID NO: 190729 - RNA, 1575 nt, Artificial Sequence
  derived and/or modified CDS sequence (opt4) from glycoprotein__RABV__AB563951.1
augaucccccaggcccugcuguucgugccccugcugguguucagccugugcuucggcaaguuccccaucuacaccauccccgacaagcugggccccuggagccccaucgacauccaccaccugagcugccccaacaaccuggugguggaggacgagggcugcaccaaccugagcggcuucagcuacauggagcugaaggugggcuacaucagcgccaucaaggugaacggcuucaccugcaccggcguggugaccgaggccgagaccuacaccaacuucgugggcuacgugaccaccaccuucaagagaaagcacuucagacccacccccgacgccugcagagccgccuacaacuggaagauggccggcgaccccagauacgaggagagccugcacaaccccuaccccgacuaccacuggcugagaaccgugaagaccaccaaggagagccuggugaucaucagccccagcguggccgaccuggaccccuacgacaagagccugcacagcagaguguuccccagcggcaagugcagcggcaucaccgugagcagcaccuacugcagcaccaaccacgacuacaccaucuggaugcccgagaaccccagacugggcaccagcugcgacaucuucaccaacagcagaggcaagagagccagcaagggcagcaagaccugcggcuucguggacgagagaggccuguacaagagccugaagggcgccugcaagcugaagcugugcggcgugcugggccugagacugauggacggcaccugggccgccauccagaccagcgacgagaccaaguggugcccccccgaccagcuggugaaccugcacgacuucagaagcgacgagaucgagcaccuggugguggaggagcuggugaagaagagagaggagugccuggacgcccuggagagcaucaugaccaccaagagcgugagcuucagaagacugagccaccugagaaagcuggugcccggcuucggcaaggccuacaccaucuucaacaagacccugauggaggccgacgcccacuacaagagcgugagaaccuggaacgagaucauccccaccaagggcugccugagagugggcggcagaugccacccccacgugaacggcguguucuucaacggcaucauccugggccccgacggccacgugcugauccccgagaugcagagcagccugcugcagcagcacauggagcugcuggagagcagcgugaucccccugaugcacccccuggccgaccccagcaccguguucaaggacgacgacgaggccgaggacuucguggaggugcaccugcccgacgugcacaagcaggugagcggcguggaccugggccugcccagcuggggcaaguacgugcugaugagcgccggcgugcugaccgcccugaugcugaugaucuuccugaccaccugcugcagaagagccgacagagccgagagcgcccagcacagccugggcgagagaggcagaaaggugagcgugaccagccagagcggcagagugaucagcagcugggagagcuacaagagcggcggcgagaccaagcuguga

SEQ ID NO: 190730 - RNA, 1575 nt, Artificial Sequence; identical to SEQ ID NO: 190655
  derived and/or modified CDS sequence (opt4) from glycoprotein__RABV__AB563952.2

SEQ ID NO: 190731 - RNA, 1575 nt, Artificial Sequence; identical to SEQ ID NO: 190655
  derived and/or modified CDS sequence (opt4) from glycoprotein__RABV__AB563953.2

SEQ ID NO: 190732 - RNA, 1575 nt, Artificial Sequence; identical to SEQ ID NO: 190632
  derived and/or modified CDS sequence (opt4) from glycoprotein__RABV__AB563954.1

SEQ ID NO: 190733 - RNA, 1575 nt, Artificial Sequence
  derived and/or modified CDS sequence (opt4) from glycoprotein__RABV__AB563955.1
augaucccccaggcccugcuguucgugccccugcugguguucagccugugcuucggcaaguuccccaucuacaccauccccgacaagcugggccccuggagccccaucgacauccaccaccugagcugccccaacaaccuggugguggaggacgagggcugcaccaaccugagcggcuucagcuacauggagcugaaggugggcuacaucagcgccaucaaggugaacggcuucaccugcaccggcguggugaccgaggccgagaccuacaccaacuucgugggcuacgugaccaccaccuucaagagaaagcacuucagacccacccccgacgccugcagagccgccuacaacuggaagauggccggcgaccccagauacgaggagagccugcacaaccccuaccccgacuaccacuggcugagaaccgugaagaccaccaaggagagccuggugaucaucagccccagcguggccgaccuggaccccuacgacaagagcccccacagcagagugccccccagcggcaagugcagcggcaucaccgugagcagcaccuacugcagcaccaaccacgacuacaccaucuggaugcccgagaaccccagacugggcaccagcugcgacaucuucaccaacagcagaggcaagagagccagcaagggcagcaagaccugcggcuucguggacgagagaggccuguacaagagccugaagggcgccugcaagcugaagcugugcggcgugcugggccugagacugauggacggcaccugggccgccauccagaccagcgacgagaccaaguggugcccccccgaccagcuggugaaccugcacgacuucagaagcgacgagaucgagcaccuggugguggaggagcuggugaagaagagagaggagugccuggacgcccuggagagcaucaugaccaccaagagcgugagcuucagaagacugagccaccugagaaagcuggugcccggcuucggcaaggccuacaccaucuucaacaagacccugauggaggccgacgcccacuacaagagcgugagaaccuggaacgagaucauccccagcaagggcugccugagagugggcggcagaugccacccccacgugaacggcguguucuucaacggcaucauccugggccccgacggccacgugcugauccccgagaugcagagcagccugcugcagcagcacauggagcugcuggagagcagcgugaucccccugaugcacccccuggccgaccccagcaccguguucaaggacgacgacgaggccgaggacuucguggaggugcaccugcccgacgugcacaagcaggugagcggcguggaccugggccugcccagcuggggcaaguacgugcugaugagcgccggcgugcugaccgcccugaugcugaugaucuuccugaccaccugcugcagaagagccaacagagccgagagcgcccagcacagccugggcgagagaggcagaaaggugagcgugaccagccagagcggcagagugaucagcagcugggagagcuacaagagcggcggcgagaccaagcuguga

SEQ ID NO: 190734 - RNA, 1575 nt, Artificial Sequence
  derived and/or modified CDS sequence (opt4) from glycoprotein__RABV__AB563956.1
augaucccccaggcccugcuguucgugccccugcugguguucagccugugcuucggcaaguuccccaucuacaccauccccgacaagcugggccccuggagccccaucgacauccaccaccugagcugccccaacaaccuggugguggaggacgagggcugcaccaaccugagcggcuucagcuacauggagcugaaggugggcuacaucagcgccaucaaggugaacggcuucaccugcaccggcguggugaccgaggccgagaccuacaccaacuucgugggcuacgugaccaccaccuucaagagaaagcacuucagacccacccccgacgccugcagagccgccuacgacuggaagauggccggcgaccccagauacgaggagagccugcacaaccccuaccccgacuaccacuggcugagaaccgugaagaccaccaaggagagccccgugaucaucagccccagcguggccgaccuggaccccuacgacaagagccugcacagcagagugccccccagcggcaagugcagcggcaucaccgugagcagcaccuacugcagcaccaaccacgacuacaccaucuggaugcccgagaaccccagacugggcaccagcugcgacaucuucaccaacagcagaggcaagagagccagcaagggcagcaagaccugcggcuucguggacgagagaggccuguacaagagccugaagggcgccugcaagcugaagcugugcggcgugcugggccugagacugauggacggcaccugggccgccauccagaccagcgacgagaccaaguggugcccccccgaccagcuggugaaccugcacgacuucagaagcgacgagaucgagcaccuggugguggaggagcuggugaagaagagagaggagugccuggacgcccuggagagcaucaugaccaccaagagcgugagcuucagaagacugagccaccugagaaagcuggugcccggcuucggcaaggccuacaccaucuucaacaagacccugauggaggccgacgcccacuacaagagcgugagaaccuggaacgagaucauccccagcaagggcugccugagagugggcggcagaugccacccccacgugaacggcguguucuucaacggcaucauccugggccccgacggccacgugcugauccccgagaugcagagcagccugcugcagcagcacauggagcugcuggagagcagcgugaucccccugaugcacccccuggccgaccccagcaccguguucaaggacgacgacgaggccgaggacuucguggaggugcaccugcccgacgugcacaagcaggugagcggcguggaccugggccugcccagcuggggcaaguacgugcugaugagcgccggcauccugaccgcccugaugcugaugaucuuccugaccaccugcugcagaagagccgacagagccgagagcgcccagcacagccugggcgagagaggcagaaaggugagcgugaccagccagagcggcagagugaucagcagcugggagagcuacaagagcggcggcgagaccaagcuguga

SEQ ID NO: 190735 - RNA, 1575 nt, Artificial Sequence
  derived and/or modified CDS sequence (opt4) from glycoprotein__RABV__AB563957.1
augaucccccaggcccugcuguucgugccccugaugguguucagccugugcuucggcaaguuccccaucuacaccauccccgacaagcugggccccuggagccccaucgacauccaccaccugagcugccccaacaaccuggugguggaggacgagggcugcaccaaccugagcggcuucagcuacauggagcugaaggugggcuacaucagcgccaucaaggugaacggcuucaccugcaccggcguggugaccgaggccgagaccuacaccaacuucgugggcuacgugaccaccaccuucaagagaaagcacuucagacccacccccgacgccugcagagccgccuacaacuggaagauggccggcgaccccagauacgaggagagccugcacaaccccuaccccgacuaccacuggcugagaaccgugaagaccaccaaggagagccuggugaucaucagccccagcguggccgaccuggaccccuacgacaagagccugcacagcagagccuuccccagcggcaagugcagcggcaucaccgugagcagcaccuacugcagcaccaaccacgacuacaccaucuggaugcccgagaaccccagacugggcaccagcugcgacaucuucaccaacagcagaggcaagagagccagcaagggcagcaagaccugcggcuucguggacgagagaggccuguacaagagccugaagggcgccugcaagcugaagcugugcggcgugcugggccugagacugauggacggcaccugggccgccauccagaccagcgacgagaccaaguggugcccccccgaccagcuggugaaccugcacgacuucagaagcgacgagaucgagcaccuggugguggaggagcuggugaagaagagagaggagugccuggacgcccuggagagcaucaugaccaccaagagcgugagcuucagaagacugagccaccugagaaagcuggugcccggcuucggcaaggccuacaccaucuucaacaagacccugauggaggccgacgcccacuacaagagcgugagaaccuggaacgagaucauccccagcaagggcugccugagagugggcggcagaugccacccccacgugaacggcguguucuucaacggcaucauccugggccccgacggccacgugcugauccccgagaugcagagcagccugcugcagcagcacauggagcugcuggagagcagcgugaucccccugaugcacccccuggccgaccccagcaccguguucaaggacgacgacgaggccgaggacuucguggaggugcaccugcccgacgugcacaagcaggugagcggcguggaccugggccugcccagcuggggcaaguacgugcugaugagcgccggcgugcugaccgcccugaugcugaugaucuuccugaugaccugcugcagaagaaccaacagagccgagagcgcccagcacagccugggcgagagaggcagaaaggugagcgugaccagccagagcggcagagugaucagcagcugggagagcuacaagagcggcggcgagaccaagcuguga

SEQ ID NO: 190736 - RNA, 1575 nt, Artificial Sequence; identical to SEQ ID NO: 190699
  derived and/or modified CDS sequence (opt4) from glycoprotein__RABV__AB563958.1

SEQ ID NO: 190737 - RNA, 1575 nt, Artificial Sequence
  derived and/or modified CDS sequence (opt4) from glycoprotein__RABV__AB563959.1
augaucccccaggcccugauguucgugccccugcugguguucagccugugcuucggcaaguuccccaucuacaccauccccgacaagcugggccccuggagccccaucgacauccaccaccugagcugccccaacaaccuggugguggaggacgagggcugcaccaaccugagcggcuucagcuacauggagcugaaggugggcuacaucagcgccaucaaggugaacggcuucaccugcaccggcguggugaccgaggccgagaccuacaccaacuucgugggcuacgugaccaccaccuucaagagaaagcacuucagacccaugcccgacgccugcagagccgccuacaacuggaagauggccggcgaccccagauacgaggagagccugcacaaccccuaccccgacuaccacuggcugagaaccgugaagaccaccaaggagagccuggugaucaucagccccagcguggccgaccuggaccccuacgacaagagccugcacagcagaguguuccccagcggcaagugcagcggcaccaccgugagcagcaccuacugcagcaccaaccacgacuacaccaucuggaugcccgagaaccccagacugggcaccagcugcgacaucuucaccaacagcagaggcaagagagccagcaagggcagcaagaccugcggcuucguggacgagagaggccuguacaagagccugaagggcgccugcaagcugaagcugugcggcgugcugggccugagacugauggacggcaccugggccgccauccagaccagcgacgagaccaaguggugcccccccgaccagcuggugaaccugcacgacuucagaagcgacgagaucgagcaccuggugguggaggagcuggugaagaagagagaggagugccuggacgcccuggagagcaucaugaccaccaagagcgugagcuucagaagacugagccaccugagaaagcuggugcccggcuucggcaaggccuacaccaucuucaacaagacccugauggaggccgacgcccacuacaagagcgugagaaccuggaacgagaucauccccagcaagggcugccugagagugggcggcagaugccacccccacgugaacggcguguucuucaacggcaucauccugggccccgacggccacgugcugauccccgagaugcagagcagccugcugcagcagcacauggagcugcuggagagcagcgugaucccccugaugcacccccuggccgaccccagcaccguguucaagggcgacgacgaggccgaggacuucguggaggugcaccugcccgacgugcacaagcaggugagcggcguggaccugggccugcccagcuggggcaaguacgugcugaugagcgccggcgugcugaccgcccugaugcugaugaucuuccugaugaccugcugcaagagagccaacagagccgagagcgcccaccacagccugggcgagagaggcagaaaggugagcgugaccagccagagcggcagagugaucagcagcugggagagcuacaagagcggcggcgagaccaagcuguga

SEQ ID NO: 190738 - RNA, 1575 nt, Artificial Sequence
  derived and/or modified CDS sequence (opt4) from glycoprotein__RABV__AB563960.1
augaucccccaggcccugcuguucgugcccuuccugguguucagccugugcuucggcaaguuccccaucuacaccauccccgacaagcugggccccuggagccccaucgacauccaccaccugagcugccccaacaaccuggugguggaggacgagggcugcaccaaccugagcggcuucagcuacauggagcugaaggugggcuacaucagcgccaucaaggugaacggcuucaccugcaccggcguggugaccgaggccgagaccuacaccaacuucgugggcuacgugaccaccaccuucaagagaaagcacuucagacccaugcccgacgccugcagagccgccuacaacuggaagauggccggcgaccccagauacgaggagagccugcacaaccccuaccccgacuaccacuggcugagaaccgugaagaccaccaaggagagccuggugaucaucagccccagcguggccgaccuggaccccuacgacaagagccugcacagcagaguguuccccagcggcaagugcagcggcaucaccgugagcagcaccuacugcagcaccaaccacgacuacaccaucuggaugcccgagaaccccagacugggcaccagcugcgacaucuucaccaacagcagaggcaagagagccagcaagggcagcaagaccugcggcuucguggacgagagaggccuguacaagagccugaagggcgccugcaagcugaagcugugcggcgugcugggccugagacugauggacggcaccugggccgccauccagaccagcgacgagaccaaguggugcccccccgaccagcuggugaaccugcacgacuucagaagcgacgagaucgagcaccuggugguggaggagcuggugaagaagagagaggagugccuggacgcccuggagagcaucaugaccaccaagagcgugagcuucagaagacugagccaccugagaaagcuggugcccggcuucggcaaggccuacaccaucuucaacaagacccugauggaggccgacgcccacuacaagagcgugagaaccuggaacgagaucauccccagcaagggcugccugagagugggcggcagaugccacccccacgugaacggcguguucuucaacggcaucauccugggccccgacggccacgugcugauccccgagaugcagagcagccugcugcagcagcacauggagcugcuggagagcagcgugaucccccugaugcacccccuggccgaccccagcaccguguucaaggacgacgacgaggccgaggacuucguggaggugcaccugcccgacgugcacaagcaggugagcggcguggaccugggccugcccagcuggggcaaguacgugcugaugagcgccggcgugcugaccgugcugaugcugaugaucuucuucaugaccugcugcagaagagccaacagaguggagagcgcccagcacagccugggcgagagaggcagaaaggugagcgugaccagccagagcggcagagugaucagcagcugggagagcuacaagagcggcggcgagaccaagcuguga

SEQ ID NO: 190739 - RNA, 1575 nt, Artificial Sequence; identical to SEQ ID NO: 190694
  derived and/or modified CDS sequence (opt4) from glycoprotein__RABV__AB563961.1

SEQ ID NO: 190740 - RNA, 1575 nt, Artificial Sequence; identical to SEQ ID NO: 190694
  derived and/or modified CDS sequence (opt4) from glycoprotein__RABV__AB563962.1

SEQ ID NO: 190741 - RNA, 1575 nt, Artificial Sequence
  derived and/or modified CDS sequence (opt4) from glycoprotein__RABV__AB563963.1
augaucccccaggcccugcuguucgugccccugcugguguucagccugugcuucggcaaguuccccaucuacaccauccccgacaagcugggccccuggagccccaucgacauccaccaccugagcugccccaacaaccuggugguggaggacgagggcugcaccaaccugagcggcuucagcuacauggagcugaaggugggcuacaucagcgccaucaaggugaacggcuucaccugcaccggcguggugaccgaggccgagaccuacaccaacuucgugggcuacgugaccaccaccuucaagagaaagcacuucagacccacccccgacgccugcagagccgccuacaacuggaagauggccggcgaccccagauacgaggagagccugcacaaccccuaccccgacuaccacuggcugagaaccgugaagaccaccaaggagagccuggugaucaucagccccagcguggccgaccuggaccccuacgacaagagccugcacagcagaguguuccccagcggcaagugcagcggcaucaccgugagcagcaccuacugcagcaccaaccacgacuacaccaucuggaugcccgagaaccccagacugggcaccagcugcgacaucuucaccaacagcagaggcaagagagccagcaagggcagcaagaccugcggcuucguggacgagagaggccuguacaagagccugaagggcgccugcaagcugaagcugugcggcgugcugggccugagacugauggacggcaccugggccgccauccagaccagcgacgagaccaaguggugcccccccgaccagcuggugaaccugcacgacuucagaagcgacgagaucgagcaccuggugguggaggagcuggugaagaagagagaggagugccuggacgcccuggagagcaucaugaccaccaagagcgugagcuucagaagacugagccaccugagaaagcuggugcccggcuucggcaaggccuacaccaucuucaacaagacccugauggaggccgacgcccacuacaagagcgugagaaccuggaacgagaucauccccagcaagggcugccugagagugggcggcagaugccacccccacgugaacggcguguucuucaacggcaucauccugggccccgacggccacgugcugauccccgagaugcagagcagccugcugcagcagcacauggagcugcuggagagcagcgugaucccccugaugcacccccuggccgaccccagcaccaucuucaaggacgacgacgaggccgaggacuucguggaggugcaccugcccgacgugcacaagcaggugagcggcguggaccugggccugcccagcuggggcaaguacgugcugaugagcgccggcgugcugaccgugcugaugcugaugaucuucuucaugaccugcugcagaagagccaacagaguggagagcgcccagcacagccugggcgagagaggcagaaaggugagcgugaccagccagagcggcagagugaucagcagcugggagagcuacaagagcggcggcgagaccaagcuguga

SEQ ID NO: 190742 - RNA, 1575 nt, Artificial Sequence; identical to SEQ ID NO: 190694
  derived and/or modified CDS sequence (opt4) from glycoprotein__RABV__AB563964.1

SEQ ID NO: 190743 - RNA, 1575 nt, Artificial Sequence; identical to SEQ ID NO: 190694
  derived and/or modified CDS sequence (opt4) from glycoprotein__RABV__AB563966.1

SEQ ID NO: 190744 - RNA, 1575 nt, Artificial Sequence; identical to SEQ ID NO: 190631
  derived and/or modified CDS sequence (opt4) from glycoprotein__RABV__AB563969.1

SEQ ID NO: 190745 - RNA, 1575 nt, Artificial Sequence
  derived and/or modified CDS sequence (opt4) from glycoprotein__RABV__AB563970.2
augaacccccaggcccugauguucgugccccugcugguguucagccugugcuucggcaaguuccccaucuacaccauccccgacaagcugggccccuggagccccaucgacauccaccaccugagcugccccaacaaccuggugguggaggacgagggcugcaccaaccugagcggcuucagcuacauggagcugaaggugggcuacaucagcgccaucaaggugaacggcuucaccugcaccggcguggugaccgaggccgagaccuacaccaacuucgugggcuacgugaccaccaccuucaagagaaagcacuucagacccacccccgacgccugcagagccgccuacaacuggaagauggccggcgaccccagauacgaggagagccugcacaaccccuaccccgacuaccacuggcugagaaccgugaagaccaccaaggagagccuggugaucaucagccccagcguggccgaccuggaccccuacgacaagagccugcacagcagaguguuccccagcggcaagugcagcggcaucaccgugagcagcaccuacugcagcaccaaccacgacuacaccaucuggaugcccgagaaccccagacugggcaccagcugcgacaucuucaccaacagcagaggcaagagagccagcaagggcagcaugaccugcggcuucguggacgagagaggccuguacaagagccugaagggcgccugcaagcugaagcugugcggcgugcugggccugagacugauggacggcaccugggccgccauccagaccagcgacgagaccaaguggugcccccccgaccagcuggugaaccugcacgacuuccacagcgacgagaucgagcaccuggugguggaggagcuggugaagaagagagaggagugccuggacgcccuggagagcaucaugaccaccaagagcgugagcuucagaagacugagccaccugagaaagcuggugcccggcuucggcaaggccuacaccaucuucaacaagacccugauggaggccgacgcccacuacaagagcgugagaaccuggaacgagaucauccccagcaagggcugccugagagugggcggcagaugccacccccacgugaacggcguguucuucaacggcaucauccugggccccgacggccacgugcugauccccgagaugcagagcagccugcugcagcagcacauggagcugcuggagagcagcgugaucccccugaugcacccccuggccgaccccagcaccguguucaaggacgacgacgaggccgaggacuucguggaggugcaccugcccgacgugcacaagcaggugagcggcguggaccugggccugcccagcuggggcaaguacgugcugaugagcgccggcgugcugaccgcccugaugcugaugaucuuccugaugaccugcugcagaagagccaacagagccgagagcgcccagcacagccugggcgagagaggcagaaaggugagcgugaccagccagagcggcagagugaucagcagcugggagagcuacaagagcggcggcgagaccaagcuguga

SEQ ID NO: 190746 - RNA, 1575 nt, Artificial Sequence
  derived and/or modified CDS sequence (opt4) from glycoprotein__RABV__AB563971.1
augaacccccaggcccugauguucgugccccugcugguguucagccugugcuucggcaaguuccccaucuacaccauccccgacaagcugggccccuggagccccaucgacauccaccaccugagcugccccaacaaccuggugguggaggacgagggcugcaccaaccugagcggcuucagcuacauggagcugaaggugggcuacaucagcgccaucaaggugaacggcuucaccugcaccggcguggugaccgaggccgagaccuacaccaacuucgugggcuacgugaccaccaccuucaagagaaagcacuucagacccacccccgacgccugcagagccgccuacaacuggaagauggccggcgaccccagauacgaggagagccugcacaaccccuaccccgacuaccacuggcugagaaccgugaagaccaccaaggagagccuggugaucaucagccccagcguggccgaccuggaccccuacgacaagagccugcacagcagaguguuccccagcggcaagugcagcggcaucaccguguucagcaccuacugcagcaccaaccacgacuacaccaucuggaugcccgagaaccccagacugggcaccagcugcgacaucuucaccaacagcagaggcaagagagccagcaagggcagcaagaccugcggcuucguggacgagagaggccuguacaagagccugaagggcgccugcaagcugaagcugugcggcgugcugggccugagacugauggacggcaccugggccgccauccagaccagcgacgagaccaaguggugcccccccgaccagcuggugaaccugcacgacuucagaagcgacgagaucgagcaccuggugguggaggagcuggugaagaagagagaggagugccuggacgcccuggagagcaucaugaccaccaagagcgugagcuucagaagacugagccaccugagaaagcuggugcccggcuucggcaaggccuacaccaucuucaacaagacccugauggaggccgacgcccacuacaagagcgugagaaccuggaacgagaucauccccagcaagggcugccugagagugggcggcagaugccacccccacgugaacggcguguucuucaacggcaucauccugggccccgacggccacgugcugauccccgagaugcagagcagccugcugcagcagcacauggagcugcuggagagcagcgugaucccccugaugcacccccuggccgaccccagcaccguguucaaggacgacgacgaggccgaggacuucguggaggugcaccugcccgacgugcacaagcaggugagcggcguggaccugggccugcccagcuggggcaaguacgugcugaugagcgccggcgugcugaccgcccugaugcugaugaucuuccugaugaccugcugcagaagagccaacagagccgagagcgcccagcacagccugggcgagagaggcagaaaggugagcgugaccagccagagcggcagagugaucagcagcugggagagcuacaagagcggcggcgagaccaagcuguga

SEQ ID NO: 190747 - RNA, 1575 nt, Artificial Sequence
  derived and/or modified CDS sequence (opt4) from glycoprotein__RABV__AB563973.2
augaucccccaggcccugcuguucgugccccugcuggugagcagccugugcuucggcaaguuccccaucuacaccauccccgacaagcugggccccuggagccccaucgacauccaccaccugagcugccccaacaaccuggugguggaggacgagggcugcaccaaccugagcggcuucagcuacauggagcugaaggugggcuacaucagcgccaucaaggugaacggcuucaccugcaccggcguggugaccgaggccgagaccuacaccaacuucgugggcuacgugaccaccaccuucaagagaaagcacuucagacccacccccgacgccugcagagccgccuacaacuggaagauggccggcgaccccagauacgaggagagccugcacaaccccuaccccgacuaccacuggcugagaaccgugaagaccaccaaggagagccuggugaucaucagccccagcguggccgaccuggaccccuacgacaagagccugcacagcagaguguuccccagcggcaagugcagcggcaucaccgugagcagcaccuacugcagcaccaaccacgacuacaccaucuggaugcccgagaaccccagacugggcaccagcugcgacaucuucaccaacagcagaggcaagagagccagcaagggcagcaagaccugcggcuucguggacgagagaggccuguacaagagccugaagggcgccugcaagcugaagcugugcggcgugcugggccugagacugauggacggcaccugggccgccauccagaccagcgacgagaccaaguggugcccccccgaccagcuggugaaccugcacgacuucagaagcgacgagaucgagcaccuggugguggaggagcuggugaagaagagagaggagugccuggacgcccuggagagcaucaugaccaccaagagcgugagcuucagaagacugagccaccugagaaagcuggugcccggcuucggcaaggccuacaccaucuucaacaagacccugauggaggccgacgcccacuacaagagcgugagaaccuggaacgagaucauccccagcaagggcugccugagagugggcggcagaugccacccccacgugaacggcguguucuucaacggcaucauccugggccccgacggccacgugcugauccccgagaugcagagcagccugcugcagcagcacauggagcugcuggagagcagcgugaucccccugaugcacccccuggccgaccccagcaccguguucaaggacgacgacgaggccgaggacuucguggaggugcaccugcccgacgugcacaagcaggugagcggcguggaccugggccugcccagcuggggcaaguacgugcugaccagcgccagcgugcugaccgcccugaugcugaugaucuuccugaugaccugcugcagaagagccaacagagccgagagcgcccagcacagccugggcgagagaggcagaaaggugagcgugaccagccagagcggcagagugaucagcagcugggagagcuacaagagcggcggcgagaccaagcuguga

SEQ ID NO: 190748 - RNA, 1575 nt, Artificial Sequence
  derived and/or modified CDS sequence (opt4) from glycoprotein__RABV__AB563974.1
augaucccccaggcccugcuguucgugccccugcuggugagcagccugugcuucggcaaguuccccaucuacaccauccccgacaagcugggccccuggagccccaucgacauccaccaccugagcugccccaacaaccuggugguggaggacgagggcugcaccaaccugagcggcuucagcuacauggagcugaaggugggcuacaucagcgccaucaaggugaacggcuucaccugcaccggcguggugaccgaggccgagaccuacaccaacuucgugggcuacgugaccaccaccuucaagagaaagcacuucagacccacccccgacgccugcagagccgccuacaacuggaagauggccggcgaccccagauacgaggagagccugcacaaccccuaccccgacuaccacuggcugagaaccgugaagaccaccaaggagagccuggugaucaucagccccagcguggccgaccuggaccccuacgacaagagccugcacagcagaguguuccccagcggcaagugcagcggcaucaccgugagcagcaccuacugcagcaccaaccacgacuacaccaucuggaugcccgagaaccccagacugggcaccagcugcgacaucuucaccaacagcagaggcaagagagccagcaagggcagcaagaccugcggcuucguggacgagagaggccuguacaagagccugaagggcgccugcaagcugaagcugugcggcgugcugggccugagacugauggacggcaccugggccgccauccagaccagcgacgagaccaaguggugcccccccgaccagcuggugaaccugcacgacuucagaagcgacgagaucgagcaccuggugguggaggagcuggugaagaagagagaggagugccuggacgcccuggagagcaucaugaccaccaagagcgugagcuucagaagacugagccaccugagaaagcuggugcccggcuucggcaaggccuacaccaucuucaacaagacccugauggaggccgacgcccacuacaagagcgugagaaccuggaacgagaucauccccagcaagggcugccugagagugggcggcagaugccacccccacgugaacggcguguucuucaacggcaucauccugggccccgacggccacgugcugauccccgagaugcagagcagccugcugcagcagcacauggagcugcuggagagcagcgugaucccccugaugcacccccuggccgaccccagcaccguguucaaggacgacgacgaggccgaggacuucguggaggugcaccugcccgacgugcacaagcaggugagcggcguggaccugggccugcccagcuggggcaaguacgugcugaccagcgccggcgugcugaccgcccugaugcugaugaucuuccugaugaccugcugcagaagagccaacagagccgagagcgcccagcacagccugggcgagagaggcagaaaggugagcgugaccagccagagcggcagagugaucagcagcugggagagcuacaagagcggcggcgagaccaagcuguga

SEQ ID NO: 190749 - RNA, 1575 nt, Artificial Sequence; identical to SEQ ID NO: 190748
  derived and/or modified CDS sequence (opt4) from glycoprotein__RABV__AB563975.2

SEQ ID NO: 190750 - RNA, 1575 nt, Artificial Sequence
  derived and/or modified CDS sequence (opt4) from glycoprotein__RABV__AB563976.1
augaucccccaggcccugcuguucgugccccugcugguguucagccugugcuucggcaaguuccccaucuacaccauccccgacaagcugggccccuggagccccaucgacauccaccaccugagcugccccaacaaccuggugguggaggacgagggcugcaccaaccugagcggcuucagcuacauggagcugaaggugggcuacaucagcgccaucaaggugaacggcuucaccugcaccggcguggugaccgaggccgagaccuacaccaacuucgugggcuacgugaccaccaccuucaagagaaagcacuucagacccacccccgacgccugcagagccgccuacaacuggaagauggccggcgaccccagauacgaggagagccugcacaaccccuaccccgacuaccacuggcugagaaccgugaagaccaccaaggagagccuggugaucaucagccccagcguggccgaccuggaccccuacgacaagagccugcacagcagaguguuccccagcggcaagugcagcggcaucaccgugagcagcaccuacugcagcaccaaccacgacuacaccaucuggaugcccgagaaccccagacugggcaccagcugcgacaucuucaccaacagcagaggcaagagagccagcaagggcagcaagaccugcggcuucguggacgagagaggccuguacaagagccugaagggcgccugcaagcugaagcugugcggcgugcugggccugagacugauggacggcaccugggccgccauccagaccagcgacgagaccaaguggugcccccccgaccagcuggugaaccugcacgacuucagaagcgacgagaucgagcaccuggugguggaggagcuggugaagaagagagaggagugccuggacgcccuggagagcaucaugaccaccaagagcgugagcuucagaagacugagccaccugagaaagcuggugcccggcuucggcaaggccuacaccaucuucaacaagacccugauggaggccgacgcccacuacaagagcgugagaaccuggaacgagaucauccccagcaagggcugccugagagugggcggcagaugccacccccacgugaacggcguguucuucaacggcaucauccugggccccgacggccacgugcugauccccgagaugcagagcagccugcugcagcagcacauggagcugcuggagagcagcgugaucccccugaugcacccccuggccgaccccagcaccguguucaaggacgacgacgaggccgaggacuucguggaggugcaccugcccgacgugcacaagcaggugagcggcguggaccugggccugcccagcuggggcaaguacgugcugaugagcgccggcgugcugaccgcccugaugcugaugaucuuccugaugaccugcugcagaggcaccaacagagccgagagcgcccagcacagccugggcgagagaggcagaaaggugagcgugaccagccagagcggcagagugaucagcagcugggagagcuacaagagcggcggcgagaccaagcuguga

SEQ ID NO: 190751 - RNA, 1575 nt, Artificial Sequence
  derived and/or modified CDS sequence (opt4) from glycoprotein__RABV__AB563977.1
augaucccccaggcccugcuguucgugccccugcugguguucagccugugcuucggcaaguuccccaucuacaccauccccgacaagcugggccccuggagccccaucgacauccaccaccugagcugccccaacaaccuggugguggaggacgagggcugcaccaaccugagcggcuucagcuacauggagcugaaggugggcuacaucagcgccaucaaggugaacggcuucaccugcaccggcguggugaccgaggccgagaccuacaccaacuucgugggcuacgugaccaccaccuucaagagaaagcacuucagacccacccccgacgccugcagagccgccuacaacuggaagauggccggcgaccccagauacgaggagagccugcacaaccccuaccccgacuaccacuggcugagaaccgugaagaccaccaaggagagccuggugaucaucagccccagcguggccgaccuggaccccuacgacaagagccugcacagcagaguguuccccagcggcaagugcagcggcaucaccgugagcagcaccuacugcagcaccaaccacgacuacaccaucuggaugcccgagaaccccagacugggcaccagcugcgacaucuucaccaacagcagaggcaagagagccagcaagggcagcaagaccugcggcuucguggacgagagaggccuguacaagagccugaagggcgccugcaagcugaagcugugcggcgugcugggccugagacugauggacggcaccugggccgccauccagaccagcgacgagaccaaguggugcccccccgaccagcuggugaaccugcacgacuucagaagcgacgagaucgagcaccuggugguggaggagcuggugaagaagagagaggagugccuggacgcccuggagagcaucaugaccaccaagagcgugagcuucagaagacugagccaccugagaaagcuggugcccggcuucggcaaggccuacaccaucuucaacaagacccugauggaggccgacgcccacuacaagagcgugagaaccuggaacgagaucauccccagcaagggcugccugagagugggcggcagaugccacccccacgugaacggcguguucuucaacggcaucauccugggccccgacggccacgugcugauccccgagaugcagagcagccugcugcagcagcacauggagcugcuggagagcagcgugaucccccugaugcacccccuggccgaccccagcaccguguucaaggacgacgacgaggccgaggacuucguggaggugcaccugcccgacgugcacaagcaggugagcggcguggaccugggccugcccagcuggggcagauacgugcugaugagcgccggcgugcugaccgcccugaugcugaugaucuuccugaccaccugcugcagaagagccaacagagccgagagcgcccagcacagccugggcgagagaggcagaaaggugagcgugaccagccagagcggcagagugaucagcagcugggagagcuacaagagcggcggcgagaccaagcuguga

SEQ ID NO: 190752 - RNA, 1575 nt, Artificial Sequence; identical to SEQ ID NO: 190711
  derived and/or modified CDS sequence (opt4) from glycoprotein__RABV__AB563979.1

SEQ ID NO: 190753 - RNA, 1575 nt, Artificial Sequence
  derived and/or modified CDS sequence (opt4) from glycoprotein__RABV__AB563981.1
augaucccccaggcccugcuguucgugccccugaugguguucagccugugcuucggcaaguuccccaucuacaccauccccgacaagcugggccccuggagccccaucgacauccaccaccugagcugccccaacaaccuggugguggaggacgagggcugcaccaaccugagcggcuucagcuacauggagcugaaggugggcuacaucagcgccaucaaggugaacggcuucaccugcaccggcguggugaccgaggccgagaccuacaccaacuucgugggcuacgugaccaccaccuucaagagaaagcacuucagacccacccccgacgccugcagagccgccuacaacuggaagauggccggcgaccccagauacgaggagagccugcacaaccccuaccccgacuaccacuggcugagaaccgugaagaccaccaaggagagccuggugaucaucagccccagcguggccgaccuggaccccuacgacaagagccugcacagcagaguguuccccagcggcaagugcagcggcaucaccgugagcagcaccuacugcagcaccaaccacgacuacaccaucuggaugcccgagaaccccagacugggcaccagcugcgacaucuucaccaacagcagaggcaagagagccagcaagggcagcaagaccugcggcuucguggacgagagaggccuguacaagagccugaagggcgccugcaagcugaagcugugcggcgugcugggccugagacugauggacggcaccugggccgccauccagaccagcgacgagaccaaguggugcccccccgaccagcuggugaaccugcacgacuucagaagcgacgagaucgagcaccuggugguggaggagcuggugaagaagagagaggagugccuggacgcccuggagagcaucaugaccaccaagagcgugagcuucagaagacugagccaccugagaaagcuggugcccggcuucggcaaggccuacaccaucuucaacaagacccugauggaggccgacgcccacuacaagagcgugagaaccuggaacgagaucauccccagcaagggcugccugagagugggcggcagaugccacccccacgugaacggcguguucuucaacggcaucauccugggccccgacggccacgugcugauccccgagaugcagagcagccugcugcagcagcacauggagcugcuggagagcagcgugaucccccugaugcacccccuggccgaccccagcaccguguucaaggacgacgacgaggccgaggacuucguggaggugcaccugcccgacgugcacaagcaggugagcggcguggaccugggccugcccagcuggggcaaguacgugcugaugagcgccggcgugcugaccgcccugaugcugaugaucuuccugaugaccugcugcagaagaaccaacagagccgagagcgcccagcacagccugggcgagagaggcagaaaggugagcgugaccagccagagcggcagaaucaucagcagcugggagagcuacaagagcggcggcgagaccaagcuguga

SEQ ID NO: 190754 - RNA, 1575 nt, Artificial Sequence
  derived and/or modified CDS sequence (opt4) from glycoprotein__RABV__AB563983.1
augaucccccaggcccugcuguucgugccccugcugguguucagccugugcuucggcaaguuccccaucuacaccauccccgacaagcugggccccuggagccccaucgacauccaccaccugagcugccccaacaaccuggugguggaggacgagggcugcaccaaccugagcggcuucagcuacauggagcugaaggugggcuacaucagcgccaucaaggugaacggcuucaccugcaccggcguggugaccgaggccgagaccuacaccaacuucgugggcuacgugaccaccaccuucaagagaaagcacuucagacccacccccgacgccugcagagccgccuacaacuggaagauggccggcgaccccagauacgaggagagccugcacaaccccuaccccgacuaccacuggcugagaaccgugaagaccaccaaggagagccuggugaucaucagccccagcguggccgaccuggaccccuacgacaagagccugcacagcagaguguuccccagcggcaagugcagcggcaucaccgugagcagcaccuacugcagcaccaaccacgacuacaccaucuggaugcccgagaaccccagacugggcaccagcugcgacaucuucaccaacagcagaggcaagagagccagcaagggcagcaagaccugcggcuucguggacgagagaggccuguacaagagccugaagggcgccugcaagcugaagcugugcggcgugcugggccugagacugauggacggcaccugggccgccauccagaccagcgacgagaccaaguggugcccccccgaccagcuggugaaccugcacgacuucagaagcgacgagauggagcaccuggugguggaggagcuggugaagaagagagaggagugccuggacgcccuggagagcaucaugaccaccaagagcgugagcuucagaagacugagccaccugagaaagcuggugcccggcuucggcaaggccuacaccaucuucaacaagacccugauggaggccgacgcccacuacaagagcgugagaaccuggaacgagaucauccccaccaagggcugccugagagugggcggcagaugccacccccacgugaacggcguguucuucaacggcaucauccugggccccgacggccacgugcugauccccgagaugcagagcagccugcugcagcagcacauggagcugcuggagagcagcgugaucccccugaugcacccccuggccgaccccagcaccguguucaaggacgacgacgaggccgaggacuucguggaggugcaccugcccgacgugcacaagcaggugagcggcguggaccugggccugcccagcuggggcaaguacgugcugaugagcgccggcgugcugaccgcccugaugcugaugaucuuccugaccaccugcugcagaagagccgacagagccgagagcgcccagcacagccugggcgagagaggcagaaaggugagcgugaccagccagagcggcagagugaucagcagcugggagagcuacaagagcggcggcgagaccaagcuguga

SEQ ID NO: 190755 - RNA, 1575 nt, Artificial Sequence; identical to SEQ ID NO: 190662
  derived and/or modified CDS sequence (opt4) from glycoprotein__RABV__AB563985.1

SEQ ID NO: 190756 - RNA, 1575 nt, Artificial Sequence
  derived and/or modified CDS sequence (opt4) from glycoprotein__RABV__AB563986.1
augaucccccaggcccugcuguucgugccccugcugguguucagccugugcuucggcaaguuccccaucuacaccauccccgacaagcugggccccuggagccccaucgacauccaccaccugagcugccccaacaaccuggugguggaggacgagggcugcaccaaccugagcggcuucagcuacauggagcugaaggugggcuacaucagcgccaucaaggugaacggcuucaccugcaccggcguggugaccgaggccgagaccuacaccaacuucgugggcuacgugaccaccaccuucaagagaaagcacuucagacccacccccgacgccugcagagccgccuacaacuggaagauggccggcgaccccagauacgaggagagccugcacaaccccuaccccgacuaccacuggcugagaaccgugaagaccaccaaggagagccuggugaucaucagccccagcgugcccgaccuggaccccuacgacaagagccugcacagcagaguguuccccagcggcaagugcagcggcaucaccgugagcagcaccuacugcagcaccaaccacgacuacaccaucuggaugcccgagaaccccagacugggcaccagcugcgacaucuucaccaacagcagaggcaagagagccagcaagggcagcaagaccugcggcuucguggacgagagaggccuguacaagagccugaagggcgccugcaagcugaagcugugcggcgugcugggccugagacugauggacggcaccugggccgccauccagaccagcgacgagaccaaguggugcccccccgaccagcuggugaaccugcacgacuucagaagcgacgagaucgagcaccuggugguggaggagcuggugaagaagagagaggagugccuggacgcccuggagagcaucaugaccaccaagagcgugagcuucagaagacugagccaccugagaaagcuggugcccggcuucggcaaggccuacaccaucuucaacaagacccugauggaggccgacgcccacuacaagagcgugagaaccuggaacgagaucauccccagcaagggcugccugagagugggcggcagaugccacccccacgugaacggcguguucuucaacggcaucauccugggccccgacggccacgugcugauccccgagaugcagagcagccugcugcagcagcacauggagcugcuggagagcagcgugaucccccugaugcacccccuggccgaccccagcaccguguucaaggacgacgacgaggccgaggacuucguggaggugcaccugcccgacgugcacaagcaggugagcggcguggaccugggccugcccagcuggggcaaguacgugcugaugagcgccggcgugcugaccgcccugaugcugaugaucuuccugaugaccugcugcagaagaaccaacagagccgagagcgcccagcacagccugggcgagagaggcagaaaggugagcgugaccagccagagcggcagagugaucagcagcugggagagcuacaagagcggcggcgagaccaagcuguga

SEQ ID NO: 190757 - RNA, 1575 nt, Artificial Sequence
  derived and/or modified CDS sequence (opt4) from glycoprotein__RABV__AB563987.1
augaucccccaggcccugcuguucgugccccugcugguguucagccugugcuucggcaaguuccccaucuacaccauccccgacaagcugggccccuggagccccaucgacauccaccaccugagcugccccaacaaccuggugguggaggacgagggcugcaccaaccugagcggcuucagcuacauggagcugaaggugggcuacaucagcgccaucaaggugaacggcuucaccugcaccggcguggugaccgaggccgagaccuacaccaacuucgugggcuacgugaccaccaccuucaagagaaagcacuucagacccacccccgacgccugcagagccgccuacaacuggaagauggccggcgaccccagauacgaggagagccugcacaaccccuaccccgacuaccacuggcugagaaccgugaagaccaccaaggagagccuggugaucaucagccccagcguggccgaccuggaccccuacgacaagagccugcacagcagaguguuccccagcggcaagugcagcggcaucaccgugagcagcaccuacugcagcaccaaccacgacuacaccaucuggaugcccgagaaccccagacugggcaccagcugcgacaucuucaccaacagcagaggcaagagagccagcaagggcagcaagaccugcggcuucguggacgagagaggccuguacaagagccugaagggcgccugcaagcugaagcugugcggcgugcugggccugagacugauggacggcaccugggccgccauccagaccagcgacgagaccaaguggugcccccccgaccagcuggugaaccugcacgacuucagaagcgacgagaucgagcaccuggugguggaggagcuggugaagaagagagaggagugccuggacgcccuggagagcaucaugaccaccaagagcgugagcuucagaagacugagccaccugagaaagcuggugcccggcuucggcaaggccuacaccaucuucaacaagacccugauggaggccgacgcccacuacaagagcgugagaaccuggaacgagaucauccccagcaagggcugccugagagugggcggcagaugccacccccacgugaacggcguguucuucaacggcaucauccugggccccgacggccacgugcugauccccgagaugcagagcagccugcugcagcagcacauggagcugcuggagagcagcgugaucccccugaugcacccccuggccgaccccagcaccguguucaaggacgacgacgaggccgaggacuucguggaggugcaccugcccgacgugcacaagcaggugagcggcguggaccugggccugcccagcuggggcaaguacgugcugaugagcgccggcgugcugaccgcccugaugcugaugaucuuccugaccaccugcugcagaagagccaacaaggccgagagcgcccagcacagccugggcgagagaggcagaaaggugagcgugaccagccagagcggcagagugaucagcagcugggagagcuacaagagcggcggcgagaccaagcuguga

SEQ ID NO: 190758 - RNA, 1575 nt, Artificial Sequence; identical to SEQ ID NO: 190748
  derived and/or modified CDS sequence (opt4) from glycoprotein__RABV__AB563988.1

SEQ ID NO: 190759 - RNA, 1575 nt, Artificial Sequence
  derived and/or modified CDS sequence (opt4) from glycoprotein__RABV__AB563989.1
augaucccccaggcccugcuguucgugccccugcugguguucagccugugcuucggcaaguuccccaucuacaccauccccgacaagcugggccccuggagccccaucgacauccaccaccugagcugccccaacaaccuggugguggaggacgagggcugcaccaaccugagcggcuucagcuacauggagcugaaggugggcuacaucagcgccaucaaggugaacggcuucaccugcaccggcguggugaccgaggccgagaccuacaccaacuucgugggcuacgugaccaccaccuucaagagaaagcacuucagacccacccccgacgccugcagagccgccuacaacuggaagauggccggcgaccccagauacgaggagagccugcacaaccccuaccccgacuaccacuggcugagaaccgugaagaccaccaaggagagccuggugaucaucagccccagcguggccgaccuggaccccuacgacaagagccugcacagcagaguguuccccagcggcaagugcagcggcaucaccgugagcagcaccuacugcagcaccaaccacgacuacaccaucuggaugcccgagaaccccagacugggcaccagcugcgacaucuucaccaacagcagaggcaagagagccagcaagggcagcaagaccugcggcuucguggacgagagaggccuguacaagagccugaagggcgccugcaagcugaagcugugcggcgugcugggccugagacugauggacggcaccugggccgccauccagaccagcgacgagaccaaguggugcccccccgaccagcuggugaaccugcacgacuucagaagcgacgagaucgagcaccuggugguggaggagcuggugaagaagagagaggagugcaucgacgcccuggagagcaucaugaccaccaagagcgugagcuucagaagacugagccaccugagaaagcuggugcccggcuucggcaaggccuacaccaucuucaacaagacccugauggaggccgacgcccacuacaagagcgugagaaccuggaacgagaucauccccagcaagggcugccugagagugggcggcagaugccacccccacgugaacggcguguucuucaacggcaucauccugggccccgacggccacgugcugauccccgagaugcagagcagccugcugcagcagcacauggagcugcuggagagcagcgugaucccccugaugcacccccuggccgaccccagcaccguguucaaggacgacgacgaggccgaggacuucguggaggugcaccugcccgacgugcacaagcaggugagcggcguggaccugggccugcccagcuggggcaaguacgugcugaugagcgccggcgugcugaccgcccugaugcugaugaucuuccugaugaccugcugcagaagaaccaacagagccgagagcgcccagcacagccugggcgagagaggcagaaaggugagcgugaccagccagagcggcagagugaucagcagcugggagagcuacaagagcggcggcgagaccaagcuguga

SEQ ID NO: 190760 - RNA, 1575 nt, Artificial Sequence
  derived and/or modified CDS sequence (opt4) from glycoprotein__RABV__AB563990.1
augaucccccaggcccugcuguucgugccccugcugguguucagccugugcuucggcaaguuccccaucuacaccauccccgacaagcugggccccuggagccccaucgacauccaccaccugagcugccccaacaaccuggugguggaggacgagggcugcaccaaccugagcggcuucagcuacauggagcugaaggugggcuacaucagcgccaucaaggugaacggcuucaccugcaccggcguggugaccgaggccgagaccuacaccaacuucgugggcuacgugaccaccaccuucaagagaaagcacuucagacccacccccgacgccugcagagccgccuacaacuggaagauggccggcgaccccagauacgaggagagccugcacaaccccuaccccgacuaccacuggcugagaaccgugaagaccaccaaggagagccuggugaucaucagccccagcguggccgaccuggaccccuacgacaagagccugcacagcagaguguuccccagcggcaagugcagcggcaucaccgugagcagcaccuacugcagcaccaaccacgacuacaccaucuggaugcccgagaaccccagacugggcaccagcugcgacaucuucaccaacagcagaggcaagagagccagcaagggcagcaagaccugcggcuucguggacgagagaggccuguacaagagccugaagggcgccugcaagcugaagcugugcggcauccugggccugagacugauggacggcaccugggccgccauccagaccagcgacgagaccaaguggugcccccccgaccagcuggugaaccugcacgacuucagaagcgacgagaucgagcaccuggugguggaggagcuggugaagaagagagaggagugccuggacgcccuggagagcaucaugaccaccaagagcgugagcuucagaagacugagccaccugagaaagcuggugcccggcuucggcaaggccuacaccaucuucaacaagacccugauggaggccgacgcccacuacaagagcgugagaaccuggaacgagaucauccccagcaagggcugccugagagugggcggcagaugccacccccacgugaacggcguguucuucaacggcaucauccugggccccgacggccacgugcugauccccgagaugcagagcagccugcugcagcagcacauggagcugcuggagagcagcgugaucccccugaugcacccccuggccgaccccagcaccguguucaaggacgacgacgaggccgaggacuucguggaggugcaccugcccgacgugcacaagcaggugagcggcguggaccugggccugcccagcuggggcaaguacgugcugaugagcgccggcgugcugaccgcccugaugcugaugaucuuccugaugaccugcugcagaagagccaacagagccgagagcgcccagcacagccugggcgagagaggcagaaaggugagcgugaccagccagagcggcagagugaucagcagcugggagagcuacaagagcggcggcgagaccaagcuguga

SEQ ID NO: 190761 - RNA, 1575 nt, Artificial Sequence
  derived and/or modified CDS sequence (opt4) from glycoprotein__RABV__AB563991.1
augaucccccaggcccugcuguucgugccccugcugguguucagccugugcuucggcaaguuccccaucuacaccauccccgacaagcugggccccuggagccccaucgacauccaccaccugagcugccccaacaaccuggugguggaggacgagggcugcaccaaccugagcggcuucagcuacauggagcugaaggugggcuacaucagcgccaucaaggugaacggcuucaccugcaccggcguggugaccgaggccgagaccuacaccaacuucgugggcuacgugaccaccaccuucaagagaaagcacuucagacccacccccgacgccugcagagccgccuacaacuggaagauggccggcgaccccagauacgaggagagccugcacaaccccuaccccgacuaccacuggcugagaaccgugaagaccaccaaggagagccuggugaucaucagccccagcguggccgaccuggaccccuacgacaagagccugcacagcagaguguuccccagcggcaagugcagcggcaucaccgugagcagcaccuacugcagcaccaaccacgacuacaccaucuggaugcccgagaaccccagacugggcaccagcugcgacaucuucaccaacagcagaggcaagagagccagcaagggcagcaagaccugcggcuucguggacgagagaggccuguacaagagccugaagggcgccugcaagcugaagcugugcggcgugcugggccugagacugauggacggcaccugggccgccauccagaccagcgacgagaccaaguggugcccccccgaccagcuggugaaccugcacgacuucagaagcgacgagaucgagcaccuggugguggaggagcuggugagaaagagagaggagugccuggacgcccuggagagcaucaugaccaccaagagcgugagcuucagaagacugagccaccugagaaagcuggugcccggcuucggcaaggccuacaccaucuucaacaagacccugauggaggccgacgcccacuacaagagcgugagaaccuggaacgagaucauccccagcaagggcugccugagagugggcggcagaugccacccccacgugaacggcguguucuucaacggcaucauccugggccccgacggccacgugcugauccccgagaugcagagcagccugcugcagcagcacauggagcugcuggagagcagcgugaucccccugaugcacccccuggccgaccccagcaccguguucaaggacgacgacgaggccgaggacuucguggaggugcaccugcccgacgugcacaagcaggugagcggcguggaccugggccugcccagcuggggcaaguacgugcugaugagcgccggcgugcugaccgcccugaugcugaugaucuuccugaugaccugcugcagaagaaccaacagagccgagagcgcccagcacagccugggcgagagaggcagaaaggugagcgugaccagccagagcggcagagugaucagcagcugggagagcuacaagagcggcggcgagaccaagcuguga

SEQ ID NO: 190762 - RNA, 1575 nt, Artificial Sequence; identical to SEQ ID NO: 190748
  derived and/or modified CDS sequence (opt4) from glycoprotein__RABV__AB563992.1

SEQ ID NO: 190763 - RNA, 1575 nt, Artificial Sequence; identical to SEQ ID NO: 190748
  derived and/or modified CDS sequence (opt4) from glycoprotein__RABV__AB563993.1

SEQ ID NO: 190764 - RNA, 1575 nt, Artificial Sequence; identical to SEQ ID NO: 190631
  derived and/or modified CDS sequence (opt4) from glycoprotein__RABV__AB563994.1

SEQ ID NO: 190765 - RNA, 1575 nt, Artificial Sequence; identical to SEQ ID NO: 190632
  derived and/or modified CDS sequence (opt4) from glycoprotein__RABV__AB563996.1

SEQ ID NO: 190766 - RNA, 1575 nt, Artificial Sequence
  derived and/or modified CDS sequence (opt4) from glycoprotein__RABV__AB563997.1
augaucccccaggcccugcuguucgugcccauccugguguucagccugugcuucggcaaguuccccaucuacaccauccccgacaagcugggccccuggagccccaucgacauccaccaccugagcugccccaacaaccuggugguggaggacgagggcugcaccaaccugagcggcuucagcuacauggagcugaaggugggcuacaucagcgccaucaaggugaacggcuucaccugcaccggcguggugaccgaggccgagaccuacaccaacuucgugggcuacgugaccaccaccuucaagagaaagcacuucagacccacccccgacgccugcagagccgccuacaacuggaagauggccggcgaccccagauacgaggagagccugcacaaccccuaccccgacuaccacuggcugagaaccgugaagaccaccaaggagagccuggugaucaucagccccagcguggccgaccuggaccccuacgacaagagccugcacagcagaguguuccccagcggcaagugcagcggcaucaccgugagcagcaccuacugcagcaccaaccacgacuacaccaucuggaugcccgagaaccccagacugggcaccagcugcgacaucuucaccaacagcagaggcaagagagccagcaagggcagcaagaccugcggcuucguggacgagagaggccuguacaagagccugaagggcgccugcaagcugaagcugugcggcgugcugggccugagacugauggacggcaccugggccgccauccagaccagcgacgagaccaaguggugcccccccgaccagcuggugaaccugcacgacuucagaagcgacgagaucgagcaccuggugguggaggagcuggugaagaagagagaggagugccuggacgcccuggagagcaucaugaccaccaagagcgugagcuucagaagacugagccaccugagaaagcuggugcccggcuucggcaaggccuacaccaucuucaacaagacccugauggaggccgacgcccacuacaagagcgugagaaccuggaacgagaucauccccagcaagggcugccugagagugggcggcagaugccacccccacgugaacggcguguucuucaacggcaucauccugggccccgacggccacgugcugauccccgagaugcagagcagccugcugcagcagcacauggagcugcuggagagcagcgugaucccccugaugcacccccuggccgaccccagcaccguguucaaggacgacgacgaggccgaggacuucguggaggugcaccugcccgacgugcacaagcaggugagcggcguggaccugggccugcccagcuggggcaaguacgugcugaugagcgccggcgugcugaccgcccugaugcugaugaucuuccugaugaccugcugcagaagagccagcagaguggagagcgcccagcacagccugggcgagagaggcagaaaggugagcgugaccagccagagcggcagagugaucagcagcugggagagcuacaagagcggcggcgagaccaagcuguga

SEQ ID NO: 190767 - RNA, 1575 nt, Artificial Sequence
  derived and/or modified CDS sequence (opt4) from glycoprotein__RABV__AB563998.1
augaucccccaggcccugcuguucgugccccugcugguguucagccugugcuucggcaaguuccccaucuacaccauccccgacaagcugggccccuggagccccaucgacauccaccaccugagcugccccaacaaccuggugguggaggacgagggcugcaccaaccugagcggcuucagcuacauggagcugaaggugggcuacaucagcgccaucaaggugaacggcuucaccugcaccggcguggugaccgaggccgagaccuacaccaacuucgugggcuacgugaccaccaccuucaagagaaagcacuucagacccacccccgacgccugcagagccgccuacaacuggaagauggccggcgaccccagauacgaggagagccugcacaagcccuaccccgacuaccacuggcugagaaccgugaagaccaccaaggagagccuggugaucaucagccccagcguggccgaccuggaccccuacgacaagagccugcacagcagaguguuccccaacggcaagugcagcggcaucaccgugagcagcaccuacugcagcaccaaccacgacuacaccaucuggaugcccgagaaccccagacugggcaccagcugcgacaucuucaccaacagcagaggcaagagagccagcaagggcagcaagaccugcggcuucguggacgagagaggccuguacaagagccugaagggcgccugcaagcugaagcugugcggcgugcugggccugagacugauggacggcaccugggccgccauccagaccagcgacgagaccaaguggugcccccccgaccagcuggugaaccugcacgacuucagaagcgacgagaucgagcaccuggugguggaggagcuggugaagaagagagaggagugccuggacgcccuggagagcaucaugaccaccaagagcgugagcuucagaagacugagccaccugagaaagcuggugcccggcuucggcaaggccuacaccaucuucaacaagacccugauggaggccgacgcccacuacaagagcgugagaaccuggaacgagaucauccccagcaagggcugccugagagugggcggcagaugccacccccacgugaacggcguguucuucaacggcaucauccugggccccgacggccacgugcugauccccgagaugcagagcagccugcugcagcagcacauggagcugcuggagagcagcgugaucccccugaugcacccccuggccgaccccagcaccguguucaaggacgacgacgaggccgaggacuucguggaggugcaccugcccgacgugcacaagcaggugagcggcguggaccugggccugcccagcuggggcaaguacgugcugaugagcgccggcgugcugaccgcccugaugcugaugaucuuccugaugaccugcugcagaagagccaacagagccgagagcgcccagcacagccugggcgagagaggcagaaaggugagcgugaccagccagagcggcagagugaucagcagcugggagagcuacaagagcggcggcgagaccaagcuguga

SEQ ID NO: 190768 - RNA, 1575 nt, Artificial Sequence
  derived and/or modified CDS sequence (opt4) from glycoprotein__RABV__AB563999.1
augaucccccaggcccugcuguucgugccccugcuggugagcagccugugcuucggcaaguuccccaucuacaccauccccgacaagcugggccccuggagccccaucgacauccaccaccugagcugccccaacaaccuggugguggaggacgagggcugcaccaaccugagcggcuucagcuacauggagcugaaggugggcuacaucagcgccaucaaggugaacggcuucaccugcaccggcguggugaccgaggccgagaccuacaccaacuucgugggcuacgugaccaccaccuucaagagaaagcacuucagacccacccccgacgccugcagagccgccuacaacuggaagauggccggcgaccccagauacgaggagagccugcacaaccccuaccccgacuaccacuggcugagaaccgugaagaccaccaaggagagccuggugaucaucagccccagcguggccgaccuggaccccuacgacaagagccugcacagcagaguguuccccagcggcaagugcagcggcaucaccgugagcagcaccuacugcagcaccaaccacgacuacaccaucuggaugcccgagaaccccagacugggcaccagcugcgacaucuucaccaacagcagaggcaagagagccagcaagggcagcaagaccugcggcuucguggacgagagaggccuguacaagagccugaagggcgccugcaagcugaagcugugcggcgugcugggccugagacugauggacggcaccugggccgccauccagaccagcgacgagaccaaguggugcccccccgaccagcuggugaaccugcacgacuucagaagcgacgagaucgagcaccuggugguggaggagcuggugaagaagagagaggagugccuggacgcccuggagagcaucaugaccaccaagagcgugagcuucagaagacugagccaccugagaaagcuggugcccggcuucggcaaggccuacaccaucuucaacaagacccugauggaggccgacgcccacuacaagagcgugagaaccuggaacgagaucauccccagcaagggcugccugagagugggcggcagaugccacccccacgugaacggcguguucuucaacggcaucauccugggccccgacggccacgugcugauccccgagaugcagagcagccugcugcagcagcacauggagcugcuggagagcagcgugaucccccugaugcacccccuggccgaccccagcaccguguucaaggacgacgacgaggccgaggacuucguggaggugcaccugcccgacgugcacaagcaggugagcggcguggaccugggccugcccagcuggggcaaguacgugcugaccagcgccggcgugcugaccgcccugaugcugaugaucuuccugaugaccugcugcagaagagccaacagagccgagagcgcccagcacagccugggcgagagaggcagaaaggugagcgugaccagccagagcagaagagugaucagcagcugggagagcuacaagagcggcggcgagaccaagcuguga

SEQ ID NO: 190769 - RNA, 1575 nt, Artificial Sequence
  derived and/or modified CDS sequence (opt4) from glycoprotein__RABV__AB564001.1
augaucccccaggcccugauguucgugccccugcugguguucagccugugcuucggcaaguuccccaucuacaccauccccgacaagcugggccccuggagccccaucgacauccaccaccugagcugccccaacaaccuggugguggaggacgagggcugcaccaaccugagcggcuucagcuacauggagcugaaggugggcuacaucagcgccaucaaggugaacggcuucaccugcaccggcguggugaccgaggccgagaccuacaccaacuucgugggcuacgugaccaccaccuucaagagaaagcacuucagacccaugcccgacgccugcagagccgccuacaacuggaagauggccggcgaccccagauacgaggagagccugcacaaccccuaccccgacuaccacuggcugagaaccgugaagaccaccaaggagagccuggugaucaucagccccagcguggccgaccuggaccccuacgacaagagccugcacagcagaguguuccccagcggcaagugcagcggcaugaccgugagcagcaccuacugcagcaccaaccacgacuacaccaucuggaugcccgagaaccccagacugggcaccagcugcgacaucuucaccaacagcagaggcaagagagccagcaagggcagcaagaccugcggcuucguggacgagagaggccuguacaagagccugaagggcgccugcaagcugaagcugugcggcgugcugggccugagacugauggacggcaccugggccgccauccagaccagcgacgagaccaaguggugcccccccgaccagcuggugaaccugcacgacuucagacuggacgagaucgagcaccuggugguggaggagcuggugaagaagagagaggagugccuggacgcccuggagagcaucaugaccaccaagagcgugagcuucagaagacugagccaccugagaaagcuggugcccggcuucggcaaggccuacaccaucuucaacaagacccugauggaggccgacgcccacuacaagagcgugagaaccuggaacgagaucauccccagcaagggcugccugagagugggcggcagaugccacccccacgugaacggcguguucuucaacggcaucauccugggccccgacggccacgugcugauccccgagaugcagagcagccugcugcagcagcacauggagcugcuggagagcagcgugaucccccugaugcacccccuggccgaccccagcaccguguucaagggcgacgacgaggccgaggacuucguggaggugcaccugcccgacgugcacaagcaggugagcggcguggaccugggccugcccagcuggggcaaguacgugcugaugagcgccggcgugcugaccgcccugaugcugaugaucuuccugaugaccugcugcaagagagccaacagagccgagagcgcccaccacagccugggcgagagaggcagaaaggugagcgugaccagccagagcggcagagugaucagcagcugggagagcuacaagagcggcggcgagaccaagcuguga

SEQ ID NO: 190770 - RNA, 1575 nt, Artificial Sequence
  derived and/or modified CDS sequence (opt4) from glycoprotein__RABV__AB564002.1
augauccccagagcccugauguucgugccccugcugguguucagccugugcuucggcaaguuccccaucuacaccauccccgacaagcugggccccuggagccccaucgacauccaccaccugagcugccccaacaaccuggugguggaggacgagggcugcaccaaccugagcggcuucagcuacauggagcugaaggugggcuacaucagcgccaucaaggugaacggcuucaccugcaccggcguggugaccgaggccgagaccuacaccaacuucgugggcuacgugaccaccaccuucaagagaaagcacuucagacccaugcccgacgccugcagagccgccuacaacuggaagauggccggcgaccccagauacgaggagagccugcacaaccccuaccccgacuaccacuggcugagaaccgugaagaccaccaaggagagccuggugaucaucagccccagcguggccgaccuggaccccuacgacaagagccugcacagcagaguguuccccagcggcaagugcagcggcaugaccgugagcagcaccuacugcagcaccaaccacgacuacaccaucuggaugcccgagaaccccagacugggcaccagcugcgacaucuucaccaacagcagaggcaagagagccagcaagggcagcaagaccugcggcuucguggacgagagaggccuguacaagagccugaagggcgccugcaagcugaagcugugcggcgugcugggccugagacugauggacggcaccugggccgccauccagaccagcgacgagaccaaguggugcccccccgaccagcuggugaaccugcacgacuucagaagcgacgagaucgagcaccuggugguggaggagcuggugaagaagagagaggagugccuggacgcccuggagagcaucaugaccaccaagagcgugagcuucagaagacugagccaccugagaaagcuggugcccggcuucggcaaggccuacaccaucuucaacaagacccugauggaggccgacgcccacuacaagagcgugagaaccuggaacgagaucauccccagcaagggcugccugagagugggcggcagaugccacccccacgugaacggcguguucuucaacggcaucauccugggccccgacggccacgugcugauccccgagaugcagagcagccugcugcagcagcacauggagcugcuggagagcagcgugaucccccugaugcacccccuggccgaccccagcaccguguucaagggcgacgacgaggccgaggacuucguggaggugcaccugcccgacgugcacaagcaggugagcggcguggaccugggccugcccagcuggggcaaguacgugcugaugagcgccggcgugcugaccgcccugaugcugaugaucuuccugaugaccugcugcaagagagccaacagagccgagagcgcccaccacaaccugggcgagagaggcagaaaggugagcgugaccagccagagcggcagagugaucagcagcugggagagcuacaagagcggcggcgagaccaagcuguga

SEQ ID NO: 190771 - RNA, 1575 nt, Artificial Sequence
  derived and/or modified CDS sequence (opt4) from glycoprotein__RABV__AB564004.1
augaucccccaggcccugauguucgugccccugcugguguucagccugugccugggcaaguuccccaucuacaccauccccgacaagcugggccccuggagccccaucgacauccaccaccugagcugccccaacaaccuggugguggaggacgagggcugcaccaaccugagcggcuucagcuacauggagcugaaggugggcuacaucagcgccaucaaggugaacggcuucaccugcaccggcguggugaccgaggccgagaccuacaccaacuucgugggcuacgugaccaccaccuucaagagaaagcacuucagacccaugcccgacgccugcagagccgccuacaacuggaagauggccggcgaccccagauacgaggagagccugcacaaccccuaccccgacuaccacuggcugagaaccgugaagaccaccaaggagagccuggugaucaucagccccagcguggccgaccuggaccccuacgacaagagccugcacagcagaguguuccccggcggcaagugcagcggcaugaccgugagcagcaccuacugcagcaccaaccacgacuacaccaucuggaugcccgagaaccccagacugggcaccagcugcgacaucuucaccaacagcagaggcaagagagccagcaagggcagcaagaccugcggcuucguggacgagagaggccuguacaagagccugaagggcgccugcaagcugaagcugugcggcgugcugggccugagacugauggacggcaccugggccgccauccagaccagcgacgagaccaaguggugcccccccgaccagcuggugaaccugcacgacuucagaagcgacgagaucgagcaccuggugguggaggagcuggugaagaagagagaggagugccuggacgcccuggagagcaucaugaccaccaagagcgugagcuucagaagacugagccaccugagaaagcuggugcccggcuucggcaaggccuacaccaucuucaacaagacccugauggaggccgacgcccacuacaagagcgugagaaccuggaacgagaucauccccagcaagggcugccugagagugggcggcagaugccacccccacgugaacggcguguucuucaacggcaucauccugggccccgacggccacgugcugauccccgagaugcagagcagccugcugcagcagcacauggagcugcuggagagcagcgugaucccccugaugcacccccuggccgaccccagcaccguguucaagggcgacgacgaggccgaggacuucguggaggugcaccugcccgacgugcacaagcaggugagcggcguggaccugggccugcccagcuggggcaaguacgugcugaugagcgccggcgugcugaccgcccugaugcugaugaucuuccugaugaccugcugcaagagagccaacagagccgagagcgcccaccacagccugggcgagagaggcagaaaggugagcgugaccagccagagcggcagagugaucagcagcugggagagcuacaagagcggcggcgagaccaagcuguga

SEQ ID NO: 190772 - RNA, 1575 nt, Artificial Sequence; identical to SEQ ID NO: 190699
  derived and/or modified CDS sequence (opt4) from glycoprotein__RABV__AB564005.1

SEQ ID NO: 190773 - RNA, 1575 nt, Artificial Sequence; identical to SEQ ID NO: 190699
  derived and/or modified CDS sequence (opt4) from glycoprotein__RABV__AB564006.1

SEQ ID NO: 190774 - RNA, 1575 nt, Artificial Sequence
  derived and/or modified CDS sequence (opt4) from glycoprotein__RABV__AB564007.1
augaucccccaggcccugauguucgugccccugcugguguucagccugugcuucggcaaguuccccaucuacaccauccccgacaagcugggccccuggagccccaucgacauccaccaccugagcugccccaacaaccuggugguggaggacgagggcugcaccaaccugagcggcuucagcuacauggagcugaaggugggcuacaucagcgccaucaaggugaacggcuucaccugcaccggcguggugaccgaggccgagaccuacaccaacuucgugggcuacgugaccaccaccuucaagagaaagcacuucagacccaugcccgacgccugcagagccgccuacaacuggaagauggccggcgaccccagauacgaggagagccugcacaaccccuaccccgacuaccacuggcugagaaccgugaagaccaccaaggagagccuggugaucaucagccccagcguggccgaccuggaccccuacgacaagagccugcacagcagaguguuccccggcggcaagugcagcggcaugaccgugagcagcaccuacugcagcaccaaccacgacuacaccaucuggaugcccgagaaccccagacugggcaccagcugcgacaucuucaccaacagcagaggcaagagagccagcaagggcagcaagaccugcggcuucguggacgagagaggccuguacaagagccugaagggcgccugcaagcugaagcugugcggcgugcugggccugagacugauggacggcaccugggccgccauccagaccagcgacgagaccaaguggugcccccccgaccagcuggugaaccugcacgacuucagaagcgacgagaucgagcaccuggugguggaggagcuggugaagaagagagaggagugccuggacgcccuggagagcaucaugaccaccaagagcgugagcuucagaagacugagccaccugagaaagcuggugcccggcuucggcaaggccuacaccaucuucaacaagacccugauggaggccgacgcccacuacaagagcgugagaaccuggaacgagaucauccccagcaagggcugccugagagugggcggcagaugccacccccacgugaacggcguguucuucaacggcaucauccugggccccgacggccacgugcugauccccgagaugcagagcagccugcugcagcagcacauggagcugcuggagagcagcgugaucccccugaugcacccccuggccgaccccagcaccguguucaagggcgacgacgaggccgaggacuucguggaggugcaccugcccgacgugcacaagcaggugagcggcguggaccugggccugcccagcuggggcaaguacgugcugaugagcgccggcgugcugaccgcccugaugcugaugaucuuccugaugaccugcugcaagagagccaacagagccaagagcgcccaccacagccugggcgagagaggcagaaaggugagcgugaccagccagagcggcagagugaucagcagcugggagagcuacaagagcggcggcgagaccaagcuguga

SEQ ID NO: 190775 - RNA, 1575 nt, Artificial Sequence; identical to SEQ ID NO: 190661
  derived and/or modified CDS sequence (opt4) from glycoprotein__RABV__AB564008.1

SEQ ID NO: 190776 - RNA, 1575 nt, Artificial Sequence
  derived and/or modified CDS sequence (opt4) from glycoprotein__RABV__AB564009.1
augaacccccaggcccugauguucgugccccugcugguguucagccugugcuucggcaaguuccccaucuacaccauccccgacaagcugggccccuggagccccaucgacauccaccaccugagcugccccaacaaccuggugguggaggacgagggcugcaccaaccugagcggcuucagcuacauggagcugaaggugggcuacaucagcgccaucaaggugaacggcuucaccugcaccggcguggugaccgaggccgagaccuacaccaacuucgugggcuacgugaccaccaccuucaagagaaagcacuucagacccacccccgacgccugcagagccgccuacaacuggaagauggccggcgaccccagauacgaggagagccugcacaaccccuaccccgacuaccacuggcugagaaccgugaagaccaccaaggagagccuggugaucaucagccccagcguggccgaccuggaccccuacgacaagagccugcacagcagaguguuccccagcggcaagugcagcggcaucaccgugagcagcaccuacugcagcaccaaccacgacuacaccaucuggaugcccgagaaccccagacugggcaccagcugcgacaucuucaccaacagcagaggcaagagagccagcaagggcagcaagaccugcggcuucguggacgagagaggccuguacaagagccugaagggcgccugcaagcugaagcugugcggcgugcugggccugagacugauggacggcaccugggccgccauccagaccagcgacgagaccaaguggugcccccccgaccagcuggugaaccugcacgacuucagaagcgacgagaucgagcaccuggugguggaggagcuggugaagaagagagaggagugccuggacgcccuggagagcaucaugaccaccaagagcgugagcuucagaagacugagccaccugagaaagcuggugcccggcuucggcaaggccuacaccaucuucaacaagacccugauggaggccgacgcccacuacaagagcgugagaaccuggaacgagaucauccccagcaagggcugccugagagugggcggcagaugccacccccacgugaacggcguguucuucaacggcaucauccugggccccgacggccacgugcugauccccgagaugcagagcagccugcugcagcagcacguggagcugcuggagagcagcgugaucccccugaugcacccccuggccgaccccagcaccguguucaaggacgacgacgaggccgaggacuucguggaggugcaccugcccgacgugcacaagcaggugagcggcguggaccugggccugcccagcuggggcaaguacgugcugaugagcgccggcgugcugaccgcccugaugcugaugaucuuccugaugaccugcugcagaagagccaacagagccgagagcgcccagcacagccugggcgagagaggcagaaaggugagcaucaccagccagagcggcagagugaucagcagcugggagagcuacaagagcggcggcgagaccaagcuguga

SEQ ID NO: 190777 - RNA, 1575 nt, Artificial Sequence; identical to SEQ ID NO: 190661
  derived and/or modified CDS sequence (opt4) from glycoprotein__RABV__AB564010.1

SEQ ID NO: 190778 - RNA, 1575 nt, Artificial Sequence; identical to SEQ ID NO: 190661
  derived and/or modified CDS sequence (opt4) from glycoprotein__RABV__AB564011.1

SEQ ID NO: 190779 - RNA, 1575 nt, Artificial Sequence
  derived and/or modified CDS sequence (opt4) from glycoprotein__RABV__AB564012.1
augaacccccaggcccugauguucgugccccugcugguguucagccugugcuucggcaaguuccccaucuacaccauccccgacaagcugggccccuggagccccaucgacauccaccaccugagcugccccaacaaccuggugguggaggacgagggcugcaccaaccugagcggcuucagcuacauggagcugaaggugggcuacaucagcgccaucaaggugaacggcuucaccugcaccggcguggugaccgaggccgagaccuacaccaacuucgugggcuacgugaccaccaccuucaagagaaagcacuucagacccacccccgacgccugcagagccgccuacaacuggaagauggccggcgaccccagauacgaggagagccugcacaaccccuaccccgacuaccacuggcugagaaccgugaagaccaccaaggagagccuggugaucaucagccccagcguggccgaccuggaccccuacgacaagagccugcacagcagaguguuccccagcggcaagugcagcggcaucaccgugagcagcaccuacugcagcaccaaccacgacuacaccaucuggaugcccgagaaccccagacugggcaccagcugcgacaucuucaccaacagcagaggcaagagagccagcaagggcagcaagaccugcggcuucguggacgagagaggccuguacaagagccugaagggcgccugcaagcugaagcugugcggcgugcugggccugagacugauggacggcaccugggccgccauccagaccagcgacgagaccaaguggugcccccccgaccagcuggugaaccugcacgacuuccacagcgacgagaucgagcaccuggugguggaggagcuggugaagaagagagaggagugccuggacgcccuggagagcaucaugaccaccaagagcgugagcuucagaagacugagccaccugagaaagcuggugcccggcuucggcaaggccuacaccaucuucaacaagacccugauggaggccgacgcccacuacaagagcgugagaaccuggaacgagaucauccccagcaagggcugccugagagugggcggcagaugccacccccacgugaacggcguguucuucaacggcaucauccugggccccgacggccacgugcugauccccgagaugcagagcagccugcugcagcagcacauggagcugcuggagagcagcgugaucccccugaugcacccccuggccgaccccagcaccguguucaaggacgacgacgaggccgaggacuucguggaggugcaccugcccgacgugcacaagcaggugagcggcguggaccugggccugcccagcuggggcaaguacgugcugaugagcgccggcgugcugaccgcccugaugcugaugaucuuccugaugaccugcugcagaagagccaacagagccgagagcgcccagcacagccugggcgagagaggcagaaaggugagcgugaccagccagagcggcagagugaucagcagcugggagagcuacaagagcggcggcgagaccaagcuguga

SEQ ID NO: 190780 - RNA, 1575 nt, Artificial Sequence
  derived and/or modified CDS sequence (opt4) from glycoprotein__RABV__AB564015.1
augaacccccaggcccugauguucgugccccugcugguguucagccugugcuucggcaaguuccccaucuacaccauccccgacaagcugggccccuggagccccaucgacauccaccaccugagcugccccaacaaccuggugguggaggacgagggcugcaccaaccugagcggcuucagcuacauggagcugaaggugggcuacaucagcgccaucaaggugaacggcuucaccugcaccggcguggugaccgaggccgagaccuacaccaacuucgugggcuacgugaccaccaccuucaagagaaagcacuucagacccacccccgacgccugcagagccgccuacaacuggaagauggccggcgaccccagauacgaggagagccugcacaaccccuaccccgacuaccacuggcugagaaccgugaagaccaccaaggagagccuggugaucaucagccccagcguggccgaccuggaccccuacgacaagagccugcacagcagaguguuccccagcggcaagugcagcggcaucaccgugagcagcaccuacugcagcaccaaccacgacuacaccaucuggaugcccgagaaccccagacugggcaccagcugcgacaucuucaccaacagcagaggcaagagagccagcaagggcagcaagaccugcggcuucguggacgagagaggccuguacaagagccugaagggcgccugcaagcugaagcugugcggcgugcugggccugagacugauggacggcaccugggccgccauccagaccagcgacgagaccaaguggugcccccccgaccagcuggugaaccugcacgacuucagaagcgacgagaucgagcaccuggugguggaggagcuggugaagaagagagaggagugccuggacgcccuggagagcaucaugaccaccaagagcgugagcuucagaagacugagccaccugagaaagcuggugcccggcuucggcaaggccuacaccaucuucaacaagacccugauggaggccgacgcccacuacaagagcgugagaaccuggaacgagaucauccccagcaagggcugccugagagugggcggcagaugccacccccacgugaacggcguguucuucaacggcaucauccugggccccgacggccacgugcugauccccgagagacagagcagccugcugcagcagcacauggagcugcuggagagcagcgugaucccccugaugcacccccuggccgaccccagcaccguguucaaggacgacgacgaggccgaggacuucguggaggugcaccugcccgacgugcacaagcaggugagcggcguggaccugggccugcccagcuggggcaaguacgugcugaugagcgccggcgugcugaccgcccugaugcugaugaucuuccugaugaccugcugcagaagagccaacagagccgagagcgcccagcacagccugggcgagagaggcagaaaggugagcgugaccagccagagcggcagagugaucagcagcugggagagcuacaagagcggcggcgagaccaagcuguga

SEQ ID NO: 190781 - RNA, 1575 nt, Artificial Sequence
  derived and/or modified CDS sequence (opt4) from glycoprotein__RABV__AB564016.1
augaacccccaggcccugauguucgugccccugcugggcuucagccugugcuucggcaaguuccccaucuacaccauccccgacaagcugggccccuggagccccaucgacauccaccaccugagcugccccaacaaccuggugguggaggacgagggcugcaccaaccugagcggcuucagcuacauggagcugaaggugggcuacaucagcgccaucaaggugaacggcuucaccugcaccggcguggugaccgaggccgagaccuacaccaacuucgugggcuacgugaccaccaccuucaagagaaagcacuucagacccacccccgacgccugcagagccgccuacaacuggaagauggccggcgaccccagauacgaggagagccugcacaaccccuaccccgacuaccacuggcugagaaccgugaagaccaccaaggagagccuggugaucaucagccccagcguggccgaccuggaccccuacgacaagagccugcacagcagaguguuccccagcggcaagugcagcggcaucaccgugagcagcaccuacugcagcaccaaccacgacuacaccaucuggaugcccgagaaccccagacugggcaccagcugcgacaucuucaccaacagcagaggcaagagagccagcaagggcagcaagaccugcggcuucguggacgagagaggccuguacaagagccugaagggcgccugcaagcugaagcugugcggcgugcugggccugagacugauggacggcaccugggccgccauccagaccagcgacgagaccaaguggugcccccccgaccagcuggugaaccugcacgacuucagaagcgacgagaucgagcaccuggugguggaggagcuggugaagaagagagaggagugccuggacgcccuggagagcaucaugaccaccaagagcgugagcuucagaagacugagccaccugagaaagcuggugcccggcuucggcaaggccuacaccaucuucaacaagacccugauggaggccgacgcccacuacaagagcgugagaaccuggaacgagaucauccccagcaagggcugccugagagugggcggcagaugccacccccacgugaacggcguguucuucaacggcaucauccugggccccgacggccacgugcugauccccgagaugcagagcagccugcugcagcagcacauggagcugcuggagagcagcgugaucccccugaugcacccccuggccgaccccagcaccguguucaaggacgacgacgaggccgaggacuucguggaggugcaccugcccgacgugcacaagcaggugagcggcguggaccugggccugcccagcuggggcaaguacgugcugaugagcgccggcgugcugaccgcccugaugcugaugaucuuccugaugaccugcugcagaagagccaacagagccgagagcgcccagcacagccugggcgagagaggcagaaaggugagcgugaccagccagagcggcagagugaucagcagcugggagagcuacaagagcggcggcgagaccaagcuguga

SEQ ID NO: 190782 - RNA, 1575 nt, Artificial Sequence
  derived and/or modified CDS sequence (opt4) from glycoprotein__RABV__AB564017.1
augaacccccaggcccugauguucgugccccugcugguguucagccugugcuucggcaaguuccccaucuacaccauccccgacaagcugggccccuggagccccaucgacauccaccaccugagcugccccaacaaccuggugguggaggacgagggcugcaccaaccugagcggcuucagcuacauggagcugaaggugggcuacaucagcgccaucaaggugaacggcuucaccugcaccggcguggugaccgaggccgagaccuacaccaacuucgugggcuacgugaccaccaccuucaagagaaagcacuucagacccacccccgacgccugcagagccgccuacaacuggaagauggccggcgaccccagauacgaggagagccugcacaaccccuaccccgacuaccacuggcugagaaccgugaagaccaccaaggagagccuggugaucaucagccccagcguggccgaccuggaccccuacgacaagagccugcacagcagaguguuccccagcggcaagugcagcggcaucaccgugagcagcaccuacugcagcaccaaccacgacuacaccaucuggaugcccgagaaccccagacugggcaccagcugcgacaucuucaccaacagcagaggcaagagagccagcgagggcagcaagaccugcggcuucguggacgagagaggccuguacaagagccugaagggcgccugcaagcugaagcugugcggcgugcugggccugagacugauggacggcaccugggccgccauccagaccagcgacgagaccaaguggugcccccccgaccagcuggugaaccugcacgacuucagaagcgacgagaucgagcaccuggugguggaggagcuggugaagaagagagaggagugccuggacgcccuggagagcaucaugaccaccaagagcgugagcuucagaagacugagccaccugagaaagcuggugcccggcuucggcaaggccuacaccaucuucaacaagacccugauggaggccgacgcccacuacaagagcgugagaaccuggaacgagaucauccccagcaagggcugccugagagugggcggcagaugccacccccacgugaacggcguguucuucaacggcaucauccugggccccgacggccacgugcugauccccgagaugcagagcagccugcugcagcagcacauggagcugcuggagagcagcgugaucccccugaugcacccccuggccgaccccagcaccguguucaaggacgacgacgaggccgaggacuucguggaggugcaccugcccgacgugcacaagcaggugagcggcguggaccugggccugcccagcuggggcaaguacgugcugaugagcgccggcgugcugaccgcccugaugcugaugaucuuccugaugaccugcugcagaagagccaacagagccgagagcgcccagcacagccugggcgagagaggcagaaaggugagcgugaccagccagagcggcagagugaucagcagcugggagagcuacaagagcggcggcgagaccaagcuguga

SEQ ID NO: 190783 - RNA, 1575 nt, Artificial Sequence
  derived and/or modified CDS sequence (opt4) from glycoprotein__RABV__AB569299.1
auggugccccaggcccugcuguucgugccccugcugguguucagccugugcuucggcaaguuccccaucuacaccauccccgacaagcugggccccuggagccccaucgacauccaccaccugagcugccccaacaaccuggugguggaggacgagggcugcaccaaccugagcggcuucagcuacauggagcugaaggugggcuacaucagcgccaucaaggugaacggcuucaccugcaccggcguggugaccgaggccgagaccuacaccaacuucgugggcuacgugaccaccaccuucagaagaaagcacuucagacccacccccgacgccugcagagccgccuacaacuggaagauggccggcgaccccagauacgaggagagccugcacaaccccuaccccgacuaccacuggcugagaaccgugaagaccaccaaggagagccuggugaucaucagccccagcguggccgaccuggaccccuacgacaagagccugcacagcagaguguuccccggcggcaagugcagcggcaucaccgugagcagcaccuacugcagcaccaaccacgacuacaccaucuggaugcccgagaaccccagacugggcaccagcugcgacaucuucgugaacagcagaggcaagagagccagcaagggcggcaagaccugcggcuucguggacgagagaggccuguacaagagccugaagggcgccugcaagcugaagcugugcggcgugcccggccugagacugauggacggcaccuggguggccauccagaccagcgacgagaccaaguggugcccccccgaccagcuggugaaccugcacgacuucagaagcgacgagaucgagcaccuggugguggaggagcuggugaagaagagagaggagugccuggacgcccuggagagcaucaugaccaccaagagcgugagcuucagaagacugagccaccugagaaagcuggugcccggcuucggcaaggccuacaccaucuucaacaagacccugauggaggccgacgcccacuacaagagcgugagaaccuggaacgagaucauccccagcaagggcugccugagagugggcggcagaugccacccccacgugaacggcguguucuucaacggcaucauccugggccccgacggccacgugcugauccccgagaugcagagcagccugcugcagcagcacauggagcugcuggagagcagcgugaucccccugaugcacccccuggccgaccccagcaccguguucaaggacggcgacgaggccgaggacuucguggaggugcaccugcccgacgugcacaagcugaucagcggcguggaccugggccugcccagcuggggcaaguacgugcugaugagcgccggcauccugaucacccugaugcugaugaucuuccugaugaccugcugcagaagagugaaccaggccggcagcaagcagcacggccuggagggcgccggcagaaaggugagcgugaccagccagaacggcagagugaucagcagcugggagagcuacaagaacggcggcgagaccagacuguga

SEQ ID NO: 190784 - RNA, 1575 nt, Artificial Sequence
  derived and/or modified CDS sequence (opt4) from glycoprotein__RABV__AB608731.1
augaucccccaggcccugcuguucgugccccugcugauccccagccugugcaucggcgaguuccccaucuacaccauccccgacaagcugggccccuggacccccaucgacauccaccaccugagcugccccaacaaccugguggccgagaacgacggcugcaccagccugagcggcuucagcuacauggagcugaaggugggcuacaucagcgccaucaaggugaacggcuucaccugcaccggcguggugaccgaggccgagaccuacaccaacuucgugggcuacgugaccaccaccuucaagagaaagcacuucagacccaugcccgacgccugcagagccgcccacgacuggaagauggccggcgaccccagauacgaggacagccugcagaaccccuaccccgacuaccacuggcugagaaccgugaagaccaccaaggagagccuggugaucaucagccccagcguggccgaccuggaccccuacgacaagagccugcacagcagaguguuccccagcggcaagugccugggcaucaccgugagcagcaccuacugcagcaccaaccacgacuacaccaucuggaugcccguggagcccagacugggcaccagcugcgacaucuucaccaacagcagaggcaagaaggccagcaagggcggcagagugugcggcuucguggacgagagaggccuguacaagagccugaagggcgccugcaagcugaagcugugcggcgugcccggcaucagacugauggacggcaccugggugagcauccagaccagcgaggacaucaaguggugcccccccgacagacuggugaaccugcacgacuuccacagcgacgagcuggagcaccuggugguggaggagcugaucaagagaagagagaacugccuggacgcccuggagagcaucgugaccaccaagagcgugagcuucagaagacugagccaccugagaaagcuggugcccggcuucggcaaggccuacaccaucuucaacaagacccugauggaggccgacgcccacuacaagagcgugaagaccuggaacgaggugauccccagcaagggcugccuggaggugggcggcaagugccacccccccgugaacggcguguucuucaacggcaucauccugggccccgacggcaacgugcugauccccgagaugcagagcagccugcugcagcagcacauggagcugcuggagagcagcgugaucccccugaugcacccccuggccgaccccagcaccguguucaaggagggcgacgaggccgaggacuucguggaggugcaccugcccgacgugcacaagcaggugagcgacguggaccugggccugcccagcuggggcaaguaccugcugaugagcgccggcgcccuggccauccugauccuggccaucgugcugaucaucugcugcagaagagugaacaagaccggcagcacccagagaggccacagagagagcagaggcaagaugagcguggccccccagaacggcaagaucaucagcagcugggagcuguacaagagcgagagcgagaccggccuguga

SEQ ID NO: 190785 - RNA, 1575 nt, Artificial Sequence
  derived and/or modified CDS sequence (opt4) from glycoprotein__RABV__AB635373.1
auggugccccaggcccugcuguucgugccccugcugguguucagccugugcuucggcaaguuccccaucuacaccauccccgacaagcugggccccuggagccccaucgacauccaccaccugagcugccccaacaaccuggugguggaggacgagggcugcaccaaccugagcggcuucagcuacauggagcugaaggugggcuacaucagcgccaucaaggugaacggcuucaccugcaccggcguggugaccgaggccgagaccuacaccaacuucgugggcuacgugaccaccaccuucagaagaaagcacuucagacccacccccgacgccugcagagccgccuacaacuggaagauggccggcgaccccagauacgaggagagccugcacaaccccuaccccgacuaccacuggcugagaaccgugaagaccaccaaggagagccuggugaucaucagccccagcguggccgaccuggaccccuacgacaagagccugcacagcagaguguuccccggcggcaagugcagcggcaucaccgugagcagcaccuacugcagcaccaaccacgacuacaccaucuggaugcccgagaaccccagacugggcaccagcugcgacaucuucaucaacagcagaggcaagagagccagcaagggcggcaagaccugcggcuucguggacgagagaggccuguacaagagccugaagggcgccugcaagcugaagcugugcggcgugcccggccugagacugauggacggcaccuggguggccauccagaccagcgacgagaccaaguggugcccccccgaccagcuggugaaccugcacgacuuccacagcgacgagaucgagcaccuggugguggaggagcuggugaagaagagagaggagugccuggacgcccuggagagcaucaugaccaccaagagcgugagcuucagaagacugagccaccugagaaagcuggugcccggcuucggcaaggccuacaccaucuucaacaagacccugauggaggccgacgcccacuacaagagcgugagaaccuggaacgagaucauccccagcaagggcugccugagagugggcggcagaugccacccccacgugaacggcguguucuucaacggcaucauccugggccccgacggccacgugcugauccccgagaugcagagcagccugcugcagcagcacauggagcugcuggagagcagcgugaucccccugaugcacccccuggccgaccccagcaccguguucaaggacggcgacgaggccgaggacuucguggaggugcaccugcccgacgugcacaagcugaucagcggcguggaccugggccugcccagcuggggcaaguacgugcugaugagcgccggcauccugaccacccugaugcugaugaucuuccugaugaucugcugcagaagagugaaccagaccggcagcaagcagcacggccugggcggcgccggcagaaaggugagcgugaccagccagaacggcagagugaucagcagcugggagagcuacaagagcggcggcgagaccagacuguga

SEQ ID NO: 190786 - RNA, 1575 nt, Artificial Sequence
  derived and/or modified CDS sequence (opt4) from glycoprotein__RABV__AB645847.1
auggugccccaggcccugcugguggugccccugcugggcuucagccugugcuucggcaaguuccccaucuacaccauccccgacaagcugggccccuggagccccaucgacauccaccaccugagcugccccaacaaccuggugguggaggacgagggcugcaccaaccugagcggcuucagcuacauggagcugaaggugggcuacaucagcgccaucaaggugaacggcuucaccugcaccggcguggugaccgaggccgagaccuacaccaacuucgugggcuacgugaccaccaccuucaagagaaagcacuucagacccacccccgacgagugcagagccgccuacaacuggaagauggccggcgaccccagauacgaggagagccugcacaaccccuaccccgacuaccacuggcugagaaccgugaagaccaccaaggagagccuggugaucaucagccccagcguggccgaccuggaccccuacgacaagagccugcacagcagaguguuccccagcggcaagugcagcggcaucaccgugagcagcaccuacugcagcaccaaccacgacuacaccaucuggaugcccgagaaccccagacugggcaccagcugcgacaucuucaccaacagcagaggcaagagagccagcaagggcagcaagaccugcggcuucguggacgagagaggccuguacaagagccugaagggcgccugcaagcugaagcugugcggcgugcugggccugaagcugauggacggcaccuggguggccaugcagaccagcgacgagaccaaguggugcccccccgaccagcuggugaaccugcacgacuucagaagcgacgagaucgagcaccuggugguggaggaccuggugaagaagagagaggagugccuggacgcccuggagagcaucaugaccaccaagagcgugagcuucagaagacugagccaccugagaaagcuggugcccggcuucggcaaggccuacaccaucuucaacaagacccugauggaggccgacgcccacuacaagagcgugagaaccuggaacgaggugauccccagcaagggcugccugaaggugggcggcagaugccacccccacgugaacggcguguucuucaacggcgugauccugggccccgacggccacgugcugauccccgagaugcagagcagccugcugagacagcacauggagcugcuggagagcagcgugaucccccugaugcacccccuggccgaccccagcaccguguucaaggacggcgacgaggccgaggacuucguggaggugcaccugcccgacgugcacaagcaggugagcggcguggaccugggccugcccaacuggggcaaguacgugagccugagcgccggcgcccugaucgcccugaugcugaugaucuuccugaugaccugcugcagaaaggugaacagacccgagcccacccagagaagccuggagggcaagggcagaaaggugagcgugaccagccagagcggcaaggugaucagcagcugggagagcuacaagagcggcggcgagaccagccuguga

SEQ ID NO: 190787 - RNA, 1575 nt, Artificial Sequence
  derived and/or modified CDS sequence (opt4) from glycoprotein__RABV__AB683584.1
augaucccccaggcccugcuguucgugccccugcugguguucagccugugcuucggcaaguuccccaucuacaccauccccgacaagcugggccccuggagccccaucgacauccaccaccugagcugccccaacaaccuggugguggaggacgagggcugcaccaaccugagcggcuucagcuacauggagcugaaggugggcuacaucagcgccaucaaggugaacggcuucaccugcaccggcguggugaccgaggccgagaccuacaccaacuucgugggcuacgugaccaccaccuucaagagaaagcacuucagacccacccccgacgccugcagagccgccuacaacuggaagauggccggcgaccccagauacgaggagagccugcacaaccccuaccccgacuaccacuggcugagaaccgugaagaccaccaaggagagccuggugaucaucagccccagcguggccgaccuggaccccuacgacaagagccugcacagcagaguguuccccagcggcaagugcagcggcaucaccgugagcagcaccuacugcagcaccaaccacgacuacaccaucuggaugcccgagaaccccagacugggcaccagcugcgacaucuucaccaacagcagaggcaagagagccagcaagggcagcaagaccugcggcuucguggacgagagaggccuguacaagagccugaagggcgccugcaagcugaagcugugcggcgugcugggccugagacugauggacggcaccugggccgccauccagaccagcgacgagaccaaguggugcccccccgaccagcuggugaaccugcacgacuucagaagcgacgagaucgagcaccuggugguggaggagcuggugaagaagagagaggagugccuggacgcccuggagagcaucaugaccaccaagagcgugagcuucagaagacugagccaccugagaaagcuggugcccggcuucggcaaggccuacaccaucuucaacaagacccugauggaggccgacgcccacuacaagagcgugagaaccuggaacgagaucauccccagcaagggcugccugagagugggcggcagaugccacccccacgugaacggcguguucuucaacggcaucauccugggccccgacggccacgugcugauccccgagaugcagagcagccugcugcagcagcacauggagcugcuggagagcagcgugaucccccugaugcacccccuggccgaccccagcaccguguucaaggacgacgacgaggccgaggaguucguggaggugcaccugcccgacgugcacaagcaggugagcggcguggaccugggccugcccagcuggggcaaguacgugcugaugagcgccggcgugcugaccgcccugaugcugaugaucuuccugaugaccugcugcagaagagccaacagaguggagagcgcccagcacagccugggcgagagaggcagaaaggugagcgugaccagccagagcggcagagugaucagcagcugggagagcuacaagagcggcggcgagaccaagcuguga

SEQ ID NO: 190788 - RNA, 1575 nt, Artificial Sequence; identical to SEQ ID NO: 190685
  derived and/or modified CDS sequence (opt4) from glycoprotein__RABV__AB683585.1

SEQ ID NO: 190789 - RNA, 1575 nt, Artificial Sequence
  derived and/or modified CDS sequence (opt4) from glycoprotein__RABV__AB683586.1
augaucccccaggcccugcuguucgugccccugcugguguucagccugugcuucggcaaguuccccaucuacaccauccccgacaagcugggccccuggagccccaucgacauccaccaccugagcugccccaacaaccuggugguggaggacgagggcugcaccaaccugagcggcuucagcuacauggagcugaaggugggcuacaucagcgccaucaaggugaacggcuucaccugcaccggcguggugaccgaggccgagaccuacaccaacuucgugggcuacgugaccaccaccuucaagagaaagcacuucagacccacccccgacgccugcagagccgccuacaacuggaagauggccggcgaccccagauacgaggagagccugcacaaccccuaccccgacuaccacuggcugagaaccgugaagaccaccaaggagagccuggugaucaucagccccagcguggccgaccuggaccccuacgacaagagccugcacagcagaguguuccccagcggcaagugcagcggcaucaccgugagcagcaccuacugcagcaccaaccacgacuacaccaucuggaugcccgagaaccccagacugggcaccagcugcgacaucuucaccaacagcagaggcaagagagccagcaagggcagcaagaccugcggcuucguggacgagagaggccuguacaagagccugaagggcgccugcaagcugaagcugugcggcgugcugggccugagacugauggacggcaccugggccgccauccagaccagcgacgagaccaaguggugcccccccgaccagcuggugaaccugcacgacuucagaagcgacgagaucgagcaccuggugguggaggagcuggugaagaagagagaggagugccuggacgcccuggagagcaucaugaccaccaagagcgugagcuucagaagacugagccaccugagaaagcuggugcccggcuucggcaaggccuacaccauccugaacaagacccugauggaggccgacgcccacuacaagagcgugagaaccuggaacgagaucauccccagcaagggcugccugagagugggcggcagaugccacccccacgugaacggcguguucuucaacggcaucauccugggccccgacggccacgugcugauccccgagaugcagagcagccugcugcagcagcacauggagcugcuggagagcagcgugaucccccugaugcacccccuggccgaccccagcaccguguucaaggacgacgacgaggccgaggacuucguggaggugcaccugcccgacgugcacaagcaggugagcggcguggaccugggccugcccagcuggggcaaguacgugcugaugagcgccggcgugcugaccgcccugaugcugaugaucuuccugaugaccugcugcagaagagccaacagagccgagagcgcccagcacagccugggcgagggcgagagaaaggugagcgugaccagccagagcggcagagugaucagcagcugggagagcuacaagagcggcggcgagaccaagcuguga

SEQ ID NO: 190790 - RNA, 1575 nt, Artificial Sequence
  derived and/or modified CDS sequence (opt4) from glycoprotein__RABV__AB683587.1
augaucccccaggcccugcuguucgugccccugcugguguucagccugugcuucggcaaguuccccaucuacaccauccccgacaagcugggccccuggagccccaucgacauccaccaccugagcugccccaacaaccuggugguggaggacgagggcugcaccaaccugagcggcuucagcuacauggagcugaaggugggcuacaucagcgccaucaaggugaacggcuucaccugcaccggcguggugaccgaggccgagaccuacaccaacuucgugggcuacgugaccaccaccuucaagagaaagcacuucagacccacccccgacgccugcagagccgccuacaacuggaagauggccggcgaccccagauacgaggagagccugcacaaccccuaccccgacuaccacuggcugagaaccgugaagaccaccaaggagagccuggugaucaucagccccagcguggccgaccuggaccccuacgacaagagccugcacagcagaguguuccccagcggcaagugcagcggcaucaccgugagcagcaccuacugcagcaccaaccacgacuacaccaucuggaugcccgagaaccccagacugggcaccagcugcgacaucuucaccaacagcagaggcaagagagccagcaagggcagcaagaccugcggcuucguggacgagagaggccuguacaagagccugaagggcgccugcaagcugaagcugugcggcgugcugggccugagacugauggacggcaccugggccgccauccagaccagcgacgagaccaaguggugccccagcgaccagcuggugaaccugcacgacuucagaagcgacgagaucgagcaccuggugguggaggagcuggugaagaagagagaggagugccuggacgcccuggagagcaucaugaccaccaagagcgugagcuucagaagacugagccaccugagaaagcuggugcccggcuucggcaaggccuacaccaucuucaacaagacccugauggaggccgacgcccacuacaagagcgugagaaccuggaacgagaucauccccagcaagggcugccugagagugggcggcagaugccacccccacgugaacggcguguucuucaacggcaucauccugggccccgacggccacgugcugauccccgagaugcagagcagccugcugcagcagcacauggagcugcuggagagcagcgugaucccccugaugcacccccuggccgaccccagcaccguguucaaggacgacgacgaggccgaggacuucguggaggugcaccugcccgacgugcacaagcaggugagcggcguggaccugggccugcccagcuggggcaaguacgugcugaugagcgccggcgugcugaccgcccugaugcugaugaucuuccugaugaccugcugcagaagagccaacagagccgagagcgcccagcacagccugggcgagagaggcagaaaggugagcgugaccagccagagcggcagagugaucagcagcugggagagcuacaagagcggcggcgagaccaagcuguga

SEQ ID NO: 190791 - RNA, 1575 nt, Artificial Sequence
  derived and/or modified CDS sequence (opt4) from glycoprotein__RABV__AB683589.1
augaacccccaggcccugauguucgugccccugcugguguucagccugugcuucggcaaguuccccaucuacaccauccccgacaagcugggccccuggagccccaucgacauccaccaccugagcugccccaacaaccuggugguggaggacgagggcugcaccaaccugagcggcuucagcuacauggagcugaaggugggcuacaucagcgccaucaaggugaacggcuucaccugcaccggcguggugaccgaggccgagaccuacaccaacuucgugggcuacgugaccaccaccuucaagagaaagcacuucagacccaugcccgacgccugcagagccgccuacaacuggaagauggccggcgaccccagauacgaggagagccugcacaaccccuaccccgacuaccacuggcugagaaccgugaagaccaccaaggagagccuggugaucaucagccccagcguggccgaccuggaccccuacgacaagagccugcacagcagaguguuccccagcggcaagugcagcggcaucaccgugagcagcaccuacugcagcaccaaccacgacuacaccaucuggaugcccgagaaccccagacugggcaccagcugcgacaucuucaccaacagcagaggcaagagagccagcaagggcagcaagaccugcggcuucguggacgagagaggccuguacaagagccugaagggcgccugcaagcugaagcugugcggcgugcugggccugagacugauggacggcaccugggccgccauccagaccagcgacgagaccaaguggugcccccccgaccagcuggugaaccugcacgacuucagaagcgacgagaucgagcaccuggugguggaggagcuggugaagaagagagaggagugccuggacgcccuggagagcaucaugaccaccaagagcgugagcuucagaagacugagccaccugagaaagcuggugcccggcuucggcaaggccuacaccaucuucaacaagacccugauggaggccgacgcccacuacaagagcgugagaaccuggaacgagaucauccccagcaagggcugccugagagugggcggcagaugccacccccacgugaacggcguguucuucaacggcaucauccugggccccgacggccacgugcugauccccgagaugcagagcagccugcugcagcagcacauggagcugcuggagagcagcgugaucccccugaugcacccccuggccgaccccagcaccguguucaaggacgacgacgaggccgaggacuucguggaggugcaccugcccgacgugcacaagcaggugagcggcguggaccugggccugcccagcuggggcaaguacgugcugaugagcgccggcgugcugaccgcccugaugcugaugaucuuccugaugaccugcugcagaagagccaacagagccgagagcgcccagcacagccugggcgagagaggcagaaaggugagcgugaccagccagagcggcagagugaucagcagcugggagagcuacaagagcggcggcgagaccaagcuguga

SEQ ID NO: 190792 - RNA, 1575 nt, Artificial Sequence; identical to SEQ ID NO: 190661
  derived and/or modified CDS sequence (opt4) from glycoprotein__RABV__AB683591.1

SEQ ID NO: 190793 - RNA, 1575 nt, Artificial Sequence
  derived and/or modified CDS sequence (opt4) from glycoprotein__RABV__AB699208.1
auggugccccaggugcugcuguucgugccccugcugguguucagcaugugcuucggcaaguuccccaucuacaccauccccgacaagcugggccccuggagccccaucgacauccaccaccugagcugccccaacaaccuggugguggaggacgagggcugcaccaaccugagcggcuucagcuacauggagcugaaggugggcuacaucagcgccaucaaggugaacggcuucaccugcaccggcguggugaccgaggccgagaccuacaccaacuucgugggcuacgugaccaccaccuucaagagaaagcacuucagacccacccccgacgccugcagagccgccuacaacuggaagauggccggcgaccccagauacgaggagagccugcacaaccccuaccccgacuaccacuggcugagaaccgugaagaccaccaaggagagccuggugaucaucagccccagcguggccgaccuggaccccuacaacaagagccugcacagcagaguguuccccagcggcaagugcagcggcaucaccaucagcagcaccuacugcgccaccaaccacgacuacaccaucuggaugcccgagaaccccagacugggcaccagcugcgacaucuucaccaacagcagaggcaagagagccagcaagggcggcaagaccugcggcuucguggacgagagaggccuguacaagagccugaagggcgccugcaagcugaagcugugcggcgugcugggccugagacugauggacggcaccuggguggccaugcagaccagcgacgagaccaaguggugcccccccgaccagcuggugaaccugcacgacuucagaagcgacgagaucgagcaccuggugguggaggagcuggugaagaagagagaggagugccuggacgcccuggagagcaucaugaccaccaagagcgugagcuucagaagacugagccaccugagaaagcuggugcccggcuucggcaaggccuacaccaucuucaacaagacccugauggaggccgacgcccacuacaagagcaucagaaccuggaacgagaucauccccagcaagggcugccugagagugggcggcagaugccacccccacgugaacggcguguucuucaacggcaucauccugggccccgacggccacgugcugauccccgagaugcagagcagccugcugcagcagcacauggagcugcuggagagcagcgugaucccccugaugcacccccuggccgaccccagcaccguguucaaggacggcgacgaggccgaggacuucguggaggugcaccugcccgacgugcacaagcagaucagcggcguggaccugggccugcccagcuggggcaaguacgugcuggugagcgccggcgugcugguggugcugaugcugaccaucuucaucaugaccugcugcggcagagugagaagacccaagagcacccagcacagccugggcggcgccggcagaaaggugagcgugaccagccagagcggcaaggugaucagcagcugggagagcuacaagaacggcggcgagaccagacuguga

SEQ ID NO: 190794 - RNA, 1575 nt, Artificial Sequence
  derived and/or modified CDS sequence (opt4) from glycoprotein__RABV__AB699209.1
auggugccccaggugcugagcuucgugccccugcugguguucagcaccugcuucggcaaguuccccaucuacaccauccccgacaagcugggccccuggagccccaucgacauccaccaccugagcugccccaacaaccuggugguggaggacgagggcugcaccaaccugagcggcuucagcuacauggagcugaaggugggcuacaucagcgccaucaaggugaacggcuucaccugcaccggcguggugaccgaggccgagaccuacaccaacuucgugggcuacgugaccaccaccuucaagagaaagcacuucagacccacccccgacgccugcagagccgccuacaacuggaagauggccggcgaccccagauacgaggagagccugcacaaccccuaccccgacuaccacuggcugagaaccgugaagaccaccaaggagagccuggugaucaucagccccaacguggccgaccuggaccccuacaacaagagccugcacagcagaguguuccccagcggcaagugcagcggcaucaccaucagcagcaccuacugcagcaccaaccacgacuacaccaucuggaugcccgagaaccccagacugggcaccagcugcgacaucuucaccaacagcagaggcaagagagccagcaagggcggcaagaccugcggcuucguggacgagagaggccuguacaagagccugaagggcgccugcaagcugaagcugugcggcgugcugggccugagacugauggacggcaccuggguggccaugcagaccagcgacgagaccaaguggugcccccccgaccagcuggugaaccugcacgacuucagaagcgacgagaucgagcaccuggugguggaggagcuggugaagaagagagaggagugccuggacgcccuggagagcaucaugaccaccaagagcgugagcuucagaagacugagccaccugagaaagcuggugcccggcuucggcaaggccuacaccaucuucaacaagacccugauggaggccgacgcccacuacaagagcgugagaaccuggaacgagaucauccccagcaagggcugccugagagugggcggcagaugccacccccacgugaacggcguguucuucaacggcaucauccugggccccgacggccacgugcugauccccgagaugcagagcagccugcugcagcagcacauggagcugcuggagagcagcgugaucccccugaugcacccccuggccgaccccagcaccguguucaaggacggcgacgaggccgaggacuucguggaggugcaccugcccgacgugcacaagcagaucagcggcguggaccugggccugcccagcuggggcaaguacgugcuggugagcgccggcgugcugguggugcugaugcugaccaucuucaucaugaccugcugcggcaaggugagaagacccaagagcacccagcacagccugggcggcaccggcagaaaggugagcgugaccagccagagcggcaaggugaucagcagcugggagagcuacaagagcggcggcgagaccagacuguga

SEQ ID NO: 190795 - RNA, 1575 nt, Artificial Sequence
  derived and/or modified CDS sequence (opt4) from glycoprotein__RABV__AB699210.1
auggugccccaggugcugagcuucgugccccugcugguguucagcaccugcuucggcaaguuccccaucuacaccauccccgacaagcugggccccuggagccccaucgacauccaccaccugagcugccccaacaaccuggugguggaggacgagggcugcaccaaccugagcggcuucagcuacauggagcugaaggugggcuacaucagcgccaucaaggugaacggcuucaccugcaccggcguggugaccgaggccgagaccuacaccaacuucgugggcuacgugaccaccaccuucaagagaaagcacuucagacccacccccgacgccugcagagccgccuacaacuggaagauggccggcgaccccagauacgaggagagccugcacaaccccuaccccgacuaccacuggcugagaaccgugaagaccaccaaggagagccuggugaucaucagccccagcguggccgaccuggaccccuacaacaagagccugcacagcagaguguuccccagcggcaagugcagcggcaucaccaucagcagcaccuacugcagcaccaaccacgacuacaccaucuggaugcccgagaaccccagacugggcaccagcugcgacaucuucaccaacagcagaggcaagagagccagcaagggcggcaagaccugcggcuucguggacgagagaggccuguacaagagccugaagggcgccugcaagcugaagcugugcggcgugcugggccugagacugauggacggcaccuggguggccaugcagaccagcgacgagaccaaguggugcccccccgaccagcuggugaaccugcacgacuucagaagcgacgagaucgagcaccuggugguggaggagcuggugaagaagagagaggagugccuggacgcccuggagagcaucaugaccaccaagagcgugagcuucagaagacugagccaccugagaaagcuggugcccggcuucggcaaggccuacaccaucuucaacaagacccugauggaggccgacgcccacuacaagagcgugagaaccuggaacgagaucauccccagcaagggcugccugagagugggcggcagaugccacccccacgugaacggcguguucuucaacggcaucauccugggccccgacggccacgugcugauccccgagaugcagagcagccugcugcagcagcacauggagcugcuggagagcagcgugaucccccugaugcacccccuggccgaccccagcaccguguucaaggacggcgacgaggccgaggacuucguggaggugcaccugcccgacgugcacaagcagaucagcggcguggaccugggccugcccagcuggggcaaguacgugcuggugagcgccggcgugcugguggugcugaugcugaccaucuucaucaugaccugcugcggcagagugagaagacccaagagcacccagcacagccugggcggcaccggcagaaaggugagcgugaccagccagagcggcaaggugaucagcagcugggagagcuacaagagcggcggcgagaccagacuguga

SEQ ID NO: 190796 - RNA, 1575 nt, Artificial Sequence
  derived and/or modified CDS sequence (opt4) from glycoprotein__RABV__AB699212.1
auggugccccaggugcugagcuucgugccccugcugguguucagcaccugcuucggcaaguuccccaucuacaccauccccgacaagcugggccccuggagccccaucgacauccaccaccugagcugccccaacaaccuggugguggaggacgagggcugcaccaaccugagcggcuucagcuacauggagcugaaggugggcuacaucagcgccaucaaggugaacggcuucaccugcaccggcguggugaccgaggccgagaccuacaccaacuucgugggcuacgugaccaccaccuucaagagaaagcacuucagacccacccccgacgccugcagagccgccuacaacuggaagauggccggcgaccccagauacgaggagagccugcacaaccccuaccccgacuaccacuggcugagaaccgugaagaccaccaaggagagccuggugaucaucagccccagcguggccgaccuggaccccuacgacaagagccugcacagcagaguguuccccagcggcaagugcagcggcaucaccaucagcagcaccugcugcagcaccaaccacgacuacaccaucuggaugcccgagaaccccagacugggcaccagcugcgacaucuucaccaacagcagaggcaagagagccagcaagggcggcaagaccugcggcuucguggacgagagaggccuguacaagagccugaagggcgccugcaagcugaagcugugcggcgugcugggccugagacugauggacggcaccuggguggccaugcagaccagcgacgagaccaaguggugcccccccgaccagcuggugaaccugcacgacuucagaagcgacgagaucgagcaccuggugguggaggagcuggugaagaagagagaggagugccuggacgcccuggagagcaucaugaccaccaagagcgugagcuucagaagacugagccaccugagaaagcuggugcccggcuucggcaaggccuacaccaucuucaacaagacccugauggaggccgacgcccacuacaagagcgugagaaccuggaacgagaucauccccagcaagggcugccugagagugggcggcagaugccacccccacgugaacggcguguucuucaacggcaucauccugggccccgacggccacgugcugauccccgagaugcagagcagccugcugcagcagcacauggagcugcuggagagcagcgugaucccccugaugcacccccuggccgaccccagcaccguguucaaggacggcgacgaggccgaggacuucguggaggugcaccugcccgacgugcacaagcagaucagcggcguggaccugggccugcccagcuggggcaaguacgugcuggugagcgccggcgugcugguggugcugaugcugaccaucuucaucaugaccugcugcggcagagugagaagacccaagagcacccagcacagccugggcggcaccggcagaaaggugagcgugaccagccagagcggcaaggugaucagcagcugggagagcuacaagagcggcggcgagaccagacuguga

SEQ ID NO: 190797 - RNA, 1575 nt, Artificial Sequence; identical to SEQ ID NO: 190795
  derived and/or modified CDS sequence (opt4) from glycoprotein__RABV__AB699213.1

SEQ ID NO: 190798 - RNA, 1575 nt, Artificial Sequence
  derived and/or modified CDS sequence (opt4) from glycoprotein__RABV__AB733961.1
augaucccccaggcccugcuguucgugccccugcuggugagcagccugugcuucggcaaguuccccaucuacaccauccccgacaagcugggccccuggagccccaucgacauccaccaccugagcugccccaacaaccuggugguggaggacgagggcugcaccaaccugagcggcuucagcuacauggagcugaaggugggcuacaucagcgccaucaaggugaacggcuucaccugcaccggcguggugaccgaggccgagaccuacaccaacuucgugggcuacgugaccaccaccuucaagagaaagcacuucagacccacccuggacgccugcagagccgccuacaacuggaagauggccggcgaccccagauacgaggagagccugcacaaccccuaccccgacuaccacuggcugagaaccgugaagaccaccaaggagagccuggugaucaucagccccagcguggccgaccuggaccccuacgacaagagccugcacagcagaguguuccccagcggcaagugcagcggcaucaccgugagcagcaccuacugcagcaccaaccacgacuacaccaucuggaugcccgagaaccccagacugggcaccagcugcgacaucuucaccaacagcagaggcaagagagccagcaagggcagcaagaccugcggcuucguggacgagagaggccuguacaagagccugaagggcgccugcaagcugaagcugugcggcgugcugggccugagacugauggacggcaccugggccgccauccagaccagcgacgagaccaaguggugcccccccgaccagcuggugaaccugcacgacuucagaagcgacgagaucgagcaccuggugguggaggagcuggugaagaagagagaggagugccuggacgcccuggagagcaucaugaccaccaagagcgugagcuucagaagacugagccaccugagaaagcuggugcccggcuucggcaaggccuacaccaucuucaacaagacccugauggaggccgacgcccacuacaagagcgugagaaccuggaacgagaucauccccagcaagggcugccugagagugggcggcagaugccacccccacgugaacggcguguucuucaacggcaucauccugggccccgacggccacgugcugauccccgagaugcagagcagccugcugcagcagcacauggagcugcuggagagcagcgugaucccccugaugcacccccuggccgaccccagcaccguguucaaggacgacgacgaggccgaggacuucguggaggugcaccugcccgacgugcacaagcaggugagcggcguggaccugggccugcccagcuggggcaaguacgugcugaccagcgccggcgugcugaccgcccugaugcugaugaucuuccugaugaccugcugcagaagagccaacagagccgagagcgcccagcacagccugggcgagagaggcagaaaggugagcgugaccagccagagcggcagagugaucagcagcugggagagcuacaagagcggcggcgagaccaagcuguga

SEQ ID NO: 190799 - RNA, 1575 nt, Artificial Sequence
  derived and/or modified CDS sequence (opt4) from glycoprotein__RABV__AB733962.1
augaucccccaggcccugcuguucgugccccugcugguguucagccugugccugggcaaguuccccaucuacaccauccccgacaagcugggccccuggagccccaucgacauccaccaccugagcugccccaacaaccuggugguggaggacgagggcugcaccaaccugagcggcuucagcuacauggagcugaaggugggcuacaucagcgccaucaaggugaacggcuucaccugcaccggcguggugaccgaggccgagaccuacaccaacuucgugggcuacgugaccaccaccuucaagagaaagcacuucagacccacccccgacgccugcagagccgccuacaacuggaagauggccggcgaccccagauacgaggagagccugcacaaccccuaccccgacuaccacuggcugagaaccgugaagaccaccaaggagagccuggugaucaucagccccagcguggccgaccuggaccccuacgacaagagccugcacagcagaguguuccccagcggcaagugcagcggcaucaccgugagcagcaccuacugcagcaccaaccacgacuacaccaucuggaugcccgagaaccccagacugggcaccagcugcgacaucuucaccaacagcagaggcaagagagccagcaagggcagcaagaccugcggcuucguggacgagagaggccuguacaagagccugaagggcgccugcaagcugaagcugugcggcgugcugggccugagacugauggacggcaccugggccgccauccagaccagcgacgagaucaaguggugcccccccgaccagcuggugaaccugcacgacuucagaagcgacgagaucgagcaccuggugguggaggagcuggugaagaagagagaggagugccuggacgcccuggagagcaucaugaccaccaagagcgugagcuucagaagacugagccaccugagaaagcuggugcccggcuucggcaaggccuacaccaucuucaacaagacccugauggaggccgacgcccacuacaagagcgugagaaccuggaacgagaucauccccagcaagggcugccugagagugggcggcagaugccacccccacgugaacggcguguucuucaacggcaucauccugggccccgacggccacgugcugauccccgagaugcagagcagccugcugcagcagcacauggagcugcuggagagcagcgugaucccccugaugcacccccuggccgaccccagcaccguguucaaggacgacgacgaggccgaggacuucguggaggugcaccugcccgacgugcacaagcaggugagcggcguggaccugggccugcccagcuggggcaaguacgugcugaugagcgccggcgugcugaccgcccugaugcugaugaucuuccugaccaccugcugcagaagagccaacagagccgagagcgcccagcacagccugggcgagagaggcagaaaggugagcgugaccagccagagcggcagagugaucagcagcugggagagcuacaagagcggcggcgagaccaagcuguga

SEQ ID NO: 190800 - RNA, 1575 nt, Artificial Sequence; identical to SEQ ID NO: 190631
  derived and/or modified CDS sequence (opt4) from glycoprotein__RABV__AB733963.1

SEQ ID NO: 190801 - RNA, 1575 nt, Artificial Sequence
  derived and/or modified CDS sequence (opt4) from glycoprotein__RABV__AB733964.1
augaucccccaggcccugcuguucgugccccugcugguguucagccugugccugggcaaguuccccaucuacaccauccccgacaagcugggccccuggagccccaucgacauccaccaccugagcugccccaacaaccuggugguggaggacgagggcugcaccaaccugagcggcuucagcuacauggagcugaaggugggcuacaucagcgccaucaaggugaacggcuucaccugcaccggcguggugaccgaggccgagaccuacaccaacuucgugggcuacgugaccaccaccuucaagagaaagcacuucagacccacccccgacgccugcagagccgccuacaacuggaagauggccggcgaccccagauacgaggagagccugcacaaccccuaccccgacuaccacuggcugagaaccgugaagaccaccaaggagagccuggugaucaucagccccagcguggccgaccuggaccccuacgacaagagccugcacagcagaguguuccccagcggcaagugcagcggcaucaccgugagcagcaccuacugcagcaccaaccacgacuacaccaucuggaugcccgagaaccccagacugggcaccagcugcgacaucuucaccaacagcagaggcaagagagccagcaagggcagcaagaccugcggcuucguggacgagagaggccuguacaagagccugaagggcgccugcaagcugaagcugugcggcgugcugggccugagacugauggacggcaccugggccgccauccagaccagcgacgagaccaaguggugcccccccgaccagcuggugaaccugcacgacuuccacagcgacgagaucgagcaccuggugguggaggagcuggugaagaagagagaggagugccuggacgcccuggagagcaucaugaccaccaagagcgugagcuucagaagacugagccaccugagaaagcuggugcccggcuucggcaaggccuacaccaucuucaacaagacccugauggaggccgacgcccacuacaagagcgugagaaccuggaacgagaucauccccaccaagggcugccugagagugggcggcagaugccacccccacgugaacggcguguucuucaacggcaucauccugggccccgacggccacgugcugauccccgagaugcagagcagccugcugcagcagcacauggagcugcuggagagcagcgugaucccccugaugcacccccuggccgaccccagcaccguguucaaggacgacgacgaggccgaggacuucguggaggugcaccugcccgacgugcacaagcaggugagcggcguggaccugggccugcccagcuggggcaaguacgugcugaugagcgccggcgugcugaccgcccugaugcugaugaucuuccugaccaccugcugcagaagagccgacagagccgagagcgcccagcacagccugggcgagagaggcagaaaggugagcgugaccagccagagcggcagagugaucagcagcugggagagcuacaagagcggcggcgagaccaagcuguga

SEQ ID NO: 190802 - RNA, 1575 nt, Artificial Sequence; identical to SEQ ID NO: 190662
  derived and/or modified CDS sequence (opt4) from glycoprotein__RABV__AB733965.1

SEQ ID NO: 190803 - RNA, 1575 nt, Artificial Sequence
  derived and/or modified CDS sequence (opt4) from glycoprotein__RABV__AB733966.1
augaucccccaggcccugcuguucgugccccugcugguguucagccugugcuucggcaaguuccccaucuacaccauccccgacaagcugggccccuggagccccaucgacauccaccaccugagcugccccaacaaccuggugguggaggacgagggcugcaccaaccugagcggcuucagcuacauggagcugaaggugggcuacaucagcgccaucaaggugaacggcuucaccugcaccggcguggugaccgaggccgagaccuacaccaacuucgugggcuacgugaccaccaccuucaagagaaagcacuucagacccacccccgacgccugcagagccgccuacaacuggaagauggccggcgaccccagauacgaggagagccugcacaaccccuaccccgacuaccacuggcugagaaccgugaagaccaccaaggagagccuggugaucaucagccccagcguggccgaccuggaccccuacgacaagagccugcacagcagaguguuccccagcggcaagugcagcggcaucaccgugagcagcaccuacugcagcaccaaccacgacuacaccaucuggaugcccgagaaccccagacugggcaccagcugcgacaucuucaccaacagcagaggcaagagagccagcaagggcagcaagaccugcggcuucguggacgagagaggccuguacaagagccugaagggcgccugcaagcugaagcugugcggcgugcugggccugagacugauggacggcaccugggccgccauccagaccagcgacgagaccaaguggugcccccccgaccagcuggugaaccugcacgacuuccacagcgacgagaucgagcaccuggugguggaggagcuggugaagaagagagaggagugccuggacgcccuggagagcaucaugaccaccaagagcgugagcuucagaagacugagccaccugagaaagcuggugcccggcuucggcaaggccuacaccaucuucaacaagacccugauggaggccgacgcccacuacaagagcgugagaaccuggaacgagaucauccccagcaagggcugccugagagugggcggcagaugccacccccacgugaacggcguguucuucaacggcaucauccugggccccgacggccacgugcugauccccgagaugcagagcagccugcugcagcagcacauggagcugcuggagagcagcgugaucccccugaugcacccccuggccgaccccagcaccguguucaaggacgacgacgaggccgaggacuucguggaggugcaccugcccgacgugcacaagcaggugagcggcguggaccugggccugcccagcuggggcaaguacgugcugaugagcgccggcgugcugaccgcccugaugcugaugaucuuccugaccaccugcugcagaagagccaacagagccgagagcgcccagcacagccugggcgagagaggcagaaaggugagcgugaccagccagagcggcagagugaucagcagcugggagagcuacaagagcggcggcgagaccaagcuguga

SEQ ID NO: 190804 - RNA, 1575 nt, Artificial Sequence; identical to SEQ ID NO: 190760
  derived and/or modified CDS sequence (opt4) from glycoprotein__RABV__AB733967.1

SEQ ID NO: 190805 - RNA, 1575 nt, Artificial Sequence
  derived and/or modified CDS sequence (opt4) from glycoprotein__RABV__AB733968.1
augaucccccaggcccugcuguucgugccccugcugguguucagccugugcuucggcaaguuccccaucuacaccauccccgacaagcugggccccuggagccccaucgacauccaccaccugagcugccccaacaaccuggugguggaggacgagggcugcaccaaccugagcggcuucagcuacauggagcugaaggugggcuacaucagcgccaucaaggugaacggcuucaccugcaccggcguggugaccgaggccgagaccuacaccaacuucgugggcuacgugaccaccaccuucaagagaaagcacuucagacccacccccgacgccugcagagccgccuacaacuggaagauggccggcgaccccagauacgaggagagccugcacaaccccuaccccgacuaccacuggcugagaaccgugaagaccaccaaggagagccuggugaucaucagccccagcguggccgaccuggaccccuacgacaagagccugcacagcagaguguuccccagcggcaagugcagcggcaucaccgugagcagcaccuacugccccaccaaccacgacuacaccaucuggaugcccgagaaccccagacugggcaccagcugcgacaucuucaccaacagcagaggcaagagagccagcaagggcagcaagaccugcggcuucguggacgagagaggccuguacaagagccugaagggcgccugcaagcugaagcugugcggcgugcugggccugagacugauggacggcaccugggccgccauccagaccagcgacgagaccaaguggugcccccccgaccagcuggugaaccugcacgacuucagaagcgacgagaucgagcaccuggugguggaggagcuggugaagaagagagaggagugccuggacgcccuggagagcaucaugaccaccaagagcgugagcuucagaagacugagccaccugagaaagcuggugcccggcuucggcaaggccuacaccaucuucaacaagacccugauggaggccgacgcccacuacaagagcgugagaaccuggaacgagaucauccccagcaagggcugccugagagugggcggcagaugccacccccacgugaacggcguguucuucaacggcaucauccugggccccgacggccacgugcugauccccgagaugcagagcagccugcugcagcagcacauggagcugcuggagagcagcgugaucccccugaugcacccccuggccgaccccagcaccguguucaaggacgacgacgaggccgaggacuucguggaggugcaccugcccgacgugcacaagcaggugagcggcguggaccugggccugcccagcuggggcaaguacgugcugaugagcgccggcgugcugaccgcccugaugcugaugaucuuccugaccaccugcugcagaagagccgacagagccgagagcgcccagcacagccugggcgagagaggcagaaaggugagcgugaccagccagagcggcagagugaucagcagcugggagagcuacaagagcggcggcgagaccaagcuguga

SEQ ID NO: 190806 - RNA, 1575 nt, Artificial Sequence; identical to SEQ ID NO: 190659
  derived and/or modified CDS sequence (opt4) from glycoprotein__RABV__AB733969.1

SEQ ID NO: 190807 - RNA, 1575 nt, Artificial Sequence; identical to SEQ ID NO: 190748
  derived and/or modified CDS sequence (opt4) from glycoprotein__RABV__AB733970.1

SEQ ID NO: 190808 - RNA, 1575 nt, Artificial Sequence
  derived and/or modified CDS sequence (opt4) from glycoprotein__RABV__AB733971.1
augaucccccaggcccugcuguucgugccccugcuggugagcagccugugcuucggcaaguuccccaucuacaccauccccgacaagcugggccccuggagccccaucgacauccaccaccugagcugccccaacaaccuggugguggaggacgagggcugcaccaaccugagcggcuucagcuacauggagcugaaggugggcuacaucagcgccaucaaggugaacggcuucaccugcaccggcguggugaccgaggccgagaccuacaccaacuucgugggcuacgugaccaccaccuucaagagaaagcacuucagacccacccccgacgccugcagagccgccuacaacuggaagauggccggcgaccccagauacgaggagagccugcacaaccccuaccccgacuaccacuggcugagaaccgugaagaccaccaaggagagccuggugaucaucagccccagcguggccgaccuggaccccuacgacaagagccugcacagcagaguguuccccagcggcaagugcagcggcaucaccgugagcagcaccuacugcagcaccaaccacgacuacaccaucuggaugcccgagaaccccagacugggcaccagcugcgacaucuucaccaacagcagaggcaagagagccagcaagggcagcaagaccugcggcuucgugaacgagagaggccuguacaagagccugaagggcgccugcaagcugaagcugugcggcgugcugggccugaagcugauggacggcaccugggccgccauccagaccagcaacgagaccaaguggugcccccccgaccagcuggugaaccugcacgacuucagaagcgacgagaucgagcaccuggugguggaggagcuggugaagaagagagaggagugccuggacgcccuggagagcaucaugaccaccaagagcgugagcuucagaagacugagccaccugagaaagcuggugcccggcuucggcaaggccuacaccaucuucaacaagacccugauggaggccgacgcccacuacaagagcgugagaaccuggaacgagaucauccccagcaagggcugccugagagugggcggcagaugccacccccacgugaacggcguguucuucaacggcaucauccugggccccgacggccacgugcugauccccgagaugcagagcagccugcugcagcagcacauggagcugcuggagagcagcgugaucccccugaugcacccccuggccgaccccagcaccguguucaaggacgacgacgaggccgaggacuucguggaggugcaccugcccgacgugcacaagcaggugagcggcguggaccugggccugcccagcuggggcaaguacgugcugaccagcgccggcgugcugaccgcccugaugcugaugaucuuccugaugaccugcugcagaagagccaacagagccgagagcgcccagcacagccugggcgagagaggcagaaaggugagcgugaccagccagagcggcagagugaucagcagcugggagagcuacaagagcggcggcgagaccaagcuguga

SEQ ID NO: 190809 - RNA, 1575 nt, Artificial Sequence
  derived and/or modified CDS sequence (opt4) from glycoprotein__RABV__AB733972.1
augaucccccaggcccugcuguucgugccccugcugguguucagccugugcuucggcaaguuccccaucuacaccauccccgacaagcugggccccuggagccccaucgacauccaccaccugagcugccccaacaaccuggugguggaggacgagggcugcaccaaccugagcggcuucagcuacauggagcugaaggugggcuacaucagcgccaucaaggugaacggcuucaccugcaccggcguggugaccgaggccgagaccuacaccaacuucgugggcuacgugaccaccaccuucaagagaaagcacuucagacccacccccgacgccugcagagccgccuacaacuggaagauggccggcgaccccagauacgaggagagccugcacaaccccuaccccgacuaccacuggcugagaaccgugaagaccaccaaggagagccuggugaucaucagccccagcguggccgaccuggaccccuacgacaagagccugcacagcagaguguuccccagcggcaagugcagcggcaucaccgugagcagcaccuacugcagcaccaaccacgacuacaccaucuggaugcccgagaaccccagacugggcaccagcugcgacaucuucaccaacagcagaggcaagagagccagcaagggcagcaagaccugcggcuucguggacgagagaggccuguacaagagccugaagggcgccugcaagcugaagcugugcggcgugcugggccugagacugauggacggcaccugggccgccauccagaccagcgacgagaccaaguggugcccccccgaccagcuggugaaccugcacgacuucagaagcgacgagaucgagcaccuggugguggaggagcuggugaagaagagagaggagugccuggacgcccuggagagcaucaugaccaccaagagcgugagcuucagaagacugagccaccugagaaagcuggugcccggcuucggcaaggccuacaccaucuucaacaagacccugauggaggccgacgcccacuacaagagcgugagaaccuggaacgagaucauccccagcaagggcugccugagagugggcggcagaugccacccccacgugaacggcguguucuucaacggcaucauccugggccccgacggccacgugcugauccccgagaugcagagcagccugcugcagcagcacauggagcugcuggagagcagcgugaucccccugaugcacccccuggccgaccccagcaccguguucaagaacgacgacgaggccgaggacuucguggaggugcaccugcccgacgugcacaagcaggugagcggcguggaccugggccugcccagcuggggcaaguacgugcugaugagcgccggcgugcugaccgcccugaugcugaugaucuuccugaugaccugcugcagaagaaccaacagagccgagagcgcccagcacagccugggcgagagaggcagaaaggugagcgugaccagccagagcggcagagugaucagcagcugggagagcuacaagagcggcggcgagaccaagcuguga

SEQ ID NO: 190810 - RNA, 1575 nt, Artificial Sequence; identical to SEQ ID NO: 190805
  derived and/or modified CDS sequence (opt4) from glycoprotein__RABV__AB733973.1

SEQ ID NO: 190811 - RNA, 1575 nt, Artificial Sequence
  derived and/or modified CDS sequence (opt4) from glycoprotein__RABV__AB733974.1
augaucccccaggcccugcuguucgugccccugcugguguucagccugugcuucggcaaguuccccaucuacaccauccccgacaagcugggccccuggagccccaucgacauccaccaccugagcugccccaacaaccuggugguggaggacgagggcugcaccaaccugagcggcuucagcuacauggagcugaaggugggcuacaucagcgccaucaaggugaacggcuucaccugcaccggcguggugaccgaggccgagaccuacaccaacuucgugggcuacgugaccaccaccuucaagagaaagcacuucagacccacccccgacgccugcagagccgccuacaacuggaagauggccggcgaccccagauacgaggagagccugcacaaccccuaccccgacuaccacuggcugagaaccgugaagaccaccaaggagagccuggugaucaucagccccagcguggccgaccuggaccccuacgacaagagccugcacagcagaguguuccccagcggcaagugcagcggcaucaccgugagcagcaccuacugcagcaccaaccacgacuacaccaucuggaugcccgagaaccccagacugggcaccagcugcgacaucuucaccaacagcagaggcaagagagccagcaagggcagcaagaccugcggcuucguggacgagagaggccuguacaagagccugaagggcgccugcaagcugaagcugugcggcgugcugggccugaagcugauggacggcaccugggccgccauccagaccagcaacgagaccaaguggugcccccccgaccagcuggugaaccugcacgacuucagaagcgacgagaucgagcaccuggugguggaggagcuggugaagaagagagaggagugccuggacgcccuggagagcaucaugaccaccaagagcgugagcuucagaagacugagccaccugagaaagcuggugcccggcuucggcaaggccuacaccaucuucaacaagacccugauggaggccgacgcccacuacaagagcgugagaaccuggaacgagaucauccccagcaagggcugccugagagugggcggcagaugccacccccacgugaacggcguguucuucaacggcaucauccugggccccgacggccacgugcugauccccgagaugcagagcagccugcugcagcagcacauggagcugcuggagagcagcgugaucccccugaugcacccccuggccgaccccagcaccguguucaaggacgacgacgaggccgaggacuucguggaggugcaccugcccgacgugcacaagcaggugagcggcguggaccugggccugcccagcuggggcaaguacgugcugaugagcgccggcgugcugaccgcccugaugcugaugaucuuccugaugaccugcugcagaagagccaacagagccgagagcgcccagcacagccugggcgagagaggcagaaaggugagcgugaccagccagagcggcagagugaucagcagcugggagagcuacaagagcggcggcgagaccaagcuguga

SEQ ID NO: 190812 - RNA, 1575 nt, Artificial Sequence; identical to SEQ ID NO: 190811
  derived and/or modified CDS sequence (opt4) from glycoprotein__RABV__AB733975.1

SEQ ID NO: 190813 - RNA, 1575 nt, Artificial Sequence; identical to SEQ ID NO: 190632
  derived and/or modified CDS sequence (opt4) from glycoprotein__RABV__AB733976.1

SEQ ID NO: 190814 - RNA, 1575 nt, Artificial Sequence; identical to SEQ ID NO: 190693
  derived and/or modified CDS sequence (opt4) from glycoprotein__RABV__AB733977.1

SEQ ID NO: 190815 - RNA, 1575 nt, Artificial Sequence
  derived and/or modified CDS sequence (opt4) from glycoprotein__RABV__AB733979.1
augaucccccaggcccugcuguucgugccccugcugguguucagccugugcuucggcaaguuccccaucuacaccauccccgacaagcugggccccuggagccccaucgacauccaccaccugagcugccccaacaaccuggugguggaggacgagggcugcaccaaccugagcggcuucagcuacauggagcugaaggugggcuacaucagcgccaucaaggugaacggcuucaccugcaccggcguggugaccgaggccgagaccuacaccaacuucgugggcuacgugaccaccaccuucaagagaaagcacuucagacccacccccgacgccugcagagccgccuacaacuggaagauggccggcgaccccagauacgaggagagccugcacaaccccuaccccgacuaccacuggcugagaaccgugaagaccaccaaggagagccuggugaucaucagccccagcguggccgaccuggaccccuacgacaagagccugcacagcagaguguuccccagcggcaagugcagcggcaucaccgugagcagcaccuacugcagcaccaaccacgacuacaccaucuggaugcccgagaaccccagacugggcaccagcugcgacaucuucaccaacagcagaggcaagagagccagcaagggcagcaagaccugcggcuucguggacgagagaggccuguacaagagccugaagggcgccugcaagcugaagcugugcggcgugcugggccugagacugauggacggcaccugggccgccauccagaccagcgacgagaccaaguggugcccccccgaccagcuggugaaccugcacgacuucagaagcgacgagaucgagcaccuggugguggaggagcuggugaagaagagagaggagugccuggacgcccuggagagcaucaugaccaccaagagcgugagcuucagaagacugagccaccugagaaagcuggugcccggcuucggcaaggccuacaccaucuucaacaagacccugauggaggccgacgcccacuacaagagcgugagaaccuggaacgagaucauccccagcaagggcugccugagagugggcggcagaugccacccccacgugaacggcguguucuucaacggcaucauccugggccccgacggccacgugcugauccccgagaugcagagcagccugcugcagcagcacauggagcugcuggagagcagcgugaucccccugaugcacccccuggccgaccccagcaccguguucaaggacgacgacgaggccgaggacuucguggaggugcaccugcccgacgugcacaagcaggugagcggcguggaccugggccugcccagcuggggcaaguacgugcugaugagcgccggcgugcugaccgcccugaugcugaugauccugcugaugaccugcugcagaagagccaacagaguggagagcgcccagcacagccugggcgagagaggcagaaaggugagcgugaccagccagagcggcagagugaucagcagcugggagagcuacaagagcggcggcgagaccaagcuguga

SEQ ID NO: 190816 - RNA, 1575 nt, Artificial Sequence
  derived and/or modified CDS sequence (opt4) from glycoprotein__RABV__AB781935.1
auggugccccaggcccugcuguucgugccccugcugguguucccccugugcuucggcaaguuccccaucuacaccauccccgacaagcugggccccuggagccccaucgacauccaccaccugagcugccccaacaaccuggugguggaggacgagggcugcaccaaccugagcggcuucagcuacauggagcugaaggugggcuacauccuggccaucaagaugaacggcuucaccugcaccggcguggugaccgaggccgagaccuacaccaacuucgugggcuacgugaccaccaccuucaagagaaagcacuucagacccacccccgacgccugcagagccgccuacaacuggaagauggccggcgaccccagauacgaggagagccugcagaaccccuaccccgacuacagauggcugagaaccgugaagaccaccaaggagagccuggugaucaucagccccagcguggccgaccuggaccccuacgacagaagccugcacagcagaguguuccccagcggcaagugcagcggcguggccgugagcagcaccuacugcagcaccaaccacgacuacaccaucuggaugcccgagaaccccagacugggcaugagcugcgacaucuucaccaacagcagaggcaagagagccagcaagggcagcgagaccugcggcuucguggacgagagaggccuguacaagagccugaagggcgccugcaagcugaagcugugcggcgugcugggccugagacugauggacggcaccuggguggccaugcagaccagcaacgagaccaaguggugcccccccgaccagcuggugaaccugcacgacuuccacagcgacgagaucgagcaccuggugguggaggagcuggugagaaagagagaggagugccuggacgcccuggagagcaucaugaccaccaagagcgugagcuucagaagacugagccaccugagaaagcuggugcccggcuucggcaaggccuacaccaucuucaacaagacccugauggaggccgacgcccacuacaagagcgugagaaccuggaacgagaucauccccagcaagggcugccugagagugggcggcagaugccacccccacgugaacggcguguucuucaacggcaucauccugggccccgacggcaacgugcugauccccgagaugcagagcagccugcugcagcagcacauggagcugcuggagagcagcgugaucccccuggugcacccccuggccgaccccagcaccaucuucaaggacggcgacgaggccgaggacuucguggaggugcaccugcccgacgugcacaaccaggugagcggcguggaccugggccugcccaacuggggcaaguacgugcugcugagcgccggcgcccugaccgcccugaugcugaucaucuuccugaugaccugcugcagaagagugaacagaagcgagcccacccagcacaaccugagaggcaccggcagagaggugagcgugaccccccagagcggcaagaucaucagcagcugggagagccacaagagcggcggcgagaccagacuguga

SEQ ID NO: 190817 - RNA, 1575 nt, Artificial Sequence
  derived and/or modified CDS sequence (opt4) from glycoprotein__RABV__AB817099.1
auggugccccaggcccugcuguucgugccccugcugguguucagccugugcuucggcaaguuccccaucuacaccauccccgacaagcugggccccuggagccccaucgacauccaccaccugagcugccccaacaaccuggugguggaggacgagggcugcaccaaccugagcggcuucagcuacauggagcugaaggugggcuacaucagcgccaucaaggugaacggcuucaccugcaccggcguggugaccgaggccgagaccuacaccaacuucgugggcuacgugaccaccaccuucagaagaaagcacuucagacccacccccgacgccugcagagccgccuacaacuggaagauggccggcgaccccagauacgaggagagccugcacaaccccuaccccgacuaccacuggcugagaaccgugaagaccaccaaggagagccuggugaucaucagccccagcguggccgaccuggaccccuacgacaagagccugcacagcagaguguuccccggcggcaagugcagcggcaucaccgugagcagcaccuacugcagcaccaaccacgacuacaccaucuggaugcccgagaaccccagacugggcaccagcugcgacaucuucgugaacagcagaggcaagagagccagcaagggcggcaagaccugcggcuucguggacgagagaggccuguacaagagccugaagggcgccugcaagcugaagcugugcggcgugcccggccugagacugauggacggcaccuggguggccauccagaccagcgacgagaccaaguggugcccccccgaccagcuggugaaccugcacgacuucagaagcgacgagaucgagcaccuggugguggaggagcuggugaagaagagagaggagugccuggacgcccuggagagcaucaugaccaccaagagcgugagcuucagaagacugagccaccugagaaagcuggugcccggcuucggcaaggccuacaccaucuucaacaagacccugauggaggccgacgcccacuacaagagcgugagaaccuggaacgagaucauccccagcaagggcugccugagagugggcggcagaugccacccccacgugaacggcguguucuucaacggcaucauccugggccccgacggccacgugcugauccccgagaugcagagcagccugcugcagcagcacauggagcugcuggagagcagcgugaucccccugaugcacccccuggccgaccccagcaccguguucaaggacggcgacgaggccgaggacuucguggaggugcaccugcccgacgugcacaagcugaucagcggcguggaccugggccugcccagcuggggcaaguacgugcugaugagcgccggcauccugaccacccugaugcugaugaucuuccugaugaccugcugcagaagagugaaccaggccggcagcaagcagcacggccuggagggcgccggcagaaaggugagcgugaccagccagaacggcagagugaucagcagcugggagagcuacaagagcggcggcgagaccagacuguga

SEQ ID NO: 190818 - RNA, 1575 nt, Artificial Sequence
  derived and/or modified CDS sequence (opt4) from glycoprotein__RABV__AB817100.1
auggugccccaggcccugcuguucgugccccugcugguguucagccugugcuucggcaaguuccccaucuacaccauccccgacaagcugggccccuggagccccaucgacauccaccaccugagcugccccaacaaccuggugguggaggacgagggcugcaccaaccugagcggcuucagcuacauggagcugaaggugggcuacaucagcgccaucaaggugaacggcuucaccugcaccggcguggugaccgaggccgagaccuacaccaacuucgugggcuacgugaccaccaccuucagaagaaagcacuucagacccacccccgacgccugcagagccgccuacaacuggaagauggccggcgaccccagauacgaggagagccugcacaaccccuaccccgacuaccacuggcugagaaccgugaagaccaccaaggagagccuggugaucaucagccccagcguggccgaccuggaccccuacgacaagagccugcacagcagaguguuccccggcggcaagugcagcggcaucaccgugagcagcaccuacugcagcaccaaccacgacuacaccaucuggaugcccgagaaccccagacugggcaccagcugcgacaucuucgugaacagcagaggcaagagagccagcaagggcggcaagaccugcggcuucguggacgagagaggccuguacaagagccugaagggcgccugcaagcugaagcugugcggcgugcccggccugagacugauggacggcaccuggguggccauccagaccagcgacgagaccaaguggugcccccccgaccagcuggugaaccugcacgacuucagaagcgacgagaucgagcaccuggugguggaggagcuggugaagaagagagaggagugccuggacgcccuggagagcaucaugaccaccaagagcgugagcuucagaagacugagccaccugagaaagcuggugcccggcuucggcaaggccuacaccaucuucaacaagacccugauggaggccgacgcccacuacaagagcgugagaaccuggaacgagaucauccccagcaagggcugccugagagugggcggcagaugccacccccacgugaacggcguguucuucaacggcaucauccugggccccgacggccacgugcugauccccgagaugcagagcagccugcugcagcagcacauggagcugcuggagagcagcgugaucccccugaugcacccccuggccgaccccagcaccguguucaaggacggcgacgaggccgaggacuucguggaggugcaccugcccgacgugcacaagcugaucagcggcguggaccugggccugcccagcuggggcaaguacgugcugaugagcgccggcauccugaucacccugaugcugaugaucuuccugaugaccugcugcagaagagugaaccaggccggcagcaagcagcacggccuggagggcgccggcagaaaggugagcgugaccagccagaacggcagagugaucagcagcugggagagcuacaagagcggcggcgagaccagacuguga

SEQ ID NO: 190819 - RNA, 1575 nt, Artificial Sequence
  derived and/or modified CDS sequence (opt4) from glycoprotein__RABV__AB817101.1
auggugccccaggcccugcuguucgugccccugcugguguucagccugugcuucggcaaguuccccaucuacaccauccccgacaagcugggccccuggagccccaucgacauccaccaccugagcugccccaacaaccuggugguggaggacgagggcugcaccaaccugagcggcuucagcuacauggagcugaaggugggcuacaucagcgccaucaaggugaacggcuucaccugcaccggcguggugaccgaggccgagaccuacaccaacuucgugggcuacgugaccaccaccuucagaagaaagcacuucagacccacccccgacgccugcagagccgccuacaacuggaagauggccggcgaccccagauacgaggagagccugcacaaccccuaccccgacuaccacuggcugagaaccgugaagaccaccaaggagagccuggugaucaucagccccagcguggccgaccuggaccccuacgacaagagccugcacagcagaguguuccccggcggcaagugcagcggcaucaccgugagcagcaccuacugcagcaccaaccacgacuacaccaucuggaugcccgagaaccccagacugggcaccagcugcgacaucuucgugaacagcagaggcaagagagccagcaagggcggcaagaccugcggcuucguggacgagagaggccuguacaagagccugaagggcgccugcaagcugaagcugugcggcgugcccggccugagacugauggacggcaccuggguggccauccagaccagcgacgagaccaaguggugcccccccgaccagcuggugaaccugcacgacuucagaagcgacgagaucgagcaccuggugguggaggagcuggugaagaagagagaggagugccuggacgcccuggagagcaucaugaccaccaagagcgugagcuucagaagacugagccaccugagaaagcuggugcccggcuucggcaaggccuacaccaucuucaacaagacccugauggaggccgacgcccacuacaagagcgugagaaccuggaacgagaucauccccagcaagggcugccugagagugggcggcagaugccacccccacgugaacggcguguucuucaacggcaucauccugggccccgacggccacgugcugauccccgagaugcagagcagccugcugcagcagcacauggagcugcuggagagcagcgugaucccccugaugcacccccuggccgaccccagcaccguguucaaggacggcgacgaggccgaggacuucguggaggugcaccugcccgacgugcacaagcugaucagcggcguggaccugggccugcccagcuggggcaaguacgugcugaugagcgccggcauccugaccacccugaugcugaugaucuuccugaugaccugcugcagaagagugaaccaggccggcagcaagcagcacggccuggagggccccggcagaaaggugagcgugaccagccagaacggcagagugaucagcagcugggagagcuacaagagcggcggcgagaccagacuguga

SEQ ID NO: 190820 - RNA, 1575 nt, Artificial Sequence
  derived and/or modified CDS sequence (opt4) from glycoprotein__RABV__AB817102.1
auggugccccagacccugcuguucgugccccugcugguguucagccugugcuucggcaaguuccccaucuacaccauccccgacaagcugggccccuggagccccaucgacauccaccaccugagcugccccaacaaccuggugguggaggacgagggcugcaccaaccugagcggcuucagcuacauggagcugaaggugggcuacaucagcgccaucaaggugaacggcuucaccugcaccggcguggugaccgaggccgagaccuacaccaacuucgugggcuacgugaccaccaccuucagaagaaagcacuucagacccacccccgacgccugcagagccgccuacaacuggaagauggccggcgaccccagauacgaggagagccugcacaaccccuaccccgacuaccacuggcugagaaccgugaagaccaccaaggagagccuggugaucaucagccccagcguggccgaccuggaccccuacgacaagagccugcacagcagaguguuccccggcggcaagugcagcggcaucaccgugagcagcaccuacugcagcaccaaccacgacuacaccaucuggaugcccgagaaccccagacugggcaccagcugcgacaucuucgugaacagcagaggcaagagagccagcagaggcggcaagaccugcggcuucguggacgagagaggccuguacaagagccugaagggcgccugcaagcugaagcugugcggcgugcccggccugagacugauggacggcaccuggguggccauccagaccagcgacgagaccaaguggugcccccccgaccagcuggugaaccugcacgacuucagaagcgacgagaucgagcaccuggugguggaggagcuggugaagaagagagaggagugccuggacgcccuggagagcaucaugaccaccaagagcgugagcuucagaagacugagccaccugagaaagcuggugcccggcuucggcaaggccuacaccaucuucaacaagacccugauggaggccgacgcccacuacaagagcgugagaaccuggaacgagaucauccccagcaagggcugccugagagugggcggcagaugccacccccacgugaacggcguguucuucaacggcaucauccugggccccgacggccacgugcugauccccgagaugcagagcagccugcugcagcagcacauggagcugcuggagagcagcgugaucccccugaugcacccccuggccgaccccagcaccguguucaaggacggcgacgaggccgaggacuucguggaggugcaccugcccgacgugcacaagcugaucagcggcguggaccugggccugcccagcuggggcaaguacgugcugaugagcgugggcauccugaccacccugaugcugaugaucuuccugaugaccugcugcagaagagugaaccaggugggccccaagcagcacggccuggagggcgccggcagaaaggugagcgugaccagccagaacggcagagugaucagcagcugggagagcuacaagagcggcggcgagaccagacuguga

SEQ ID NO: 190821 - RNA, 1575 nt, Artificial Sequence
  derived and/or modified CDS sequence (opt4) from glycoprotein__RABV__AB817103.1
auggugccccaggcccugcuguucgugccccugcugguguucagccugugcuucggcaaguuccccaucuacaccauccccgacaagcugggccccuggagccccaucgacauccaccaccugagcugccccaacaaccuggugguggaggacgagggcugcaccaaccugagcggcuucagcuacauggagcugaaggugggcuacaucagcgccaucaaggugaacggcuucaccugcaccggcguggugaccgaggccgagaccuacaccaacuucgugggcuacgugaccaccaccuucagaagaaagcacuucagacccacccccgacgccugcagagccgccuacaacuggaagauggccggcgaccccagauacgaggagagccugcacaaccccuaccccgacuaccacuggcugagaaccgugaagaccaccaaggagagccuggugaucaucagccccagcguggccgaccuggaccccuacgacaagagccugcacagcagaguguuccccggcggcaagugcagcggcaucaccgugagcagcaccuacugcagcaccaaccacgacuacaccaucuggaugcccgagaaccccagacugggcaccagcugcgacaucuucgugaacagcagaggcaagagagccagcaagggcggcaagaccugcggcuucguggacgagagaggccuguacaagagccugaagggcgccugcaagcugaagcugugcggcgugcccggccugagacugauggacggcaccuggguggccauccagaccagcgacgagaccaaguggugcccccccgaccagcuggugaaccugcacgacuucagaagcgacgagaucgagcaccuggugguggaggagcuggugaagaagagagaggagugccuggacgcccuggagagcaucaugaccaccaagagcgugagcuucagaagacugagccaccugagaaagcuggugcccggcuucggcaaggccuacaccaucuucaacaagacccugauggaggccgacgcccacuacaagagcgugagaaccuggaacgagaucauccccagcaagggcugccugagagugggcggcagaugccacccccacgugaacggcguguucuucaacggcaucauccugggccccgacggccacgugcugauccccgagaugcagagcagccugcugcagcagcacauggagcugcuggagagcagcgugaucccccugaugcacccccuggccgaccccagcaccguguucaaggacggcgacgaggccgaggacuucguggaggugcaccugcccgacgugcacaagcugaucagcggcguggaccugggccugcccagcuggggcaaguacgugcugaugagcgccggcauccugaccacccugaugcugaugaucuuccugaugaccugcugcagaagagugaaccaggccggcagcaagcagcacggccuggagggcgccggcagaaaggugagcgugaccagccagaacggcagaaucaucagcagcugggagagcuacaagagcggcggcgagaccagacuguga

SEQ ID NO: 190822 - RNA, 1575 nt, Artificial Sequence; identical to SEQ ID NO: 190818
  derived and/or modified CDS sequence (opt4) from glycoprotein__RABV__AB817104.1

SEQ ID NO: 190823 - RNA, 1575 nt, Artificial Sequence
  derived and/or modified CDS sequence (opt4) from glycoprotein__RABV__AB817105.1
auggugccccaggcccugcuguucgugccccugcugguguucagccugugcuucggcaaguuccccaucuacaccauccccgacaagcugggccccuggagccccaucgacauccaccaccugagcugccccaacaaccuggugguggaggacgagggcugcaccaaccugagcggcuucagcuacauggagcugaaggugggcuacaucagcgccaucaaggugaacggcuucaccugcaccggcguggugaccgaggccgagaccuacaccaacuucgugggcuacgugaccaccaccuucagaagaaagcacuucagacccacccccgacgccugcagagccgccuacaacuggaagauggccggcgaccccagauacgaggagagccugcacaaccccuaccccgacuaccacuggcugagaaccgugaagaccaccaaggagagccuggugaucaucagccccagcguggccgaccuggaccccuacgacaagagccugcacagcagaguguuccccggcggcaagugcagcggcaucaccgugagcagcaccuacugcagcaccaaccacgacuacaccaucuggaugcccgagaaccccagacugggcaccagcugcgacaucuucgugaacagcagaggcaagagagccagcaagggcggcaagaccugcggcuucguggacgagagaggccuguacaagagccugaagggcgccugcaagcugaagcugugcggcgugcccggccugagacugauggacggcaccuggguggccauccagaccagcgacgagaccaaguggugcccccccgaccagcuggugaaccugcacgacuucagaagcgacgagaucgagcaccuggugguggaggagcuggugaagaagagagaggagugccuggacgcccuggagagcaucaugaccaccaagagcgugagcuucagaagacugagccaccugagaaagcuggugcccggcuucggcaaggccuacaccaucuucaacaagacccugauggaggccgacgcccacuacaagagcgugagaaccuggaacgagaucauccccagcaagggcugccugagagugggcggcagaugccacccccacgugaacggcguguucuucaacggcaucauccugggccccgacggccacgugcugauccccgagaugcagagcagccugcugcagcagcacauggagcugcuggagagcagcgugaucccccugaugcacccccuggccgaccccagcaccguguucaaggacggcgacgaggccgaggacuucguggaggugcaccugcccgacgugcacaagcugaucagcggcguggaccugggccugcccagcuggggcaaguacgugcugaugagcgccggcauccugaccacccugaugcugaugaucuuccugaugaccugcugcagaagagugaaccaggccggcagcaagcagcacggccuggagggcgccggcagaaaggugagcgugaccagccagaccggcagaaucaucagcagcugggagagcuacaagagcggcggcgagaccagacuguga

SEQ ID NO: 190824 - RNA, 1575 nt, Artificial Sequence; identical to SEQ ID NO: 190817
  derived and/or modified CDS sequence (opt4) from glycoprotein__RABV__AB817106.1

SEQ ID NO: 190825 - RNA, 1575 nt, Artificial Sequence; identical to SEQ ID NO: 190818
  derived and/or modified CDS sequence (opt4) from glycoprotein__RABV__AB817107.1

SEQ ID NO: 190826 - RNA, 1575 nt, Artificial Sequence; identical to SEQ ID NO: 190818
  derived and/or modified CDS sequence (opt4) from glycoprotein__RABV__AB817108.1

SEQ ID NO: 190827 - RNA, 1575 nt, Artificial Sequence; identical to SEQ ID NO: 190818
  derived and/or modified CDS sequence (opt4) from glycoprotein__RABV__AB817109.1

SEQ ID NO: 190828 - RNA, 1575 nt, Artificial Sequence
  derived and/or modified CDS sequence (opt4) from glycoprotein__RABV__AB817110.1
auggugccccaggcccugcuguucgugccccugcugguguucagccugugcuucggcaaguuccccaucuacaccauccccgacaagcugggccccuggagccccaucgacauccaccaccugagcugccccaacaaccuggugguggaggacgagggcugcaccaaccugagcggcuucagcuacauggagcugaaggugggcuacaucagcgccaucaaggugaacggcuucaccugcaccggcguggugaccgaggccgagaccuacaccaacuucgugggcuacgugaccaccaccuucagaagaaagcacuucagacccacccccgacgccugcagagccgccuacaacuggaagauggccggcgaccccagauacgaggagagccugcacaaccccuaccccgacuaccacuggcugagaaccgugaagaccaccaaggagagccuggugaucaucagccccagcguggccgaccuggaccccuacgacaagagccugcacagcagaguguuccccggcggcaagugcagcggcaucaccgugagcagcaccuacugcagcaccaaccacgacuacaccaucuggaugcccgagaaccccagacugggcaccagcugcgacaucuucgugaacagcagaggcaagagagccagcaagggcggcaagaccugcggcuucguggacgagagaggccuguacaagagccugaagggcgccugcaagcugaagcugugcggcgugcccggccugagacugauggacggcaccuggguggccauccagaccagcgacgagaccaaguggugcccccccgaccagcuggugaaccugcacgacuucagaagcgacgagaucgagcaccuggugguggaggagcuggugaagaagagagaggagugccuggacgcccuggagagcaucaugaccaccaagagcgugagcuucagaagacugagccaccugagaaagcuggugcccggcuucggcaaggccuacaccaucuucaacaagacccugauggaggccgacgcccacuacaagagcgugagaaccuggaacgagaucauccccagcaagggcugccugagagugggcggcagaugccacccccacgugaacggcguguucuucaacggcaucauccugggccccgacggccacgugcugauccccgagaugcagagcagccugcugcagcagcacauggagcugcuggagagcagcgugaucccccugaugcacccccuggccgaccccagcaccguguucaaggacggcgacgaggccgaggacuucguggaggugcaccugcccgacgugcacaagcugaucagcggcguggaccugggccugcccagcuggggcaaguacgugcugaucagcgccggcauccugaucacccugaugcugaugaucuuccugaugaccugcugcagaagagugaaccaggccggcagcaagcagcacggccuggagggcgccggcagaaaggugagcgugaccagccagaacggcagagugaucagcagcugggagagcuacaagaacggcggcgagaccagacuguga

SEQ ID NO: 190829 - RNA, 1575 nt, Artificial Sequence
  derived and/or modified CDS sequence (opt4) from glycoprotein__RABV__AB817111.1
auggugccccaggcccugcuguucgugccccugcugguguucagccugugcuucggcaaguuccccaucuacaccauccccgacaagcugggccccuggagccccaucgacauccaccaccugagcugccccaacaaccuggugguggaggacgagggcugcaccaaccugagcggcuucagcuacauggagcugaaggugggcuacaucagcgccaucaaggugaacggcuucaccugcaccggcguggugaccgaggccgagaccuacaccaacuucgugggcuacgugaccaccaccuucagaagaaagcacuucagacccacccccgacgccugcagagccgccuacaacuggaagauggccggcgaccccagauacgaggagagccugcacaaccccuaccccgacuaccacuggcugagaaccgugaagaccaccaaggagagccuggugaucaucagccccagcguggccgaccuggaccccuacgacaagagccugcacagcagaguguuccccggcggcaagugcagcggcaucaccgugagcagcaccuacugcagcaccaaccacgacuacaccaucuggaugcccgagaaccccagacugggcaccagcugcgacaucuucgugaacagcagaggcaagagagccagcaagggcggcaagaccugcggcuucguggacgagagaggccuguacaagagccugaagggcgccugcaagcugaagcugugcggcgugcccggccugagacugauggacggcaccuggguggccauccagaccagcgacgagaccaaguggugcccccccgaccagcuggugaaccugcacgacuucagaagcgacgagaucgagcaccuggugguggaggagcuggugaagaagagagaggagugccuggacgcccuggagagcaucaugaccaccaagagcgugagcuucagaagacugagccaccugagaaagcuggugcccggcuucggcaaggccuacaccaucuucaacaagacccugauggaggccgacgcccacuacaagagcgugagaaccuggaacgagaucauccccagcaagggcugccugagagugggcggcagaugccacccccacgugaacggcguguucuucaacggcaucauccugggccccgacggccacgugcugauccccgagaugcagagcagccugcugcagcagcacauggagcugcuggagagcagcgugaucccccugaugcacccccuggccgaccccagcaccguguucaaggacggcgacgaggccgaggacuucguggaggugcaccugcccgacgugcacaagcugaucagcggcguggaccugggccugcccagcuggggcaaguacgugcugaugagcgccggcauccugaucacccugaugcugaugaucuuccugaugaccugcugcagaagagugaaccaggccggcagcagacagcacgagcuggagggcgccggcagaaaggugagcgugaccagccagaacggcagagugaucagcagcugggagagcuacaagagcggcggcgagaccagacuguga

SEQ ID NO: 190830 - RNA, 1575 nt, Artificial Sequence; identical to SEQ ID NO: 190828
  derived and/or modified CDS sequence (opt4) from glycoprotein__RABV__AB817112.1

SEQ ID NO: 190831 - RNA, 1575 nt, Artificial Sequence
  derived and/or modified CDS sequence (opt4) from glycoprotein__RABV__AB817113.1
auggugccccaggcccugcuguucgugccccugcugguguucagccugugcuucggcaaguuccccaucuacaccauccccgacaagcugggccccuggagccccaucgacgugcaccaccugagcugccccaacaaccuggugguggaggacgagggcugcaccaaccugagcggcuucagcuacauggagcugaaggugggcuacaucagcgccaucaaggugaacggcuucaccugcaccggcguggugaccgaggccgagaccuacaccaaccuggugggcuacgugaccaccaccuucagaagaaagcacuucagacccacccccgacgccugcagagccagcuacaacuggaagauggccggcgaccccagauacgaggagagccugcacaaccccuaccccgacuaccacuggcugagaaccgugaagaccaccaaggagagccuggugaucaucagccccagcguggccgaccuggaccccuacgacaagagccugcacagcagaguguuccccggcggcaagugcagcggcaucaccgugagcagcaccuacugcagcaccaaccacgacuacaccaucuggaugcccgagaaccccagacugggcaccagcugcgacaucuucgugaacagcagaggcaagagagccagcaagggcggcaagaccugcggcuucguggacgagagaggccuguacaagagccugaagggcgccugcaagcugaagcugugcggcgugcccggccugagacugauggacggcaccuggguggccauccagaccagcgacgagaccaaguggugcccccccgaccagcuggugaaccugcacgacuucagaagcgacgagaucgagcaccuggugguggaggagcuggugaagaagagagaggagugccuggacgcccuggagagcaucaugaccaccaagagcgugagcuucagaagacugagccaccugagaaagcuggugcccggcuucggcaaggccuacaccaucuucaacaagacccugauggaggccgacgcccacuacaagagcgugagaaccuggaacgagaucauccccagcaagggcugccugagagugggcggcagaugccacccccacgugaacggcguguucuucaacggcaucauccugggccccgacggccacgugcugauccccgagaugcagagcagccugcugcagcagcacauggagcugcuggagagcagcgugaucccccugaugcacccccuggccgaccccagcaccguguucaaggacggcgacgaggccgaggacuucguggaggugcaccugcccgacgugcacaagcugaucagcggcguggaccugggccugcccagcuggggcaaguacgugcugaugagcgccggcauccugaccacccugaugcugaugaucuuccugaugaccugcugcagaagagugaaccaggccggcagcaagcagcacggccuggagggcgccggcagaaaggugagcgugaccagccagaacggcagagugaucagcagcugggagagcuacaagagcggcggcgagaccagacuguga

SEQ ID NO: 190832 - RNA, 1575 nt, Artificial Sequence
  derived and/or modified CDS sequence (opt4) from glycoprotein__RABV__AB817114.1
auggugccccaggcccugcuguucgugccccugcugguguucagccugugcuucggcaaguuccccaucuacaccauccccgacaagcugggccccuggagccccaucgacauccaccaccugagcugccccaacaaccuggugguggaggacgagggcugcaccaaccugagcggcuucagcuacauggagcugaaggugggcuacaucagcgccaucaaggugaacggcuucaccugcaccggcguggugaccgaggccgagaccuacaccaacuucgugggcuacgugaccaccaccuucagaagaaagcacuucagacccacccccgacgccugcagagccgccuacaacuggaagauggccggcgaccccagauacgaggagagccugcacaaccccuaccccgacuaccacuggcugagaaccgugaagaccaccaaggagagccuggugaucaucagccccagcguggccgaccuggaccccuacgacaagagccugcacagcagaguguuccccggcggcaagugcagcggcaucaccgugagcagcaccuacugcagcaccaaccacgacuacaccaucuggaugcccgagaaccccagacugggcaccagcugcgacaucuucgugaacagcagaggcaagagagccagcaagggcggcaagaccugcggcuucguggacgagagaggccuguacaagagccugaagggcgccugcaagcugaagcugugcggcgugcccggccugagacugauggacggcaccuggguggccauccagaccagcgacgagaccaaguggugcccccccgaccagcuggugaaccugcacgacuucagaagcgacgagaucgagcaccuggugguggaggagcuggugaagaagagagaggagugccuggacgcccuggagagcaucaugaccaccaagagcgugagcuucagaagacugagccaccugagaaagcuggugcccggcuucggcaaggccuacaccaucuucaacaagacccugauggaggccgacgcccacuacaagagcgugagaaccuggaacgagaucauccccagcaagggcugccugagagugggcggcagaugccacccccacgugaacggcguguucuucaacggcaucauccugggccccgacggccacgugcugauccccgagaugcagagcagccugcugcagcagcacauggagcugcuggagagcagcgugaucccccugaugcacccccuggccgaccccagcaccguguucaaggacggcgacgaggccgaggacuucguggaggugcaccugcccgacgugcacaagcugaucagcggcguggaccugggccugcccagcuggggcaaguacgugcugaugagcgccggcauccugaccacccugaugcugaugaucuuccugaugaccugcugcagaagagugaaccaggccggcagcaagcagcacggccuggagagagccggcagaaaggugagcgugaccagccagaacggcagagugaucagcagcugggagagcuacaagagcggcggcgagaccagacuguga

SEQ ID NO: 190833 - RNA, 1575 nt, Artificial Sequence
  derived and/or modified CDS sequence (opt4) from glycoprotein__RABV__AB817115.1
auggugccccaggcccugcuguucgugccccugcugguguucagccugugcuucggcaaguuccccaucuacaccauccccgacaagcugggccccuggagccccaucgacauccaccaccugagcugccccaacaaccuggugguggaggacgagggcugcaccaaccugagcggcuucagcuacauggagcugaaggugggcuacaucagcgccaucaaggugaacggcuucaccugcaccggcguggugaccgaggccgagaccuacaccaacuucgugggcuacgugaccaccaccuucagaagaaagcacuucagacccacccccgacgccugcagagccgccuacaacuggaagauggccggcgaccccagauacgaggagagccugcacaaccccuaccccgacuaccacuggcugagaaccgugaagaccaccaaggagagccuggugaucaucagccccagcguggccgaccuggaccccuacgacaagagccugcacagcagaguguuccccggcggcaagugcagcggcaucaccgugagcagcaccuacugcagcaccaaccacgacuacaccaucuggaugcccgagaaccccagacugggcaccagcugcgacaucuucgugaacagcagaggcaagagagccagcaagggcggcaagaccugcggcuucguggacgagagaggccuguacaagagccugaagggcgccugcaagcugaagcugugcggcgugcccggccugagacugauggacggcaccuggguggccauccagaccagcgacgagaccaaguggugcccccccgaccagcuggugaaccugcacgacuucagaagcgacgagaucgagcaccuggugguggaggagcuggugaagaagagagaggagugccuggacgcccuggagagcaucaugaccaccaagagcgugagcuucagaagacugagccaccugagaaagcuggugcccggcuucggcaaggccuacaccaucuucaacaagacccugauggaggccgacgcccacuacaagagcgugagaaccuggaacgagaucauccccagcaagggcugccugagagugggcggcagaugccacccccacgugaacggcguguucuucaacggcaucauccugggccccgacggccacgugcugauccccgagaugcagagcagccugcugcagcagcacauggagcugcuggagagcagcgugaucccccugaugcacccccuggccgaccccagcaccguguucaaggacggcgacgaggccgaggacuucguggaggugcaccugcccgacgugcacaagcugaucagcggcguggaccugggccugcccggcuggggcaaguacgugcugaugagcgccggcauccugaccacccugaugcugaugaucuuccugaugaccugcugcagaagagugaaccaggccggcagcaagcagcacggccuggagggcgccggcagaaaggugagcgugaccagccagaacggcagagugaucagcagcugggagagcuacaagagcggcggcgagaccagacuguga

SEQ ID NO: 190834 - RNA, 1575 nt, Artificial Sequence; identical to SEQ ID NO: 190818
  derived and/or modified CDS sequence (opt4) from glycoprotein__RABV__AB817116.1

SEQ ID NO: 190835 - RNA, 1575 nt, Artificial Sequence; identical to SEQ ID NO: 190823
  derived and/or modified CDS sequence (opt4) from glycoprotein__RABV__AB817117.1

SEQ ID NO: 190836 - RNA, 1575 nt, Artificial Sequence; identical to SEQ ID NO: 190818
  derived and/or modified CDS sequence (opt4) from glycoprotein__RABV__AB817118.1

SEQ ID NO: 190837 - RNA, 1575 nt, Artificial Sequence; identical to SEQ ID NO: 190817
  derived and/or modified CDS sequence (opt4) from glycoprotein__RABV__AB817119.1

SEQ ID NO: 190838 - RNA, 1575 nt, Artificial Sequence; identical to SEQ ID NO: 190818
  derived and/or modified CDS sequence (opt4) from glycoprotein__RABV__AB817120.1

SEQ ID NO: 190839 - RNA, 1575 nt, Artificial Sequence; identical to SEQ ID NO: 190818
  derived and/or modified CDS sequence (opt4) from glycoprotein__RABV__AB817121.1

SEQ ID NO: 190840 - RNA, 1575 nt, Artificial Sequence; identical to SEQ ID NO: 190821
  derived and/or modified CDS sequence (opt4) from glycoprotein__RABV__AB817122.1

SEQ ID NO: 190841 - RNA, 1575 nt, Artificial Sequence
  derived and/or modified CDS sequence (opt4) from glycoprotein__RABV__AB817123.1
auggugccccaggcccugcuguucgugccccugcugguguucagccugugcuucggcaaguuccccaucuacaccauccccgacaagcugggccccuggagccccaucgacauccaccaccugagcugccccaacaaccuggugguggaggacgagggcugcaccaaccugagcggcuucagcuacauggagcugaaggugggcuacaucagcgccaucaaggugaacggcuucaccugcaccggcguggugaccgaggccgagaccuacaccaacuucgugggcuacgugaccaccaccuucagaagaaagcacuucagacccacccccgacgccugcagagccgccuacaacuggaagauggccggcgaccccagauacgaggagagccugcacaaccccuaccccgacuaccacuggcugagaaccgugaagaccaccaaggagagccuggugaucaucagccccagcguggccgaccuggaccccuacgacaagagccugcacagcagaguguuccccggcggcaagugcagcggcaucaccgugagcagcaccuacugcagcaccaaccacgacuacaccaucuggaugcccgagaaccccagacugggcaccagcugcgacaucuucgugaacagcagaggcaagagagccagcaagggcggcaagaccugcggcuucguggacgagagaggccuguacaagagccugaagggcgccugcaagcugaagcugugcggcgugcccggccugagacugauggacggcaccuggguggccauccagaccagcgacgagaccaaguggugcccccccgaccagcuggugaaccugcacgacuucagaagcgacgagaucgagcaccuggugguggaggagcuggugaagaagagagaggagugccuggacgcccuggagagcaucaugaccaccaagagcgugagcuucagaagacugagccaccugagaaagcuggugcccggcuucggcaaggccuacaccaucuucaacaagacccugauggaggccgacgcccacuacaagagcgugagaaccuggaacgagaucauccccagcaagggcugccugagagugggcggcagaugccacccccacgugaacggcguguucuucaacggcaucauccugggccccgacggccacgugcugauccccgagaugcagagcagccugcugcagcagcacauggagcugcuggagagcagcgugaucccccugaugcacccccuggccgaccccagcaccguguucaaggacggcgacgaggccgaggaguucguggaggugcaccugcccgacgugcacaagcugaucagcggcguggaccugggccugcccagcuggggcaaguacgugcugaugagcgccggcauccugaucacccugaugcugaugaucuuccugaugaccugcugcagaagagugaaccaggccggcagcaagcagcacggccuggagggcgccggcagaaaggugagcgugaccagccagaacggcagagugaucagcagcugggagagcuacaagagcggcggcgagaccagacuguga

SEQ ID NO: 190842 - RNA, 1575 nt, Artificial Sequence; identical to SEQ ID NO: 190818
  derived and/or modified CDS sequence (opt4) from glycoprotein__RABV__AB817124.1

SEQ ID NO: 190843 - RNA, 1575 nt, Artificial Sequence; identical to SEQ ID NO: 190821
  derived and/or modified CDS sequence (opt4) from glycoprotein__RABV__AB817125.1

SEQ ID NO: 190844 - RNA, 1575 nt, Artificial Sequence
  derived and/or modified CDS sequence (opt4) from glycoprotein__RABV__AB817128.1
auggugccccaggcccugcuguucgugccccugcuggccuucagccugugcuucggcaaguuccccaucuacaccauccccgacaagcugggccccuggagccccaucgacauccaccaccugagcugccccaacaaccuggugguggaggacgagggcugcaccaaccugagcggcuucagcuacauggagcugaaggugggcuacaucagcgccaucaaggugaacggcuucaccugcaccggcguggugaccgaggccgagaccuacaccaacuucgugggcuacgugaccaccaccuucagaagaaagcacuucagacccacccccgacgccugcagagccgccuacaacuggaagauggccggcgaccccagauacgaggagagccugcacaaccccuaccccgacuaccacuggcugagaaccgugaagaccaccaaggagagccuggugaucaucagccccagcguggccgaccuggaccccuacgacaagagccugcacagcagaguguuccccggcggcaagugcagcggcaucaccgugagcagcaccuacugcagcaccaaccacgacuacaccaucuggaugcccgagaaccccagacugggcaccagcugcgacaucuucgugaacagcagaggcaagagagccagcaagggcggcaagaccugcggcuucguggacgagagaggccuguacaagagccugaagggcgccugcaagcugaagcugugcggcgugcccggccugagacugauggacggcaccuggguggccauccagaccagcgacgagaccaaguggugcccccccgaccagcuggugaaccugcacgacuucagaagcgacgagaucgagcaccuggugguggaggagcuggugaagaagagagaggagugccuggacgcccuggagagcaucaugaccaccaagagcgugagcuucagaagacugagccaccugagaaagcuggugcccggcuucggcaaggccuacaccaucuucaacaagacccugauggaggccgacgcccacuacaagagcgugagaaccuggaacgagaucauccccagcaagggcugccugagagugggcggcagaugccacccccacgugaacggcguguucuucaacggcaucauccugggccccgacggccacgugcugauccccgagaugcagagcagccugcugcagcagcacauggagcugcuggagagcagcgugaucccccugaugcacccccuggccgaccccagcaccguguucaaggacggcgacgaggccgaggacuucguggaggugcaccugcccgacgugcacaagcugaucagcggcguggaccugggccugcccagcuggggcaaguacgugcugaugagcgccggcauccugaucacccugaugcugaugaucuuccugaugaccugcugcagaagagugaaccaggccggcagcaagcagcacggccuggagggcgccggcagaaaggugagcgugagcagccagaacggcagagugaucagcagcugggagagcuacaagagcggcggcgagaccagacuguga

SEQ ID NO: 190845 - RNA, 1575 nt, Artificial Sequence
  derived and/or modified CDS sequence (opt4) from glycoprotein__RABV__AB817129.1
auggugccccaggcccugcuguucgugccccugcugguguucagccugugcuucggcaaguuccccaucuacaccauccccgacaagcugggccccuggagccccaucgacauccaccaccugagcugccccaacaaccuggugguggaggacgagggcugcaccaaccugagcggcuucagcuacauggagcugaaggugggcuacaucagcgccaucaaggugaacggcuucaccugcaccggcguggugaccgaggccgagaccuacaccaacuucgugggcuacgugaccaccaccuucagaagaaagcacuucagacccacccccgacgccugcagagccgccuacaacuggaagauggccggcgaccccagauacgaggagagccugcacaaccccuaccccgacuaccacuggcugagaaccgugaagaccaccaaggagagccuggugaucaucagccccagcguggccgaccuggaccccuacgacaagagccugcacagcagaguguuccccggcggcaagugcagcggcaucaccgugagcagcaccuacugcagcaccaaccacgacuacaccaucuggaugcccgagaaccccagacugggcaccagcugcgacaucuucgugaacagcagaggcaagagagccagcaagggcggcaagaccugcggcuucguggacgagagaggccuguacaagagccugaagggcgccugcaagcugaagcugugcggcgugcccggccugagacugauggacggcaccuggguggccauccagaccagcgacgagaccaaguggugcccccccgaccagcuggugaaccugcacgacuucagaagcgacgagaucgagcaccuggugguggaggagcuggugaagaagagagaggagugccuggacgcccuggagagcaucaugaccaccaagagcgugagcuucagaagacugagccaccugagaaagcuggugcccggcuucggcaaggccuacaccaucuucaacaagacccugauggaggccgacgcccacuacaagagcgugagaaccuggaacgagaucauccccagcaagggcugccugagagugggcggcagaugccacccccacgugaacggcguguucuucaacggcaucauccugggccccgacggccacgugcugauccccgagaugcagagcagccugcugcagcagcacauggagcugcuggagagcagcgugaucccccugaugcacccccuggccgaccccagcaccguguucaaggacggcgacgaggccgaggacuucguggaggugcaccugcccgacgugcacaagcugaucagcggcguggaccugggccugcccagcuggggcaaguacgugcugaugagcgccggcauccugaucacccugaugcugaugaucuuccugaugaccugcugcagaagagugaaccaggccggcagcaagcagcacggccuggagggcgccggcagaaaggugagcgugagcagccagaacggcagagugaucagcagcugggagagcuacaagagcggcggcgagaccagacuguga

SEQ ID NO: 190846 - RNA, 1575 nt, Artificial Sequence; identical to SEQ ID NO: 190818
  derived and/or modified CDS sequence (opt4) from glycoprotein__RABV__AB817130.1

SEQ ID NO: 190847 - RNA, 1575 nt, Artificial Sequence; identical to SEQ ID NO: 190818
  derived and/or modified CDS sequence (opt4) from glycoprotein__RABV__AB817131.1

SEQ ID NO: 190848 - RNA, 1575 nt, Artificial Sequence; identical to SEQ ID NO: 190818
  derived and/or modified CDS sequence (opt4) from glycoprotein__RABV__AB817132.1

SEQ ID NO: 190849 - RNA, 1575 nt, Artificial Sequence
  derived and/or modified CDS sequence (opt4) from glycoprotein__RABV__AB817133.1
auggugccccaggcccugcuguucgugccccugcugguguucagccugugcuucggcaaguuccccaucuacaccauccccgacaagcugggccccuggagccccaucgacauccaccaccugagcugccccaacaaccuggugguggaggacgagggcugcaccaaccugagcggcuucagcuacauggagcugaaggugggcuacaucagcgccaucaaggugaacggcuucaccugcaccggcguggugaccgaggccgagaccuacaccaacuucgugggcuacgugaccaccaccuucagaagaaagcacuucagacccacccccgacgccugcagagccgccuacaacuggaagauggccggcgaccccagauacgaggagagccugcacaaccccuaccccgacuaccacuggcugagaaccgugaagaccaccaaggagagccuggugaucaucagccccagcguggccgaccuggaccccuacgacaagagccugcacagcagaguguuccccggcggcaagugcagcggcaucaccgugagcagcaccuacugcagcaccaaccacgacuacaccaucuggaugcccgagaaccccagacugggcaccagcugcgacaucuucgugaacagcagaggcaagagagccagcaagggcggcaagaccugcggcuucguggacgagagaggccuguacaagagccugaagggcgccugcaagcugaagcugugcggcgugcccggccugagacugauggacggcaccuggguggccauccagaccagcgacgagaccaaguggugcccccccgaccagcuggugaaccugcacgacuucagaagcgacgagaucgagcaccuggugguggaggagcuggugaagaagagagaggagugccuggacgcccuggagagcaucaugaccaccaagagcgugagcuucagaagacugagccaccugagaaagcuggugcccggcuucggcaaggccuacaccaucuucaacaagacccugauggaggccgacgcccacuacaagagcgugagaaccuggaacgagaucauccccagcaagggcugccugagagugggcggcagaugccacccccacgugaacggcguguucuucaacggcaucauccugggccccgacggccacgugcugauccccgagaugcagagcagccugcugcagcagcacauggagcugcuggagagcagcgugaucccccugaugcacccccuggccgaccccagcaccguguucaaggacggcgacgaggccgaggacuucguggaggugcaccugcccgacgugcacaagcugaucagcggcguggaccugggccugcccagcuggggcaaguacgcccugaugagcgccggcgugcugaccacccugaugcugaugaucuuccugaugaccugcugcagaagagugaaccaggccggcagcaagcagcacggccuggagggcgccggcagaaaggugagcgugaccagccagaacggcagagugaucagcagcugggagagcuacaagagcggcggcgagaccagacuguga

SEQ ID NO: 190850 - RNA, 1575 nt, Artificial Sequence
  derived and/or modified CDS sequence (opt4) from glycoprotein__RABV__AB817134.1
auggugccccaggcccugcuguucgugccccugcugguguucagccugugcuucggcaaguuccccaucuacaccauccccgacaagcugggccccuggagccccaucgacauccaccaccugagcugccccaacaaccuggugguggaggacgagggcugcaccaaccugagcggcuucagcuacauggagcugaaggugggcuacaucagcgccaucaaggugaacggcuucaccugcaccggcguggugaccgaggccgagaccuacaccaacuucgugggcuacgugaccaccaccuucagaagaaagcacuucagacccacccccgacgccugcagagccgccuacaacuggaagauggccggcgaccccagauacgaggagagccugcacaaccccuaccccgacuaccacuggcugagaaccgugaagaccaccaaggagagccuggugaucaucagccccagcguggccgaccuggaccccuacgacaagagccugcacagcagaguguuccccggcggcaagugcagcggcaucaccgugagcagcaccuacugcagcaccaaccacgacuacaccaucuggaugcccgagaaccccagacugggcaccagcugcgacaucuucgugaacagcagaggcaagagagccagcaagggcggcaagaccugcggcuucguggacgagagaggccuguacaagagccugaagggcgccugcaagcugaagcugugcggcgugcccggccugagacugauggacggcaccuggguggccauccagaccagcgacgagaccaaguggugcacccccgaccagcuggugaaccugcacgacuucagaagcgacgagaucgagcaccuggugguggaggagcuggugaagaagagagaggagugccuggacgcccuggagagcaucaugaccaccaagagcgugagcuucagaagacugagccaccugagaaagcuggugcccggcuucggcaaggccuacaccaucuucaacaagacccugauggaggccgacgcccacuacaagagcgugagaaccuggaacgagaucauccccagcaagggcugccugagagugggcggcagaugccacccccacgugaacggcguguucuucaacggcaucauccugggccccgacggccacgugcugauccccgagaugcagagcagccugcugcagcagcacauggagcugcuggagagcagcgugaucccccugaugcacccccuggccgaccccagcaccguguucaaggacggcgacgaggccgaggacuucguggaggugcaccugcccgacgugcacaagcugaucagcggcguggaccugggccugcccagcuggggcaaguacgugcugaugagcgccggcauccugaucacccugaugcugaugaucuuccugaugaccugcugcagaagagugaaccaggccggcagcaagcagcacggccuggagggcgccggcagaaaggugagcgugaccagccagaacggcagagugaucagcagcugggagagcuacaagagcggcggcgagaccagacuguga

SEQ ID NO: 190851 - RNA, 1575 nt, Artificial Sequence
  derived and/or modified CDS sequence (opt4) from glycoprotein__RABV__AB817135.1
auggugccccaggcccugcuguucgugccccugcugguguucagccugugcuucggcaaguuccccaucuacaccauccccgacaagcugggccccuggagccccaucgacauccaccaccugagcugccccaacaaccuggugguggaggacgagggcugcaccaaccugagcggcuucagcuacauggagcugaaggugggcuacaucagcgccaucaaggugaacggcuucaccugcaccggcguggugaccgaggccgagaccuacaccaacuucgugggcuacgugaccaccaccuucagaagaaagcacuucagacccacccccgacgccugcagagccgccuacaacuggaagauggccggcgaccccagauacgaggagagccugcacaaccccuaccccgacuaccacuggcugagaaccgugaagaccaccaaggagagccuggugaucaucagccccagcguggccgaccuggaccccuacgacaagagccugcacagcagaguguuccccggcggcaagugcagcggcaucaccgugagcagcaccuacugcagcaccaaccacgacuacaccaucuggaugcccgagaaccccagacugggcaccagcugcgacaucuucgugaacagcagaggcaagagagccagcaagggcggcaagaccugcggcuucguggacgagagaggccuguacaagagccugaagggcgccugcaagcugaagcugugcggcgugcccggccugagacugauggacggcaccuggguggccauccagaccagcgacgagaccaaguggugcccccccgaccagcuggugaaccugcacgacuucagaagcgacgagaucgagcaccuggugguggaggagcuggugaagaagagagaggagugccuggacgcccuggagagcaucaugaccaccagaagcgugagcuucagaagacugagccaccugagaaagcuggugcccggcuucggcaaggccuacaccaucuucaacaagacccugauggaggccgacgcccacuacaagagcgugagaaccuggaacgagaucauccccagcaagggcugccugagagugggcggcagaugccacccccacgugaacggcguguucuucaacggcaucauccugggccccgacggccacgugcugauccccgagaugcagagcagccugcugcagcagcacauggagcugcuggagagcagcgugaucccccugaugcacccccuggccgaccccagcaccguguucaaggacggcgacgaggccgaggacuucguggaggugcaccugcccgacgugcacaagcugaucagcggcguggaccugggccugcccagcuggggcaaguacgugcugaugagcgccggcauccugaucacccugaugcugaugaucuuccugaugaccugcugcagaagagugaaccaggccggcagcaagcagcacggccuggagggcgccggcagaaaggugagcgugaccagccagaacggcagagugaucagcagcugggagagcuacaagagcggcggcgagaccagacuguga

SEQ ID NO: 190852 - RNA, 1575 nt, Artificial Sequence; identical to SEQ ID NO: 190817
  derived and/or modified CDS sequence (opt4) from glycoprotein__RABV__AB817136.1

SEQ ID NO: 190853 - RNA, 1575 nt, Artificial Sequence; identical to SEQ ID NO: 190817
  derived and/or modified CDS sequence (opt4) from glycoprotein__RABV__AB817137.1

SEQ ID NO: 190854 - RNA, 1575 nt, Artificial Sequence
  derived and/or modified CDS sequence (opt4) from glycoprotein__RABV__AB817138.1
auggugccccaggcccugcuguucgugccccugcugguguucagccugugcuucggcaaguuccccaucuacaccauccccgacaagcugggccccuggagccccaucgacauccaccaccugagcugccccaacaaccuggugguggaggacgagggcugcaccaaccugagcggcuucagcuacauggagcugaaggugggcuacaucagcgccaucaaggugaacggcuucaccugcaccggcguggugaccgaggccgagaccuacaccaacuucgugggcuacgugaccaccaccuucagaagaaagcacuucagacccacccccgacgccugcagagccgccuacaacuggaagauggccggcgaccccagauacgaggagagccugcacaaccccuaccccgacuaccacuggcugagaaccgugaagaccaccaaggagagccuggugaucaucagccccagcguggccgaccuggaccccuacgacaagagccugcacagcagaguguuccccggcggcaagugcagcggcaucaccgugagcagcaccuacugcagcaccaaccacgacuacaccaucuggaugcccgagaaccagagacugggcaccagcugcgacaucuucgugaacagcagaggcaagagagccagcaagggcggcaagaccugcggcuucguggacgagagaggccuguacaagagccugaagggcgccugcaagcugaagcugugcggcgugcccggccugagacugauggacggcaccuggguggccauccagaccagcgacgagaccaaguggugcccccccgaccagcuggugaaccugcacgacuucagaagcgacgagaucgagcaccuggugguggaggagcuggugaagaagagagaggagugccuggacgcccuggagagcaucaugaccaccaagagcgugagcuucagaagacugagccaccugagaaagcuggugcccggcuucggcaaggccuacaccaucuucaacaagacccugauggaggccgacgcccacuacaagagcgugagaaccuggaacgagaucauccccagcaagggcugccugagagugggcggcagaugccacccccacgugaacggcguguucuucaacggcaucauccugggccccgacggccacauccugauccccgagaugcagagcagccugcugcagcagcacauggagcugcuggagagcagcgugaucccccugaugcacccccuggccgaccccagcaccguguucaaggacggcgacgaggccgaggacuucguggaggugcaccugcccgacgugcacaagcugaucagcggcguggaccugggccugcccagcuggggcaaguacgugcugaugagcgccggcauccugaccacccugaugcugaugaucuuccugaugaccugcugcagaagagugaacagagugggcagcaagcagcacggccuggagggcgccggcagaaaggugagcgugaccagccagaacggcagagugaucagcagcugggagagcuacaagagcggcggcgagaccagacuguga

SEQ ID NO: 190855 - RNA, 1575 nt, Artificial Sequence; identical to SEQ ID NO: 190783
  derived and/or modified CDS sequence (opt4) from glycoprotein__RABV__AB817140.1

SEQ ID NO: 190856 - RNA, 1575 nt, Artificial Sequence; identical to SEQ ID NO: 190828
  derived and/or modified CDS sequence (opt4) from glycoprotein__RABV__AB817141.1

SEQ ID NO: 190857 - RNA, 1575 nt, Artificial Sequence
  derived and/or modified CDS sequence (opt4) from glycoprotein__RABV__AB817142.1
auggugccccaggugcugcuguucgugccccugcugguguucagccugugcuucggcaaguuccccaucuacaccauccccgacaagcugggccccuggagccccaucgacauccaccaccugagcugccccaacaaccuggugguggaggacgagggcugcaccaaccugagcggcuucagcuacauggagcugaaggugggcuacaucagcgccaucaaggugaacggcuucaccugcaccggcguggugaccgaggccgagaccuacaccaacuucgugggcuacgugaccaccaccuucagaagaaagcacuucagacccacccccgacgccugcagagccgccuacaacuggaagauggccggcgaccccagauacgaggagagccugcacaaccccuaccccgacuaccacuggcugagaaccgugaagaccaccaaggagagccuggugaucaucagccccagcguggccgaccuggaccccuacgacaagagccugcacagcagaguguuccccggcggcaagugcagcggcaucaccgugagcagcaccuacugcagcaccaaccacgacuacaccaucuggaugcccgagaaccccagacugggcaccagcugcgacaucuucgugaacagcagaggcaagagagccagcaagggcggcaagaccugcggcuucguggacgagagaggccuguacaagagccugaagggcgccugcaagcugaagcugugcggcgugcccggccugagacugauggacggcaccuggguggccauccagaccagcgacgagaccaaguggugcccccccgaccagcuggugaaccugcacgacuucagaagcgacgagaucgagcaccuggugguggaggagcuggugaagaagagagaggagugccuggacgcccuggagagcaucaugaccaccaagagcgugagcuucagaagacugagccaccugagaaagcuggugcccggcuucggcaaggccuacaccaucuucaacaagacccugauggaggccgacgcccacuacaagagcgugagaaccuggaacgagaucauccccagcaagggcugccugagagugggcggcagaugccacccccacgugaacggcguguucuucaacggcaucauccugggccccgacggccacgugcugauccccgagaugcagagcagccugcugcagcagcacauggagcugcuggagagcagcgugaucccccugaugcacccccuggccgaccccagcaccguguucaaggacggcgacgaggccgaggacuucguggaggugcaccugcccgacgugcacaagcugaucagcggcguggaccugggccugcccagcuggggcaaguacgugcugaugagcgccggcauccugaccacccugaugcugaugaucuuccugaugaccugcugcagaagagugaaccaggccggcagcaagcagcacggccuggagggcgccggcagaaaggugagcgugaccagccagaacggcagagugaucagcagcugggagagcuacaagagcggcggcgagaccagacuguga

SEQ ID NO: 190858 - RNA, 1575 nt, Artificial Sequence
  derived and/or modified CDS sequence (opt4) from glycoprotein__RABV__AB817143.1
auggugccccaggcccugcuguucgugccccugcugguguucagccugugcuucggcaaguuccccaucuacaccauccccgacaagcugggccccuggagccccaucgacauccaccaccugagcugccccaacaaccuggugguggaggacgagggcugcaccaaccugagcggcuucagcuacauggagcugaaggugggcuacaucagcgccaucaaggugaacggcuucaccugcaccggcguggugaccgaggccgagaccuacaccaacuucgugggcuacgugaccaccaccuucagaagaaagcacuucagacccacccccgacgccugcagagccgccuacaacuggaagauggccggcgaccccagauacgaggagagccugcacaaccccuaccccgacuaccacuggcugagaaccgugaagaccaccaaggagagccuggugaucaucagccccagcguggccgaccuggaccccuacgacaagagccugcacagcagaguguuccccggcggcaagugcagcggcaucaccgugagcagcaccuacugcagcaccaaccacgacuacaccaucuggaugcccgagaaccccagacugggcaccagcugcgacaucuucgugaacagcagaggcaagagagccagcaagggcggcaagaccugcggcuucguggacgagagaggccuguacaagagccugaagggcgccugcaagcugaagcugugcggcgugcccggccugagacugauggacggcaccuggguggccauccagaccagcgacgagaccaaguggugcccccccgaccagcuggugaaccugcacgacuucagaagcgacgagaucgagcaccuggugguggaggagcuggugaagaagagagaggagugccuggacgcccuggagagcaucaugaccaccaagagcgugagcuucagaagacugagccaccugagaaagcuggugcccggcuucggcaaggccuacaccaucuucaacaagacccugauggaggccgacgcccacuacaagagcgugagaaccuggaacgagaucauccccagcaagggcugccugagagugggcggcagaugccacccccacgugaacggcguguucuucaacggcaucauccugggccccgacggccacgugcugauccccgagaugcagagcagccugcugcagcagcacauggagcugcuggagagcagcgugaucccccugaugcacccccuggccgaccccagcaccguguucaaggacggcgacgaggccgaggacuucguggaggugcaccugcccgacgugcacaagcugaucagcggcguggaccugggccugcccagcuggggcaaguacgugcugaugagcgccggcauccugaucacccugaugcugaugaucuuccugaugaccugcugcagaagagugaaccaggccggcagcaagcagcacggccuggagggcaccggcagaaaggugagcgugaccagccagaacggcagagugaucagcagcugggagagcuacaagagcggcggcgagaccagacuguga

SEQ ID NO: 190859 - RNA, 1575 nt, Artificial Sequence; identical to SEQ ID NO: 190818
  derived and/or modified CDS sequence (opt4) from glycoprotein__RABV__AB817144.1

SEQ ID NO: 190860 - RNA, 1575 nt, Artificial Sequence; identical to SEQ ID NO: 190821
  derived and/or modified CDS sequence (opt4) from glycoprotein__RABV__AB817146.1

SEQ ID NO: 190861 - RNA, 1575 nt, Artificial Sequence
  derived and/or modified CDS sequence (opt4) from glycoprotein__RABV__AB838709.1
augaucccccaggcccugcuguucgugccccugcugguguucagccugugcuucggcaaguuccccaucuacaccauccccgacaagcugggccccuggagccccaucgacauccaccaccugagcugccccaacaaccuggugguggaggacgagggcugcaccaaccugagcggcuucagcuacauggagcugaaggugggcuacaucagcgccaucaaggugaacggcuucaccugcaccggcguggugaccgaggccgagaccuacaccaacuucgugggcuacgugaccaccaccuucaagagaaagcacuucagacccacccccgacgccugcagagccgccuacaacuggaagauggccggcgaccccagauacgaggagagccugcacaaccccuaccccgacuaccacuggcugagaaccgugaagaccaccaaggagagccuggugaucaucugccccagcguggccgaccuggaccccuacgacaagagccugcacagcagaguguuccccagcggcaagugcagcggcaucaccgugagcagcaccuacugcagcaccaaccacgacuacaccaucuggaugcccgagaaccccagacugggcaccagcugcgacaucuucaccaacagcagaggcaagagagccagcaagggcagcaagaccugcggcuucguggacgagagaggccuguacaagagccugaagggcgccugcaagcugaagcugugcggcgugcugggccugagacugauggacggcaccugggccgccauccagaccagcgacgagaccaaguggugcccccccgaccagcuggugaaccugcacgacuucagaagcgacgagaucgagcaccuggugguggaggagcuggugaagaagagagaggagugccuggacgcccuggagagcaucaugaccaccaagagcgugagcuucagaagacugagccaccugagaaagcuggugcccggcuucggcaaggccuacaccaucuucaacaagacccugauggaggccgacgcccacuacaagagcgugagaaccuggaacgagaucauccccagcaagggcugccugagagugggcggcagaugccacccccacgugaacggcguguucuucaacggcaucauccugggccccgacggccacgugcugauccccgagaugcagagcagccugcugcagcagcacauggagcugcuggagagcagcgugaucccccugaugcacccccuggccgaccccagcaccguguucaaggacgacgacgaggccgaggacuucguggaggugcaccugcccgacgugcacaagcaggugagcggcguggaccugggccugcccagcuggggcaaguacgugcugaugagcgccggcgugcugaccgcccugaugcugaugaucuuccugaccaccugcugcagaagagccaacagagccgagagcgcccagcacagccugggcgagagaggcagaaaggugagcgugaccagccagagcggcagagugaucagcagcugggagagcuacaagagcggcggcgagaccaagcuguga

SEQ ID NO: 190862 - RNA, 1575 nt, Artificial Sequence; identical to SEQ ID NO: 190694
  derived and/or modified CDS sequence (opt4) from glycoprotein__RABV__AB838710.1

SEQ ID NO: 190863 - RNA, 1575 nt, Artificial Sequence
  derived and/or modified CDS sequence (opt4) from glycoprotein__RABV__AB905545.1
augaucccccaggcccugcuguucgugccccugcugaucagcagcagcugccugggcaaguuccccaucuacaccauccccgacaagcugggccccuggagccccaucgacauccaccaccugagcugccccaacaaccuggugguggaggacgagggcugcaccaaccugagcggcuucagcuacauggagcugaaggugggcuacaucagcgccaucaaggugaacggcuucaccugcaccggcguggugaccgaggccgagaccuacaccaacuucgugggcuacgugaccaccaccuucaagagaaagcacuucagacccauccccgacgccugcagagccgccuacaacuggaagauggccggcgaccccagauacgaggagagccugcagaaccccuaccccgacuaccacuggcugagaaccgugaagaccaccaaggagagccugaucaucaucagccccagcguggccgaccuggaccccuacgacaagagccugcacagcagaguguuccccggcggcaagugccugggcaucaccgugagcagcaccuacugcagcaccaaccacgacuacaccaucuggaugcccgaggagcccagacugggcaccagcugcgacaucuucaccagcagcaagggcaagaaggccagcaagggcggcaagaccugcggcuucguggacgagagaggccuguacaagagccugaagggcgccugcaagcugaagcugugcggcgugcugggccugagacugauggacggcaccugggugagcauccagaccagcgacgacaccaaguggugcccccccgaccagcuggugaaccugcacgacuuccacagcgacgagaucgagcaccuggugguggaggagcuggugaagaagagagaggagugccuggacgcccuggagagcaucaugaccaccaagagcgugagcuucagaagacugagcuaccugagaaagcuggugcccggcuucggcaaggccuacaccaucuucaacaagacccugauggaggccgacgcccacuacaagagcgugagaaccuggaacgagaucauccccagcaagggcugccugaaggugagagagagaugccacccccccguggacggcguguucuucaacggcaucauccugggccccgacggcaacgugcugauccccgagaugcagagcagccugcugcagcagcacauggagcugcuggagagcagcgugaucccccugaugcacccccuggccgaccccagcaccguguucaaggagggcgacgaggccgaggacuucguggaggugcaccugcccgacgugcacaagcagaucagcggcguggaccugggccugcccagcuggggcaaguaccugcugaugaucgccggcggccuggccacccuggugcugaucaucugcagcauggccugcugcagaagaaccaagagaaccgagagcagaagaagaggcagcggcgagagcggcaagaaggugaccgccaccccccagaccaagaagguggugagcagcugggagcuguacaagagcgagggcgacgccagacuguga

SEQ ID NO: 190864 - RNA, 1575 nt, Artificial Sequence
  derived and/or modified CDS sequence (opt4) from glycoprotein__RABV__AB981663.1
augaucccccaggcccugcuguucgugccccugcugguguucagccugugcuucggcaaguuccccaucuacaccauccccgacaagcugggccccuggagccccaucgacauccaccaccugagcugccccaacaaccuggugguggaggacgagggcugcaccaaccugagcggcuucagcuacauggagcugaaggugggcuacaucagcgccaucaaggugaacggcuucaccugcaccggcguggugaccgaggccgagaccuacaccaacuucgugggcuacgugaccaccaccuucaagagaaagcacuucagacccacccccgacgccugcagagccgccuacaacuggaagauggccggcgaccccagauacgaggagagccugcacaaccccuaccccgacuaccacuggcugagaaccgugaagaccaccaaggagagccuggugaucaucagccccagcgugagcgaccuggaccccuacgacaagagccugcacagcagaguguuccccagcggcaagugcagcggcaucaccgugagcagcaccuacugccccaccaaccacgacuacaccaucuggaugcccgagaaccccagacugggcaccagcugcgacaucuucaccaacagcagaggcaagagagccagcaagggcagcaagaccugcggcuucguggacgagagaggccuguacaagagccugaagggcgccugcaagcugaagcugugcggcgugcugggccugagacugauggacggcaccugggccgccauccagaccagcgacgaggccaaguggugcccccccgaccagcuggugaacauccacgacuucagaagcgacgagaucgagcaccuggugguggaggagcuggugaagaagagagaggagugccuggacgcccuggagagcaucaugaccaccaagagcgugagcuucagaagacugagccaccugagaaagcuggugcccggcuucggcaaggccuacaccaucuucaacaagacccugauggaggccgacgcccacuacaagagcgugagaaccuggaacgagaucauccccagcaagggcugccugagagugggcggcagaugccacccccacgugaacggcguguucuucaacggcaucauccugggccccgacggccacgugcugauccccgagaugcagagcagccugcugcagcagcacauggagcugcuggagagcagcgugaucccccugaugcacccccuggccgaccccagcaccguguucaaggacggcgacgaggccgaggacuucguggaggugcaccugcccgacgugcacaagcaggugagcggcguggaccugggccugcccagcuggggcaaguacgugcugaugagcgugggcgccaugaucgcccugaugcugaccaucuuccugaccaccugcugcagaaagaccaacggcgccggcagcauccagcacagacccggcgagaccggcagaaaggugagcgugaccagccagagcggcagagugaucagcagcugggagagcuacaagagcggcggcgagaccaagcuguga

SEQ ID NO: 190865 - RNA, 1575 nt, Artificial Sequence
  derived and/or modified CDS sequence (opt4) from glycoprotein__RABV__AB981664.1
augaucccccaggcccugcuguucgugccccugcugguguucagccugugcuucggcaaguuccccaucuacaccauccccgacaagcugggccccuggagccccaucgacauccaccaccugagcugccccaacaaccuggugguggaggacgagggcugcaccaaccugagcggcuucagcuacauggagcugaaggugggcuacaucagcgccaucaaggugaacggcuucaccugcaccggcguggugaccgaggccgagaccuacaccaacuucgugggcuacgugaccaccaccuucaagagaaagcacuucagacccacccccgacgccugcagagccgccuacaacuggaagauggccggcgaccccagauacgaggagagccugcacaaccccuaccccgacuaccacuggcugagaaccgugaagaccaccaaggagagccuggugaucaucagccccagcgugagcgaccuggaccccuacgacaagagccugcacagcagaguguuccccagcggcaagugcagcggcaucaccgugagcagcaccuacugccccaccaaccacgacuacaccaucuggaugcccgagaaccccagacugggcaccagcugcgacaucuucaccaacagcagaggcaagagagccagcaagggcagcaagaccugcggcuucguggacgagagaggccuguacaagagccugaagggcgccugcaagcugaagcugugcggcgugcugggccugagacugauggacggcaccugggccgccauccagaccagcgacgaggugaaguggugcccccccgaccagcuggugaacauccacgacuucagaagcgacgagaucgagcaccuggugguggaggagcuggugaagaagagagaggagugccuggacgcccuggagagcaucaugaccagcaagagcgugagcuucagaagacugagccaccugagaaagcuggugcccggcuucggcaaggccuacaccaucuucaacaagacccugauggaggccgacgcccacuacaagagcgugagaaccuggaacgagaucauccccagcaagggcugccugagagugggcggcagaugccacccccacgugaacggcguguucuucaacggcaucauccugggccccgacggccacgugcugauccccgagaugcagagcagccugcugcagcagcacauggagcugcuggagagcagcgugaucccccugaugcacccccuggccgaccccagcaccguguucaaggacggcgacgaggccgaggacuucguggaggugcaccugcccgacgugcacaagcaggugagcggcguggaccugggccugcccagcuggggcaaguacgugcugaugagcgugggcgccaugaucgcccugaugcugaugaucuuccugaugaccugcugcagaaaggccaacggcgccgagagcauccagcacagacugggcgagaccggcagaaaggugagcgugaccagccagagcggcagagugaucagcagcugggagagcuacaagagcggcggcgagaccaagcuguga

SEQ ID NO: 190866 - RNA, 1575 nt, Artificial Sequence
  derived and/or modified CDS sequence (opt4) from glycoprotein__RABV__AF344305.1
auggugccccaggcccugcugguggugccccugcugggcuucagccugugcuucggcaaguuccccaucuacaccauccccgacaagcugggccccuggagccccaucgacauccaccaccugagcugccccaacaaccuggugguggaggacgagggcugcaccaaccugagcggcuucagcuacauggagcugaaggugggcuacaucagcgccaucaaggugaacggcuucaccugcaccggcguggugaccgaggccgagaccuacaccaacuucgugggcuacgugaccaccaccuucaagagaaagcacuucagacccacccccgacgagugcagagccgcccacaacuggaagauggccggcgaccccagauacgaggagagccugcacaaccccuaccccgacuaccacuggcugagaaccgugaagaccaccaaggagagccuggugaucaucagccccagcguggccgaccuggaccccuacgacaagagccugcacagcagaguguuccccagcggcaagugcagcggcaucaccgugagcagcaccuacugcagcaccaaccacgacuacaccaucuggaugcccgagaaccccagacugggcaccagcugcgacaucuucaccaacagcagaggcaagagagccagcaagggcagcaagaccugcggcuucguggacgagagaggccuguacaagagccugaagggcgccugcaagcugaagcugugcggcgugcugggccugaagcugauggacggcaccuggguggccaugcagaccagcgacgagaccaaguggugcccccccgaccagcuggugaaccugcacgaccugagaagcgacgagaucgagcaccuggugguggaggagcuggugaagaagagagaggagugccuggacgcccuggagagcaucaugaccaccaagagcgugagcuucagaagacugagccaccugagaaagcuggugcccggcuucggcaaggccuacaccaucuucaacaagacccugauggaggccgacgcccacuacaagagcgugagaaccuggaacgagaucauccccagcaagggcugccugaaggugggcggcagaugccacccccacgugaacggcguguucuucaacggcgugauccugggccccgacggccacgugcugauccccgagaugcagagcagccugcugcagcagcacauggagcugcuggagagcagcgugaucccccugaugcacccccuggccgaccccagcaccguguucaaggacggcgacgaggccgaggacuucguggaggugcaccugcccgacgugcacaagcaggugagcggcguggaccugggccugcccaacuggggcaaguacaucagccugagcgccggcgcccugaucgcccugaugcugaucauccugcugaugaccugcugcagaaaggugaacagacccgagcccacccagagaagccuggagggcaagaagagaaaggugagcgugaccagccagagcggcaaggugaucagcagcugggagagcuacaagagcggcggcgagaccagacuguga

SEQ ID NO: 190867 - RNA, 1575 nt, Artificial Sequence
  derived and/or modified CDS sequence (opt4) from glycoprotein__RABV__AF344307.1
auggugccccaggcccugcugguggugccccugcugggcuucagccugugcuucggcaaguuccccaucuacaccauccccgacaagcugggccccuggagccccaucgacauccaccaccugagcugccccaacaaccuggugguggaggacgagggcugcaccaaccugagcggcuucagcuacauggagcugaaggugggcuacaucagcgccaucaaggugaacggcuucaccugcaccggcguggugaccgaggccgagaccuacaccaacuucgugggcuacgugaccaccaccuucaagagaaagcacuucagacccacccccgacgagugcagagccgccuacaacuggaagauggccggcgaccccagauacgaggagagccugcacaaccccuaccccgacuaccacuggcugagaaccgugaagaccaccaaggagagccuggugaucaucagccccagcguggccgaccuggaccccuacgacaagagccugcacagcagaguguuccccagcggcaagugcagcggcaucaccgugagcagcaccuacugcagcaccaaccacgacuacaccaucuggaugcccgagaaccccagacugggcaccagcugcgacaucuucaccaacagcagaggcaagagagccagcaagggcagcaagaccugcggcuucguggacgagagaggccuguacaagagccugaagggcgccugcaagcugaagcugugcggcgugcugggccugaagcugauggacggcaccuggguggccaugcagaccagcgacgagaccaaguggugcccccccgaccagcuggugaaccugcacgaccugagaagcgacgagaucgagcaccuggugguggaggagcuggugaagaagagagaggagugccuggacgcccuggagagcaucaugaccaccaagagcgugagcuucagaagacugagccaccugagaaagcuggugcccggcuucggcaaggccuacaccaucuucaacaagacccugauggaggccgacgcccacuacaagagcgugagaaccuggaacgagaucauccccagcaagggcugccugaagguggagggcagaugccacccccacgugaacggcguguucuucaacggcgugauccugggccccgacggccacgugcugauccccgagaugcagagcagccugcugcagcagcacauggagcugcuggagagcagcgugaucccccugaugcacccccuggccgaccccagcaccguguucaaggacggcgacgaggccgaggacuucguggaggugcaccugcccgacgugcacaagcaggugagcggcguggaccugggccugcccaacuggggcaaguacaucagccugagcgccggcgcccugaucgcccugaugcugaucauccugcugaugaccugcugcagaaaggugaacagacccgagcccacccagagaagccuggagggcaagaagagaaaggugagcgugaccagccagagcggcaaggugaucagcagcugggagagcuacaagagcggcggcgagaccagacuguga

SEQ ID NO: 190868 - RNA, 1575 nt, Artificial Sequence
  derived and/or modified CDS sequence (opt4) from glycoprotein__RABV__AF499686.2
auggugccccaggcccugcuguucgugccccugcugguguucccccugugcuucggcaaguuccccaucuacaccauccccgacaagcugggccccuggagccccaucgacauccaccaccugagcugccccaacaaccuggugguggaggacgaggagugcaccaaccugagcggcuucagcuacauggagcugaaggugggcuacauccuggccaucaaggugaacggcuucaccugcaccggcguggugaccgaggccgagaccuacaccaacuucgugggcuacgugaccaccaccuucaagagaaagcacuucagacccacccccgacgccugcagagccgccuacaacuggaagauggccggcgaccccagauacgaggagagccugcacaaccccuaccccgacuacagauggcugagaaccgugaagaccaccaaggagagccuggugaucaucagccccagcguggccgaccuggaccccuacgacagaagccugcacagcagaguguuccccagcggcaagugcagcggcguggccgugagcagcaccuacugcagcaccaaccacgacuacaccaucuggaugcccgagaaccccagacugggcaugagcugcgacaucuucaccaacagcagaggcaagagagccagcaagggcagcgagaccugcggcuucguggacgagagaggccuguacaagagccugaagggcgccugcaagcugaagcugugcggcgugcugggccugagacugauggacggcaccugggugagcaugcagaccagcaacgagaccaaguggugcccccccgacaagcuggugaaccugcacgacuucagaagcgacgagaucgagcaccuggugguggaggagcuggugagaaagagagaggagugccuggacgcccuggagagcaucauggccaccaagagcgugagcuucagaagacugagccaccugagaaagcuggugcccggcuucggcaaggccuacaccaucuucaacaagacccugauggaggccgacgcccacuacaagagcgugagcaccuggaacgaggugcugcccagcaagggcugccugagagugggcggcagaugccacccccacgugaacggcguguucuucaacggcaucauccugggccccgacggcaacgugcugauccccgagaugcagagcagccugcugcagcagcacauggagcugcuggagagcagcgugaucccccuggugcacccccuggccgaccccagcaccguguucaaggacggcgacgaggccgaggacuucguggaggugcaccugcccgacgugcacaaccaggugagcggcguggaccugggccugcccaacuggggcaaguacgugcugcugagcgccggcgcccugaccgcccugaugcugaucaucuuccugaugaccugcugcagaagagugaacagaagcgagcccacccagcacaaccugagaggcaccggcagagaggugagcgugaccccccagagcggcaagaucaucagcagcugggagagccacaagagcggcggcgagaccagacuguga

SEQ ID NO: 190869 - RNA, 1575 nt, Artificial Sequence
  derived and/or modified CDS sequence (opt4) from glycoprotein__RABV__AJ871962.1
auggugccccaggcccugcuguucgugccccugcugggcuucagccugugcuucggcaaguuccccaucuacaccauccccgacgagcugggccccuggagccccaucgacauccaccaccugagcugccccaacaaccuggugguggaggacgagggcugcaccaaccugagcgaguucagcuacauggagcugaaggugggcuacaucagcgccaucaaggugaacggcuucaccugcaccggcguggugaccgaggccgagaccuacaccaacuucgugggcuacgugaccaccaccuucaagagaaagcacuucagacccacccccgacgccugcagagccgccuacaacuggaagauggccggcgaccccagauacgaggagagccugcacaaccccuaccccgacuaccacuggcugagaaccgugagaaccaccaaggagagccugaucaucaucagccccagcgugaccgaccuggaccccuacgacaagagccugcacagcagaguguuccccggcggcaagugcagcggcaucaccgugagcagcaccuacugcagcaccaaccacgacuacaccaucuggaugcccgagaaccccagacccagaacccccugcgacaucuucaccaacagcagaggcaagagagccagcaagggcaacaagaccugcggcuucguggacgagagaggccuguacaagagccugaagggcgccugcagacugaagcugugcggcgugcugggccugagacugauggacggcaccuggguggccaugcagaccagcgacgagaccaaguggugcccccccgaccagcuggugaaccugcacgacuucagaagcgacgagaucgagcaccuggugguggaggagcuggugaagaagagagaggagugccuggacgcccuggagagcaucaugaccaccaagagcgugagcuucagaagacugagccaccugagaaagcuggugcccggcuucggcaaggccuacaccaucuucaacaagacccugauggaggccgacgcccacuacaagagcgugagaaccuggaacgagaucauccccagcaagggcugccugaaggugggcggcagaugccacccccacgugaacggcguguucuucaacggcaucauccugggccccgacggccacgugcugauccccgagaugcagagcagccugcugcagcagcacauggagcugcugaagagcagcgugaucccccugaugcacccccuggccgaccccagcaccguguucaaggagggcgacgaggccgaggacuucguggaggugcaccugcccgacguguacaagcagaucagcggcguggaccugggccugcccaacuggggcaaguacgugcugaugaccgccggcgccaugaucggccuggugcugaucuucagccugaugaccuggugcagaagagccaacagacccgagagcaagcagagaagcuucggcggcaccggcagaaacgugagcgugaccagccagagcggcaaggugauccccagcugggagagcuacaagagcggcggccagaccagacuguga

SEQ ID NO: 190870 - RNA, 1575 nt, Artificial Sequence
  derived and/or modified CDS sequence (opt4) from glycoprotein__RABV__AY683208.1
auggugccccaggcccugcuguucgugcccuuccugggcuucagccugugcuucggcaaguuccccaucuacaccauccccgacaagcugggccccuggagccccaucgacauccaccaccugagcugccccaacaaccuggugguggaggacgagggcugcaccaaccugagcggcuucagcuaccuggagcugaaggugggccacaucagcgccaucaaggugaacggcuucaccugcaccggcguggugaccgaggccgagaccuacaccaacuucgugggcuacgugaccaccaccuucaagagaaagcacuucagacccacccccgacgccugcagagccgccuacaacuggaagaccgccggcgaccccagauacgaggagagccugcagaaccccuaccccgacuaccaguggcugagaaccgugagaaccaccaaggagagccuggugaucaucagccccagcgccgccgaccuggaccccuacgacaagagccugcacagcagaguguuccccagcggcaagugcagcggcaucaccgugagcagcguguacugcagcaccaaccacgacuacaccaucuggaugcccgagaaccccagacagggcaugagcugcgacaucuucaccaacagcagaggcaagagagccagcaaggagagaaagaccugcggcuucguggacgagagaggccuguacaagagccugagaggcagcugcaagcugaagcugugcggcgugcugggccugagacugauggacggcaccuggguggccaugcagaccagcaacgagaccaaguggugcagccccgaccagcuggugaaccugcacgacuuccacagcgacgagaucgagcaccuggugguggaggagcuggugaagaagagagaggagugccuggacgcccuggagagcaucaugaccaccaagagcgugagcuucagaagacugagccaccugagaaagcuggugcccggcuucggcaaggccuacaccaucaucaacaagacccugauggaggccgaggcccacuacaagagcgugagaaccuggaacgagaucgugcccagcaagggcugccugagaguggagggcagaugccacccccacgugaacggcguguucuucaacggcaucauccugggccccgacggccacgugcugauccccgagaugcagagcagccugcugcagcagcacauggagcugcuggagagcagcgugaucccccugaugcacccccuggccgaccccagcaccguguucaaggagggcgacgaggccgaggacuucguggaggugcacuuccccgacgugcacaagaaggugagcgagguggaccugggccugcccaacuggggcgaguacgugcugcugagcgccggcacccugaucgcccugaugcugaucaucuuccugaugaucugcagaagaagagugaacagacccgagagcacccagagaagccugagaggcaccgagaugaaggugagcgugaccccccagagcggcaaguucaagagcagcugggagagcuacaagagcggcgacgaggccagacuguga

SEQ ID NO: 190871 - RNA, 1575 nt, Artificial Sequence
  derived and/or modified CDS sequence (opt4) from glycoprotein__RABV__AY705373.1
augaucccccaggcccugcuguucgugccccugcugauccccagccugugccugggcaaguuccccaucuacaccauccccgacaagcugggccccuggagccccaucgacauccaccaccugagcugccccaacaaccuggugguggaggacgagggcugcaccagccugagcggcuucagcuacauggagcugaaggugggcuacaucagcgccaugaaggugaacggcuucaccugcaccggcguggugaccgaggccgagaccuacaccaacuucgugggcuacgugaccaccaccuucaagagaaagcacuucagacccaugcccgacgccugcagagccgcccacgacuggaagaucgccggcgaccccagauacgaggacagccugcagaaccccuaccccgacuaccacuggcugagaaccgugaagaccaccaaggagagccuggugaucaucagccccagcguggccgaccuggaccccuacgacaagagccugcacagcagaguguuccccagcggcaagugccugggcaucaccgugagcagcaccuacugccccaccaaccacgacuacaccaucuggaugcccguggaggccagacugggcaccagcugcgacaucuucaccaacagcagaggcaagaaggccagcaagggcggcagaaccugcggcuucguggacgagagaggccuguacaagagccugaagggcgccugcaagcugaagcugugcggcgugcccggccugagacugaugaacggcaccugggugagcauccagaccagcgacgacaucaaguggugcccccccgaccagcuggugaaccugcacgacuuccacagcgacgagaucgagcaccuggugguggaggagcugaucaagaagagagagggcugccuggacgcccuggagagcaucaugaccaccaagagcgugagcuucagaagacugagccaccugagaaagcuggugcccggcuucggcaaggccuacaccaucuucaacaacacccugauggaggccgacgcccacuacaagagcgugagaaccuggaacgaggugauccccagcaagggcugccugaaggugggcggcagaugccacccccccgugaacggcguguucuucaacggcaucauccugggccccgacggcaacgugcugauccccgagaugcagagcagccugcugcagcagcacauggagcugcuggagagcagcgugaucccccugaugcacccccuggccgaccccagcaccguguucaaggacggcgacgaggccgaggacuucguggaggugcaccugcccgacgugcacaagcaggugagcgacguggaccugggccugcccagcuggggcaaguaccugcugaugagcgccggcgcccuggccacccugauccuggccaucuuccugaucaccugcugcagaagagccaacagaaccaagagcacccagagaggccacagagagagcggcggcaaggugagcguggccccccagaacggcaagaucaucagcagcugggagcuguacaagagcgagagcgagaccggcauguga

SEQ ID NO: 190872 - RNA, 1575 nt, Artificial Sequence
  derived and/or modified CDS sequence (opt4) from glycoprotein__RABV__AY956319.1
auggugccccaggcccugcuguucgugccccugcugguggugagcaugugcuucggcaaguuccccaucuacaccgugcccgacaagcugggccccuggagccccaucgacauccaccaccugagcugccccaacaaccuggugguggaggacgagggcugcaccaaccugagcggcuucagcuacauggagcugaaggugggcuacaucagcgccaucaaggugaacggcuucaccugcaccggcguggugaccgaggccgagaccuacaccaacuucgugggcuacgugaccaccaccuucaagagaaagcacuucagacccacccccgacgccugcagagccgccuacaacuggaagauggccggcgaccccagauacgaggagagccugcacaaccccuaccccgacuaccacuggcugagaaccgugaagaccaccaaggagagccuggugaucaucagccccagcguggccgaccuggaccccuacgacaagagccugcacagcagaguguuccccagcggcaagugcagcggcaucaccaucagcagcaccuacugcagcaccaaccacgacuacaccaucuggaugcccgagaaccccagacugggcaccagcugcgacaucuucaccaacagcagaggcaagagagccagcaagggcggcaagaccugcggcuucguggacgagagaggccuguacaagagccugaagggcgccugcaagcugaagcugugcggcgugcugggccugagacugauggacggcaccuggguggccaugcagaccagcgacgagaccaaguggugcccccccgaccagcuggugaaccugcacgacuucagaagcgacgagaucgagcaccuggugguggaggagcuggugaagaagagagaggagugccuggacgcccuggagagcaucaugaccaccaagagcgugagcuucagaagacugagccaccugagaaagcuggugcccggcuucggcaaggccuacaccaucuucaacaagacccugauggaggccgacgcccacuacaagagcgugagaaccuggaacgagaucauccccagcaagggcugccugagagugggcggcagaugccacccccacgugaacggcguguucuucaacggcaucauccugggccccgacggccacgugcugauccccgagaugcagagcagccugcugcagcagcacauggagcugcuggagagcagcgugaucccccugaugcacccccuggccgaccccagcaccguguucaaggacggcgacgaggccgaggacuucguggaggugcaccugcccgacgugcacaagcaggugagcggcguggaccugggccugcccagcuggggcaaguacgugcuggugagcgccggcgugcugguggugcugaugcugaccaucuucaucaugaccugcugcagaagagugcacagacccaagagcacccagcacggccugggcggcaccggcagaaaggugagcgugaccagccagagcggcaaggugaucagcagcugggagagcuacaagagcggcggcgagaccagacuguga

SEQ ID NO: 190873 - RNA, 1575 nt, Artificial Sequence
  derived and/or modified CDS sequence (opt4) from glycoprotein__RABV__DQ074978.1
auggugccccaggcccugcuguucgugccccugcugguguucccccugugcuucggcaaguuccccaucuacaccauccccgacaagcugggccccuggagccccaucgacauccaccaccugagcugccccaacaaccuggugguggaggacgagggcugcaccaaccugagcggcuucagcuacauggagcugaaggugggcuacaucagcgccaucaagaugaacggcuucaccugcaccggcguggugaccgaggccgagaccuacaccaacuucgugggcuacgugaccaccaccuucaagagaaagcacuucagacccacccccgacgccugcagagccgccuacaacuggaagauggccggcgaccccagauacgaggagagccugcacaaccccuaccccgacuaccacuggcugagaaccgugaagaccaccaaggagagccuggugaucaucagccccagcguggccgaccuggaccccuacgacaucagccugcacagcagaguguuccccggcggcaacugcagcggcguggccgugagcagcaccuacugcagcaccaaccacgacuacaccaucuggaugcccgagaaccccagacugggcaugagcugcgacaucuucaccaacagcagaggcaagagagagagcaagggcagcgagaccugcggcuucguggacgagagaggccuguacaagagccugaagggcgccugcaagcugaagcugugcggcgugcugggccugagacugauggacggcaccuggguggccaugcagaccagcaacgagaccaaguggugcccccccggccagcuggugaaccugcacgacuucagaagcgacgagaucgagcaccuggugguggaggagcuggugagaaagagagaggagugccuggacgcccuggagagcaucaugaccaccaagagcgugagcuucagaagacugagccaccugagaaagcuggugcccggcuucggcaaggccuacaccaucuucaacaagacccugauggaggccgacgcccacuacaagagcgugagaaccuggaacgagaucauccccagcaagggcugccugagagugggcggcagaugccacccccacgugaacggcguguucuucaacggcaucauccugggccccgacggcaacgugcugauccccgagaugcagagcagccugcugcagcagcacauggagcugcuggugagcagcgugaucccccugaugcacccccuggccgaccccagcaccguguucaagaacggcgacgaggccgaggacuucguggaggugcaccugcccgacgugcacgagagaaucagcggcguggaccugggccugcccaacuggggcaaguacgugcugcugagcgccggcgcccugaccgcccugaugcugaucaucuuccugaugaccugcuggagaagagugaacagaagcgagcccacccagcacaaccugagaggcaccggcagagaggugagcgugaccccccagagcggcaagaucaucagcagcugggagagccacaagagcggcggcgagaccagacuguga

SEQ ID NO: 190874 - RNA, 1575 nt, Artificial Sequence
  derived and/or modified CDS sequence (opt4) from glycoprotein__RABV__DQ076093.1
auggugccccaggcccugcuguucgugccccugcugguguucagcaugugcuucggcaaguuccccaucuacaccauccccgacaagcugggccccuggagccccaucgacauccaccaccugagcugccccaacaaccuggugguggaggacgagggcugcaccaaccugagcggcuucagcuacauggagcugaaggugggcuacaucagcgccaucaaggugaacggcuucaccugcaccggcguggugaccgaggccgagaccuacaccaacuucgugggcuacgugaccaccaccuucaagagaaagcacuucagacccacccccgacgccugcagagccgccuacaacuggaagauggccggcgaccccagauacgaggagagccugcacaaccccuaccccgacuaccacuggcugagaaccgugaagaccaccaaggagagccuggugaucaucagccccagcguggccgaccuggaccccuacgacaagagccugcacagcagaguguuccccaacggcaagugcagcggcaucaccaucagcagcaccuacugccccaccaaccacgacuacaccaucuggcugcccgagaaccccagacugggcaccagcugcgacaucuucaccaacagcagaggcaagagagccagcaagggcagcaagaccugcggcuucguggacgagagaggccuguacaagagccugaagggcgccugcaagcugaagcugugcggcgugcugggccugagacugauggacggcaccuggguggccaugcaggccagcgacgagaccaaguggugcccccccgaccagcuggugaaccugcacgacuucagaagcgacgagaucgagcaccuggugguggaggagcuggugaagaagagagaggagugccuggacgcccuggagagcaucaugaccaccaagagcgugagcuucagaagacugagccaccugagaaagcuggugcccggcuucggcaaggccuacaccaucuucaacaagacccugauggaggccgacgcccacuacaagagcgugagaaccuggaacgagaucauccccagcaagggcugccugagagugggcggcagaugccacccccacgugaacggcguguucuucaacggcaucauccugggccccgacggccacgugcugauccccgagaugcagagcagccugcugcagcagcacauggagcugcuggagagcagcgugaucccccugaugcacccccuggccgaccccagcaccguguucaaggacggcgacgaggccgagaacuucguggaggugcaccugcccgacgugcacaagcagaucagcggcguggaccugggccugcccaacuggggcaaguacgugcuggugagcgccggcgugcugaucgcccugaugcugaucaucuuccugaugaccugcugcggcagagugaacagacccaagagcacccagcacaaccugggcggcaccggcagaaaggugagcgugaccccccagagcggcaaggugaucagcagcugggagagcuacaagagcggcggcggcaccagacuguga

SEQ ID NO: 190875 - RNA, 1575 nt, Artificial Sequence
  derived and/or modified CDS sequence (opt4) from glycoprotein__RABV__DQ076096.1
auggugccccaggcccugcuguucgugccccugcugguguucagcaugugcuucggcaaguuccccaucuacaccauccccgacaagcugggccccuggagccccaucgacauccaccaccugagcugccccaacaaccuggugguggaggacgagggcugcaccaaccugagcggcuucagcuacauggagcugaaggugggcuacaucagcgccaucaaggugaacggcuucaccugcaccggcguggugaccgaggccgagaccuacaccaacuucgugggcuacgugaccaccaccuucaagagaaagcacuucagacccacccccgacgccugcagagccgccuacaacuggaagauggccggcgaccccagauacgaggagagccugcacaaccccuaccccgacuaccacuggcugagaaccgugaagaccaccaaggagagccuggugaucaucagccccagcguggccgaccuggaccccuacgacaagagccugcacagcagaguguuccccaacggcaagugcagcggcaucaccaucagcagcaccuacugccccaccaaccacgacuacaccaucuggcugcccgagaaccccagacugggcaccagcugcgacaucuucaccaacagcagaggcaagagagccagcaagggcagcaagaccugcggcuucguggacgagagaggccuguacaagagccugaagggcgccugcaagcugaagcugugcggcgugcugggccugagacugauggacggcaccuggguggccaugcaggccagcgacgagaccaaguggugcccccccgaccagcuggugaaccugcacgacuucagaagcgacgagaucgagcaccuggugguggaggagcuggugaagaagagagaggagugccuggacgcccuggagagcaucaugaccaccaagagcgugagcuucagaagacugagccaccugagaaagcuggugcccggcuucggcaaggccuacaccaucuucaacaagacccugauggaggccgacgcccacuacaagagcgugagaaccuggaacgagaucauccccagcaagggcugccugagagugggcggcagaugccacccccacgugaacggcguguucuucaacggcaucauccugggccccgacggccacgugcugauccccgagaugcagagcagccugcugcagcagcacauggagcugcuggagagcagcgugaucccccugaugcacccccuggccgaccccagcaccguguucaaggacggcgacgaggccgagaacuucguggaggugcaccugcccgacgugcacaagcagaucagcggcguggaccugggccugcccaacuggggcaaguacgugcuggugagcgccggcgugcugaucgcccugaugcugaccaucuuccugaugaccugcugcggcagagugaacagacccaagagcacccagcacaaccugggcggcaccggcagaaaggugagcgugaccccccagagcggcaaggugaucagcagcugggagagcuacaagagcggcggcggcaccagacuguga

SEQ ID NO: 190876 - RNA, 1575 nt, Artificial Sequence
  derived and/or modified CDS sequence (opt4) from glycoprotein__RABV__DQ076097.1
auggugccccaggcccugcuguucgugccccugcugguguucagcaugugcuucggcaaguuccccaucuacaccauccccgacaagcugggccccuggagccccaucgacauccaccaccugagcugccccaacaaccuggugguggaggacgacggcugcaccaaccugagcggcuucagcuacauggagcugaaggugggcuacaucagcgccaucaaggugaacggcuucaccugcaccggcguggugaccgaggccgagaccuacaccaacuucgugggcuacgugaccaccaccuucaagagaaagcacuucagacccacccccgacgccugcagagccgccuacaacuggaagauggccggcgaccccagauacgaggagagccugcacacccccuaccccgacuaccacuggcugagaaccgugaagaccaccaaggagagccuggugaucaucagccccagcguggccgaccuggaccccuacgacaagagccugcacagcagaguguuccccaacggcaagugcagcggcaucaccaucagcagcaccuacugccccaccaaccacgacuacaccaucuggcugcccgagaaccccagacugggcaccagcugcgacaucuucaccaacagcagaggcaagagagccagcaagggcagcaagaccugcggcuucguggacgagagaggccuguacaagagccugaagggcgccugcaagcugaagcugugcggcgugcugggccugagacugauggacggcaccuggguggccaugcaggccagcgacgagaccaaguggugcccccccgaccagcuggugaaccugcacgacuucagaagcgacgagaucgagcaccuggugguggaggagcuggugaagaagagagaggagugccuggacgcccuggagagcaucaugaccaccaagagcgugagcuucagaagacugagccaccugagaaagcuggugcccggcuucggcaaggccuacaccaucuucaacaagacccugauggaggccgacgcccacuacaagagcgugagaaccuggaacgagaucauccccagcaagggcugccugagagugggcggcagaugccacccccacgugaacggcguguucuucaacggcaucauccugggccccgacggccacgugcugauccccgagaugcagagcagccugcugcagcagcacauggagcugcuggagagcagcgugaucccccugaugcacccccuggccgaccccagcaccguguucaaggacggcgacgaggccgagaacuucguggaggugcaccugcccgacgugcacaagcagaucagcggcguggaccugggccugcccaacuggggcaaguacgugcuggugagcgccggcgugcugaucgcccugaugcugaucaucuuccugaugaccugcugcggcagagugaacagacccaagagcacccagcacaaccugggcggcaccggcagaaaggugagcgugaccccccagagcggcaaggugaucagcagcugggagagcuacaagagcggcggcggcaccagacuguga

SEQ ID NO: 190877 - RNA, 1575 nt, Artificial Sequence; identical to SEQ ID NO: 190874
  derived and/or modified CDS sequence (opt4) from glycoprotein__RABV__DQ076098.1

SEQ ID NO: 190878 - RNA, 1575 nt, Artificial Sequence
  derived and/or modified CDS sequence (opt4) from glycoprotein__RABV__DQ076099.1
auggugccccaggcccugcuguucaucccccugcugguguuccccaugugcuucggcaaguuccccaucuacaccauccccgacaagcugggccccuggagccccaucgacauccaccaccugagcugccccaacaaccuggugguggaggacgaggagugcaccaaccugagcggcuucagcuacauggagcugaaggugggcuacaucagcgccaucaaggugaacggcuucaccugcaccggcguggugaccgaggccgagaccuacaccaacuucgugggcuacgugaccaccaccuucaagagaaagcacuucagacccacccccgacgccugcagagccgccuacaacuggaagauggccggcgaccccagauacgaggagagccugcacaaccccuaccccgacuaccacuggcugagaaccgugaagaccaccaaggagagccuggugaucaucagccccagcguggccgaccuggaccccuacgacaagagccugcacagcagaguguuccccaacggcaagugcagcggcaucaccaucagcagcaccuacugccccaccaaccacgacuacaccaucuggcugcccgagaaccccagacugggcaccagcugcgacaucuucgccaacagcagaggcaagagagccagcaagggcagcaagaccugcggcuucguggacgagagaggccuguacaagagccugaagggcgccugcaagcugaagcugugcggcgugcugggccugagacugauggacggcaccuggguggccaugcagaccagcgacgagaccaaguggugcccccccgaccagcuggugaaccugcacgacuucagaagcgacgagaucgagcaccuggugguggaggagcuggugaagaagagagaggagugccuggacgcccuggagagcaucaugaccaccaagagcgugagcuucagaagacugagccaccugagaaagcuggugcccggcuucggcaaggccuacaccaucuucaacaagacccugauggaggccgacgcccacuacaagagcgugagaaccuggaacgagaucauccccagcaagggcugccugagagugggcggcagaugccacccccacgugaacggcguguucuucaacggcaucauccugggccacgacggccacgugcugauccccgagaugcagagcagccugcugcagcagcacauggagcugcuggagagcagcgugaucccccugaugcacccccuggccgaccccagcaccguguucaaggacggcgacgaggccgaggacuucguggaggugcaccugcccgacgugcacaagcagaucagcggcguggaccugggccugcccaacuggggcaaguacgugcuggugagcgccggcgugcugaucgcccugaugcugaucaucuuccugaugaccugcugcggcagagugaacagacccaagagcacccagcacaaccugggcgagaccggcagaaaggugagcgugaccagccagagcggcaaggugaucagcagcugggagagcuacaagagcggcggcggcaccagacuguga

SEQ ID NO: 190879 - RNA, 1575 nt, Artificial Sequence
  derived and/or modified CDS sequence (opt4) from glycoprotein__RABV__DQ076100.1
auggugccccaggcccugcuguucgugccccugcugguguucagcaugugcuucggcaaguuccccaucuacaccauccccgacaagcugggccccuggagccccaucgacauccaccaccugagcugccccaacaaccuggugguggaggacgagggcugcaccaaccugagcggcuucagcuacauggagcugaaggugggcuacaucagcgccaucaaggugaacggcuucaccugcaccggcguggugaccgaggccgagaccuacaccaacuucgugggcuacgugaccaccaccuucaagagaaagcacuucagacccacccccgacgccugcagagccgccuacaacuggaagauggccggcgaccccagauacgaggagagccugcacaaccccuaccccgacuaccacuggcugagaaccgugaagaccaccaaggagagccuggugaucaucagccccagcguggccgaccuggaccccuacgacaagagccugcacagcagaguguuccccaacggcaagugcagcggcaucaccaucagcagcaccuacugccccaccaaccacgacuacaccaucuggcugcccgagaaccccagacugggcaccagcugcgacaucuucaccaacagcagaggcaagagagccagcaagggcagcaagaccugcggcuucguggacgagagaggccuguacaagagccugaagggcgccugcaagcugaagcugugcggcgugcugggccugagacugauggacggcaccuggguggccaugcagaccagcgacgagaccaaguggugcccccccgaccagcuggugaaccugcacgacuucagaagcgacgagaucgagcaccuggugguggaggagcuggugaagaagagagaggagugccuggacgcccuggagagcaucaugaccaccaagagcgugagcuucagaagacugagccaccugagaaagcuggugcccggcuucggcaaggccuacaccaucuucaacaagacccugauggaggccgacgcccacuacaagagcgugagaaccuggaacgagaucauccccagcaagggcugccugagagugggcggcagaugccacccccacgugaacggcguguucuucaacggcaucauccugggccccgacggccacgugcugauccccgagaugcagagcagccugcugcagcagcacauggagcugcuggagagcagcgugaucccccugaugcacccccuggccgaccccagcaccguguucaaggacggcgacgaggccgaggacuucguggaggugcaccugcccgacgugcacaagcagaucagcggcguggaccugggccugcccaacuggggcaaguacgugcuggugagcgccggcgugcugaucgcccugaugcugaucaucuuccugaugaccugcugcggcagagugaacagacccaagagcacccagcacaaccugggcggcaccggcagaaaggugagcgugaccagccagagcggcaaggugaucagcagcugggagagcuacaagagcggcggcgagaccagacuguga

SEQ ID NO: 190880 - RNA, 1575 nt, Artificial Sequence
  derived and/or modified CDS sequence (opt4) from glycoprotein__RABV__DQ076102.1
auggugccccaggcccugcuguucgugccccugcugguguucagcaugugcuucggcaaguuccccaucuacaccauccccgacaagcugggccccuggagccccaucggcauccaccaccugagcugcagcaacaaccuggugguggaggacgagggcugcaccaaccugagcggcuucagcuacauggagcugaaggugggcuacaucagcgccaucaaggugaacggcuucaccugcaccggcguggugaccgaggccgagaccuacaccaacuucgugggcuacgugaccaccaccuucaagagaaagcacuucagacccacccccgacgccugcagagccgccuacaacuggaagauggccggcgaccccagauacgaggagagccugcacaaccccuaccccgacuaccacuggcugagaaccgugaagaccaccaaggagagccuggugaucaucagccccagcguggccgaccuggaccccuacgacaagagccugcacagcagaguguuccccaacggcaagugcagcggcaucaccaucagcagcaccuacugccccaccaaccacgacuacaccaucuggcugcccgagaaccccagacugggcaccagcugcgacaucuucaccaacagcagaggcaagagagccagcaagggcagcaagaccugcggcuucguggacgagagaggccuguacaagagccugaagggcgccugcaagcugaagcugugcggcgugcugggccugagacugauggacggcaccuggguggccaugcagaccagcgacgagaccaaguggugcccccccgaccagcuggugaaccugcacgacuucagaagcgacgagaucgagcaccuggugguggaggagcuggugaagaagagagaggagugccuggacgcccuggagagcaucaugaccaccaagagcgugagcuucagaagacugagccaccugagaaagcuggugcccggcuucggcaaggccuacaccaucuucaacaagacccugauggaggccgacgcccacuacaagagcgugagaaccuggaacgagaucauccccagcaagggcugccugagagugggcggcagaugccacccccacgugaacggcguguucuucaacggcaucauccugggccccgacggccacgugcugauccccgagaugcagagcagccugcugcagcagcacauggagcugcuggagagcagcgugaucccccugaugcacccccuggccgaccccagcaccguguucaaggacggcgacgaggccgaggacuucguggaggugcaccugcccgacgugcacaagcagaucagcggcguggaccugggccugcccaacuggggcaaguacgugcuggugagcgccggcgugcugaucgcccugaugcugaucaucuuccugaugaccugcugcggcagagugaacagacccaagagcacccagcacaaccugggcggcaccggcagaaaggugagcgugaccagccagagcggcaaggugaucagcagcugggagagcuacaagagcggcggcgagaccagacuguga

SEQ ID NO: 190881 - RNA, 1575 nt, Artificial Sequence
  derived and/or modified CDS sequence (opt4) from glycoprotein__RABV__DQ076103.1
auggugccccaggcccugcuguucgugccccugcugguguucagcaugugcuucggcaaguuccccaucuacaccauccccgacaagcugggccccuggagccccaucgacauccaccaccugagcugccccaacaaccuggugguggaggacgagggcugcaccaaccugagcggcuucagcuacauggagcugaaggugggcuacaucagcgccaucaaggugaacggcuucaccugcaccggcguggugaccgaggccgagaccuacaccaacagcgugggcuacgugaccaccaccuucaagagaaagcacuucagacccacccccgacgccugcagagccgccuacaacuggaagauggccggcgaccccagauacgaggagagccugcacaaccccuaccccgacuaccacuggcugagaaccgugaagaccaccaaggagagccuggugaucaucagccccagcguggccgaccuggaccccuacgacaagagccugcacagcagaguguuccccaacggcaagugcagcggcaucaccaucagcagcaccuacugccccaccaaccacgacuacaccaucuggcugcccgagaaccccagacugggcaccagcugcgacaucuucaccaacagcagaggcaagagagccagcaagggcagcaagaccugcggcuucguggacgagagaggccuguacaagagccugaagggcgccugcaagcugaagcugugcggcgugcugggccugagacugauggacggcaccuggguggccaugcagaccagcgacgagaccaaguggugcccccccgaccagcuggugaaccugcacgacuucagaagcgacgagaucgagcaccuggugguggaggagcuggugaagaagagagaggagugccuggacgcccuggagagcaucaugaccaccaagagcgugagcuucagaagacugagccaccugagaaagcuggugcccggcuucggcaaggccuacaccaucuucaacaagacccugauggaggccgacgcccacuacaagagcgugagaaccuggaacgagaucauccccagcaagggcugccugagagugggcggcagaugccacccccacgugaacggcguguucuucaacggcaucauccugggccccgacggccacgugcugauccccgagaugcagagcagccugcugcagcagcacauggagcugcuggagagcagcgugaucccccugaugcacccccuggccgaccccagcaccguguucaaggacggcgacgaggccgaggacuucguggaggugcaccugcccgacgugcacaagcagaucagcggcguggaccugggccugcccaacuggggcaaguacgugcuggugagcgccggcgugcugaucgcccugaugcugaucaucuuccugaugaccugcugcggcagagugaacagacccaagagcacccagcacaaccugggcggcaccggcagaaaggugagcgugaccagccagagcggcaaggugaucagcagcugggagagcuacaagagcggcggcgagaccagacuguga

SEQ ID NO: 190882 - RNA, 1575 nt, Artificial Sequence
  derived and/or modified CDS sequence (opt4) from glycoprotein__RABV__DQ076104.1
auggugccccaggcccugcuguucgugccccugcugguguucagcaugugcuucggcaaguuccccaucuacaccauccccgacaagcugggccccuggagccccaucgacauccaccaccugagcugccccaacaaccuggugguggaggacgagggcugcaccaaccugagcggcuucagcuacauggagcugaaggugggcuacaucagcgccaucaaggugaacggcuucaccugcaccggcguggugaccgaggccgagaccuacaccaacuucgugggcuacgugaccaccaccuucaagagaaagcacuucagacccacccccgacgccugcagaaccgccuacaacuggaagauggccggcgaccccagauacgaggagagccugcacaaccccuaccccgacuaccacuggcugagaaccgugaagaccaccaaggagagccuggugaucaucagccccagcguggccgaccuggaccccuacgacaagagccugcacagcagaguguuccccaacggcaagugcagcggcaucaccaucagcagcaccuacugccccaccaaccacgacuacaccaucuggcugcccgagaaccccagacugggcaccagcugcgacaucuucaccaacagcagaggcaagagagccagcaagggcagcaagaccugcggcuucguggacgagagaggccuguacaagagccugaagggcgccugcaagcugaagcugugcggcgugcugggccugagacugauggacggcaccuggguggccaugcagaccagcgacgagaccaaguggugcccccccgaccagcuggugaaccugcacgacuucagaagcgacgagaucgagcaccuggugguggaggagcuggugaagaagagagaggagugccuggacgcccuggagagcaucaugaccaccaagagcgugagcuucagaagacugagccaccugagaaagcuggugcccggcuucggcaaggccuacaccaucuucaacaagacccugauggaggccgacgcccacuacaagagcgugagaaccuggaacgagaucauccccagcaagggcugccugagagugggcggcagaugccacccccacgugaacggcguguucuucaacggcaucauccugggccccgacggccacgugcugauccccgagaugcagagcagccugcugcagcagcacauggagcugcuggagagcagcgugaucccccugaugcacccccuggccgaccccagcaccguguucaaggacggcgacgaggccgaggacuucguggaggugcaccugcccgacgugcacaagcagaucagcggcguggaccugggccugcccaacuggggcaaguacgugcuggugagcgccggcgugcugaucgcccugaugcugaucaucuuccugaugaccugcugcggcagagugaacagacccaagagcacccagcacaaccugggcggcaccggcagaaaggugagcgugaccagccagagcggcaaggugaucagcagcugggagagcuacaagagcggcggcgagaccagacuguga

SEQ ID NO: 190883 - RNA, 1575 nt, Artificial Sequence
  derived and/or modified CDS sequence (opt4) from glycoprotein__RABV__DQ076105.1
auggugccccaggcccugcuguucgugccccugcugguguucagcaugugcuucggcagauuccccaucuacaccauccccgacaagcugggccccuggagccccaucgacauccaccaccugagcugccccaacaaccuggugguggaggacgagggcugcaccaaccugagcggcuucagcuacauggagcugaaggugggcuacaucagcgccaucaaggugaacggcuucaccugcaccggcguggugaccgaggccgagaccuacaccaacuucgugggcuacgugaccaccaccuucaagagaaagcacuucagacccacccccgacgccugcagagccgccuacaacuggaagauggccggcgaccccagauacgaggagagccugcacaaccccuaccccgacuaccacuggcugagaaccgugaagaccaccaaggagagccuggugaucaucagccccagcguggccgaccuggaccccuacgacaagagccugcacagcagaguguuccccaacggcaagugcagcggcaucaccaucagcagcaccuacugccccaccaaccacgacuacaccaucuggcugcccgagaaccccagacugggcaccagcugcgacaucuucaccaacagcagaggcaagagagccagcaagggcagcaagaccugcggcuucguggacgagagaggccuguacaagagccugaagggcgccugcaagcugaagcugugcggcgugcugggccugagacugauggacggcaccuggguggccaugcagaccagcgacgagaccaaguggugcccccccgaccagcuggugaaccugcacgacuucagaagcgacgagaucgagcaccuggugguggaggagcuggugaagaagagagaggagugccuggacgcccuggagagcaucaugaccaccaagagcgugagcuucagaagacugagccaccugagaaagcuggugcccggcuucggcaaggccuacaccaucuucaacaagacccugauggaggccgacgcccacuacaagagcgugagaaccuggaacgagaucauccccagcaagggcugccugagagugggcggcagaugccacccccacgugaacggcguguucuucaacggcaucauccugggccccgacggccacgugcugauccccgagaugcagagcagccugcugcagcagcacauggagcugcuggagagcagcgugaucccccugaugcacccccuggccgaccccagcaccguguucaaggacggcgacgaggccgaggacuucguggaggugcaccugcccgacgugcacaagcagaucagcggcguggaccugggccugcccaacuggggcaaguacgugcuggugagcgccggcgugcugaucgcccugaugcugaugaucuuccugaugaccugcugcggcagagugaacagacccaagagcacccagcacaaccugggcggcaccggcagaaaggugagcgugaccagccagagcggcaaggugaucagcagcugggagagcuacaagagcggcggcgagaccagacuguga

SEQ ID NO: 190884 - RNA, 1575 nt, Artificial Sequence
  derived and/or modified CDS sequence (opt4) from glycoprotein__RABV__DQ849044.1
augaucccccaggugcugcuguucgugccccugcugguguucagcagcugcuucggcaaguuccccaucuacaccauccccgacaagcugggccccuggagccccaucgacauccaccaccugagcugccccaacaaccuggugguggaggacgagggcugcaccaaccugagcggcuucagcuacauggagcugaaggugggcuacaucagcgccaucaaggugaacggcuucaccugcaccggcguggugaccgaggccgagaccuacaccaacuucgugggcuacgugaccaccaccuucaagagaaagcacuucagacccacccccgacgccugcagagccgccuacaacuggaagauggccggcgaccccagauacgaggagagccugcacaaccccuaccccgacuaccacuggcugagaaccgugaagaccagcaaggagagccuggugaucaucagccccagcguggccgaccuggaccccuacgacaagagccugcacagcagaguguuccccggcggcaagugcagcggcaucaccgugagcagcaccugcugcagcaccaaccacgacuacaccaucuggaugcccgagaaccccagacugggcaccagcugcgacaucuucaccaacagcagaggcaagagagccagcaagggcggcaagaccugcggcuucguggacgagagaggccuguacaagagcaucaagggcgccugcaagcugaagcugugcggcgugcugggccugagacugauggacggcaccuggguggccauccagaccagcgacgagaucaaguggugcagccccgaccagcuggugaaccugcacgacuuccacagcgacgagaucgagcaccuggugguggaggagcuggugaagaagagagaggagugccuggacgcccuggagaccaucaugaccaccaagagcgugagcuucagaagacugagccaccugagaaagcuggugcccggcuucggcaaggccuacaccaucuucaacaagacccugauggaggccgacgcccacuacaagagcaucagaaccuggaacgagaucauccccagcaagggcugccugagagugggcggcagaugccacccccacgugaacggcguguucuucaacggcaucauccugggccccgacggccacgugcugauccccgagaugcagagcagccugcugcaccagcacauggagcugcuggagagcagcgugaucccccugaugcacccccuggccgaccccagcaccguguucaaggacggcgacgaggccgaggacuucguggaggugcaccugcccgacgugcacaagcagaucagcggcguggaccugggccugcccaacuggggcaaguacgugcuggugagcgccggcgcccugaccgcccugaugcugaugaucuuccugaugaccugcugcagaaagaccaacagagccgagagcauccagcacagccccggcgagaccggcagaaaggugagcgugaccagccacaacggcagagugaucagcagcugggagagcuacaagagcggcggcgagaccaagcuguga

SEQ ID NO: 190885 - RNA, 1575 nt, Artificial Sequence
  derived and/or modified CDS sequence (opt4) from glycoprotein__RABV__DQ849045.1
augaucccccaggugcugcuguucgugccccugcugguguucagcagcugcuucggcaaguuccccaucuacaccauccccgacaagcugggccccuggagccccaucgacauccaccaccugagcugccccaacaaccuggugguggaggacgagggcugcaccaaccugagcggcuucagcuacauggagcugaaggugggcuacaucagcgccaucaaggugaacggcuucaccugcaccggcguggugaccgaggccgagaccuacaccaacuucgugggcuacgugaccaccaccuucaagagaaagcacuucagacccacccccgacgccugcagagccgccuacaacuggaagauggccggcgaccccagauacgaggagagccugcacaaccccuaccccgacuaccacuggcugagaaccgugaagaccagcaaggagagccuggugaucaucagccccagcguggccgaccuggaccccuacgacaagagccugcacagcagaguguuccccggcggcaagugcagcggcaucaccgugagcagcaccugcugcuucaccaaccacgacuacaccaucuggaugcccgagaaccccagacugggcaccagcugcgacaucuucaccaacagcagaggcaagagagccagcaagggcggcaagaccugcggcuucguggacgagagaggccuguacaagagccugaagggcgccugcaagcugaagcugugcggcgugcugggccugagacugauggacggcaccuggguggccauccagaccagcgacgagaucaaguggugcagccccgaccagcuggugaaccugcacgacuuccacagcgacgagaucgagcaccuggugguggaggagcuggugaagaagagagaggagugccuggacgcccuggagaccaucaugaccaccaagagcgugagcuucagaagacugagccaccugagaaagcuggugcccggcuucggcaaggccuacaccaucuucaacaagacccugauggaggccgacgcccacuacaagagcaucagaaccuggaacgagaucauccccagcaagggcugccugagagugggcggcagaugccacccccacgugaacggcguguucuucaacggcaucauccugggccccgacggccacgugcugauccccgagaugcagagcagccugcugcaccagcacauggagcugcuggagagcagcgugaucccccugaugcacccccuggccgaccccagcaccguguucaaggacggcgacgaggccgaggacuucguggaggugcaccugcccgacgugcacaagcagaucagcggcguggaccugggccugcccaacuggggcaaguacgugcuggugagcgccggcgcccugaccgcccugaugcugaugaucuuccugaugaccugcugcagaaagaccaacagagccgagagcauccagcacagccccggcgagaccggcagaaaggugagcgugaccagccacaacggcagagugaucagcagcugggagagcuacaagagcggcggcgagaccaagcuguga

SEQ ID NO: 190886 - RNA, 1575 nt, Artificial Sequence
  derived and/or modified CDS sequence (opt4) from glycoprotein__RABV__DQ849046.1
augaucccccaggugcugcuguucgugccccugcugguguucagcagcugcuucggcaaguuccccaucuacaccauccccgacaagcugggccccuggagccccaucgacauccaccaccugagcugccccaacaaccuggugguggaggacgagggcugcaccaaccugagcggcuucagcuacauggagcugaaggugggcuacaucagcgccaucaaggugaacggcuucaccugcaccggcguggugaccgaggccgagaccuacaccaacuucgugggcuacgugaccaccaccuucaagagaaagcacuucagacccacccccgacgccugcagagccgccuacaacuggaagauggccggcgaccccagauacgaggagagccugcacaaccccuaccccgacuaccacuggcugagaaccgugaagaccagcaaggagagccuggugaucaucagccccagcguggccgaccuggaccccuacgacaagagccugcacagcagaguguuccccggcggcaagugcagcggcaucaccgugagcagcaccugcugcuucaccaaccacgaguacaccaucuggaugcccgagaaccccagacugggcaccagcugcgacaucuucaccaacagcagaggcaagagagccagcaagggcggcaagaccugcggcuucguggacgagagaggccuguacaagagccugaagggcgccugcaagcugaagcugugcggcgugcugggccugagacugauggacggcaccuggguggccauccagaccagcgacgagaucaaguggugcagccccgaccagcuggugaaccugcacgacuuccacagcgacgagaucgagcaccuggugguggaggagcuggugaagaagagagaggagugccuggacgcccuggagaccaucaugaccaccaagagcgugagcuucagaagacugagccaccugagaaagcuggugcccggcuucggcaaggccuacaccaucuucaacaagacccugauggaggccgacgcccacuacaagagcaucagaaccuggaacgagaucauccccagcaagggcugccugagagugggcggcagaugccacccccacgugaacggcguguucuucaacggcaucauccugggccccgacggccacgugcugauccccgagaugcagagcagccugcugcaccagcacauggagcugcuggagagcagcgugaucccccugaugcacccccuggccgaccccagcaccguguucaaggacggcgacgaggccgaggacuucguggaggugcaccugcccgacgugcacaagcagaucagcggcguggaccugggccugcccaacuggggcaaguacgugcuggugagcgccggcgcccugaccgcccugaugcugaugaucuuccugaugaccugcugcagaaagaccaacagagccgagagcauccagcacagccccggcgagaccggcagaaaggugagcgugaccagccacaacggcagagugaucagcagcugggagagcuacaagagcggcggcgagaccaagcuguga

SEQ ID NO: 190887 - RNA, 1575 nt, Artificial Sequence
  derived and/or modified CDS sequence (opt4) from glycoprotein__RABV__DQ849047.1
augaucccccaggugcugcuguucgugccccugcugguguucagcagcugcuucggcaaguuccccaucuacaccauccccgacaagcugggccccuggagccccaucgacauccaccaccugagcugccccaacaaccuggugguggaggacgagggcugcaccaaccugagcggcuucagcuacauggagcugaaggugggcuacaucagcgccaucaaggugaacggcuucaccugcaccggcguggugaccgaggccgagaccuacaccaacuucgugggcuacgugaccaccaccuucaagagaaagcacuucagacccacccccgacgccugcagagccgccuacaacuggaagauggccggcgaccccagauacgaggagagccugcacaaccccuaccccgacuaccacuggcugagaaccgugaagaccagcaaggagagccuggugaucaucagccccagcguggccgaccuggaccccuacgacaagagccugcacagcagaguguuccccggcggcaagugcagcggcaucaccgugagcagcaccugcugcagcaccaaccacgacuacaccaucuggaugcccgagaaccccagacugggcaccagcugcgacaucuucaccaacagcagaggcaagagagccagcaagggcggcaagaccugcggcuucguggacgagagaggccuguacaagagccugaagggcgccugcaagcugaagcugugcggcgugcugggccugagacugauggacggcaccuggguggccauccagaccagcgacgagaucaaguggugcagccccgaccagcuggugaaccugcacgacuuccacagcgacgagaucgagcaccuggugguggaggagcuggugaagaagagagaggagugccuggacgcccuggagaccaucaugaccaccaagagcgugagcuucagaagacugagccaccugagaaagcuggugcccggcuucggcaaggccuacaccaucuucaacaagacccugauggaggccgacgcccacuacaagagcaucagaaccuggaacgagaucauccccagcaagggcugccugagagugggcggcagaugccacccccacgugaacggcguguucuucaacggcaucauccugggccccgacggccacgugcugauccccgagaugcagagcagccugcugcaccagcacauggagcugcuggagagcagcgugaucccccugaugcacccccuggccgaccccagcaccguguucaaggacggcgacgaggccgaggacuucguggaggugcaccugcccgacgugcacaagcagaucagcggcguggaccugggccugcccaacuggggcaaguacgugcuggugagcgccggcgcccugaccgcccugaugcugaugaucuuccugaugaccugcugcagaaagaccaacagagccgagagcauccagcacagccccggcgagaccggcagaaaggugagcgugaccagccacaacggcagagugaucagcagcugggagagcuacaagagcggcggcgagaccaagcuguga

SEQ ID NO: 190888 - RNA, 1575 nt, Artificial Sequence; identical to SEQ ID NO: 190887
  derived and/or modified CDS sequence (opt4) from glycoprotein__RABV__DQ849048.1

SEQ ID NO: 190889 - RNA, 1575 nt, Artificial Sequence
  derived and/or modified CDS sequence (opt4) from glycoprotein__RABV__DQ849049.1
augaucccccaggugcugcuguucgugccccugcugguguuccugagcugcuucggcaaguuccccaucuacaccauccccgacaagcugggccccuggagccccaucgacauccaccaccugagcugccccaacaaccuggugguggaggacgagggcugcaccaaccugagcggcuucagcuacauggagcugaaggugggcuacaucagcgccaucaaggugaacggcuucaccugcaccggcguggugaccgaggccgagaccuacaccaacuucgugggcuacgugaccaccaccuucaagagaaagcacuucagacccacccccgacgccugcagagccgccuacaacuggaagauggccggcgaccccagauacgaggagagccugcacaaccccuaccccgacuaccacuggcugagaaccgugaagaccagcaaggagagccuggugaucaucagccccagcguggccgaccuggaccccuacgacaagagccugcacagcagaguguuccccggcggcaagugcagcggcaucaccgugagcagcaccugcugcagcaccaaccacgacuacaccaucuggaugcccgagaaccccagacugggcaccagcugcgacaucuucaccaacagcagaggcaagagagccagcaagggcggcaagaccugcggcuucguggacgagagaggccuguacaagagccugaagggcgccugcaagcugaagcugugcggcgugcugggccugagacugauggacggcaccuggguggccauccagaccagcgacgagaucaaguggugcagccccgaccagcuggugaaccugcacgacuuccacagcgacgagaucgagcaccuggugguggaggagcuggugaagaagagagaggagugccuggacgcccuggagaccaucaugaccaccaagagcgugagcuucagaagacugagccaccugagaaagcuggugcccggcuucggcaaggccuacaccaucuucaacaagacccugauggaggccgacgcccacuacaagagcaucagaaccuggaacgagaucauccccagcaagggcugccugagagugggcggcagaugccacccccacgugaacggcguguucuucaacggcaucauccugggccccgacggccacgugcugauccccgagaugcagagcagccugcugcaccagcacauggagcugcuggagagcagcgugaucccccugaugcacccccuggccgaccccagcaccguguucaaggacggcgacgaggccgaggacuucguggaggugcaccugcccgacgugcacaagcagaucagcggcguggaccugggccugcccaacuggggcaaguacgugcuggugagcgccggcgcccugaccgcccugaugcugaugaucuuccugaugaccugcugcagaaagaccaacagagccgagagcauccagcacagccccggcgagaucggcagaaaggugagcgugaccagccacaacggcagagugaucagcagcugggagagcuacaagagcggcggcgagaccaagcuguga

SEQ ID NO: 190890 - RNA, 1575 nt, Artificial Sequence; identical to SEQ ID NO: 190887
  derived and/or modified CDS sequence (opt4) from glycoprotein__RABV__DQ849050.1

SEQ ID NO: 190891 - RNA, 1575 nt, Artificial Sequence; identical to SEQ ID NO: 190887
  derived and/or modified CDS sequence (opt4) from glycoprotein__RABV__DQ849051.1

SEQ ID NO: 190892 - RNA, 1575 nt, Artificial Sequence
  derived and/or modified CDS sequence (opt4) from glycoprotein__RABV__DQ849052.1
augaucccccaggugcugcuguucgugccccugcugguguucagcagcugcuucggcaaguuccccaucuacaccauccccgacaagcugggccccuggagccccaucgacauccaccaccugagcugccccaacaaccuggugguggaggacgagggcugcaccaaccugagcggcuucagcuacauggagcugaaggugggcuacaucagcgccaucaaggugaacggcuucaccugcaccggcguggugaccgaggccgagaccuaccccaacuucgugggcuacgugaccaccaccuucaagagaaagcacuucagacccacccccgacgccugcagagccgccuacaacuggaagauggccggcgaccccagauacgaggagagccugcacaaccccuaccccgacuaccacuggcugagaaccgugaagaccagcaaggagagccuggugaucaucagccccagcguggccgaccuggaccccuacgacaagagccugcacagcagaguguuccccggcggcaagugcagcggcaucaccgugagcagcaccugcugcuucaccaaccacgacuacaccaucuggaugcccgagaaccccagacugggcaccagcugcgacaucuucaccaacagcagaggcaagagagccagcaagggcggcaagaccugcggcuucguggacgagagaggccuguacaagagccugaagggcgccugcaagcugaagcugugcggcgugcugggccugagacugauggacggcaccuggguggccauccagaccagcgacgagaucaaguggugcagccccgaccagcuggugaaccugcacgacuuccacagcgacgagaucgagcaccuggugguggaggagcuggugaagaagagagaggagugccuggacgcccuggagaccaucaugaccaccaagagcgugagcuucagaagacugagccaccugagaaagcuggugcccggcuucggcaaggccuacaccaucuucaacaagacccugauggaggccgacgcccacuacaagagcaucagaaccuggaacgagaucauccccagcaagggcugccugagagugggcggcagaugccacccccacgugaacggcguguucuucaacggcaucauccugggccccgacggccacgugcugauccccgagaugcagagcagccugcugcaccagcacauggagcugcuggagagcagcgugaucccccugaugcacccccuggccgaccccagcaccguguucaaggacggcgacgaggccgaggacuucguggaggugcaccugcccgacgugcacaagcagaucagcggcguggaccugggccugcccaacuggggcaaguacgugcuggugagcgccggcgcccugaccgcccugaugcugaugaucuuccugaugaccugcugcagaaagaccaacagagccgagagcauccagcacagccccggcgagaccggcagaaaggugagcgugaccagccacaacggcagagugaucagcagcugggagagcuacaagagcggcggcgagaccaagcuguga

SEQ ID NO: 190893 - RNA, 1575 nt, Artificial Sequence
  derived and/or modified CDS sequence (opt4) from glycoprotein__RABV__DQ849053.1
augaucccccaggugcugcuguucgugccccugcugguguucagcagcugcuucggcaaguuccccaucuacaccauccccgacaagcugggccccuggagccccaucgacauccaccaccugagcugccccaacaaccuggugguggaggacgagggcugcaccaaccugagcggcuucagcuacauggagcugaaggugggcuacaucagcgccaucaaggugaacggcuucaccugcaccggcguggugaccgaggccgagaccuacaccaacuucgugggcuacgugaccaccaccuucaagagaaagcacuucagacccacccccgacgccugcagagccgccuacaacuggaagauggccggcgaccccagauacgaggagagccugcacaaccccuaccccgacuaccacuggcugagaaccgugaagaccagcaaggagagccuggugaucaucagccccagcguggccgaccuggaccccuacgacaagagccugcacagcagaguguuccccggcggcaagugcagcggcaucaccgugagcagcaccugcugcagcaccaaccacgacuacaccaucuggaugcccgagaaccccagacugggcaccagcugcgacaucuucaccaacagcagaggcaagagagccagcaagggcggcaagaccugcggcuucguggacgagagaggccuguacaagagccugaagggcgccugcaagcugaagcugugcggcgugcugggccugagacugauggacggcaccuggguggccauccagaccagcgacgagaucagauggugcagccccgaccagcuggugaaccugcacgacuuccacagcgacgagaucgagcaccuggugguggaggagcuggugaagaagagagaggagugccuggacgcccuggagaccaucaugaccaccaagagcgugagcuucagaagacugagccaccugagaaagcuggugcccggcuucggcaaggccuacaccaucuucaacaagacccugauggaggccgacgcccacuacaagagcaucagaaccuggaacgagaucauccccagcaagggcugccugagagugggcggcagaugccacccccacgugaacggcguguucuucaacggcaucauccugggccccgacggccacgugcugauccccgagaugcagagcagccugcugcaccagcacauggagcugcuggagagcagcgugaucccccugaugcacccccuggccgaccccagcaccguguucaaggacggcgacgaggccgaggacuucguggaggugcaccugcccgacgugcacaagcagaucagcggcguggaccugggccugcccaacuggggcaaguacgugcuggugagcgccggcgcccugaccgcccugaugcugaugaucuuccugaugaccugcugcagaaagaccaacagagccgagagcauccagcacagccccggcgagaccggcagaaaggugagcgugaccagccacaacggcagagugaucagcagcugggagagcuacaagagcggcggcgagaccaagcuguga

SEQ ID NO: 190894 - RNA, 1575 nt, Artificial Sequence
  derived and/or modified CDS sequence (opt4) from glycoprotein__RABV__DQ849054.1
augaucccccaggugcugcuguucgugccccugcugguguucagcagcugcuucggcaaguuccccaucuaccccauccccgacaagcugggccccuggagccccaucgacauccaccaccugagcugccccaacaaccuggugguggaggacgagggcugcaccaaccugagcggcuucagcuacauggagcugaaggugggcuacaucagcgccaucaaggugaacggcuucaccugcaccggcguggugaccgaggccgagaccuaccccaacuucgugggcuacgugaccaccaccuucaagagaaagcacuucagacccacccccgacgccugcagagccgccuacaacuggaagauggccggcgaccccagauacgaggagagccugcacaaccccuaccccgacuaccacuggcugagaaccgugaagaccagcaaggagagccuggugaucaucagccccagcguggccgaccuggaccccuacgacaagagccugcacagcagaguguuccccggcggcaagugcagcggcaucaccgugagcagcaccugcugcuucaccaaccacgacuacaccaucuggaugcccgagaaccccagacugggcaccagcugcgacaucuucaccaacagcagaggcaagagagccagcaagggcggcaagaccugcggcuucguggacgagagaggccuguacaagagccugaagggcgccugcaagcugaagcugugcggcgugcugggccugagacugauggacggcaccuggguggccauccagaccagcgacgagaucaaguggugcagccccgaccagcuggugaaccugcacgacuuccacagcgacgagaucgagcaccuggugguggaggagcuggugaagaagagagaggagugccuggacgcccuggagaccaucaugaccaccaagagcgugagcuucagaagacugagccaccugagaaagcuggugcccggcuucggcaaggccuacaccaucuucaacaagacccugauggaggccgacgcccacuacaagagcaucagaaccuggaacgagaucauccccagcaagggcugccugagagugggcggcagaugccacccccacgugaacggcguguucuucaacggcaucauccugggccccgacggccacgugcugauccccgagaugcagagcagccugcugcaccagcacauggagcugcuggagagcagcgugaucccccugaugcacccccuggccgaccccagcaccguguucaaggacggcgacgaggccgaggacuucguggaggugcaccugcccgacgugcacaagcagaucagcggcguggaccugggccugcccaacuggggcaaguacgugcuggugagcgccggcgcccugaccgcccugaugcugaugaucuuccugaugaccugcugcagaaagaccaacagagccgagagcauccagcacagccccggcgagaccggcagaaaggugagcgugaccagccacaacggcagagugaucagcagcugggagagcuacaagagcggcggcgagaccaagcuguga

SEQ ID NO: 190895 - RNA, 1575 nt, Artificial Sequence
  derived and/or modified CDS sequence (opt4) from glycoprotein__RABV__DQ849055.1
augaucccccaggugcugcuguucgugccccugcugguguucagcagcugcuucggcaaguuccccaucuacaccauccccgacaagcugggccccuggagccccaucgacauccaccaccugagcugccccaacaaccuggugguggaggacgagggcugcaccaaccugagcggcuucagcuacauggagcugaaggugggcuacaucagcgccaucaaggugaacggcuucaccugcaccggcguggugaccgaggccgagaccuacaccaacuucgugggcuacgugaccaccaccuucaagagaaagcacuucagacccacccccgacgccugcagagccgccuacaacuggaagauggccggcgaccccagauacgaggagagccugcacaaccccuaccccgacuaccacuggcugagaaccgugaagaccagcaaggagagccuggugaucaucagccccagcguggccgaccuggaccccuacgacaagagccugcacagcagaguguuccccggcggcaagugcagcggcaucaccgugagcagcaccugcugcuucaccaaccacgacuacaccaucuggaugcccgagaaccccagacugggcaccagcugcgacaucuucaccaacagcagaggcaagagagccagcaagggcggcaagaccugcggcuucguggacgagagaggccuguacaagagccugaagggcgccugcaagcugaagcugugcggcgugcugggccugagacugauggacggcaccuggguggccauccagaccagcgacgagaucaaguggugcagccccgaccagcuggugaaccugcacgacuuccacagcgacgagaucgagcaccuggugguggaggagcuggugaagaagagagaggagugccuggacgcccuggagaccaucaugaccaccaagagcgugagcuucagaagacugagccaccugagaaagcuggugcccggcuucggcaaggccuacaccaucuucaacaagacccugauggaggccgacgcccacuacaagagcaucagaaccuggaacgagaucauccccagcaagggcugccugagagugggcggcagaugccacccccacgugaacggcguguucuucaacggcaucauccugggccccgacggccacgugcugauccccgagaugcagagcagccugcugcaccagcacauggagcugcuggagagcgccgugaucccccugaugcacccccuggccgaccccagcaccguguucaaggacggcgacgaggccgaggacuucguggaggugcaccugcccgacgugcacaagcagaucagcggcguggaccugggccugcccaacuggggcaaguacgugcuggugagcgccggcgcccugaccgcccugaugcugaugaucuuccugaugaccugcugcagaaagaccaacagagccgagagcauccagcacagccccggcgagaccggcagaaaggugagcgugaccagccacaacggcagagugaucagcagcugggagagcuacaagagcggcggcgagaccaagcuguga

SEQ ID NO: 190896 - RNA, 1575 nt, Artificial Sequence
  derived and/or modified CDS sequence (opt4) from glycoprotein__RABV__DQ849056.1
augaucccccaggugcugcuguucgugccccugcugguguucagcagcugcuucggcaaguuccccaucuacaccauccccgacaagcugggccccuggagccccaucgacauccaccaccugagcugccccaacaaccuggugguggaggacgagggcugcaccaaccugagcggcuucagcuacauggagcugaaggugggcuacaucagcgccaucaaggugaacggcuucaccugcaccggcguggugaccgaggccgagaccuacaccaacuucgugggcuacgugaccaccaccuucaagagaaagcacuucagacccacccccgacgccugcagagccgccuacaacuggaagauggccggcgaccccagauacgaggagagccugcacaaccccuaccccgacuaccacuggcugagaaccgugaagaccagcaaggagagccuggugaucaucagccccagcguggccgaccuggaccccuacgacaagagccugcacagcagaguguuccccggcggcaagugcagcggcaucaccgugagcagcaccuggugcagcaccaaccacgacuacaccaucuggaugcccgagaaccccagacugggcaccagcugcgacaucuucaccaacagcagaggcaagagagccagcaagggcggcaagaccugcggcuucguggacgagagaggccuguacaagagccugaagggcgccugcaagcugaagcugugcggcgugcugggccugagacugauggacggcaccuggguggccauccagaccagcgacgagaucaaguggugcagccccgaccagcuggugaaccugcacgacuuccacagcgacgagaucgagcaccuggugguggaggagcuggugaagaagagagaggagugccuggacgcccuggagaccaucaugaccaccaagagcgugagcuucagaagacugagccaccugagaaagcuggugcccggcuucggcaaggccuacaccaucuucaacaagacccugauggaggccgacgcccacuacaagagcaucagaaccuggaacgagaucauccccagcaagggcugccugagagugggcggcagaugccacccccacgugaacggcguguucuucaacggcaucauccugggccccgacggccacgugcugauccccgagaugcagagcagccugcugcaccagcacauggagcugcuggagagcagcgugaucccccugaugcacccccuggccgaccccagcaccguguucaaggacggcgacgaggccgaggacuucguggaggugcaccugcccgacgugcacaagcagaucagcggcguggaccugggccugcccaacuggggcaaguacgugcuggugagcgccggcgcccugaccgcccugaugcugaugaucuuccugaugaccugcugcagaaagaccaacagagccgagagcauccagcacagccccggcgagaccggcagaaaggugagcgugaccagccacaacggcagagugaucagcagcugggagagcuacaagagcggcggcgagaccaagcuguga

SEQ ID NO: 190897 - RNA, 1575 nt, Artificial Sequence
  derived and/or modified CDS sequence (opt4) from glycoprotein__RABV__DQ849057.1
augaucccccaggugcugcuguucgugccccugcugguguucagcagcugcuucggcaaguuccccaucuacaccauccccgacaagcugggccccuggagccccaucgacauccaccaccugagcugccccaacaaccuggugguggaggacgagggcugcaccaaccugagcggcuucagcuacauggagcugaaggugggcuacaucagcgccaucaaggugaacggcuucaccugcaccggcguggugaccgaggccgagaccuacaccaacuucgugggcuacgugaccaccaccuucaagagaaagcacuucagacccacccccgacgccugcagagccgccuacaacuggaagauggccggcgaccccagauacgaggagagccugcacaaccccuaccccgacuaccacuggcugagaaccgugaagaccagcaaggagagccuggugaucaucagccccagcguggccgaccuggaccccuacgacaagagccugcacagcagaguguuccccggcggcaagugcagcggcaucaccgugagcagcaccugcugcagcaccaaccacgacuacaccaucuggaugcccgagaaccccagacugggcaccagcugcgacaucuucaccaacagcagaggcaagagagccagcaagggcggcaagaccugcggcuucguggacgagagaggccuguacaagagccugaagggcgccugcaagcugaagcugugcggcgugcugggccugagacugauggacggcaccuggguggccauccagaccagcgacgagaucaaguggugcagccccgaccagcuggugaaccugcacgacuuccacagcgacgagaucgagcaccuggugguggaggagcuggugaagaagagagaggagugccuggacgcccuggagaccaucaugaccaccaagagcgugagcuucagaagacugagccaccugagaaagcuggugcccggcuucggcaaggccuacaccaucuucaacaagacccugauggaggccgacgcccacuacaagagcaucagaaccuggaacgagaucauccccagcaagggcugccugagagugggcggcagaugccacccccacgugaacggcguguucuucaacggcaucauccugggccccgacggccacgugcugauccccgagaugcagagcagccugcugcaccagcacauggagcugcuggagagcagcgugaucccccugaugcacccccuggccgaccccagcaccaucuucaaggacggcgacgaggccgaggacuucguggaggugcaccugcccgacgugcacaagcagaucagcggcguggaccugggccugcccaacuggggcaaguacgugcuggugagcgccggcgcccugaccgcccugaugcugaugaucuuccugaugaccugcugcagaaagaccaacagagccgagagcauccagcacagccccggcgagaccggcagaaaggugagcgugaccagccacaacggcagagugaucagcagcugggagagcuacaagagcggcggcgagaccaagcuguga

SEQ ID NO: 190898 - RNA, 1575 nt, Artificial Sequence
  derived and/or modified CDS sequence (opt4) from glycoprotein__RABV__DQ849058.1
augaucccccaggugcugcuguucgugccccugcugguguucagcagcugcuucggcaaguuccccaucuacaccauccccgacaagcugggccccuggagccccaucgacauccaccaccugagcugccccaacaaccuggugguggaggacgagggcugcaccaaccugagcggcuucagcuacauggagcugaaggugggcuacaucagcgccaucaaggugaacggcuucaccugcaccggcguggugaccgaggccgagaccuacaccaacuucgugggcuacgugaccaccaccuucaagagaaagcacuucagacccacccccgacgccugcagagccgccuacaacuggaagauggccggcgaccccagauacgaggagagccugcacaaccccuaccccgacuaccacugggugagaaccgugaagaccagcaaggagagccuggugaucaucagccccagcguggccgaccuggaccccuacgacaagagccugcacagcagaguguuccccggcggcaagugcagcggcaucaccgugagcagcaccugcugcagcaccaaccacgacuacaccaucuggaugcccgagaaccccagacugggcaccagcugcgacaucuucaccaacagcagaggcaagagagccagcaagggcggcaagaccugcggcuucguggacgagagaggccuguacaagagccugaagggcgccugcaagcugaagcugugcggcgugcugggccugagacugauggacggcaccuggguggccauccagaccagcgacgagaucaaguggugcagccccgaccagcuggugaaccugcacgacuuccacagcgacgagaucgagcaccuggugguggaggagcuggugaagaagagagaggagugccuggacgcccuggagaccaucaugaccaccaagagcgugagcuucagaagacugagccaccugagaaagcuggugcccggcuucggcaaggccuacaccaucuucaacaagacccugauggaggccgacgcccacuacaagagcaucagaaccuggaacgagaucauccccagcaagggcugccugagagugggcggcagaugccacccccacgugaacggcguguucuucaacggcaucauccugggccccgacggccacgugcugauccccgagaugcagagcagccugcugcaccagcacauggagcugcuggagagcagcgugaucccccugaugcacccccuggccgaccccagcaccguguucaaggacggcgacgaggccgaggacuucguggaggugcaccugcccgacgugcacaagcagaucagcggcguggaccugggccugcccaacuggggcaaguacgugcuggugagcgccggcgcccugaccgcccugaugcugaugaucuuccugaugaccugcugcagaaagaccaacagagccgagagcauccagcacagccccggcgagaccggcagaaaggugagcgugaccagccacaacggcagagugaucagcagcugggagagcuacaagagcggcggcgagaccaagcuguga

SEQ ID NO: 190899 - RNA, 1575 nt, Artificial Sequence
  derived and/or modified CDS sequence (opt4) from glycoprotein__RABV__DQ849059.1
augaucccccaggugcugcuguucgugccccugcugguguucagcagcugcuucggcaaguuccccaucuacaccauccccgacaagcugggccccuggagccccaucgacauccaccaccugagcugccccaacaaccuggugguggaggacgagggcugcaccaaccugagcggcuucagcuacauggagcugaaggugggcuacaucagcgccaucaaggugaacggcuucaccugcaccggcguggugaccgaggccgagaccuacaccaacuucgugggcuacgugaccaccaccuucaagagaaagcacuucagacccaugcccgacgccugcagagccgccuacaacuggaagauggccggcgaccccagauacgaggagagccugcacaaccccuaccccgacuaccacuggcugagaaccgugaagaccaccaaggagagccuggugaucaucagccccagcguggccgaccuggaccccuacgacaagagccugcacagcagaguguuccccggcggcaagugcagcggcaucaccgugagcagcaccugcugcagcaccaaccacgacuacaccaucuggaugcccgagaaccccagacugggcaccagcugcgacaucuucaccaacagcagaggcaagagagccagcaagggcggcaagaccugcggcuucguggacgagagaggccuguacaagagccugaagggcgccugcaagcugaagcugugcggcgugcugggccugagacugauggacggcaccuggguggccauccagaccagcgacgagaucaaguggugcagccccgaccagcuggugaaccugcacgacuuccacagcgacgagaucgagcaccuggugguggaggagcuggugaagaagagagaggagugccuggacgcccuggagaccaucaugaccaccaagagcgugagcuucagaagacugagccaccugagaaagcuggugcccggcuucggcaaggccuacaccaucuucaacaagacccugauggaggccgacgcccacuacaagagcaucagaaccuggaacgagaucauccccagcaagggcugccugagagugggcggcagaugccacccccacgugaacggcguguucuucaacggcaucauccugggccccgacggccacgugcugauccccgagaugcagagcagccugcugcaccagcacauggagcugcuggagagcagcgugaucccccugaugcacccccuggccgaccccagcaccguguucaaggacggcgacgaggccgaggacuucguggaggugcaccugcccgacgugcacaagcagaucagcggcguggaccugggccugcccaacuggggcaaguacgugcugaucagcgccggcgcccugaccgcccugaugagcaugaucuuccugaugaccugcugcagaaagaccaacagagccgagagcauccagcacagccccggcgagaccggcagaaaggugagcgugaccagccacaacggcagagugaucagcagcugggagagcuacaagagcggcggcgagaccaagcuguga

SEQ ID NO: 190900 - RNA, 1575 nt, Artificial Sequence; identical to SEQ ID NO: 190899
  derived and/or modified CDS sequence (opt4) from glycoprotein__RABV__DQ849060.1

SEQ ID NO: 190901 - RNA, 1575 nt, Artificial Sequence
  derived and/or modified CDS sequence (opt4) from glycoprotein__RABV__DQ849061.1
augaucccccaggugcugcuguucgugccccugcugguguucagcagcugcuucggcaaguuccccaucuacaccauccccgacaagcugggccccuggagccccaucgacauccaccaccugagcugccccaacaaccuggugguggaggacgagggcugcaccaaccugagcggcuucagcuacauggagcugaaggugggcuacaucagcgccaucaaggugaacggcuucaccugcaccggcguggugaccgaggccgagaccuacaccaacuucgugggcuacgugaccaccaccuucaagagaaagcacuucagacccaugcccgacgccugcagagccgccuacaacuggaagauggccggcgaccccagauacgaggagagccugcacaaccccuaccccgacuaccacuggcugagaaccgugaagaccaccaaggagagccuggugaucaucagccccagcguggccgaccuggaccccuacgacaagagccugcacagcagaguguuccccggcggcaagugcagcggcaucaccgugagcagcaccugcugcagcaccaaccacgacuacaccaucuggaugcccgagaaccccagacugggcaccagcugcgacaucuucaccaacagcagaggcaagagagccagcaagggcggcaagaccugcggcuucguggacgagagaggccuguacaagagccugaagggcgccugcaagcugaagcugugcggcgugcugggccugagacugauggacggcaccuggguggccauccagaccagcgacgagaucaaguggugcagccccgaccagcuggugaaccugcacgacuuccacagcgacgagaucgagcaccuggugguggaggagcuggugaagaagagagaggagugccuggacgcccuggagaccaucaugaccaccaagagcgugagcuucagaagacugagccaccugagaaagcuggugcccggcuucggcaaggccuacaccaucuucaacaagacccugauggaggccgacgcccacuacaagagcaucagaaccuggaacgagaucauccccagcaagggcugccugagagugggcggcagaugccacccccacgugaacggcguguucuucaacggcaucauccugggccccgacggccacgugcugauccccgagaugcagagcagccugcugcaccagcacauggagcugcuggagagcagcgugaucccccugaugcacccccuggccgaccccagcaccguguucaaggacggcgacgaggccgaggacuucguggaggugcaccugcccgacgugcacaagcagaucagcggcguggaccugggccugcccaacuggggcaaguacgugcugaucagcgugggcgcccugaccgcccugaugcugaugaucuuccugaugaccugcugcagaaagaccaacagagccgagagcacccagcacagccccggcgagaccggcagaaaggugagcgugaccagccacaacggcagagugaucagcagcugggagagcuacaagagcggcggcgagaccaagcuguga

SEQ ID NO: 190902 - RNA, 1575 nt, Artificial Sequence
  derived and/or modified CDS sequence (opt4) from glycoprotein__RABV__DQ849062.1
augaucccccaggugcugcuguucgugccccugcugguguucagcagcugcuucggcaaguuccccaucuacaccauccccgacaagcugggccccuggagccccaucgacauccaccaccugagcugccccaacaaccuggugguggaggacgagggcugcaccaaccugagcggcuucagcuacauggagcugaaggugggcuacaucagcgccaucaaggugaacggcuucaccugcaccggcguggugaccgaggccgagaccuacaccaacuucgugggcuacgugaccaccaccuucaagagaaagcacuucagacccaugcccgacgccugcagagccgccuacaacuggaagauggccggcgaccccagauacgaggagagccugcacaaccccuaccccggcuaccacuggcugagaaccgugaagaccaccaaggagagccuggugaucaucagccccagcguggccgaccuggaccccuacgacaagagccugcacagcagaguguuccccggcggcaagugcagcggcaucaccgugagcagcaccugcugcagcaccaaccacgacuacaccaucuggaugcccgagaaccccagacugggcaccagcugcgacaucuucaccaacagcagaggcaagagagccagcaagggcggcaagaccugcggcuucguggacgagagaggccuguacaagagccugaagggcgccugcaagcugaagcugugcggcgugcugggccugagacugauggacggcaccuggguggccauccagaccagcgacgagaucaaguggugcagccccgaccagcuggugaaccugcacgacuuccacagcgacgagaucgagcaccuggugguggaggagcuggugaagaagagagaggagugccuggacgcccuggagaccaucaugaccaccaagagcgugagcuucagaagacugagccaccugagaaagcuggugcccggcuucggcaaggccuacaccaucuucaacaagacccugauggaggccgacgcccacuacaagagcaucagaaccuggaacgagaucauccccagcaagggcugccugagagugggcggcagaugccacccccacgugaacggcguguucuucaacggcaucauccugggccccgacggccacgugcugauccccgagaugcagagcagccugcugcaccagcacauggagcugcuggagagcagcgugaucccccugaugcacccccuggccgaccccagcaccguguucaaggacggcgacgaggccgaggacuucguggaggugcaccugcccgacgugcacaagcagaucagcggcguggaccugggccugcccaacuggggcaaguacgugcugaucagcgccggcgcccugaccgcccugaugcugaugaucuuccugaugaccugcugcagaaagaccaacagagccgagagcauccagcacagccccggcgagaccggcagaaaggugagcgugaccagccacaacggcagagugaucagcagcugggagagcuacaagagcggcggcgagaccaagcuguga

SEQ ID NO: 190903 - RNA, 1575 nt, Artificial Sequence
  derived and/or modified CDS sequence (opt4) from glycoprotein__RABV__DQ849063.1
augaucccccaggugcugcuguucgugccccugcugguguucagcagcugcuucggcaaguuccccaucuacaccauccccgacaagcugggccccuggagccccaucgacauccaccaccugagcugccccaacaaccuggugguggaggacgagggcugcaccaaccugagcggcuucagcuacauggagcugaaggugggcuacaucagcgccaucaaggugaacggcuucaccugcaccggcguggugaccgaggccgagaccuacaccaacuucgugggcuacgugaccaccaccuucaagagaaagcacuucagacccaugcccgacgccugcagagccgccuacaacuggaagauggccggcgaccccagauacgaggagagccugcacaaccccuaccccgacuaccacuggcugagaaccgugaagaccaccaaggagagccuggugaucaucagccccagcguggccgaccuggaccccuacgacaagagccugcacagcagaguguuccccggcggcaagugcagcggcaucaccgugagcagcaccugcugcagcaccaaccacgacuacaccaucuggaugcccgagaaccccagacugggcaccagcugcgacaucuucaccaacagcagaggcaagagagccagcaagggcggcaagaccugcggcuucguggacgagagaggccuguacaagagccugaagggcgccugcaagcugaagcugugcggcgugcugggccugagacugauggacggcaccuggguggccauccagaccagcgacgagaucaaguggugcagccccgaccagcuggugaaccugcacgacuuccacagcgacgagaucgagcaccuggugguggaggagcuggugaagaagagagaggagugccuggacgcccuggagaccaucaugaccaccaagagcgugagcuucagaagacugagccaccugagaaagcuggugcccggcuucggcaaggccuacaccaucuucaacaagacccugauggaggccgacgcccacuacaagagcaucagaaccuggaacgagaucauccccagcaagggcugccugagagugggcggcagaugccacccccacgugaacggcguguucuucaacggcaucauccugggccccgacggccacgugcugauccccgagaugcagagcagccugcugcaccagcacauggagcugcuggagagcagcgugaucccccugaugcacccccuggccgaccccagcaccguguucaaggacggcgacgaggccgaggacuucguggaggugcaccugcccgacgugcacaagcagaucagcggcguggaccugggccugcccaacuggggcaaguacgugcugaucagcgccggcgcccugaccgcccugaugcugaugaucuuccugaugaccugcugcagaaagaccaacagagccgagagcauccagcacagccccggcgagaccggcagaaaggugagcgugaccagccacaacggcagagugaucagcagcugggagagcuacaagagcggcggcgagaccaagcuguga

SEQ ID NO: 190904 - RNA, 1575 nt, Artificial Sequence
  derived and/or modified CDS sequence (opt4) from glycoprotein__RABV__DQ849064.1
augauccugcaggugcugcuguucgccccccugcugguguucagcagcugcuucggcaaguuccccaucuacaccauccccgacaagcugggccccuggagccccaucgacauccaccaccugagcugccccaacaaccuggugguggaggacgagggcugcaccaaccugagcggcuucagcuacauggagcugaaggugggcuacaucagcgccaucaaggugaacggcuucaccugcaccggcguggugaccgaggccgagaccuacaccaacuucgugggcuacgugaccaccaccuucaagagaaagcacuucagacccaugcccgacgccugcagagccgccuacaacuggaagauggccggcgaccccagauacgaggagagccugcacaaccccuaccccgacuaccacuggcugagaaccgugaagaccaccaaggagagccuggugaucaucagccccagcguggccgaccuggaccccuacgacaagagccugcacagcagaguguuccccggcggcaagugcagcggcaucaccgugagcagcaccugcugcagcaccaaccacgacuacaccaucuggaugcccgagaaccccagacugggcaccagcugcgacaucuucaccaacagcagaggcaagagagccagcaagggcggcaagaccugcggcuucguggacgagagaggccuguacaagagccugaagggcgccugcaagcugaagcugugcggcgugcugggccugagacugauggacggcaccuggguggccauccagaccagcgacgagaucaaguggugcccccccgaccagcuggugaaccugcacgacuuccacagcgacgagaucgagcaccuggugguggaggagcuggugaagaagagagaggagugccuggacgcccuggagaccaucaugaccaccaagagcgugagcuucagaagacugagccaccugagaaagcuggugcccggcuucggcaaggccuacaccaucuucaacaagacccugauggaggccgacgcccacuacaagagcaucagaaccuggaacgagaucauccccagcaagggcugccugagagugggcggcagaugccacccccacgugaacggcguguucuucaacggcaucauccugggccccgacggccacgugcugauccccgagaugcagagcagccugcugcaccagcacauggagcugcuggagagcagcgugaucccccugaugcacccccuggccgaccccagcaccguguucaaggacggcgacgaggccgaggacuucguggaggugcaccugcccgacgugcacaagcagaucagcggcguggaccugggccugcccaacuggggcaaguacgugcugaucagcgccggcgcccugaccgcccugaugcugaugaucuuccugaugaccugcugcagaaagaacaacagagccgagagcauccagcacagccccggcgagaccggcagaaaggugagcgugaccagccacaacggcagagugaucagcagcugggagagcuacaagagcggcggcgagaccaagcuguga

SEQ ID NO: 190905 - RNA, 1575 nt, Artificial Sequence
  derived and/or modified CDS sequence (opt4) from glycoprotein__RABV__DQ849065.1
augaucccccaggugcugcuguucgugccccugcugguguucagcagcugcuucggcaaguuccccaucuacaccauccccgacaagcugggccccuggagccccaucgacauccaccaccugagcugccccaacaaccuggugguggaggacgagggcugcaccaaccugagcggcuucagcuacauggagcugaaggugggcuacaucagcgccaucaaggugaacggcuucaccugcaccggcguggugaccgaggccgagaccuacaccaacuucgugggcuacgugaccaccaccuucaagagaaagcacuucagacccaugcccgacgccugcagagccgccuacaacuggaagauggccggcgaccccagauacgaggagagccugcacaaccccuaccccgacuaccacuggcugagaaccgugaagaccaccaaggagagccuggugaucaucagccccagcguggccgaccuggaccccuacgacaagagccugcacagcagaguguuccccggcggcaagugcagcggcaucaccgugagcagcaccugcugcagcaccaaccacgacuacaccaucuggaugcccgagaaccccagacugggcaccagcugcgacaucuucaccaacagcagaggcaagagagccagcaagggcggcaagaccugcggcuucguggacgagagaggccuguacaagagccugaagggcgccugcaagcugaagcugugcggcgugcugggccugagacugauggacggcaccuggguggccauccagaccagcgacgagaucaaguggugcagccccgaccagcuggugaaccugcacgacuuccacagcgacgagaucgagcaccuggugguggaggagcuggugaagaagagagaggagugccuggacgcccuggagaccaucaugaccaccaagagcgugagcuucagaagacugagccaccugagaaagcuggugcccggcuucggcaaggccuacaccaucuucaacaagacccugauggaggccgacgcccacuacaagagcaucagaaccuggaacgagaucauccccagcaagggcugccugagagugggcggcagaugccacccccacgugaacggcguguucuucaacggcaucauccugggccccgacggccacgugcugauccccgagaugcagagcagccugcugcaccagcacauggagcugcuggagagcagcgugaucccccugaugcacccccuggccgaccccagcaccguguucaaggacggcgacgaggccgaggacuucguggaggugcaccugcccgacgugcacaagcagaucagcggcguggaccugggccugcccaacuggggcaaguacgugcugaucagcgccggcgcccugaccgcccugaugcugaccaucuuccugaugaccugcugcagaaagaccaacagagccgagagcauccagcacagccccggcgagaccggcagaaaggugagcgugaccagccacaacggcagagugaucagcagcugggagagcuacaagagcggcagcgagaccaagcuguga

SEQ ID NO: 190906 - RNA, 1575 nt, Artificial Sequence
  derived and/or modified CDS sequence (opt4) from glycoprotein__RABV__DQ849066.1
augaucccccaggugcugcuguucgugccccugcugguguucagcagcugcuucggcaaguuccccaucuacaccauccccgacaagcugggccccuggagccccaucgacauccaccaccugagcugccccaacaaccuggugguggaggacgagggcugcaccaaccugagcggcuucagcuacauggagcugaaggugggcuacaucagcgccaucaaggugaacggcuucaccugcaccggcguggugaccgaggccgagaccuacaccaacuucgugggcuacgugaccaccaccuucaagagaaagcacuucagacccaugcccgacgccugcagagccgccuacaacuggaagauggccggcgaccccagauacgaggagagccugcacaaccccuaccccgacuaccacuggcugagaaccgugaagaccaccaaggagagccuggugaucaucagccccagcguggccgaccuggaccccuacgacaagagccugcacagcagaguguuccccggcggcaagugcagcggcaucaccgugagcagcaccugcugcagcaccaaccacgacuacaccaucuggaugcccgagaaccccagacugggcaccagcugcgacaucuucaccaacagcagaggcaagagagccagcaagggcggcaagaccugcggcuucguggacgagagaggccuguacaagagccugaagggcgccugcaagcugaagcugugcggcgugcugggccugagacugauggacggcaccuggguggccauccagaccagcgacgagaucaaguggugcagccccgaccagcuggugaaccugcacgacuuccacagcgacgagaucgagcaccuggugguggaggagcuggugaagaagagagaggagugccuggacgcccuggagaccaucaugaccaccaagagcgugagcuucagaagacugagccaccugagaaagcuggugcccggcuucggcaaggccuacaccaucuucaacaagacccugauggaggccgacgcccacuacaagagcaucagaaccuggaacgagaucauccccagcaagggcugccugagagugggcggcagaugccacccccacgugaacggcguguucuucaacggcaucauccugggccccgacggccacgugcugauccccgagaugcagagcagccugcugcaccagcacauggagcugcuggagagcagcgugaucccccugaugcacccccuggccgaccccagcaccguguucaaggacggcgacgaggccgaggacuucguggaggugcaccugcccgacgugcacaagcagaucagcggcguggaccugggccugcccaacuggggcaaguacgugcugaucagcgccggcgcccugaccgcccugaugcugaccaucuuccugaugaccugcugcagaaagaccaacagagccggcagcauccagcacagccccggcgagaccggcagaaaggugagcgugaccagccacaacggcagagugaucagcagcugggagagcuacaagagcggcagcgagaccaagcuguga

SEQ ID NO: 190907 - RNA, 1575 nt, Artificial Sequence; identical to SEQ ID NO: 190906
  derived and/or modified CDS sequence (opt4) from glycoprotein__RABV__DQ849067.1

SEQ ID NO: 190908 - RNA, 1575 nt, Artificial Sequence; identical to SEQ ID NO: 190905
  derived and/or modified CDS sequence (opt4) from glycoprotein__RABV__DQ849068.1

SEQ ID NO: 190909 - RNA, 1575 nt, Artificial Sequence
  derived and/or modified CDS sequence (opt4) from glycoprotein__RABV__DQ849069.2
augaucccccaggcccugcuguucgugccccugcugguguucagcuucugcuucggcaaguuccccaucuacaccauccccgacaagcugggccccuggagccccaucgacauccaccaccugagcugccccaacaaccuggugguggaggacgagggcugcaccaaccugagcggcuucagcuacauggagcugaaggugggcuacaucagcgccaucaaggugaacggcuucaccugcaccggcguggugaccgaggccgagaccuacaccaacuucgugggcuacgugaccaccaccuucaagagaaagcacuucagacccacccccgacgccugcagagccgccuacaacuggaagauggccggcgaccccagauacgaggagagccugcacaaccccuaccccgacuaccacuggcugagaaccgugaagaccaccaaggagagccuggugaucaucagccccagcgugagcgaccuggaccccuacgacaagagccugcacagcagaguguuccccagcggcaagugcagcagaaucaccgugagcagcaccuacugccccaccaaccacgacuacaccaucuggaugcccgagaaccccagacugggcaccagcugcgacaucuucaccaacagcagaggcaagagagccagcaagggcagcaagaccugcggcuucguggacgagagaggccuguacaagagccugaagggcgccugcaagcugaagcugugcggcgugcugggccugacccugauggacggcaccuggguggccauccagaccagcgacgaggccaaguggugcccccccgaccagcuggugaacauccacgacuucagaagcgacgagaucgagcaccuggugguggaggagcuggugaagaagagagaggagugccuggacgcccuggagagcaucaugaccaccaagagcgugagcuucagaagacugagccaccugagaaagcuggugcccggcuucggcaaggccuacaccaucuucaacaagacccugauggaggccgacgcccacuacaagagcgugagaaccuggaacgagaucauccccagcaagggcugccugagagugggcggcagaugccacccccacgugaacggcguguucuucaacggcaucauccugggccccgacggccacgugcugauccccgagaugcagagcagccugcugcagcagcacauggagcugcuggagagcagcgugaucccccugaugcacccccuggccgaccccagcaccguguucaaggaggacgacgaggccgaggacuucguggaggugcaccugcccgacgugcacaagcaggugagcggcguggaccugggccugcccagcuggggcaaguacgugcugaugagcgugggcgccaugaucgcccugaugcugaugaucuuccugaugaccugcugcagaagagccaacggcgccgagagcauccagcacagccugggcgagaccggcagaaaggugagcgugaccagccagagcggcagagugaucagcagcugggagagcuacaagagcggcggcgagaccaagcuguga

SEQ ID NO: 190910 - RNA, 1575 nt, Artificial Sequence
  derived and/or modified CDS sequence (opt4) from glycoprotein__RABV__DQ849070.1
augaucccccaggugcugcuguucgugccccugcugguguucagcagcugcuucggcaaguuccccaucuacaccauccccgacaagcugggccccuggagccccaucgacauccaccaccugagcugccccaacaaccuggugguggaggacgagggcugcaccaaccugagcggcuucagcuacauggagcugaaggugggcuacaucagcgccaucaaggugaacggcuucaccugcaccggcguggugaccgaggccgagaccuacaccaacuucgugggcuacgugaccaccaccuucaagagaaagcacuucagacccaugcccgacgccugcagagccgccuacaacuggaagauggccggcgaccccagauacgaggagagccugcacaaccccuaccccgacuaccacuggcugagaaccgugaagaccaccaaggagagccuggugaucaucagccccagcguggccgaccuggaccccuacgacaagagccugcacagcagaguguuccccggcggcaagugcagcggcaucaccgugagcagcaccugcugcagcaccaaccacgacuacaccaucuggaugcccgagaaccccagacugggcaccagcugcgacaucuucaccaacagcagaggcaagagagccagcaagggcggcaagaccugcggcuucguggacgagagaggccuguacaagagccugaagggcgccugcaagcugaagcugugcggcgugcugggccugagacugauggacggcaccuggguggccauccagaccagcgacgagaucaaguggugcagccccgaccagcuggugaaccugcacgacuuccacagcgacgagaucgagcaccuggugguggaggagcuggugaagaagagagaggagugccuggacgcccuggagaccaucaugaccaccaagagcgugagcuucagaagacugagccaccugagaaagcuggugcccggcuucggcaaggccuacaccaucuucaacaagacccugauggaggccgacgcccacuacaagagcaucagaaccuggaacgagaucauccccagcaagggcugccugagagugggcggcagaugccacccccacgugaacggcguguucuucaacggcaucauccugggccccgacggccacgugcugauccccgagaugcagagcagccugcugcaccagcacauggagcugcuggagagcagcgugaucccccugaugcacccccuggccgaccccagcaccguguucaaggacggcgacgaggccgaggacuucguggacgugcaccugcccgacgugcacaagcagaucagcggcguggaccugggccugcccaacuggggcaaguacgugcugaucagcgccggcgcccugaccgcccugaugcugaugaucuuccugaugaccugcugcagaaaggccaacagagccgagagcauccagcacaaccccggcgagaccggcagaaaggugagcgugaccagccacaacggcagagugaucagcagcugggagagcuacaagagcggcggcgagaccaagcuguga

SEQ ID NO: 190911 - RNA, 1575 nt, Artificial Sequence; identical to SEQ ID NO: 190587
  derived and/or modified CDS sequence (opt4) from glycoprotein__RABV__DQ849071.1

SEQ ID NO: 190912 - RNA, 1575 nt, Artificial Sequence
  derived and/or modified CDS sequence (opt4) from glycoprotein__RABV__DQ849072.1
augaucccccaggcccugcuguucgugccccugcugguguucagccugugcuucggcaaguuccccaucuacaccauccccgacaagcugggccccuggagccccaucgacauccaccaccugagcugccccaacaaccuggugguggaggacgagggcugcaccaaccugagcggcuucagcuacauggagcugaaggugggcuacaucagcgccaucaaggugaacggcuucaccugcaccggcguggugaccgaggccgagaccuacaccaacuucgugggcuacgugaccaccaccuucaagagaaagcacuucagacccacccccgacgccugcagagccgccuacaacuggaagauggccggcgaccccagauacgaggagagccugcacaaccccuaccccgacuaccacuggcugagaaccgugaagaccaccaaggagagccuggugaucaucagccccagcguggccgaccuggaccccuacgacaagagccugcacagcagaguguuccccagcggcaagugcagcggcaucaccgugagcagcaccuacugcagcaccaaccacgacuacaccaucuggaugcccgagaaccccagacugggcaccagcugcgacaucuucgugaacagcagaggcaagagagccagcaagggcagcaagaccugcggcuucguggacgagagaggccuguacaagagccugaagggcgccugcaagcugaagcugugcggcgugcugggccugagacugauggacggcaccuggguggccauccagaccagcgacgagaccaaguggugcccccccgaccagcuggugaaccugcacgacuucagaagcgacgagaucgagcaccuggugguggaggagcuggugaagaagagagaggagugccuggacgcccuggagagcaucaugaccaccaagagcgugagcuucagaagacugagccaccugagaaagcuggugcccggcuucggcaaggccuacaccaucuucaacaagacccugauggaggccgacgcccacuacaagagcgugagaaccuggaacgagaucauccccagcaagggcugccugagagugggcggcagaugccacccccacgugaacggcguguucuucaacggcaucauccugggccccgacggccacgugcugauccccgagaugcagagcagccugcugcagcagcacauggagcugcuggagagcagcgugaucccccugaugcacccccuggccgaccccagcaccaucuucaaggacggcgacgaggccgaggacuucguggaggugcaccugcccgacgugcacaagcaggugagcggcguggaccugggccugcccaacuggggcaaguacgugcugaugagcgccggcgcccugaccgcccugaugcugaugaucuuccugaugaccugcugcagaaagaccgacagaaccggcagcacccaccacagccccggcgagaccggcagaaaggugagcgugaccagccagaacggcagagugaucgccagcugggagagcuacaagagcggcggcgagaccaagcuguga

SEQ ID NO: 190913 - RNA, 1575 nt, Artificial Sequence
  derived and/or modified CDS sequence (opt4) from glycoprotein__RABV__DQ849073.1
augaucccccaggugcugcuguucgugccccugcugguguucagcagcugccugggcaaguuccccaucuacaccauccccgacaagcugggccccuggagccccaucgacauccaccaccugagcugccccaacaaccuggugguggaggacgagggcugcaccaaccugagcggcuucagcuacauggagcugaaggugggcuacaucagcgccaucaaggugaacggcuucaccugcaccggcguggugaccgaggccgagaccuacaccaacuucgugggcuacgugaccaccaccuucaagagaaagcacuucagacccaugcccgacgccugcagagccgccuacaacuggaagauggccggcgaccccagauacgaggagagccugcacaaccccuaccccgacuaccacuggcugagaaccgugaagaccagcaaggagagccuggugaucaucagccccagcguggccgaccuggaccccuacgacaagagccugcacagcagaguguuccccggcggcaagugcagcggcaucaccgugagcagcaccugcugcagcaccaaccacgacuacaccaucuggaugcccgagaaccccagacugggcaccagcugcgacaucuucaccaacagcagaggcaagagagccagcaagggcggcaagaccugcggcuucguggacgagagaggccuguacaagagccugaagggcgccugcaagcugaagcugugcggcgugcugggccugagacugauggacggcaccuggguggccauccagaccagcgacgagaucaaguggugcagccccgaccagcuggugaaccugcacgacuuccacagcgacgagaucgagcaccuggugguggaggagcuggugaagaagagagaggagugccuggacgcccuggagaccaucaugaccaccaagagcgugagcuucagaagacugagccaccugagaaagcuggugcccggcuucggcaaggccuacaccaucuucaacaagacccugauggaggccgacgcccacuacaagagcaucagaaccuggaacgagaucauccccagcaagggcugccugagagugggcggcagaugccacccccacgugaacggcguguucuucaacggcaucauccugggccccgacggccacgugcugauccccgagaugcagagcagccugcugcaccagcacauggagcugcuggagagcagcgugaucccccugaugcacccccuggccgaccccagcaccguguucaaggacggcgacgaggccgaggacuucguggaggugcaccugcccgacgugcacaagcagaucagcggcguggaccugggccugcccaacuggggcaaguacgugcugaucagcgccggcgcccugaccgccagcaugcugaugaucuuccugaugaccugcugcagaaagaccaacagagccgagagcauccagcacagccccggcgagaccggcagaaaggugagcgugaccagccacaacggcagagugaucagcagcugggagagcuacaagagcggcggcgagaccaagcuguga

SEQ ID NO: 190914 - RNA, 1575 nt, Artificial Sequence
  derived and/or modified CDS sequence (opt4) from glycoprotein__RABV__DQ875050.1
auggugccccaggugcugcuguucgugcugcugcugggcuucagccugugcuucggcaaguuccccaucuacaccauccccgacgagcugggccccuggagccccaucgacauccaccaccugagcugccccaacaaccuggugguggaggacgagggcugcaccaaccugagcgaguucagcuacauggagcugaaggugggcuacaucagcgccaucaaggugaacggcuucaccugcaccggcguggugaccgaggccgagaccuacaccaacuucgugggcuacgugaccaccaccuucaagagaaagcacuucagacccacccccgacgccugcagagccgccuacaacuggaagauggccggcgaccccagauacgaggagagccugcacaaccccuaccccgacuaccacuggcugagaaccgugagaaccaccaaggagagccugaucaucaucagccccagcgugaccgaccuggaccccuacgacaagagccugcacagcagaguguuccccggcagaaagugcagcggcaucaccgugagcagcaccuacugcagcaccaaccacgacuacaccaucuggaugcccgagaaccccagacccagaacccccugcgacaucuucaccaacagcagaggcaagagagccagcaacggcaacaagaccugcggcuucguggacgagagaggccuguacaagagccugaagggcgccugcagacugaagcugugcggcgugcugggccugagacugauggacggcaccuggguggccaugcagaccagcggcgagaccaaguggugcccccccgaccagcuggugaaccugcacgacuucagaagcgacgagaucgagcaccuggugguggaggagcuggugaagaagagagaggagugccuggacgcccuggagagcaucaugaccaccaagagcgugagcuucagaagacugagccaccugagaaagcuggugcccggcuucggcaaggccuacaccaucuucaacaagacccugauggaggccgacgcccacuacaagagcgugagaaccuggaacgagaucauccccagcaagggcugccugaaggugggcggcagaugccacccccacgugaacggcguguucuucaacggccugauccugggccccgacgaccacgugcugauccccgagaugcagagcagccugcugcagcagcacauggagcugcuggagagcagcgugaucccccugaugcacccccuggccgaccccagcaccguguucaaggagggcgacgaggccgaggacuucguggaggugcaccugcccgacguguacaagcagaucagcggcguggaccugggccugcccaacuggggcaaguacgugcugaugaccgccggcgccaugaucggccuggugcugaucuucagccugaugaccuggugcagaagagccaacagacccgagagcaagcagagaagcuucggcggcaccggcggcaacgugagcgugaccagccagagcggcaaggugauccccagcugggagagcuacaagagcggcggcgagaucagacuguga

SEQ ID NO: 190915 - RNA, 1575 nt, Artificial Sequence
  derived and/or modified CDS sequence (opt4) from glycoprotein__RABV__DQ875051.1
auggugccccaggcccugcugcuggugccccugcugggcuucagccugugcuucggcaaguuccccaucuacaccauccccaccaagcugggccccuggagccccaucgacauccaccaccugagcugccccaacaaccuggugguggaggacgagggcugcaccaaccugagcggcuucagcuacauggagcugaaggugggcagaaucagcgccaucaaggugaacggcuucaccugcaccggcguggugaccgaggccgagaccuacaccaacuucgugggcuacgugaccaccaccuucaagagaaagcacuucagacccaugcccggcugcauguacagcagagugcagcuggaggacggcagaagcccccagaucgaggagagccugcacaaccccuaccccgacuaccacuggcugagaaccgugagaaccaccaaggagagccugaucaucaucagccccagcgugaccgaccuggaccccuacgacaagagccugcacagcagaguguuccccggcagaaagugcagcggcaucaccgugagcagcaccuacugcagcaccaaccacgacuacaccguguggaugcccgagauccugagacugggcaccagcugcgacaucuucaccaacagcagaggcaagagagccagcaagggcagcaagaccugcggcuucguggacgagagaggccuguacaagagccugaagggcgccugcaagcugaagcugugcggcgugcccggccugagacugauggacggcaccuggguggccaugcagaccagcaacgagaccaaguggugcccccccggccagcuggugaaccugcacgaccugcacagcgacgagaucgagcaccuggugguggaggagcuggugaagaagagagaggagugccuggacgcccuggagagcaucaccaccaccaagagcgugagcuucagaagacugagccaccugagaaagcuggugcccggcuucggcaaggccuacaccaucuucaacaagacccugauggaggccgaggcccacuacaagagcgugagaaccuggaacgagaucauccccagcaagggcugccugagagugggcggcggcugccacccccacgugaacggcguguucuucaacggcaucauccugggccccgacggccacgugcugauccccgagaugcagagcagccugcugcagcagcacaucgagcugcuggagagcagcgugaucccccugaugcacccccuggccgaccccuucaccguguucaaggacggcgacgagaucgaggacuucguggaggugcaccugcccgacgugcacgagcaggugagcggcguggaccugggccugcccaacuggggcgaguacgugcugcugagcgccggcacccugaucgcccugaugcugaucaucuuccugaucaccugcugcaagagaguggacagacccgagagcacccagagaagccugagaggcaccggcagaaacgugagcgugaccagccagagcggcaaguucauccccagcagagagagcuacaagagcggcggcgagaccggccuguga

SEQ ID NO: 190916 - RNA, 1575 nt, Artificial Sequence
  derived and/or modified CDS sequence (opt4) from glycoprotein__RABV__E02022.1
auggugccccaggcccugcugcuggugcccauccugggcuucagcagcugcuucggcaaguuccccaucuacaccauccccgacacccugggccccuggagccccaucgacauccaccaccugagcugccccaacaaccuggugguggaggacgagggcugcaccaaccugagcggcuucagcuacauggagcugaaggugggccacaucagcgccaucaaggugaacggcuucaccugcaccggcguggugaccgaggccgagaccuacaccaacuucgugggcuacgugaccaccaccuucaagagaaagcacuucagacccacccccgacgccugcagagccgccuacaacuggaagauggccggcgaccccagauacgaggagagccugcacagccccuaccccgacuaccacuggcugagaaccgugaagaccaccaaggagagccuggugaucaucagccccagcgugguggaccuggaccccuacgacaacagccugcacagcagaguguuccccagcggcaagugcagcggcaucaccgugagcagcguguacugcagcaccaaccacgacuacaccguguggaugcccgagagccugagacugggcaccagcugcgacaucuucaccaacagcagaggcaagagagugagcaagggcagcaagaccugcggcuucguggacgagagaggccuguacaagagccugaagggcgccugcaagcugaagcugugcggcgugagaggccugagacugauggacggcaccuggguggccaugcagaccagcaacgagaccaaguggugcccccccgaccagcuggugaaccugcacgaccugagaagcgacgagaucgagcaccuggugaucgaggagcuggugaagaagagagaggagugccuggacgcccuggagagcaucaucaccaccaagagcgugagcuucagaagacugagcuaccugagaaagcuggugcccggcuucggcaaggccuacaccaucuucaacaagacccugauggaggccgaggcccacuacaagagcgugagaaccuggaacgagaucauccccagcaagggcugccugagagugggcggcagaugccacccccacgugaacggcguguucuucaacggcaucauccugggccccgacggccacgugcugauccccgagaugcagagcagccugcugcagcagcacaucgagcugcuggagagcagcgugaucccccugaugcacccccuggccgaccccuucaccguguucaaggacggcgacgagaccgaggacuucaucgaggugcaccugcccgacgugcacgagcaggugagcggcguggaccugggccugcccaacuggggcgaguacgugcugcugagcgccggcacccugaucgcccugaugcugaucaucuuccugaugaccugcugcagaaagguggacagacccgagagcacccagagaagccugagaggcaccggcagaaacgugagcgugaccagccagagcggcaaguucauccccagcugggagagcuacaagagcggcggcgagaccggccuguga

SEQ ID NO: 190917 - RNA, 1575 nt, Artificial Sequence
  derived and/or modified CDS sequence (opt4) from glycoprotein__RABV__EF206707.1
auggugccccaggcccugcuguucgugccccugcugguguucccccugugcuucggcaaguuccccaucuacaccauccccgacaagcugggccccuggagccccaucgacauccaccaccugagcugccccaacaaccuggugguggaggacgagggcugcaccaaccugagcggcuucagcuacauggagcugaaggugggcuacauccuggccaucaagaugaacggcuucaccugcaccggcguggugaccgaggccgagaccuacaccaacuucgugggcuacgugaccaccaccuucaagagaaagcacuucagacccacccccgacgccugcagagccgccuacaacuggaagauggccggcgaccccagauacgaggagagccugcacaaccccuaccccgacuacagauggcugagaaccgugaagaccaccaaggagagccuggugaucaucagccccagcguggccgaccuggaccccuacgacagaagccugcacagcagaguguuccccagcggcaagugcagcggcguggccgugagcagcaccuacugcagcaccaaccacgacuacaccaucuggaugcccgagaaccccagacugggcaugagcugcgacaucuucaccaacagcagaggcaagagagccagcaagggcagcgagaccugcggcuucguggacgagagaggccuguacaagagccugaagggcgccugcaagcugaagcugugcggcgugcugggccugagacugauggacggcaccuggguggccaugcagaccagcaacgagaccaaguggugcccccccgaccagcuggugaaccugcacgacuucagaagcgacgagaucgagcaccuggugguggaggagcuggugagaaagagagaggagugccuggacgcccuggagagcaucaugaccaccaagagcgugagcuucagaagacugagccaccugagaaagcuggugcccggcuucggcaaggccuacaccaucuucaacaagacccugauggaggccgacgcccacuacaagagcgugagaaccuggaacgagauccugcccagcaagggcugccugagagugggcggcagaugccacccccacgugaacggcguguucuucaacggcaucauccugggccccgacggcaacgugcugauccccgagaugcagagcagccugcugcagcagcacauggagcugcuggagagcagcgugaucccccuggugcacccccuggccgaccccagcaccguguucaaggacggcgacgaggccgaggacuucguggaggugcaccugcccgacgugcacaaccaggugagcggcguggaccugggccugcccaacuggggcaaguacgugcugcugagcgccggcgcccugaccgcccugaugcugaucaucuuccugaugaccugcugcagaagagugaacagaagcgagcccacccagcacaaccugagaggcaccggcagagaggugagcgugaccccccagagcggcaagaucaucagcagcugggagagccacaagagcggcggcgagaccagacuguga

SEQ ID NO: 190918 - RNA, 1575 nt, Artificial Sequence
  derived and/or modified CDS sequence (opt4) from glycoprotein__RABV__EF206709.1
auggugccccaggcccugcuguucgugccccugcugguguucccccugugcuucggcaaguuccccaucuacaccauccccgacaagcugggccccuggagccccaucgacauccaccaccugagcugccccaacaaccuggugguggaggacgagggcugcaccaaccugagcggcuucagcuacauggagcugaaggugggcuacauccuggccaucaaggugaacggcuucaccugcaccggcguggugaccgaggccgagaccuacaccaacuucgugggcuacgugaccaccaccuucaagagaaagcacuucagacccacccccgacgccugcagagccgccuacaacuggaagauggccggcgaccccagauacgaggagagccugcacaaccccuaccccgacuacagauggcugagaaccgugaagaccaccaaggagagccuggugaucaucagccccagcguggccgaccuggaccccuacgacagaagccugcacagcagaguguuccccagcggcaagugcagcggcguggccgugagcagcaccuacugcagcaccaaccacgacuacaccaucuggaugcccgagaaccccagacugggcaugagcugcgacaucuucaccaacagcagaggcaagagagccagcaagggcagcgagaccugcggcuucguggacgagagaggccuguacaagagccugaagggcgccugcaagcugaagcugugcggcgugcugggccugagacugauggacggcaccugggugagcaugcagaccagcaacgagaccaaguggugcccccccgacaagcuggugaaccugcacgacuucagaagcgacgagaucgagcaccuggugguggaggagcuggugagaaagagagaggagugccuggacgcccuggagagcaucaugaccaccaagagcgugagcuucagaagacugagccaccugagaaagcuggugcccggcuucggcaaggccuacaccaucuucaacaagacccugauggaggccgacgcccacuacaagagcgugagaaccuggaacgagauccugcccagcaagggcugccugagagugggcggcagaugccacccccacgugaacggcguguucuucaacggcaucauccugggccccgacggcaacgugcugauccccgagaugcagagcagccugcugcagcagcacauggagcugcuggagagcagcgugaucccccuggugcacccccuggccgaccccagcaccguguucaaggacggcgacgaggccgaggacuucguggaggugcaccugcccgacgugcacaaccaggugagcggcguggaccugggccugcccaacuggggcaaguacgugcugcugagcgccggcgcccugaccgcccugaugcugaucaucuuccugaugaccugcugcagaagagugaacagaagcgagcccacccagcacaaccugagaggcaccggcagagaggugagcgugaccccccagagcggcaagaucaucagcagcugggagagccacaagagcggcggcgagaccagacuguga

SEQ ID NO: 190919 - RNA, 1575 nt, Artificial Sequence
  derived and/or modified CDS sequence (opt4) from glycoprotein__RABV__EF206715.1
auggugccccaggcccugcuguucgugccccugcugguguucccccugugcuucggcaaguuccccaucuacaccauccccgacaagcugggccccuggagccccaucgacauccaccaccugagcugccccaacaaccuggugguggaggacgagggcugcaccaaccugagcggcuucagcuacauggagcugaaggugggcuacauccuggccaucaaggugaacggcuucaccugcaccggcguggugaccgaggccgagaccuacaccaacuucgugggcuacgugaccaccaccuucaagagaaagcacuucagacccacccccgacgccugcagagccgccuacaacuggaagauggccggcgaccccagauacgaggagagccugcacaaccccuaccccgacuacagauggcugagaaccgugaagaccaccaaggagagccuggugaucaucagccccagcguggccgaccuggaccccuacgacagaagccugcacagcagaguguuccccagcggcaagugcagcggcguggccgugagcagcaccuacugcagcaccaaccacgacuacaccaucuggaugcccgagaaccccagacugggcaugagcugcgacaucuucaccaacagcagaggcaagagagccagcaagggcagcgagaccugcggcuucguggacgagagaggccuguacaagagccugaagggcgccugcaagcugaagcugugcggcgugcugggccugagacugauggacggcaccugggugagcaugcagcccagcaacgagaccaaguggugcccccccgacaagcuggugaaccugcacgacuucagaagcgacgagaucgagcaccuggugguggaggagcuggugagaaagagagaggagugccuggacgcccuggagagcaucaugaccaccaagagcgugagcuucagaagacugagccaccugagaaagcuggugcccggcuucggcaaggccuacaccaucuucaacaagacccugauggaggccgacgcccacuacaagagcgugagaaccuggaacgagauccugcccagcaagggcugccugagagugggcggcagaugccacccccacgugaacggcguguucuucaacggcaucauccugggccccgacggcaacgugcugauccccgagaugcagagcagccugcugcagcagcacauggagcugcuggagagcagcgugaucccccuggugcacccccuggccgaccccagcaccguguucaaggacggcgacgaggccgaggacuucguggaggugcaccugcccgacgugcacaaccaggugagcggcguggaccugggccugcccaacuggggcaaguacgugcugcugagcgccggcgcccugaccgcccugaugcugaucaucuuccugaugaccugcugcagaagagugaacagaagcgagcccacccagcacaaccugagaggcaccggcagagaggugagcgugaccccccagagcggcaagaucaucagcagcugggagagccacaagagcggcggcgagaccagacuguga

SEQ ID NO: 190920 - RNA, 1575 nt, Artificial Sequence
  derived and/or modified CDS sequence (opt4) from glycoprotein__RABV__EF206716.1
auggugccccaggcccugcuguucgugccccugcugguguucccccugugcuucggcaaguuccccaucuacaccauccccgacaagcugggccccuggagccccaucgacauccaccaccugagcugccccaacaaccuggugguggaggacgagggcugcaccaaccugagcggcuucagcuacauggagcugaaggugggcuacauccuggccaucaaggugaacggcuucaccugcaccggcguggugaccgaggccgagaccuacaccaacuucgugggcuacgugaccaccaccuucaagagaaagcacuucagacccacccccgacgccugcagagccgccuacaacuggaagauggccggcgaccccagauacgaggagagccugcacaaccccuaccccgacuacagauggcugagaaccgugaagaccaccaaggagagccuggugaucaucagccccagcguggccgaccuggaccccuacgacagaagccugcacagcagaguguuccccagcggcaagugcagcggcguggccgugagcagcaccuacugcagcaccaaccacgacuacaccaucuggaugcccgagaaccccagacugggcaugagcugcgacaucuucaccaacagcagaggcaagagagccagcaagggcagcgagaccugcggcuucguggacgagagaggccuguacaagagccugaagggcgccugcaagcugaagcugugcggcgugcugggccugagacugauggacggcaccugggugagcaugcagaccagcaacgagaccaaguggugcccccccgacaagcuggugaaccugcacgacuucagaagcgacgagaucgagcaccuggugguggaggagcuggugagaaagagagaggagugccuggacgcccuggagagcaucaugaccaccaagagcgugagcuucagaagacugagccaccugagaaagcuggugcccggcuucggcaaggccuacaccaucuucaacaagacccugauggaggccgacgcccacuacaagagcgugggcaccuggaacgagauccugcccagcaagggcugccugagagugggcggcagaugccacccccacgugaacggcguguucuucaacggcaucauccugggccccgacggcaacgugcugauccccgagaugcagagcagccugcugcagcagcacauggagcugcuggagagcagcgugaucccccuggugcacccccuggccgaccccagcaccguguucaaggacggcgacgaggccgaggacuucguggaggugcaccugcccgacgugcacaaccaggugagcggcguggaccugggccugcccaacuggggcaaguacgugcugcugagcgccggcgcccugaccgcccugaugcugaucaucuuccugaugaccugcugcagaagagugaacagaagcgagcccacccagcacaaccugagaggcaccggcagagaggugagcgugaccccccagagcggcaagaucaucagcagcugggagagccacaagagcggcggcgagaccagacuguga

SEQ ID NO: 190921 - RNA, 1575 nt, Artificial Sequence
  derived and/or modified CDS sequence (opt4) from glycoprotein__RABV__EF206717.1
auggugccccaggcccugcuguucgugccccugcugguguucccccugugcuucggcaaguuccccaucuacaccauccccgacaagcugggccccuggagccccaucgacauccaccaccugagcugccccaacaaccuggugguggaggacgagggcugcaccaaccugagcggcuucagcuacauggagcugaaggugggcuacaucagcgccaucaagaugaacggcuucaccugcaccggcguggugaccgaggccgagaccuacaccaacuucgugggcuacgugaccaccaccuucaagagaaagcacuucagacccacccccgacgccugcagagccgccuacaacuggaagauggccggcgaccccagauacgaggagagccugcacaaccccuaccccgacuacagauggcugagaaccgugaagaccaccaaggagagccuggugaucaucagccccagcguggccgaccuggaccccuacgacagaagccugcacagcagaguguuccccagcggcaagugcagcggcguggccgugagcagcaccuacugcagcaccaaccacgacuacaccaucuggaugcccgagaaccccagacugggcaugagcugcgacaucuucaccaacagcagaggcaagagagccagcaagggcagcgagaccugcggcuucguggacgagagaggccuguacaagagccugaagggcgccugcaagcugaagcugugcggcgugcugggccugagacugauggacggcaccuggguggccaugcagaccagcaacgagaccaaguggugcccccccgaccagcuggugaaccugcacgacuucagaagcgacgagaucgagcaccuggugguggaggagcuggugagaaagagagaggagugccuggacgcccuggagagcaucaugaccaccaagagcgugagcuucagaagacugagccaccugagaaagcuggugcccggcuucggcaaggccuacaccaucuucaacaagacccugauggaggccgacgcccacuacaagagcgugagaaccuggaacgagauccugcccagcaagggcugccugagagugggcggcagaugccacccccacgugaacggcguguucuucaacggcaucauccugggccccgacggcaacgugcugauccccgagaugcagagcagccugcugcagcagcacauggagcugcuggagagcagcgugaucccccugaugcacccccuggccgaccccagcaccguguucaaggacggcgacgaggccgaggacuucguggaggugcaccugcccgacgugcacaagcaggugagcggcguggaccugggccugcccaacuggggcaaguacgugcugcugagcgccggcgcccugaccgcccugaugcugaucaucuuccugaugaccugcugcagaagagugaacagaagcgagcccacccagcacaaccugagaggcaccggcagagaggugagcgugaccccccagagcggcaagaucaucagcagcugggagagcuacaagagcggcggcgagaccagacuguga

SEQ ID NO: 190922 - RNA, 1575 nt, Artificial Sequence
  derived and/or modified CDS sequence (opt4) from glycoprotein__RABV__EF206719.1
auggugccccaggcccugcuguucgugccccugcugguguucccccugugcuucggcaaguuccccaucuacaccauccccgacaagcugggccccuggagccccaucgacauccaccaccugagcugccccaacaaccuggugguggaggacgagggcugcaccaaccugagcggcuucagcuacauggagcugaaggugggcuacauccuggccaucaaggugaacggcuucaccugcaccggcguggugaccgaggccgagaccuacaccaacuucgugggcuacgugaccaccaccuucaagagaaagcacuucagacccacccccgacgccugcagagccgccuacaacuggaagauggccggcgaccccagauacgaggagagccugcacaaccccuaccccgacuacagauggcugagaaccgugaagaccaccaaggagagccuggugaucaucagccccagcguggccgaccuggaccccuacgacagaagccugcacagcagaguguuccccagcggcaagugcagcggcguggccgugagcagcaccuacugcagcaccaaccacgacuacaccaucuggaugcccgagaaccccagacugggcaugagcugcgacaucuucaccaacagcagaggcaagagagccagcaagggcagcgagaccugcggcuucguggacgagagaggccuguacaagagccugaagggcgccugcaagcugaagcugugcggcgugcugggccugagacugauggacggcaccugggugagcaugcagaccagcaacgagaccaaguggugcccccccgacaagcuggugaaccugcacgacuucagaagcgacgagaucgagcaccuggugguggaggagcuggugagaaagagagaggagugccuggacgcccuggagagcaucaugaccaccaagagcgugagcuucagaagacugagccaccugagaaagcuggugcccggcuucggcaaggccuacaccaucuucaacaagacccugauggaggccgacgcccacuacaagagcguggagaccuggaacgagauccugcccagcaagggcugccugagagugggcggcagaugccacccccacgugaacggcguguucuucaacggcaucauccugggccccgacggcaacgugcugauccccgagaugcagagcagccugcugcagcagcacauggagcugcuggagagcagcgugaucccccuggugcacccccuggccgaccccagcaccguguucaaggacggcgacgaggccgaggacuucguggaggugcaccugcccgacgugcacaaccaggugagcggcguggaccugggccugcccaacuggggcaaguacgugcugcugagcgccggcgcccugaccgcccugaugcugaucaucuuccugaugaccugcugcagaagagugaacagaagcgagcccacccagcacaaccugagaggcaccggcagagaggugagcgugaccccccagagcggcaagaucaucagcagcugggagagccacaagagcggcggcgagaccauccuguga

SEQ ID NO: 190923 - RNA, 1575 nt, Artificial Sequence; identical to SEQ ID NO: 190918
  derived and/or modified CDS sequence (opt4) from glycoprotein__RABV__EF206720.1

SEQ ID NO: 190924 - RNA, 1575 nt, Artificial Sequence
  derived and/or modified CDS sequence (opt4) from glycoprotein__RABV__EF437215.1
auggugccccaggugcugcuguucgugccccugcugguguucagcaugugcuucggcaaguuccccaucuacaccauccccgacaagcugggccccuggagccccaucgacauccaccaccugagcugccccaacaaccuggugguggaggacgagggcugcaccaaccugagcggcuucagcuacauggagcugaaggugggcuacaucagcgccaucaaggugaacggcuucaccugcaccggcguggugaccgaggccgagaccuacaccaacuucgugggcuacgugaccaccaccuucaagagaaagcacuucagacccacccccgacgccugcagagccgccuacaacuggaagauggccggcgaccccagauacgaggagagccugcacaaccccuaccccgacuaccacuggcugagaaccgugaagaccaccaaggagagccuggugaucaucagccccagcguggccgaccuggaccccuacgacaagagccugcacagcagaguguuccccagcggcaagugcagcggcaucaccaucagcagcaccuacugcagcaccaaccacgacuacaccaucuggaugcccgagaaccccagacugggcaccagcugcgacaucuucaccaacagcagaggcaagagagccagcaagggcggcaagaccugcggcuucguggacgagagaggccuguacaagagccugaagggcgccugcaagcugaagcugugcggcgugcugggccugagacugauggacggcaccuggguggccaugcagaccagcgacgagaccaaguggugcccccccgaccagcuggugaaccugcacgacuucagaagcgacgagaucgagcaccuggugguggaggagcuggugaagaagagagaggagugccuggacgcccuggagagcaucauggccaccaagagcgugagcuucagaagacugagccaccugagaaagcuggugcccggcuucggcaaggccuacaccaucuucaacaagacccugauggaggccgacgcccacuacaagagcgugagaaccuggaacgagaucauccccagcaagggcugccugagagugggcggcagaugccacccccacgugaacggcguguucuucaacggcaucauccugggccccgacggccacgugcugauccccgagaugcagagcagccugcugcagcagcacauggagcugcuggagagcagcgugaucccccugaugcacccccuggccgaccccagcaccguguucaaggacggcgacgaggccgaggacuucguggaggugcaccugcccgacgugcacaagcagaucagcggcguggaccugggccugcccagcuggggcaaguacgugcuggugagcgccggcgugcugguggugcugaugcugaccaucuucaucaugaccugcugcggcagagugcacagacccaagagcacccagcacggccugggcggcaccggcagaaaggugagcgugaccagccagagcggcaaggugaucagcagcugggagagcuacaagagcggcggcgagaccagacuguga

SEQ ID NO: 190925 - RNA, 1575 nt, Artificial Sequence
  derived and/or modified CDS sequence (opt4) from glycoprotein__RABV__EF556198.1
augaccccccaggugcugcuguucgugccccugcugguguucagcagcugcuucggcaaguuccccaucuacaccauccccgacaagcugggccccuggagccccaucgacauccaccaccugagcugccccaacaaccuggugguggaggacgagggcugcaccaaccugagcggcuucagcuacauggagcugaaggugggcuacaucagcgccaucaaggugaacggcuucaccugcaccggcguggugaccgaggccgagaccuacaccaacuucgugggcuacgugaccaccaccuucaagagaaagcacuucagacccaugcccgacgccugcagagccgccuacaacuggaagauggccggcgaccccagauacgaggagagccugcacaaccccuaccccgacuaccacuggcugagaaccgugaagaccaccaaggagagccuggugaucaucagccccagcguggccgaccuggaccccuacgacaagagccugcacagcagaguguuccccggcggcaagugcagcggcaucaccgugagcagcgccugcugcagcaccaaccacgacuacaccaucuggaugcccgagaaccccagacugggcaccagcugcgacaucuucaccaacagcagaggcaagagagccagcaagggcggcaagaccugcggcuucguggacgagagaggccuguacaagagccugaagggcgccugcaagcugaagcugugcggcgugcugggccugagacugauggacggcaccuggguggccauccagaccagcgacgagaucaaguggugcagccccgaccagcuggugaaccugcacgacuuccacagcgacgagaucgagcaccuggugguggaggagcuggugaagaagagagaggagugccuggacgcccuggagaccaucaugaccaccaagagcgugagcuucagaagacugagccaccugagaaagcuggugcccggcagcggcaaggccuacaccaucuucaacaagacccugauggaggccgacgcccacuacaagagcaucagaaccuggaacgagaucauccccagcaagggcugccugagagugggcggcagaugccacccccacgugaacggcguguucuucaacggcaucauccugggccccgacggccacgugcugauccccgagaugcagagcagccugcugcaccagcacauggagcugcuggagagcagcgugaucccccugaugcacccccuggccgaccccagcaccguguucaaggacggcgacgaggccgaggacuucguggaggugcaccugcccgacgugcacaagcagaucagcggcguggaccugggccugcccaacuggggcaaguacgugcugaucagcgccggcgcccugaccgcccugaugcugaccaucuuccugaugaccugcugcagaaagaccaacagagccgagagcauccagcacagccccggcgagaccggcagaaaggugagcgugaccagccacaacggcagagugaucagcagcugggagagcuacaagagcggcagcgagaccaagcuguga

SEQ ID NO: 190926 - RNA, 1575 nt, Artificial Sequence
  derived and/or modified CDS sequence (opt4) from glycoprotein__RABV__EF564174.1
augaucccccaggcccugcuguucgugccccugcugguguucccccugugcuucggcaaguuccccaucuacaccauccccgacaagcugggccccuggagccccaucgacauccacaaccugagcugccccaacaaccuggugguggaggacgagggcugcaccaaccugagcggcuucagcuacauggagcugaaggugggcuacaucagcgccaucaaggugaacggcuucaccugcaccggcguggugaccgaggccgagaccuacaccaacuucgugggcuacgugaccaccaccuucaagagaaagcacuucagacccacccccgacgccugcagaagcgccuacaacuggaagauggccggcgaccccagauacgaggagagccugcacaaccccuaccccgacuaccacuggcugagaaccgugaagaccaccaaggagagcguggugaucaucagccccagcguggccgaccuggaccccuacgacaagagccugcacagcagaguguuccccagaggcaagugcagcggcaucaccgugagcagcgccuacugcagcaccaaccacgacuacaccaucuggaugcccgagaaccccagacugggcaccagcugcgacaucuucaccaacagcagaggcaagagagccagcaagggcagcaagaccugcggcuucguggacgagagaggccuguacaagagccugaagggcgccugcaagcugaagcugugcggcgugcugggccugagacugauggacggcaccuggguggccauccagaccagcaacgagaccaaguggugcccccccgaccagcuggugaaccugcacgacuuccacagcgacgagaucgagcaccuggugguggaggagcugguggagaagagagaggagugccuggacgcccuggagagcaucaugaccaccaaccccgugagcuucagaagacugagcccccugagaaagcuggugcccggcuucggcaaggccuacaccaucuucaacaagacccugauggaggccgacgcccacuacaagagcgugcagaccugggacgagaucauccccagcaagggcugccugagagugggcgccagaugccacccccacgugaacggcguguucuucaacggcaucauccugggccccgacggccacgugcugauccccgagaugcagagcagccugcugcagcagcacauggagcugcuggagagcagcgugaucccccugaugcacccccuggccgaccccagcaccguguucaaggacggcgacgagguggaggacuucguggaggugcaccugcccgacgugcacaagcaggugagcggcguggaccugggccugcccaacuggggcaaggacgugcugaugggcgccggcgugcugaccgcccugaugcugaugaucuuccugaugaccugcugcagaagaaccaacagagccgagagcauccagcacagccugggcgagaccggcagaaaggugagcgugaccagccagagcggcagagugaucagcagcugggagagcuacaagagcggcggcgagaccaagcuguga

SEQ ID NO: 190927 - RNA, 1581 nt, Artificial Sequence
  derived and/or modified CDS sequence (opt4) from glycoprotein__RABV__EF614261.1
augcccagccaggccguguuccuggugcugaccaccguguucagccagugcgugggcaaguuccccaucuacaccauccccgacaagcugggccccuggagccccaucgacauccaccaccugagcugccccaacaaccuggugguggaggacgacggcugcaccacccugagcggcuucaccuacauggagcugaaggugggcuacaucaccaccaucaagguggacggcuucaccugcaccggcaucgugaccgaggccgagaccuacaccaacuucgugggcuacgugaccaccaccuucaagagaaagcacuucagacccggccccagcgccugcagagacgccuacaacuggaaggccgccggcgaccccagauacgaggagagccugcacaaccccuaccccgacagccacuggcugagaaccgugaccaccaccaaggagagccugcugaucaucagccccagcgugguggacauggacgccuacgacaagagccugcugagcaagaucuuccccaacggcaagugccccggcgugagcaucgccagccccuucugcagcaccaaccacgacuacaccaucuggaugcccgagaacaccaagaccggcaugagcugcgacaucuucaccaccagcaagggcaagagagccaccaaggacggcaagcugugcggcuucguggacgagagaggccuguacaagagccugaagggcagcugcaagcugaagcugugcggcgugagcggccugagacugauggacggcagcugggugagcauccagaaccacgaggaggccaaguggugcccccccgaccagcuggugaacgugcacgacuuccacagcgacgagaucgagcaccugaucguggaggagcuggugaagaagagagaggagugccuggacgcccuggagagcaucaugaccaccaagagcaucagcuucagaagacugagccaccugagaaagcuggugcccggcuucggcaaggccuacaccaucaucaacaagacccugauggaggccgacgcccacuacaagagcaucagagaguggagcgagaucauccccagcaagggcugccugguggccggcggcagaugcuaccaccaccacaacggcguguucuucaacggcaucauccugagccccgacggccacgugcugauccccgagaugcagagcgcccugcugcagcagcacaucgagcugcuggagagcagcgugaucccccugaugcacccccuggccgaccccagcaccguguucaagggcgacgacggcgccgaggacuucguggaggugcaccugcccgacgugcagaagcagaucagcggcaucgaccugggccugcccgaguggaagagauacuuccugaucggcguggccgcccugacccuguucgcccugaccaucuucgugguggugugcugcagaagagugagaagaagagagagagccaagcccaaccccguggagcugaucagaaaggugagcgugaccagccagagcggcaaggugauccccagcugggagagcuacaagguggaggccgagggccagagccaggccuga

SEQ ID NO: 190928 - RNA, 1575 nt, Artificial Sequence; identical to SEQ ID NO: 190903
  derived and/or modified CDS sequence (opt4) from glycoprotein__RABV__EF643518.1

SEQ ID NO: 190929 - RNA, 1575 nt, Artificial Sequence
  derived and/or modified CDS sequence (opt4) from glycoprotein__RABV__EU008924.1
augaucccccaggcccugcuguucgugccccugcugguguucagcagcugcuucggcaaguuccccaucuacaccauccccgacaagcugggccccuggagccccaucgacauccaccaccugagcugccccaacaaccuggugguggaggacgagggcugcaccaaccugagcggcuucagcuacauggagcugaaggugggcuacaucagcgccaucaaggugaacggcuucaccugcaccggcguggugaccgaggccgagaccuacaccaacuucgugggcuacgugaccaccaccuucaagagaaagcacuucagacccaugcccggcgccugcagagccgccuacaacuggaagauggccggcgaccccagauacgaggagagccugcacaaccccuaccccgacuaccacuggcugagaaccgugaagaccaccaaggagagccuggugaucaucagccccagcguggccgaccuggaccccuacgacaagagccugcacagcagaguguuccccagcggcaagugcagcggcaucaccgugagcagcaccugcugcagcaccaaccacgacuacaccaucuggaugcccgagaaccccagacugggcaccagcugcgacaucuucaccaacagcagaggcaagagagccagcaagggcggcaagaccugcggcuucguggacgagagaggccuguacaagagccugaagggcgccugcaagcugaagcugugcggcgugcugggccugagacugauggacggcaccuggguggccauccagaccagcgacgagaucaaguggugcagccccgaccagcuggugaaccugcacgacuuccacagcgacgagaucgagcaccuggugguggaggagcuggugaagaagagagaggagugccuggacgcccuggagaccaucaugaccaccaagagcgugagcuucagaagacugagccaccugagaaagcuggugcccggcuucggcaaggccuacaccaucuucaacaagacccugauggaggccgacgcccacuacaagagcaucagaaccuggaacgagaucauccccagcaagggcugccugagagugggcggcagaugccacccccacgugaacggcguguucuucaacggcaucauccugggccccgacggccacgugcugauccccgagaugcagagcagccugcugcaccagcacauggagcugcuggagagcagcgugaucccccugaugcacccccuggccgaccccagcaccguguucaaggacggcgacgaggccgaggacuucguggaggugcaccugcccgacgugcacaagcagaucagcggcguggaccugggccugcccaacuggggcaaguacgugcugaucagcgugggcgcccugaccgcccugaugagcaugaucuuccugaugaccugcugcagaaagaccaacagagccgagagcauccagcacagccccggcgagaccggcagaaaggugagcgugaccagccacaacggcagagugaucagcagcugggagagcuacaagagcggcggcgagaccaagcuguga

SEQ ID NO: 190930 - RNA, 1575 nt, Artificial Sequence
  derived and/or modified CDS sequence (opt4) from glycoprotein__RABV__EU008925.1
augaucccccaggcccugcuguucgugccccugcugguguucagccugugcuucggcaaguuccccaucuacaccauccccgacaagcugggccccuggagccccaucgacauccaccaccugagcugccccaacaaccuggugguggaggacgagggcugcaccaaccugagcggcuucagcuacauggagcugaaggugggcuacaucagcgccaucaaggugaacggcuucaccugcaccggcguggugaccgaggccgagaccuacaccaacuucgugggcuacgugaccaccaccuucaagagaaagcacuucagacccaugcccggcgccugcagagccgccuacaacuggaagauggccggcgaccccagauacgaggagagccugcacaaccccuaccccgacuaccacuggcugagaaccgugaagaccaccaaggagagccuggugaucaucagccccagcguggccgaccuggaccccuacgacaagagccugcacagcagaguguuccccggcggcaagugcagcggcaucaccgugagcagcaccugcugcagcaccaaccacgacuacaccaucuggaugcccgagaaccccagacugggcaccagcugcgacaucuucaccaacagcagaggcaagagagccagcaagggcggcaagaccugcggcuucguggacgagagaggccuguacaagagccugaagggcgccugcaagcugaagcugugcggcgugcugggccugagacugauggacggcaccuggguggccauccagaccagcgacgagaucaaguggugcagccccgaccagcuggugaaccugcacgacuuccacagcgacgagaucgagcaccuggugguggaggagcuggugaagaagagagaggagugccuggacgcccuggagaccaucaugaccaccaagagcgugagcuucagaagacugagccaccugagaaagcuggugcccggcuucggcaaggccuacaccaucuucaacaagacccugauggaggccgacgcccacuacaagagcaucagaaccuggaacgagaucauccccagcaagggcugccugagagugggcggcagaugccacccccacgugaacggcguguucuucaacggcaucauccugggccccgacggccacgugcugauccccgagaugcagagcagccugcugcaccagcacauggagcugcuggagagcagcgugaucccccugaugcacccccuggccgaccccagcaccguguucaaggacggcgacgaggccgaggacuucguggaggugcaccugcccgacgugcacaagcagaucagcggcguggaccugggccugcccaacuggggcaaguacgugcugaucagcgccggcgcccugaccgcccugaugagcaugaucuuccugaugaccugcugcagaaagaccaacagagccggcagcauccagcacagccccggcgagaccggcagaaaggugagcgugaccagccacaacggcagagugaucagcagcugggagagcuacaagagcggcggcgagaccaagcuguga

SEQ ID NO: 190931 - RNA, 1575 nt, Artificial Sequence
  derived and/or modified CDS sequence (opt4) from glycoprotein__RABV__EU008926.1
augaucccccaggcccugcuguucgugccccugcugguguucagcagcugcuucggcaaguuccccaucuacaccauccccgacaagcugggccccuggagccccaucgacauccaccaccugagcugccccaacaaccuggugguggaggacgagggcugcaccaaccugagcggcuucagcuacauggagcugaaggugggcuacaucagcgccaucaaggugaacggcuucaccugcaccggcguggugaccgaggccgagaccuacaccaacuucgugggcuacgugaccaccaccuucaagagaaagcacuucagacccaugcccggcgccugcagagccgccuacaacuggaagauggccggcgaccccagauacgaggagagccugcacaaccccuaccccgacuaccacuggcugagaaccgugaagaccaccaaggagagccuggugaucaucagccccagcguggccgaccuggaccccuacgacaagagccugcacagcagaguguuccccggcggcaagugcagcggcaucaccgugagcagcaccugcugcagcaccaaccacgacuacaccaucuggaugcccgagaaccccagacugggcaccagcugcgacaucuucaccaacagcagaggcaagagagccagcaagggcggcaagaccugcggcuucguggacgagagaggccuguacaagagccugaagggcgccugcaagcugaagcugugcggcgugcugggccugagacugauggacggcaccuggguggccauccagaccagcgacgagaucaaguggugcagccccgaccagcuggugaaccugcacgacuuccacagcgacgagaucgagcaccuggugguggaggagcuggugaagaagagagaggagugccuggacgcccuggagaccaucaugaccaccaagagcgugagcuucagaagacugagccaccugagaaagcuggugcccggcuucggcaaggccuacaccaucuucaacaagacccugauggaggccgacgcccacuacaagagcaucagaaccuggaacgagaucauccccagcaagggcugccugagagugggcggcagaugccacccccacgugaacggcguguucuucaacggcaucauccugggccccgacggccacgugcugauccccgagaugcagagcagccugcugcagcagcacauggagcugcuggagagcagcgugaucccccugaugcacccccuggccgaccccagcaccguguucaaggacggcgacgaggccgaggacuucguggaggugcaccugcccgacgugcacaagcagaucagcggcguggaccugggccugcccaacuggggcaaguacgugcugaugagcgccggcgcccugaccgcccugaugagcaugaucuuccugaugaccugcugcagaaagaccaacagagccgagagcauccagcacagccccggcgagaccggcagaaaggugagcgugaccagccacaacggcagagugaucagcagcugggagagcuacaagagcggcggcgagaccaagcuguga

SEQ ID NO: 190932 - RNA, 1575 nt, Artificial Sequence
  derived and/or modified CDS sequence (opt4) from glycoprotein__RABV__EU008927.1
augaucccccaggcccugcuguucgugccccugcugguguuccugagcugcuucggcaaguuccccaucuacaccauccccgacaagcugggccccuggagccccaucgacauccaccaccugagcugccccaacaaccuggugguggaggacgagggcugcaccaaccugagcggcuucagcuacauggagcugaaggugggcuacaucagcgccaucaaggugaacggcuucaccugcaccggcguggugaccgaggccgagaccuacaccaacuucgugggcuacgugaccaccaccuucaagagaaagcacuucagacccaugcccgacgccugcagagccgccuacaacuggaagauggccggcgaccccagauacgaggagagccugcacaaccccuaccccgacuaccacuggcugagaaccgugaagaccaccaaggagagccuggugaucaucagccccagcguggccgaccuggaccccuacgacaagagccugcacagcagaguguuccccggcggcaagugcagcggcaucaccgugagcagcaccugcugcagcaccaaccacgacuacaccaucuggaugcccgagaaccccagacugggcaccagcugcgacaucuucaccaacagcagaggcaagagagccagcaagggcagcaagaccugcggcuucguggacgagagaggccuguacaagagccugaagggcgccugcaagcugaagcugugcggcgugcugggccugagacugauggacggcaccuggguggccauccagaccagcgacgagaucaaguggugcagccccgaccagcuggugaaccugcacgacuuccacagcgacgagaucgagcaccuggugguggaggagcuggugaagaagagagaggagugccuggacgcccuggagaccaucaugaccaccaagagcgugagcuucagaagacugagccaccugagaaagcuggugcccggcuucggcaaggccuacaccaucuucaacaagacccugauggaggccgacgcccacuacaagagcaucagaaccuggaacgagaucauccccagcaagggcugccugagagugggcggcagaugccacccccacgugaacggcguguucuucaacggcaucauccugggccccgacggccacgugcugauccccgagaugcagagcagccugcugcaccagcacauggagcugcuggagagcagcgugaucccccugaugcacccccuggccgaccccagcaccguguucaaggacggcgacgaggccgaggacuucguggaggugcaccugcccgacgugcacaagcagaucagcggcguggaccugggccugcccaacuggggcaaguacgugcugaucagcgccggcgcccugaccgcccugaugagcaugaucuuccugaugaccugcugcagaaagaccaacagagccgagagcauccagcacagccccggcgagaccggcagaaaggugagcgugaccagccacaacggcagagugaucagcagcugggagagcuacaagagcggcggcgagaccaagcuguga

SEQ ID NO: 190933 - RNA, 1575 nt, Artificial Sequence
  derived and/or modified CDS sequence (opt4) from glycoprotein__RABV__EU008928.1
augaucccccaggugcugcuguucgugccccugcugguguucagcagcugcuucggcaaguuccccaucuacaccauccccgacaagcugggccccuggagccccaucgacauccaccaccugagcugccccaacaaccuggugguggaggacgagggcugcaccaaccugagcggcuucagcuacauggagcugaaggugggcuacaucagcgccaucaaggugaacggcuucaccugcaccggcguggugaccgaggccgagaccuacaccaacuucgugggcuacgugaccaccaccuucaagagaaagcacuucagacccaugcccgacgccugcagagccgccuacaacuggaagauggccggcgaccccagauacgaggagagccugcacaaccccuaccccgacuaccacuggcugagaaccgugaagaccaccaaggagagccuggugaucaucagccccagcguggccgaccuggaccccuacgacaagagccugcacagcagaguguuccccagcggcaagugcagcggcaucaccgugagcagcaccugcugcagcaccaaccacgacuacaccaucuggaugcccgagaaccccagacugggcaccagcugcgacaucuucaccaacagcagaggcaagagagccagcaagggcggcaagaccugcggcuucguggacgagagaggccuguacaagagccugaagggcgccugcaagcugaagcugugcggcgugcugggccugagacugauggacggcaccuggguggccauccagaccagcgacgagaucaaguggugcccccccgaccagcuggugaaccugcacgacuuccacagcgacgagaucgagcaccuggugguggaggagcuggugaagaagagagaggagugccuggacgcccuggagagcaucaugaccaccaagagcgugagcuucagaagacugagccaccugagaaagcuggugcccggcuucggcaaggccuacaccaucuucaacaagacccugauggaggccgacgcccacuacaagagcaucagaaccuggaacgagaucauccccagcaagggcugccugagagugggcggcagaugccacccccacgugaacggcguguucuucaacggcaucauccugggccccgacggccacgugcugauccccgagaugcagagcagccugcugcaccagcacauggagcugcuggagagcagcgugaucccccugaugcacccccuggccgaccccagcaccguguucaaggacggcgacgaggccgaggacuucguggaggugcaccugcccgacgugcacaagcagaucagcggcguggaccugggccugcccaacuggggcaaguacgugcugaucagcgccggcgcccugaccgcccugaugagcaugaucuuccugaugaccugcugcagaaagaccagcagagccgagagcacccagcacagccccggcgagaccggcagaaaggugagcgugaccagccacaacggcagagugaucagcagcugggagagcuacaagagcggcggcgagaccaagcuguga

SEQ ID NO: 190934 - RNA, 1575 nt, Artificial Sequence
  derived and/or modified CDS sequence (opt4) from glycoprotein__RABV__EU086128.1
auggugccccaggugcugcuguucgugccccugcugguguucagcaugugcuucggcaaguuccccaucuacaccauccccgacaagcugggccccuggagccccaucgacauccaccaccugagcugccccaacaaccuggugguggaggacgagggcugcaccaaccugagcggcuucagcuacauggagcugaaggugggcuacaucagcgccaucaaggugaacggcuucaccugcaccggcguggugaccgaggccgagaccuacaccaacuucgugggcuacgugaccaccaccuucaagagaaagcacuucagacccacccccgacgccugcagagccgccuacaacuggaagauggccggcgaccccagauacgaggagagccugcacaaccccuaccccgacuaccacuggcugagaaccgugaagaccaccaaggagagccuggugaucaucagccccagcguggccgaccuggaccccuacgacaagagccugcacagcagaguguuccccagcggcaagugccugggcaucaccaucagcagcaccuacugcagcaccaaccacgacuacaccaucuggaugcccgagaaccccagacugggcaccagcugcgacaucuucaccaacagcagaggcaagagagccagcaagggcagcaagaccugcggcuucguggacgagagaggccuguacaagagccugaagggcgccugcaagcugaagcugugcggcgugcugggccugagacugauggacggcaccuggguggccaugcagaccagcgacgagaccaaguggugcccccccgaccagcuggugaaccugcacgacuucagaagcaacgagaucgagcaccuggugguggaggagcuggugaagaagagagaggagugccuggacgcccuggagagcaucaugaccaccaagagcgugagcuucagaagacugagccaccugagaaagcuggugcccggcuucggcaaggccuacaccaucuucaacaagacccugauggaggccgacgcccacuacaagagcgugagaaccuggaacgagaucauccccagcaagggcugccugagagugggcggcagaugccacccccacgugaacggcguguucuucaacggcaucauccugggccccgacggccacgugcugauccccgagaugcagagcagccugcugcagcagcacauggaccugcuggagagcagcgugaucccccugaugcacccccuggccgaccccagcaccguguucaaggacggcgacgaggccgaggacuucguggaggugcaccugcccgacgugcacaagcagaucagcggcguggaccugggccugcccagcuggggcaaguacgugcuggugagcgccggcgugcugguggugcugaugcugaccaucuucaucaugaccugcugcggcagagugcacagacccaagagcacccagcacagccugggcggcaccggcagaaaggugagcgugaccagccagagcggcaaggugaucagcagcugggagagcuacaagagaggcggcgagaccagacuguga

SEQ ID NO: 190935 - RNA, 1575 nt, Artificial Sequence
  derived and/or modified CDS sequence (opt4) from glycoprotein__RABV__EU086129.1
augaucccccaggcccugcuguucgugcccuuccuggccuucagccugugcuucggcaaguuccccaucuacaccauccccgacaagcugggccccuggagccccaucgacauccaccaccugagcugccccaacaaccuggugguggaggacgagggcugcaccaaccugagcggcuucagcuacauggagcugaaggugggcuacaucagcgccaucaaggugaacggcuucaccugcaccggcguggugaccgaggccgagaccuacaccaacuucaucggcuacgugaccaccaccuucagaagaaagcacuucagacccacccccgacgccugcagagccgccuacaacuggaagauggccggcgaccccagauacgaggagagccugcacaaccccuaccccgacuaccacuggcugagaaccgugaagaccaccaaggagagccuggugaucaucagccccagcgugagcgaccuggaccccuacgacaagagccugcacagcagaguguuccccagcggcaagugcagcggcaucaccgugagcagcaccuacugccccaccaaccacgacuacaccaucuggaugcccgagaaccccagacugggcaccagcugcgacaucuucaccaacagcagaggcaagagagccagcaagggcagcaagaccugcggcuucguggacgagagaggccuguacaagagccugaagggcgccugcaagcugaagcugugcggcgugcugggccugagacugauggacggcaccugggccgccauccagaccagcgacgaggccaaguggugcccccccgaccagcuggugaacauccacgacuucagaagcgacgagaucgagcaccuggugguggaggagcuggugaagaagagagaggagugccuggacgcccuggagagcaucaugaccaccaagagcgugagcuucagaagacugagccaccugagaaagcuggugcccggcuucggcaaggccuacaccaucuucaacaagacccugauggaggccgacgcccacuacaagagcgugagaaccuggaacgagaucauccccagcaagggcugccugagagugggcggcagaugccacccccacgugaacggcguguucuucaacggcaucauccugggccccgacggccacgugcugauccccgagaugcagagcagccugcugcagcagcacauggagcugcuggagagcagcgugaucccccugaugcacccccuggccgaccccagcaccguguucaaggacggcgacgaggccgaggacuucguggaggugcaccugcccgacgugcacaagcaggugagcggcguggaccugggccugcccagcuggggcaaguacgugcugaugagcgugggcgcccugaucgugcugaugcugaugaucuuccugaccaccugcugcagaaaggccaacggcgccgagagcaucagacacagacugggcgagaccggcagaaaggugagcgugaccagccagaacggcagagugaucagcagcugggagagcuacaagagcggcggcgagaccaagcuguga

SEQ ID NO: 190936 - RNA, 1575 nt, Artificial Sequence
  derived and/or modified CDS sequence (opt4) from glycoprotein__RABV__EU086130.1
augaucccccaggcccugcuguucgugccccugcugguguucagccugugcuacggcaaguuccccaucuacaccauccccgacaagcugggccccuggagccccaucgacauccaccaccugagcugccccaacaaccuggugguggaggacgagggcugcaccaaccugagcggcuucagcuacauggagcugaaggugggcuacaucagcgccaucaaggugaacggcuucaccugcaccggcguggugaccgaggccgagaccuacaccaacuucgugggcuacgugaccaccaccuucaagagaaagcacuucagacccacccccgacgccugcagagccgccuacaacuggaagauggccggcgaccccagauacgaggagagccugcacaaccccuaccccgacuaccacuggcugagaaccgugaagaccaccaaggagagccuggugaucaucagccccagcgugagcgaccuggaccccuacgacaagagccugcacagcagaguguuccccagcggcaagugcagcggcaucaccgugagcagcaccuacugccccaccaaccacgacuacaccaucuggaugcccgagaaccccagacugggcaccagcugcgacaucuucaccaacagcagaggcaagagagccagcaagggcagcaagaccugcggcuucguggacgagagaggccuguacaagagccugaagggcgccugcaagcugaagcugugcggcgugcugggccugagacugauggacggcaccugggccgccauccagaccagcgacgaggccaaguggugcccccccgaccagcuggugaacauccacgacuucagaagcgacgagaucgagcaccuggugguggaggagcuggugaagaagagagaggagugccuggacgcccuggagagcaucaugaccaccaagagcgugagcuucagaagacugagccaccugagaaagcuggugcccggcuucggcaaggccuacaccaucuucaacaagacccugauggaggccgacgcccacuacaagagcgugagaaccuggaacgagaucauccccagcaagggcugccugagagugggcggcagaugccacccccacgugaacggcguguucuucaacggcaucauccugggccccgacggccacgugcugauccccgagaugcagagcagccugcugcagcagcacauggagcugcuggagagcagcgugaucccccugaugcacccccuggccgaccccagcaccguguucaaggacggcgacgaggccgaggacuucguggaggugcaccugcccgacgugcacaagcaggugagcggcguggaccugggccugcccagcuggggcaaguacgugcugaugagcgugggcgccaugaucgcccugaugcuggugaucuuccugaccaccugcugcagaaaggugaacggcgccgagaccauccagcacagacugggcgagaccggcagaaaggugagcgugaccagccagagcggcagagugaucagcagcugggagagcuacaagagcggcggcgagaccaagcuguga

SEQ ID NO: 190937 - RNA, 1575 nt, Artificial Sequence
  derived and/or modified CDS sequence (opt4) from glycoprotein__RABV__EU086131.1
augaucccccaggcccugcuguucgugccccugcugguguucagccugugccugggcaaguuccccaucuacaccauccccgacaagcugggccccuggagccccaucgacauccaccaccugagcugccccaacaaccuggugguggaggacgagggcugcaccaaccugagcggcuucagcuacauggagcugaaggugggcuacaucagcgccaucaaggugaacggcuucaccugcaccggcguggugaccgaggccgagaccuacaccaacuucgugggcuacgugaccaccaccuucaagagaaagcacuucagacccacccccgacgccugcagagccgccuacaacuggaagauggccggcgaccccagauacgaggagagccugcacaaccccuaccccgacuaccacuggcugagaaccgugaagaccaccaaggagagccuggugaucaucagccccagcgugagcgaccuggaccccuacgacaagagccugcacagcagaguguuccccggcggcaagugcagcggcaucaccgugagcagcaccuacugccccaccaaccacgacuacaccaucuggaugcccgagaaccccagacugggcaccagcugcgacaucuucaccaacagcagaggcaagagagccagcaagggcagcaagaccugcggcuucguggacgagagaggccuguacaagagccugaagggcgccugcaagcugaagcugugcggcgugcugggccugagacugauggacggcaccugggccgccauccagaccagcgacgaggccaaguggugcccccccgaccagcuggugaacauccacgacuucagaagcgacgagaucgagcaccuggugguggaggagcuggugaagaagagagaggagugccuggacgcccuggagagcaucaugaccaccaagagcgugagcuucagaagacugagccaccugagaaagcuggugcccggcuucggcaaggccuacaccaucuucaacaagacccugauggaggccgacgcccacuacaagagcgugagaaccuggaacgagaucauccccagcaagggcugccugagagugggcggcagaugccacccccacgugaacggcguguucuucaacggcaucauccugggccccgacggccacgugcugauccccgagaugcagagcagccugcugcagcagcacauggagcugcuggagagcagcgugaucccccugaugcacccccuggccgaccccagcaccguguucaaggacggcgacgaggccgaggacuucguggaggugcaccugcccgacgugcacaagcaggugagcggcguggaccugggccugcccagcuggggcaaguacgugcugaugagcgugggcgccaugaucgcccugaugcugaugaucuuccugaccaccugcugcagaaaggccaacggcgccgagaccauccagcacagacugggcgagaccggcagaaaggugagcgugaccagccagagcggcagagugaucagcagcugggagagcuacaagagcggcggcgagaccaagcuguga

SEQ ID NO: 190938 - RNA, 1575 nt, Artificial Sequence
  derived and/or modified CDS sequence (opt4) from glycoprotein__RABV__EU086132.1
augaucccccaggcccugcuguucgugccccugcugguguucagccugugcuucggcaaguuccccaucuacaccauccccgacaagcugggccccuggagccccaucgacauccaccaccugagcugccccaacaaccuggugguggaggacgagggcugcaccaaccugagcggcuucagcuacauggagcugaaggugggcuacaucagcgccaucaaggugaacggcuucaccugcaccggcguggugaccgaggccgagaccuacaccaacuucgugggcuacgugaccaccaccuucaagagaaagcacuucagacccacccccgacgccugcagagccgccuacaacuggaagauggccggcgaccccagauacgaggagagccugcacaaccccuaccccgacuaccacuggcugagaaccgugaagaccaccaaggagagccuggugaucaucagccccagcgugagcgaccuggaccccuacgacaagagccugcacagcagaguguuccccagcggcaagugcagcggcaucaccgugagcagcaccuacugccccaccaaccacgacuacaccaucuggaugcccgagaaccccagacugggcaccagcugcgacaucuucaccaacagcagaggcaagagagccagcaagggcagcaagaccugcggcuucguggacgagagaggccuguacaagagccugaagggcgccugcaagcugaagcugugcggcgugcugggccugagacugauggacggcaccugggccgccauccagaccagcgacgaggccaaguggugcccccccgaccagcuggugaacauccacgacuucagaagcgacgagaucgagcaccuggugguggaggagcuggugaagaagagagaggagugccuggacgcccuggagagcaucaugaccaccaagagcgugagcuucagaagacugagccaccugagaaagcuggugcccggcuucggcaaggccuacaccaucuucaacaagacccugauggaggccgacgcccacuacaagagcgugagaaccuggaacgagaucauccccagcaagggcugccugagagugggcggcagaugccacccccacgugaacggcguguucuucaacggcaucauccugggccccgacggccacgugcugauccccgagaugcagagcagccugcugcagcagcacauggagcugcuggagagcagcgugaucccccugaugcacccccuggccgaccccagcaccguguucaaggacggcgacgaggccgaggacuucguggaggugcaccugcccgacgugcacaagcaggugagcggcguggaccugggccugcccagcuggggcaaguacgugcugaugagcgugggcgccaugaucgcccugaugcugaugauccugcugaccaccugcugcagaaaggugaacggcgccgagaccauccagcacagacugggcgagaccggcagaaaggugagcgugaccagccagagcggcagagugaucagcagcugggagagcuacaagagcggcggcgagaccaagcuguga

SEQ ID NO: 190939 - RNA, 1575 nt, Artificial Sequence
  derived and/or modified CDS sequence (opt4) from glycoprotein__RABV__EU086133.1
augaucccccaggcccugcuguucgugccccugcugguguucagccugugcuucggcaaguuccccaucuacaccauccccgacaagcugggccccuggagccccaucgacauccaccaccugagcugccccaacaaccuggugguggaggacgagggcugcaccaaccugagcggcuucagcuacauggagcugaaggugggcuacaucagcgccaucaaggugaacggcuucaccugcaccggcguggugaccgaggccgagaccuacaccaacuucgugggcuacgugaccaccaccuucaagagaaagcacuucagacccacccccgacgccugcagagccgccuacaacuggaagauggccggcgaccccagauacgaggagagccugcacaaccccuaccccgacuaccacuggcugagaaccgugaagaccaccaaggagagccuggugaucaucagccccagcgugagcgaccuggaccccuacgacaagagccugcacagcagaguguuccccagcggcaagugcagcggcaucaccgugagcagcaccuacugccccaccaaccacgacuacaccaucuggaugcccgagaaccccagacugggcaccagcugcgacaucuucaccaacagcagaggcaagagagccagcaagggcagcaagaccugcggcuucguggacgagagaggccuguacaagagccugaagggcgccugcaagcugaagcugugcggcgugcugggccugagacugauggacggcaccugggccgccauccagaccagcgacgaggccaaguggugcccccccgaccagcuggugaacauccacgacuucagaagcgacgagaucgagcaccuggugguggaggagcuggugaagaagagagaggagugccuggacgcccuggagagcaucaugaccaccaagagcgugagcuucagaagacugagccaccugagaaagcuggugcccggcuucggcaaggccuacaccaucuucaacaagacccugauggaggccgacgcccacuacaagagcgugagaaccuggaacgagaucauccccagcaagggcugccugagagugggcggcagaugccacccccacgugaacggcguguucuucaacggcaucauccugggccccgacggccacgugcugauccccgagaugcagagcagccugcugcagcagcacauggagcugcuggagagcagcgugaucccccugaugcacccccuggccgaccccagcaccguguucaaggacggcgacgaggccgaggacuucguggaggugcaccugcccgacgugcacaagcaggugagcggcguggaccugggccugcccagcuggggcaaguacgugcugaugagcgugggcgccaugaucgcccugaugcugaugaucuuccugaccaccugcugcagaaaggugaacggcgccgagaccauccagagaagacugggcgagaccggcagaaaggugagcgugaccagccagagcggcagagugaucagcagcugggagagcuacaagagcggcggcgagaccaagcuguga

SEQ ID NO: 190940 - RNA, 1575 nt, Artificial Sequence
  derived and/or modified CDS sequence (opt4) from glycoprotein__RABV__EU086134.1
augaucccccaggcccugcuguucgugccccugcugguguucagccugugcuucggcaaguuccccaucuacaccauccccgacaagcugggccccuggagccccaucgacauccaccaccugagcugccccaacaaccuggugguggaggacgagggcugcaccaaccugagcggcuucagcuacauggagcugaaggugggcuacaucagcgccaucaaggugaacggcuucaccugcaccggcguggugaccgaggccgagaccuacaccaacuucgugggcuacgugaccaccaccuucaagagaaagcacuucagacccacccccgacgccugcagagccgccuacaacuggaagauggccggcgaccccagauacgaggagagccugcacaaccccuaccccgacuaccacuggcugagaaccgugaagaccaccaaggagagccuggugaucaucagccccagcgugagcgaccuggaccccuacgacaagagccugcacagcagaguguuccccagcggcaagugcagcggcaucaccgugagcagcaccuacugccccaccaaccacgacuacaccaucuggaugcccgagaaccccagacugggcaccagcugcgacaucuucaccaacagcagaggcaagagagccagcaagggcagcaagaccugcggcuucguggacgagagaggccuguacaagagccugaagggcgccugcaagcugaagcugugcggcgugcugggccugagacugauggacggcaccugggccgccauccagaccagcgacgaggccaaguggugcccccccgaccagcuggugaacauccacgacuucagaagcgacgagaucgagcaccuggugguggaggagcuggugaagaagagagaggagugccuggacgcccuggagagcaucaugaccaccaagagcgugagcuucagaagacugagccaccugagaaagcuggugcccggcuucggcaaggccuacaccaucuucaacaagacccugauggaggccgacgcccacuacaagagcgugagaaccuggaacgagaucauccccagcaagggcugccugagagugggcggcagaugccacccccacgugaacggcguguucuucaacggcaucauccugggccccgacggccacgugcugauccccgagaugcagagcagccugcugcagcagcacauggagcugcuggagagcagcgugaucccccugaugcacccccuggccgaccccagcaccguguucaaggacggcgacgaggccgaggacuucguggaggugcaccugcccgacgugcacaagcaggugagcggcguggaccugggccugcccagcuggggcaaguacgugcugaugagcgugggcgccaugaucgcccugaugcugaugaucuuccugaccaccugcugcagaaaggugaacagagccgagaccauccagagaagacugggcgagaccggcagaaaggugagcgugaccagccagaccggcagagugaucagcagcugggagagcuacaagagcggcggcgagaccaagcuguga

SEQ ID NO: 190941 - RNA, 1575 nt, Artificial Sequence
  derived and/or modified CDS sequence (opt4) from glycoprotein__RABV__EU086135.1
augaucccccaggugcugcuguucgugccccugcugguguucagcagcugcuucggcaaguuccccaucuacaccauccccgacaagcugggccccuggagccccaucgacauccaccaccugagcugccccaacaaccuggugguggaggacgagggcagcaccaaccugagcggcuuccccuacauggagcugaaggugggcuacaucagcgccaucaaggugaacggcuucaccugcaccggcguggugaccgaggccgagcccuacaccaacuucgugggcuacgugaccaccaccuucaagagaaagcacuucagacccaugcccgacgccugcagagccgccuacaacuggaagauggccggcgaccccagauacgaggagagccugcacaaccccuaccccgacuaccacuggcugagaaccgugaagaccaccaaggagagccuggugaucaucagccccagcguggccgaccuggaccccuacgacaagagccugcacagcagaguguuccccggcggcaagugcagcggcaucaccgugagcagcaccugcugcagcaccaaccacgacuacaccaucuggaugcccgagaaccccagacugggcaccagcugcgacaucuucaccaacagcagaggcaagagagccagcaagggcggcaagaccugcggcugcguggacgagagaggccuguacaagagccugaagagagccugcaagcugaagcugugcggcgugcugggccugagacugauggacggcaccuggguggccauccagaccagcgacgagaucaaguggugcagccccgaccagcuggugaaccugcacgacuuccacagcgacgagaucgagcaccuggugguggaggagcuggugaagaagagagaggagugccuggacgcccuggagaccaucaugaccaccaagagcgugagcuucagaagacugagccaccugagaaagcuggugcccggcuucggcaaggccuacaccaucuucaacaagacccugauggaggccgacgcccacuacaagagcaucagaaccuggaacgagaucauccccagcaagggcugccugagagugggcggcagaugccacccccacgugaacggcguguucuucaacggcaucauccugggccccgacggccacgugcugauccccgagaugcagagcagccugcugcaccagcacauggagcugcuggagagcagcgugaucccccugaugcacccccuggccgaccccagcaccguguucaaggacggcgacgaggccgaggacuucguggaggugcaccugcccgacgugcacaagcagaucagcggcguggaccugggccugcccaacuggggcaaguacgugcugaucagcgccggcgcccugaccgcccugaugcugaccaucuuccugaugaccugcugcagaaagaccaacagagccgagagcauccagcacagccccggcgagaccggcagaaaggugagcgugaccagccacaacggcagagugaucagcagcugggagagcuacaagagcggcagcgagaccaagcuguga

SEQ ID NO: 190942 - RNA, 1575 nt, Artificial Sequence
  derived and/or modified CDS sequence (opt4) from glycoprotein__RABV__EU086136.1
augaucccccaggugcugcuguucgugccccugcugguguucagcagcugcuucggcaaguuccccaucuacaccauccccgacaagcugggccccuggagccccaucgacauccaccaccugagcugccccaacaaccuggugguggaggacgagggcugcaccaaccugagcggcuucagcuacauggagcugaaggugggcuacaucagcgccaucaaggugaacggcuucaccugcaccggcguggugaccgaggccgagaccuacaccaacuucgugggcuacgugaccaccaccuucaagagaaagcacuucagacccaugcccgacgccugcagagccgccuacaacuggaagauggccggcgaccccagauacgaggagagccugcacaaccccuaccccgacuaccacuggcugagaaccgugaagaccaccaaggagagccuggugaucaucagccccagcguggccgaccuggaccccuacgacaagagccugcacagcagaguguuccccggcggcaagugcagcggcaucaccgugagcagcaccugcugcagcaccaaccacgacuacaccaucuggaugcccgagaaccccagacugggcaccagcugcgacaucuucaccaacagcagaggcaagagagccagcaagggcggcaagaccugcggcuucguggacgagagaggcuucgugaagagccugaagggcgccugcaagcugaagcugugcggcgugcugggccugagacugauggacggcaccuggguggccauccagaccagcgacgagaucaaguggugcagccccgaccagcuggugaaccugcacgacuuccacagcgacgagaucgagcaccuggugguggaggagcuggugaagaagagagaggagugccuggacgcccuggagaccuucaugaccaccaagagcgugagcuucagaagacugagccugcugagaaagcuggugcccggcuucggcaaggccuucaccaucuucaacaagacccugauggaggccgacgcccacuucaagagcauccugaccuggaacgagaucuuccccuacaaguggugcuucagacugggcgagauccugcacccccacgugaacagaguguucuucaacggcaucauccugggccccgacggccacgugcugauccccgagaugcagagcagccugcugcaccagcacauggagcugcuggagagcagcgugaucccccugaugcacccccuggccgaccccagcaccguguucaaggacggcgacgaggccgaggacuucguggacgugcaccugcccgacgugcacaagcagaucagcggcguggaccugggccugcccaacuggggcaaguacgugcugaucagcgccggcgcccugaccgcccugaugcugaugaucuuccugaugaccugcugcagaaaggccaacagagccgagagcauccagcacaaccccggcgagaccggcagaaaggugagcgugaccagccacaacggcagagugaucagcagcugggagagcuacaagagcggcggcgagaccaagcuguga

SEQ ID NO: 190943 - RNA, 1575 nt, Artificial Sequence
  derived and/or modified CDS sequence (opt4) from glycoprotein__RABV__EU086137.1
augaucccccaggugcugcuguucgugccccugcugguguucagcagcugcuucggcaaguuccccaucuacaccauccccgacaagcugggccccuggagccccaucgacauccaccaccugagcugccccaacaaccuggugguggaggacgagggcugcaccaaccugagcggcuucagcuacauggagcugaaggugggcuacaucagcgccaucaaggugaacggcuucaccugcaccggcguggugaccgaggccgagaccuacaccaacuucgugggcuacgugaccaccaccuucaagagaaagcacuucagacccaugcccgacgccugcagagccgccuacaacuggaagauggccggcgaccccagauacgaggagagccugcacaaccccuaccccgacuaccacuggcugagaaccgugaagaccaccaaggagagccuggugaucaucagccccagcguggccgaccuggaccccuacgacaagagccugcacagcagaguguuccccggcggcaagugcagcggcaucaccgugagcagcaccugcugcagcaccaaccacgacuacaccaucuggaugcccgagaaccccagacugggcaccagcugcgacaucuucaccaacagcagaggcaagagagccagcaagggcggcaagaccugcggcuucguggacgagagaggccuguacaagagccugaagggcgccugcaagcugaagcugugcggcgugcugggccugagacugauggacggcaccuggguggccauccagaccagcgacgagaucaaguggugcagccccgaccagcuggugaaccugcacgacuuccacagcgacgagaucgagcaccuguucguggaggagcuggugaagaagagagaggagugccuggacgcccuggagaccaucaugaccaccaagagcgugagcuucaagagacugagccaccugaccaaccuggugcccggcuucggcaaggccuacaccaucuucaacaagacccugauggaggccgacgcccacuacaagagcauccccaccuggaacgagaucauccccagcaagggcugccugaaguucggcggcagaugccacccccccgugaacggcguguucuucaacggcaucauccugggccccgacggccacgugcugauccccgagaugcagagcagccugcugcaccagcacauggagcugcuggagagcagcgugaucccccugaugcacccccuggccgaccccagcaccguguucaaggacggcgacgaggccgaggacuucguggacgugcaccugcccgacgugcacaagcagaucagcggcguggaccugggccugcccaacuggggcaaguacgugcugaucagcgccggcgcccugaccgcccugaugcugaugaucuuccugaugaccugcugcagaaaggccaacagagccgagagcauccagcacaaccccggcgagaccggcagaaaggugagcgugaccagccacaacggcagagugaucagcagcugggagagcuacaagagcggcggcgagaccaagcuguga

SEQ ID NO: 190944 - RNA, 1575 nt, Artificial Sequence
  derived and/or modified CDS sequence (opt4) from glycoprotein__RABV__EU086138.1
augaucccccaggugcugcuguucgugccccugcugguguucagcagcugcuucggcaaguuccccaucuacaccauccccgacaagcugggccccuggagccccaucgacauccaccaccugagcugccccaacaaccuggugguggaggacgagggcugcaccaaccugagcggcuucagcuacauggagcugaaggugggcuacaucagcgccaucaaggugaacggcuucaccugcaccggcguggugaccgaggccgagaccuacaccaacuucgugggcuacgugaccaccaccuucaagagaaagcacuucagacccaugcccgacgccugcagagccgccuacaacuggaagauggccggcgaccccagauacgaggagagccugcacaaccccuaccccgacuaccacuggcugagaaccgugaagaccaccaaggagagccuggugaucaucagccccagcguggccgaccuggaccccuacgacaagagccugcacagcagaguguuccccggcggcaagugcagcggcaucaccgugagcagcaccuggugcagcaccaaccacgacuacaccaucuggaugcccgagaaccccagacugggcaccagcugcgacaucuucaccaacagcagaggcaagagagccagcaagggcggcaagaccugcggcuucguggacgagagaggccuguacaagagccugaagggcgccugcaagcugaagcugugcggcgugcugggccugagacugauggacggcaccuggguggccauccagaccagcgacgagaucaaguggugcagccccgaccagcuggugaaccugcacgacuuccacagcgacgagaucgagcaccuggugguggaggagcuggugaagaagagagaggagugccuggacgcccuggagaccaucaugaccaccaagagcgugagcuucagaagacugagccaccugagaaagcuggugcccggcuucggcaaggccuacaccaucuucaacaagacccugauggaggccgacgcccacuacaagagcaucagaaccuggaacgagaucauccccagcaagggcugccugagagugggcggcagaugccacccccuggugaacggcgugagcuucaacggcaucauccugggccccgacggccacgugcugauccccgagaugcagagcagccugcugcaccagcacauggagcugcuggagagcagcgugaucccccugaugcacccccuggccgaccccagcaccguguucaaggacggcgacgaggccgaggacuucguggaggugcaccugcccgacgugcacaagcagaucagcggcguggaccugggccugcccaacuggggcaaguacgugcugaucagcgccggcgcccugaccgcccugaugcugaccaucuuccugaugaugugcugcagaaagaccaacagagccgagagcauccagcacagccccggcgagaucggcagaaaggugagcgugaccagccacaacggcagagugaucagcagcugggagagcuacaagagcggcagcgagaccaagcuguga

SEQ ID NO: 190945 - RNA, 1575 nt, Artificial Sequence
  derived and/or modified CDS sequence (opt4) from glycoprotein__RABV__EU086139.1
augaucccccaggugcugcuguucgugccccugcugguguucagcagcugcuucggcaaguuccccaucuacaccauccccgacaagcugggccccuggagccccaucgacauccaccaccugagcugccccaacaaccuggugguggaggacgagggcugcaccaaccugagcggcuucagcuacauggagcugaaggugggcuacaucagcgccaucaaggugaacggcuucaccugcaccggcguggugaccgaggccgagaccuacaccaacuucgugggcuacgugaccaccaccuucaagagaaagcacuucagacccaugcccgacgccugcagagccgccuacaacuggaagauggccggcgaccccagauacgaggagagccugcacaaccccuaccccgacuaccacuggcugagaaccgugaagaccaccaaggagagccuggugaucaucagccccagcguggccgaccuggaccccuacgacaacagccugcacagcagaguguuccccggcggcaagugcagcggcaucaccgugagcagcaccugcugcagcaccaaccacgacuacaccaucuggaugcccgagaaccccagacugggcaccagcugcgacaucuucaccaacagcagaggcaagagagccagcaagggcggcaagaccugcggcuucguggacgagagaggccuguacaagagccugaagggcgccugcaagcugaagcugugcggcgugcugggccugagacugauggacggcaccuggguggccauccagaccagcgacgagaucaaguggugcagccccgaccagcuggugaaccugcacgacuuccacagcgacgagaucgagcaccuggugguggaggagcuggugaagaagagagaggagugccuggacgcccuggagaccaucaugaccaccaagagcgugagcuucagaagacugagccaccugagaaagcuggugcccggcuucggcaaggccuacaccaucuucaacaagacccugauggaggccgacgcccacuacaagagcaucagaaccuggaacgagaucauccccagcaagggcugccugagagugggcggcagaugccacccccacgugaacggcguguucuucaacggcaucauccugggccccgacggccacgugcugauccccgagaugcagagcagccugcugcaccagcacauggagcugcuggagagcagcgugaucccccugaugcacccccuggccgaccccagcaccguguucaaggacggcgacgaggccgaggacuucguggaggugcaccugcccgacgugcacaagcagaucagcggcguggaccugggccugcccaacuggggcaaguacgugcugaucagcgccggcgcccugaccgcccugaugcugaccaucuuccugaugaccugcugcagaaagaccaacagagccgagagcauccagcacagccccggcgagaucggcagaaaggugagcgugaccagccacaacggcagagugaucagcagcugggagagcuacaagagcggcagcgagaccaagcuguga

SEQ ID NO: 190946 - RNA, 1575 nt, Artificial Sequence
  derived and/or modified CDS sequence (opt4) from glycoprotein__RABV__EU086140.1
augaucccccaggugcugcuguucgugccccugcugguguucagcagcugcuucggcaaguuccccaucuacaccauccccgacaagcugggccccuggagccccaucgacauccaccaccugagcugccccaacaaccuggugguggaggacgagggcugcaccaaccugagcggcuucagcuacauggagcugaaggugggcuacaucagcgccaucaaggugaacggcuucaccugcaccggcguggugaccgaggccgagaccuacaccaacuucgugggcuacgugaccaccaccuucaagagaaagcacuucagacccaugcccgacgccugcagagccgccuacaacuggaagauggccggcgaccccagauacgaggagagccugcacaaccccuaccccgacuaccacuggcugagaaccgugaagaccagcaaggagagccuggugaucaucagccccagcguggccgaccuggaccccuacgacaagagccugcacagcagaguguuccccggcggcaagugcagcggcaucaccgugagcagcaccugcugcagcaccaaccacgacuacaccaucuggaugcccgagaaccccagacugggcaccagcugcgacaucuucaccaacagcagaggcaagagagccagcaagggcggcaagaccugcggcuucguggacgagagaggccuguacaagagccugaagggcgccugcaagcugaagcugugcggcgugcugggccugagacugauggacggcaccuggguggccauccagaccagcgacgagaucaaguggugcagccccgaccagcuggugaaccugcacgacuuccacagcgacgagaucgagcaccuggugguggaggagcuggugaagaagagagaggagugccuggacgcccuggagaccaucaugaccaccaccagcgugagcuucagaagacugagccaccugagaaagcuggugcccggcuucggcagagccuucagcaucuucaacaagacccugguggaggccgacgcccuguuccagagcuucagaaccuggaacgagaucauccccagcaagggcugccugagagugggcggcagaugccacccccacgugaacggcguguucuucaacggcaucauccugggccccgacggccacgugcugauccccgagaugcagagcagccugcugcaccagcacauggagcugcuggagagcagcgugaucccccugaugcacccccuggccgaccccagcaccguguucaaggacggcgacgaggccgaggacuucguggaggugcaccugcccgacgugcacaagcagaucagcggcguggaccugggccugcccaacuggggcaaguacgugcugaucagcgccggcgcccugaccgcccugaugcugaugaucuuccugaugaccugcugcagaaagaccaacagagccgagagcauccagcacagccccggcgagaccggcagaaaggugagcgugaccagccacaacggcagagugaucagcagcugggagagcuacaagagcggcggcgagaccaagcuguga

SEQ ID NO: 190947 - RNA, 1575 nt, Artificial Sequence
  derived and/or modified CDS sequence (opt4) from glycoprotein__RABV__EU086141.1
augaucccccaggugcugcuguucgugccccugcugguguucagcagcugccugggcaaguuccccaucuacaccauccccgacaagcugggccccuggagccccaucgacauccaccaccugagcugccccaacaaccuggugguggaggacgagggcugcaccaaccugagcggcuucagcuacauggagcugaaggugggcuacaucagcgccaucaaggugaacggcuucaccugcaccggcguggugaccgaggccgagaccuacaccaacuucgugggcuacgugaccaccaccuucaagagaaagcacuucagacccaugcuggacgccugcagagccgccuacaacuggaagauggccggcgaccccagauacgaggagagccugcacaaccccuaccccgacuaccacuggcugagaaccgugaagaccagcaaggagagccuggugaucaucagccccagcguggccgaccuggaccccuacgacaagagccugcacagcagaguguuccccggcggcaagugcagcggcaucaccgugagcagcaccugcugcagcaccaaccacgacuacaccaucuggaugcccgagaaccccagacugggcaccagcugcgacaucuucaccaacagcagaggcaagagagccagcaagggcggcaagaccugcggcuucguggacgagagaggccuguacaagagccugaagggcgccugcaagcugaagcugugcggcgugcugggccugagacugauggacggcaccuggguggccauccagaccagcgacgagaucaaguggugcagccccgaccagcuggugaaccugcacgacuuccacagcgacgagaucgagcaccuggugguggaggagcuggugaagaagagagaggagugccuggacgcccuggagaccaucaugaccaccaagagcgugagcuucagaagacugagccaccugagaaagcuggugcccggcuucggcaaggccuacaccaucuucaacaagacccugauggaggccgacgcccacuacaagagcaucagaaccuggaacgagaucauccccagcaagggcugccugagagugggcggcagaugccacccccacgugaacgagguguucuucaacggcaucauccugggccccgacggccacgugcugauccccgagaugcagagcagccugcugcaccagcacauggagcugcuggagagcagcgugaucccccugaugcacccccugaccgaccccagcaccguguucaaggacggcgacgaggccgaggacuucguggaggugcaccugcccgacgugcacaagcagaucagcggcggcgaccugggccugcccaacuggggcaaguacgugcugaucagcgccggcgcccugaccgccagcaugcugaugaucuuccugaugaccugcugcagaaagaccaacagagccgagagcauccagcacagccccggcgagaccggcgaggaggugagcggcaccagccagaccggcagagugaucagcagcugggagagcuacaagagcggcggcgagaccaagcuguga

SEQ ID NO: 190948 - RNA, 1575 nt, Artificial Sequence
  derived and/or modified CDS sequence (opt4) from glycoprotein__RABV__EU086142.1
augaucccccaggugcugcuguucgugccccugcugguguucagcagcugccugggcaaguuccccaucuacaccauccccgacaagcugggccccuggagccccaucgacauccaccaccugagcugccccaacaaccuggugguggaggacgagggcugcaccaaccugagcggcuucagcuacauggagcugaaggugggcuacaucagcgccaucaaggugaacggcuucaccugcaccggcguggugaccgaggccgagaccuacaccaacuucgugggcuacgugaccaccaccuucaagagaaagcacuucagacccaugcuggacgccugcagagccgccuacaacuggaagauggccggcgaccccagauacgaggagagccugcacaaccccuaccccgacuaccacugguucagaaccgugaagaccagcaaggagagccuggugaucaucagccccagcguggccgaccuggaccccuacgacaagagccugcacagcagaguguuccccggcggcaagugcagcggcaucaccgugagcagcaccugcugcagcaccaaccacgacuacaccaucuggaugcccgagaaccccagacugggcaccagcugcgacaucuucaccaacagcagaggcaagagagccagcaagggcggcaagaccugcggcuucguggacgagagaggccuguacaagagccugaagggcgccugcaagcugaagcugugcggcgugcugggccugagacugauggacggcaccuggguggccauccagaccagcgacgagaucaaguggugcagccccgaccagcuggugaaccugcacgacuuccacagcgacgagaucgagcaccuggugguggaggagcuggugaagaagagagaggagugccuggacgcccuggagaccaucaugaccaccaagagcgugagcuucagaagacugagccaccugagaaagcuggugcccggcuucggcaaggccuacaccaucuucaacaagacccugauggaggccgacgcccacuacaagagcaucagaaccuggaacgagaucauccccagcaagggcugccugagagugggcggcagaugccacccccacgugaacggcguguucuucaacggcaucauccugggccccgacggccacgugcugauccccgagaugcagagcugccugcugcaccagcacauggagcugcuggagagcagcuucaucccccugaugcugccccuggccgaccccagcaccguguucaaggacggcgacgaggccgaggacuucguggaggugcaccugcccgacgugcacaagcagaucagcggcggcgaccugggccugcccaacuggggcaaguacgugcugaucagcgccggcgcccugaccgccagcaugcugaugaucuuccugaugaccugcugcagaaagaccaacagagccgagagcauccagcacagccccggcgagaccggcagaaaggugagcgugaccagccacaacggcagagugaucagcagcugggagagcuacaagagcggcggcgagaccaagcuguga

SEQ ID NO: 190949 - RNA, 1575 nt, Artificial Sequence
  derived and/or modified CDS sequence (opt4) from glycoprotein__RABV__EU086143.1
augaucccccaggugcugcuguucgugccccugcugguguucagcagcugcuucggcaaguuccccaucuacaccauccccgacaagcugggccccuggagccccaucgacauccaccaccugagcugccccaacaaccuggugguggaggacgagggcugcaccaaccugagcggcuucagcuacauggagcugaaggugggcuacaucagcgccaucaaggugaacggcuucaccugcaccggcguggugaccgaggccgagaccuacaccaacuucgugggcuacgugaccaccaccuucaagagaaagcacuucagacccaugcccgacgccugcagagccgccuacaacuggaagauggccggcgaccccagauacgaggagagccugcacaaccccuaccccgacuaccacuggcugagaaccgugaagaccagcaaggagagccuggugaucaucagccccagcguggccgaccuggaccccuacgacaagagccugcacagcagaguguuccccggcggcaagugcagcggcaucaccgugagcagcaccugcugcagcaccaaccacgacuacaccaucuggaugcccgagaaccccagacugggcaccagcugcgacaucuucaccaacagcagaggcaagagagccagcaagggcggcaagaccugcggcuucguggacgagagaggccuguacaagagccugaagggcgccugcaagcugaagcugugcggcgugcugggccugagacugauggacggcaccuggguggccauccagaccagcgacgagaucaaguggugcagccccgaccagcuggugaaccugcacgacuuccacagcgacgagaucgagcaccuggugguggaggagcuggugaagaagagagaggagugccuggacgcccuggagaccaucaugaccaccaagagcgugagcuucagaagacugagccaccugagaaagcuggugcccggcuucggcaaggccuacaccaucuucaacaagacccugauggaggccgacgcccacuacaagagcaucagaaccuggaacgagaucauccccagcaagggcugccugagagugggcggcagaugccacccccacgugaacggcguguucuucaacggcaucauccugggccccgacggccacgugcugauccccgagaugcagagcagccugcugcaccagcacauggagcugcuggagagcagcgugaucccccugaugcacccccuggccgaccccagcaccguguucaaggacggcgacgaggccgaggacuucguggaggugcaccugcccgacgugcacaagcagaucagcggcguggaccugggccugcccaacuggggcaaguacgugcugaucagcgccggcgcccugaccgcccugaugcugaugaucuuccugaugaccugcugcagaagacugaacagagccgagagcauccagcacagccccggcgagaccggcagaaaggugagcgugaccagccacagcggcagagugaucagcagcugggagagcuacaagagcggcggcgagaccaagcuguga

SEQ ID NO: 190950 - RNA, 1575 nt, Artificial Sequence; identical to SEQ ID NO: 190587
  derived and/or modified CDS sequence (opt4) from glycoprotein__RABV__EU086144.1

SEQ ID NO: 190951 - RNA, 1575 nt, Artificial Sequence
  derived and/or modified CDS sequence (opt4) from glycoprotein__RABV__EU086145.1
augaucccccaggcccugcuguucgugccccugcugguguucagccugugcuucggcaaguuccccaucuacaccauccccgacaagcugggccccuggagccccaucgacauccaccaccugagcugccccaacaaccuggugguggaggacgagggcugcaccaaccugagcggcuucagcuacauggagcugaaggugggcuacaucagcgccaucaaggugaacggcuucaccugcaccggcguggugaccgaggccgagaccuacaccaacuucgugggcuacgugaccaccaccuucaagagaaagcacuucagacccacccccgacgccugcagagccgccuacaacuggaagauggccggcgaccccagauacgaggagagccugcacaaccccuaccccgacuaccacuggcugagaaccgugaagaccaccaaggagagccuggugaucaucagccccagcguggccgaccuggaccccuacgacaagagccugcacagcagaguguuccccagcggcaagugcagcggcaucaccgugagcagcaccuacugcagcaccaaccacgacuacaccaucuggaugcccgagaaccccagacugggcaccagcugcgacaucuucgugaacagcagaggcaagagagccagcaagggcagcaagaccugcggcuucguggacgagagaggccuguacaagagccugaagggcgccugcaagcugaagcugugcggcgugcugggccugagacugauggacggcaccuggguggccauccagaccagcgacgagaccaaguggugcccccccgaccagcuggugaaccugcacgacuucagaagcgacgagaucgagcaccuggugguggaggagcuggugaagaagagagaggagugccuggacgcccuggagagcaucaugaccaccaagagcgugagcuucagaagacugagccaccugagaaagcuggugcccggcuucggcaaggccuacaccaucuucaacaagacccugauggaggccgacgcccacuacaagagcgugagaaccuggaacgagaucauccccagcaagggcugccugagagugggcggcagaugccacccccacgugaacggcguguucuucaacggcaucauccugggccccgacggccacgugcugauccccgagaugcagagcagccugcugcagcagcacauggagcugcuggagagcagcgugaucccccugaugcacccccuggccgaccccagcaccaucuucaaggacggcuacgaggccgaggacuucguggaggugcaccugcccgacgugcacaagcaggugagcggcguggaccugggccugcccaacuggggcaaguacgugcugaugagcgccggcgcccugaccgcccugaugcugaugaucuuccugaugaccugcugcagaaagaccgacagaaccggcagcacccaccacagccccggcgagaccggcagaaaggugagcgugaccagccagaacggcagagugaucgccagcugggagagcuacaagagcggcggcgagaccaagcuguga

SEQ ID NO: 190952 - RNA, 1575 nt, Artificial Sequence; identical to SEQ ID NO: 190903
  derived and/or modified CDS sequence (opt4) from glycoprotein__RABV__EU086146.1

SEQ ID NO: 190953 - RNA, 1575 nt, Artificial Sequence; identical to SEQ ID NO: 190905
  derived and/or modified CDS sequence (opt4) from glycoprotein__RABV__EU086147.1

SEQ ID NO: 190954 - RNA, 1575 nt, Artificial Sequence
  derived and/or modified CDS sequence (opt4) from glycoprotein__RABV__EU086148.1
augaucccccaggugcugcuguucgugccccugcugguguucagcagcugcuucggcaaguuccccaucuacaccauccccgacaagcugggccccuggagccccaucgacauccaccaccugagcugccccaacaaccuggugguggaggacgagggcugcaccaaccugagcggcuucagcuacauggagcugaaggugggcuacaucagcgccaucaaggugaacggcuucaccugcaccggcguggugaccgaggccgagaccuacaccaacuucgugggcuacgugaccaccaccuucaagagaaagcacuucagacccaugcccgacgccugcagagccgccuacaacuggaagauggccggcgaccccagauacgaggagagccugcacaaccccuaccccgacuaccacuggcugagaaccgugaagaccaccaaggagagccuggugaucaucagccccagcguggccgaccuggaccccuacgacaagagccugcacagcagaguguuccccggcggcaagugcagcggcaucaccgugagcagcaccugcugcagcaccaaccacgacuacaccaucuggaugcccgagaaccccagacugggcaccagcugcgacaucuucaccaacagcagaggcaagagagccagcaagggcggcaagaccugcggcuucguggacgagagaggccuguacaagagccugaagggcgccugcaagcugaagcugugcggcgugcugggccugagacugauggacggcaccuggguggccauccagaccagcgacgagaucaaguggugcagccccgaccagcuggugaaccugcacgacuuccacagcgacgagaucgagcaccuggugguggaggagcuggugaagaagagagaggagugccuggacgcccuggagaccaucaugaccaccaagagcgugagcuucagaagacugagccaccugagaaagcuggugcccggcuucggcaaggccuacaccaucuucaacaagacccugauggaggccgacgcccacuacaagagcaucagaaccuggaacgagaucauccccagcaagggcugccugagagugggcggcagaugccacccccacgugaacggcguguucuucaacggcaucauccugggccccgacggccacgugcugauccccgagaugcagagcugccugcugcaccagcacauggagcugcuggagagcagcgugaucccccugaugcacccccuggccgaccccagcaccguguucaaggacggcgacgaggccgaggacuucguggaggugcaccugcccgacgugcacaagcagaucagcggcguggaccugggccugcccaacuggggcaaguacgugcugaucagcgccggcgcccugaccgcccugaugagcaugaucuuccugaugaccugcugcagaaagaccaacagagccgagagcauccagcacagccccggcgagaccggcagaaaggugagcgugaccagccacaacggcagagugaucagcagcugggagagcuacaagagcggcggcgagaccaagcuguga

SEQ ID NO: 190955 - RNA, 1575 nt, Artificial Sequence
  derived and/or modified CDS sequence (opt4) from glycoprotein__RABV__EU086149.1
augaucccccaggugcugcuguucgugccccugcuggugagcagcagcugcuucggcaaguuccccaucuacaccauccccgacaagcugggccccuggagccccaucgacauccaccaccugagcugccccaacaaccuggugguggaggacgagggcugcaccaaccugagcggcuucagcuacauggagcugaaggugggcuacaucagcgccaucaaggugaacggcuucaccugcaccggcguggugaccgaggccgagaccuacaccaacuucgugggcuacgugaccaccaccuucaagagaaagcacuucagacccaugcccgacgccugcagagccgccuacaacuggaagauggccggcgaccccagauacgaggagagccugcacaaccccuaccccgacuaccacuggcugagaaccgugaagaccaccaaggagagccuggugaucaucagccccagcguggccgaccuggaccccuacgacaagagccugcacagcagaguguuccccggcggcaagugcagcggcaucaccgugagcagcaccugcugcagcaccaaccacgacuacaccaucuggaugcccgagaaccccagacugggcaccagcugcgacaucuucaccaacagcagaggcaagagagccagcaagggcggcaagaccugcggcuucguggacgagagaggccuguacaagagccugaagggcgccugcaagcugaagcugugcggcgugcugggccugagacugauggacggcaccuggguggccauccagaccagcgacgagaucaaguggugcagccccgaccagcuggugaaccugcacgacuuccacagcgacgagaucgagcaccuggugguggaggagcuggugaagaagagagaggagugccuggacgcccuggagaccaucaugaccaccaagagcgugagcuucagaagacugagccaccugagaaagcuggugcccggcuucggcaaggccuacaccaucuucaacaagacccugauggaggccgacgcccacuacaagagcaucagaaccuggaacgagaucauccccagcaagggcugccugagagugggcggcagaugccacccccacgugaacggcguguucuucaacggcaucauccugggccccgacggccacgugcugauccccgagaugcagagcagccugcugcaccagcacauggagcugcuggagagcagcgugaucccccugaugcacccccuggccgaccccagcaccguguucaaggacggcgacgaggccgaggacuucguggaggugcaccugcccgacgugcacaagcagaucagcggcguggaccugggccugcccaacuggggcaaguacgugcugaucagcgccggcgcccugaccgcccugaugagcaugaucuuccugaugaccugcugcagaaagaccaacagagccgagagcauccagcacagccccggcgagaccggcagaaaggugagcgugaccagccacaacggcagagugaucagcagcugggagagcuacaagagcggcggcgagaccaagcuguga

SEQ ID NO: 190956 - RNA, 1575 nt, Artificial Sequence
  derived and/or modified CDS sequence (opt4) from glycoprotein__RABV__EU086150.1
augauccugcaggugcugcuguucgugccccugcagguguucagcagcugcuucggcgaguuccccaucuacaccauccccgacaagcugggccccuggagccccaucgacauccaccaccugagcugccccaacaaccugguggugaaggacgagggcugcaccaaccugagcggcuucagcuacauggagcugaaggugggcuacaucagcgccaucaaggugaacggcuucaccugcaccggcguggugaccgaggccgagaccuacaccaacuucgugggcuacgugaccaccaccuucaagagaaagcacuucagacccaugcccgacgccugcagagccgccuacaacuggaagauggccggcgaccccagauacgaggagagccugcacaaccccuaccccgacuaccacuggcugagaaccgugaagaccaccaaggagagccuggugaucaucagccccagcguggccgaccuggaccccuacgacaagagccugcacagcagaguguuccccggcggcaagugcagcggcaucaccgugagcagcaccugcugcagcaccaaccacgacuacaccaucuggaugcccgagaaccccagacugggcaccagcugcgacaucuucaccaacagcagaggcaagagagccagcaagggcggcaagaccugcggcuucguggacgagagaggccuguacaagagccugaagggcgccugcaagcugaagcugugcggcgugcugggccugagacugauggacggcaccuggguggccauccagaccagcgacgagaucaaguggugcccccccgaccagcuggugaaccugcacgacuuccacagcgacgagaucgagcaccuggugguggaggagcuggugaagaagagagaggagugccuggacgcccuggagaccaucaugaccaccaagagcgugagcuucagaagacugagccaccugagaaagcuggugcccggcuucggcaaggccuacaccaucuucaacaagacccugauggaggccgacgcccacuacaagagcaucagaaccuggaacgagaucauccccagcaagggcugccugagagugggcggcagaugccacccccacgugaacggcguguucuucaacggcaucauccugggccccgacggccacgugcugauccccgagaugcagagcagccugcugcaccagcacauggagcugcuggagagcagcgugaucccccugaugcacccccuggccgaccccagcaccguguucaaggacggcgacgaggccgaggacuucguggaggugcaccugcccgacgugcacaagcagaucagcggcguggaccugggccugcccaacuggggcaaguacgugcuggugagcgccggcgcccugaccgcccugaugcugaugaucuuccugaugaccugcugcagaaagaccaacagagccgagagcauccagcacagccccggcgagaccggcagaaaggugagcgugaccagccacaacggcagagugaucagcagcugggagagcuacaagagcggcggcgagaccaagcuguga

SEQ ID NO: 190957 - RNA, 1575 nt, Artificial Sequence
  derived and/or modified CDS sequence (opt4) from glycoprotein__RABV__EU086151.1
augaucccccaggcccugcuguucgugccccugcugguguucagccugugcuucggcaaguuccccaucuacaccauccccgacaagcugggccccuggagccccaucgacauccaccaccugagcugccccaacaaccuggugguggaggacgagggcugcaccaaccugagcggcuucagcuacauggagcugaaggugggcuacaucagcgccaucaaggugaacggcuucaccugcaccggcguggugaccgaggccgagaccuacaccaacuucgugggcuacgugaccaccaccuucaagagaaagcacuucagacccacccccgacgccugcagagccgccuacaacuggaagauggccggcgaccccagauacgaggagagccugcacaaccccuaccccgacuaccacuggcugagaaccgugaagaccaccaaggagagccuggugaucaucagccccagcguggccgaccuggaccccuacgacaagagccugcacagcagaguguuccccaacggcaagugcagcggcaucaccgugagcagcaccuacugcagcaccaaccacgacuacaccaucuggaugcccgagaaccccagacugggcaccagcugcgacaucuucaccaacagcagaggcaagagagccagcaagggcagcaagaccugcggcuucguggacgagagaggccuguacaagagccugaagggcgccugcaagcugaagcugugcggcgugcugggccugagacugauggacggcaccuggguggcccugcagaccagcgacgagaccaaguggugcagccccgaccagcuggugaaccugcacgacuuccacagcgacgagaucgagcaccuggugguggaggagcuggugaagaagagagaggagugccuggacgcccuggagagcaucaugaccaccaagagcgugagcuucagaagacugagccaccugagaaagcuggugcccggcuucggcaaggccuacaccaucuucaacaagacccugauggaggccgacgcccacuacaagagcaucagaaccuggaacgagaucauccccagcaagggcugccugagagugggcggcaagugccacccccacgugaacggcguguucuucaacggcaucauccugggccccgacggccacgugcugauccccgagaugcagagcagccugcugcaccagcacauggagcugcuggagagcagcgugaucccccugaugcacccccuggccgaccccagcaccguguucaaggacggcgacgaggccgaggacuucguggaggugcaccugcccgacgugcacaagcagaucagcggcguggaccugggccugcccaacuggggcaaguacgugcugaugagcgccggcgcccugaccgugcugaugcugaccaucuuccuggugaccugcugcagaaagaccaacagagccgagagcauccagcacagcagcggcgagaccggcagaaaggugagcgugaccagccagaacggcagagugaucagcagcugggagagcuacaagagcggcggcgagaccaagcuguga

SEQ ID NO: 190958 - RNA, 1575 nt, Artificial Sequence
  derived and/or modified CDS sequence (opt4) from glycoprotein__RABV__EU086152.1
augaucccccaggcccugcuguucgugccccugcugguguucagccugugcuucggcaaguuccccaucuacaccauccccgacaagcugggccccuggagccccaucgacauccaccaccugagcugccccaacaaccuggugguggaggacgagggcugcaccaaccugagcggcuucagcuacauggagcugaaggugggcuacaucagcgccaucaaggugaacggcuucaccugcaccggcguggugaccgaggccgagaccuacaccaacuucgugggcuacgugaccaccaccuucaagagaaagcacuucagacccacccccgacgccugcagagccgccuacaacuggaagauggccggcgaccccagauacgaggagagccugcacaaccccuaccccgacuaccacuggcugagaaccgugaagaccaccaaggagagccuggugaucaucagccccagcgugagcgaccuggaccccuacgacaagagccugcacagcagaguguuccccagcggcaagugcagcggcaucaccgugagcagcaccuacugccccaccaaccacgacuacaccaucuggaugcccgagaaccccagacugggcaccagcugcgacaucuucaccaacagcagaggcaagagagccagcaagggcagcaagaccugcggcuucguggacgagagaggccuguacaagagccugaagggcgccugcaagcugaagcugugcggcgugcugggccugagacugauggacggcaccugggccgccauccagaccagcgacgaggccaaguggugcccccccgaccagcuggugaacauccacgacuucagaagcgacgagaucgagcaccuggugguggaggagcuggugaagaagagagaggagugccuggacgcccuggagagcaucaugaccaccaagagcgugagcuucagaagacugagccaccugagaaagcuggugcccggcuucggcaaggccuacaccaucuucaacaagacccugauggaggccgacgcccacuacaagagcgugagaaccuggaacgagaucauccccagcaagggcugccugagagugggcggcagaugccacccccacgugaacggcguguucuucaacggcaucauccugggccccgacggccacgugcugauccccgagaugcagagcagccugcugcagcagcacauggagcugcuggagagcagcgugaucccccugaugcacccccuggccgaccccagcaccguguucaaggacggcgacgaggccgaggacuucguggaggugcaccugcccgacgugcacaagcaggugagcggcguggaccugggccugcccagcuggggcaaguacgugcugaugagcgugggcgccaugaucgcccugaugcugaugaucuuccugaugaccugcugcagaaagagcaacggcgccgagagcauccagcacagacugggcgagaccggcagaaaggugagcgugaccagccagagcggcagagugaucagcagcugggagagcuacaagagcggcggcgagaccaagcuguga

SEQ ID NO: 190959 - RNA, 1575 nt, Artificial Sequence
  derived and/or modified CDS sequence (opt4) from glycoprotein__RABV__EU086153.1
auggugccccaggugcugugguucgugccccugcugguguucagcaugugcuucggcaaguuccccaucuacaccauccccgacaagcugggccccuggagccccaucgacauccaccaccugagcugccccaacaaccuggugguggaggacgagggcugcaccaaccugagcggcuucagcuacauggagcugaaggugggcuacaucagcgccaucaaggugaacggcuucaccugcaccggcguggugaccgaggccgagaccuacaccaacuucgugggcuacgugaccaccaccuucaagagaaagcacuucagacccacccccgacgccugcagagccgccuacaacuggaagauggccggcgaccccagauacgaggagagccugcacaaccccuaccccgacuaccacuggcugagaaccgugaagaccaccaaggagagccuggugaucaucagccccagcguggccgaccuggaccccuacgacaagagccugcacagcagaguguuccccagcggcaagugcagcggcaucaccaucagcagcaccuacugcagcaccaaccacgacuacaccaucuggaugcccgagaaccccagacugggcaccagcugcgacaucuucaccaacagcagaggcaagagagccagcaagggcagcaagaccugcggcuucguggacgagagaggccuguacaagagccugaagggcgccugcaagcugaagcugugcggcgugcugggccugagacugauggacggcaccuggguggccaugcagaccagcgacgagaccaaguggugcccccccgaccagcuggugaaccugcacgacuucagaagcgacgagaucgagcaccuggugguggaggagcuggugaagaagagagaggagugccuggacgcccuggagagcaucaugaccaccaagagcgugagcuucagaagacugagccaccugagaaagcuggugcccggcuucggcaaggccuacaccaucuucaacaagacccugauggaggccgacgcccacuacaagagcgugagaaccuggaacgagaucauccccagcaagggcugccugagagugggcggcagaugccacccccacgugaacggcguguucuucaacggcaucauccugggccccgacggccacgugcugauccccgagaugcagagcagccugcugcagcagcacauggagcugcuggagagcagcgugaucccccugaugcacccccuggccgaccccagcaccguguucaaggacggcgacgaggccgaggacuucguggaggugcaccugcccgacgugcacaagcagaucagcggcguggaccugggccugcccaacuggggcaaguacgugcuggugagcgccggcgugcugguggugcugaugcuggccaucuucaucaugaccugcugcggcagagugaacagacccaagagcacccagcacagccuggagggcaccggcagaaaggugagcgugaccagccagagcggcaaggugaucagcagcugggagagcuacaagagcggcggcgagaccagacuguga

SEQ ID NO: 190960 - RNA, 1575 nt, Artificial Sequence
  derived and/or modified CDS sequence (opt4) from glycoprotein__RABV__EU086154.1
auggugccccaggugcugugguucgugccccugcugguguucagcaugugcuucggcaaguuccccaucuacaccauccccgacaagcugggccccuggagccccaucgacauccaccaccugagcugccccaacaaccuggugguggaggacgagggcugcaccaaccugagcggcuucagcuacauggagcugaaggugggcuacaucagcgccaucaaggugaacggcuucaccugcaccggcguggugaccgaggccgagaccuacaccaacuucgugggcuacgugaccaccaccuucaagagaaagcacuucagacccacccccgacgccugcagagccgccuacaacuggaagauggccggcgaccccagauacgaggagagccugcacaaccccuaccccgacuaccacuggcugagaaccgugaagaccaccaaggagagccuggugaucaucagccccagcguggccgaccuggaccccuacgacaagagccugcacagcagaguguuccccagcggcaagugcagcggcaucaccaucagcagcaccuacugcagcaccaaccacgacuacaccaucuggaugcccgagaaccccagacugggcaccagcugcgacaucuucaccaacagcagaggcaagagagccagcaagggcagcaagaccugcggcuucguggacgagagaggccuguacaagagccugaagggcgccugcaagcugaagcugugcggcgugcugggccugagacugauggacggcaccuggguggccaugcagaccagcgacgagaccaaguggugcccccccgaccagcuggugaaccugcacgacuucagaagcgacgagaucgagcaccuggugguggaggagcuggugaagaagagagaggagugccuggacgcccuggagagcaucaugaccaccaagagcgugagcuucagaagacugagccaccugagaaagcuggugcccggcuucggcaaggccuacaccaucuucaacaagacccugauggaggccgacgcccacuacaagagcgugagaaccuggaacgagaucauccccagcaagggcugccugagagugggcggcagaugccacccccacgugaacggcguguucuucaacggcaucauccugggccccgacggccacgugcugauccccgagaugcagagcagccugcugcagcagcacauggagcugcuggagagcagcgugaucccccugaugcacccccugagcgaccccagcaccguguucaaggacggcgacgaggccgaggacuucguggaggugcaccugcccgacgugcacaagcagaucagcggcguggaccugggccugcccaacuggggcaaguacgugcuggugagcgccggcgugcugguggugcugaugcuggccaucuucaucaugaccugcugcggcagagugaacagacccaagagcacccagcacagccuggagggcaccggcagaaaggugagcgugaccagccagagcggcaaggugaucagcagcugggagagcuacaagagcggcggcgagaccagacuguga

SEQ ID NO: 190961 - RNA, 1575 nt, Artificial Sequence; identical to SEQ ID NO: 190693
  derived and/or modified CDS sequence (opt4) from glycoprotein__RABV__EU086155.1

SEQ ID NO: 190962 - RNA, 1575 nt, Artificial Sequence
  derived and/or modified CDS sequence (opt4) from glycoprotein__RABV__EU086156.1
auggugccccaggugcugcuguucgugccccugcugguguucagccugugcuucggcaaguuccccaucuacaccauccccgacaagcugggccccuggagccccaucgacauccaccaccugagcugccccaacaaccuggugguggaggacgagggcugcaccaaccugagcggcuucagcuacauggagcugaaggugggcuacaucagcgccaucaaggugaacggcuucaccugcaccggcguggugaccgaggccgagaccuacaccaacuucgugggcuacgugaccaccaccuucaagagaaagcacuucagacccacccccgacgccugcagagccgccuacaacuggaagcuggccggcgaccccagauacgaggagagccugcacaaccccuaccccgacuaccacuggcugagaaccgugaagaccaccaaggagagccuggugaucaucagccccagcguggccgaccuggaccccuacgacaagagccugcacagcagaguguucagcggcggcaagugcagcggcaucaccgugagcagcaccuacugcagcaccaaccacgacuacaccaucuggaugcccgagaaccccagacugggcaccagcugcgacaucuucgugaacagcagaggcaagagagccagcaagggcggcaagaccugcggcuucguggacgagagaggccuguacaagagccugaagggcgccugcaagcugaagcugugcggcgugcccggccugagacugauggacggcaccugggccgccauccagaccagcgacgagaccaaguggugcccccccgaccagcuggugaaccugcacgacuucagaagcgacgagaucgagcaccuggugguggaggagcuggugaagaagagagaggagugccuggacgcccuggagagcaucaugaccaccaagagcgugagcuucagaagacugagccaccugagaaagcuggugcccggcuucggcaaggccuacaccaucuucaacaagacccugauggaggccgacgcccacuacgagagcgugagaaccuggaacgagaucauccccagcaagggcugccugagagugggcggcagaugccacccccacgugaacggcguguucuucaacggcaucauccugggccccgacggccacgugcugauccccgagaugcagagcagccugcugcagcagcacauggagcugcuggagagcagcgugaucccccugaugcacccccuggccgaccccagcaccgugcugaaggacggcgacgaggccgaggacuucguggaggugcaccugcccgacgugcacaagcugaucagcggcguggaccugggccugcccagcuggggcaaguacgugcugaugagcgccggcgugcugaccgcccugaugcugaugaucuuccugaugaccugcugcagaagaggcaaccaggccggcagcaagcagcacggccuggagggcaccggcagaaaggugagcgugaccagccagaacggcaaggugaucagcagcugggagagcuacaagagcggcggcgagaccagacuguga

SEQ ID NO: 190963 - RNA, 1575 nt, Artificial Sequence
  derived and/or modified CDS sequence (opt4) from glycoprotein__RABV__EU086157.1
augaucccccaggcccugcuguucgugccccugcugguguucagccugugcuucggcaaguuccccaucuacaccauccccgacaagcugggccccuggagccccaucgacauccaccaccugagcugccccaacaaccuggugguggaggacgagggcugcaccaaccugagcggcuucagcuacauggagcugaaggugggcuacaucagcgccaucaaggugaacggcuucaccugcaccggcguggugaccgaggccgagaccuacaccaacuucgugggcuacgugaccaccaccuucaagagaaagcacuucagacccacccccgacgccugcagagccgccuacaacuggaagauggccggcgaccccagauacgaggagagccugcacaaccccuaccccgacuaccacuggcugagaaccgugaagaccaccaaggagagccuggugaucaucagccccagcgugagcgaccuggaccccuacgacaagagccugcacagcagaguguuccccagcggcaagugcagcggcaucaccgugagcagcaccuacugccccaccaaccacgacuacaccaucuggaugcccgagaaccccagacugggcaccagcugcgacaucuucaccaacagcagaggcaagagagccagcaagggcagcaagaacugcggcuucguggacgagagaggccuguacagaagccugaagggcgccugcaagcugaagcugugcggcgugcugggccugagacugauggacggcaccugggccgccauccagaccagcgacgaggccaaguggugcccccccgaccagcuggugaacauccacgacuucagaagcgacgagaucgagcaccuggugguggaggagcuggugaagaagagagaggagugccuggacgcccuggagagcaucaugaccaccaagagcgugagcuucagaagacugagccaccugagaaagcuggugcccggcuucggcaaggccuacaccaucuucaacaagacccugauggaggccgacgcccacuacaagagcgugagaaccuggaacgagaucauccccagcaagggcugccugagagugggcggcagaugccacccccacgugaacggcguguucuucaacggcaucauccugggccccgacggccacgugcugauccccgagaugcagagcagccugcugcagcagcacauggagcugcuggagagcagcgugaucccccugaugcacccccuggccgaccccagcaccguguucaaggacggcgacgaggccgaggacuucguggaggugcaccugcccgacgugcacaagcaggugagcggcguggaccugggccugcccagcuggggcaaguacgugcugaugagcgugggcgcccugaucgcccugaugcugaugaucuuccugaugaccugcugcagaaaggccaacggcguggagagcaugcagcacagacugggcgagaccggcagaaaggugagcgugaccagccagagcggcagagugaucagcagcugggagagcuacaagagcggcggcgagaccaagcuguga

SEQ ID NO: 190964 - RNA, 1575 nt, Artificial Sequence
  derived and/or modified CDS sequence (opt4) from glycoprotein__RABV__EU086158.1
augaucccccaggcccugcuguucgugccccugcugguguucagccugugcuucggcaaguuccccaucuacaccauccccgacaagcugggccccuggagccccaucgacauccaccaccugagcugccccaacaaccuggugguggaggacgagggcugcaccaaccugagcggcuucagcuacauggagcugaaggugggcuacaucagcgccaucaaggugaacggcuucaccugcaccggcguggugaccgaggccgagaccuacaccaacuucgugggcuacgugaccaccaccuucaagagaaagcacuucagacccacccccgacgccugcagagccgccuacaacuggaagauggccggcgaccccagauacgaggagagccugcacaaccccuaccccgacuaccacuggcugagaaccgugaagaccaccaaggagagccuggugaucaucagccccagcgugagcgaccuggaccccuacgacaagagccugcacagcagaguguuccccagcggcaagugcagcggcaucaccgugagcagcaccuacugccccaccaaccacgacuacaccaucuggaugcccgagaaccccagacugggcaccagcugcgacaucuucaccaacagcagaggcaagagagccagcaagggcagcaagaccugcggcuucguggacgagagaggccuguacagaagccugaagggcgccugcaagcugaagcugugcggcgugcugggccugagacugauggacggcaccugggccgccauccagaccagcgacgaggccaaguggugcccccccgaccagcuggugaacauccacgacuucagaagcgacgagaucgagcaccuggugguggaggagcuggugaagaagagagaggagugccuggacgcccuggagagcaucaugaccaccaagagcgugagcuucagaagacugagccaccugagaaagcuggugcccggcuucggcaaggccuacaccaucuucaacaagacccugauggaggccgacgcccacuacaagagcgugagaaccuggaacgagaucauccccagcaagggcugccugagagugggcggcagaugccacccccacgugaacggcguguucuucaacggcaucauccugggccccgacggccacgugcugauccccgagaugcagagcagccugcugagacagcacauggagcugcuggagagcagcgugaucccccugaugcacccccuggccgaccccagcaccguguucaaggacggcgacgaggccgaggacuucguggaggugcaccugcccgacgugcacaaccagaucagcggcguggaccugggccugcccagcuggggcaaguacgugcugaugagcgugggcgccaugaucgcccugaugcuggugaucuuccugaccaccugcugcagaaaggccaacggcgccgagaccauccagcacagacugggcgagaccggcagaaaggugagcgugaccagccagagcggcagagugaugagcagcugggagagcuacaagagcggcggcgagaccaagcuguga

SEQ ID NO: 190965 - RNA, 1575 nt, Artificial Sequence
  derived and/or modified CDS sequence (opt4) from glycoprotein__RABV__EU086159.1
augaucccccaggcccugcuguucgugccccugcugguguucagccugugcuucggcaaguuccccaucuacaccauccccgacaagcugggccccuggagccccaucgacauccaccaccugagcugccccaacaaccuggugguggaggacgagggcugcaccaaccugagcggcuucagcuacauggagcugaaggugggcuacaucagcgccaucaaggugaacggcuucaccugcaccggcguggugaccgaggccgagaccuacaccaacuucgugggcuacgugaccaccaccuucaagagaaagcacuucagacccacccccgacgccugcagagccgccuacaacuggaagauggccggcgaccccagauacgaggagagccugcacaaccccuaccccgacuaccacuggcugagaaccgugaagaccaccaaggagagccuggugaucaucagccccagcgugagcgaccuggaccccuacgacaagagccugcacagcagaguguuccccagcggcaagugcagcggcaucaccgugagcagcaccuacugccccaccaaccacgacuacaccaucuggaugcccgagaaccccagacugggcaccagcugcgacaucuucaccaacagcagaggcaagagagccagcaagggcagcaagaccugcggcuucguggacgagagaggccuguacaagagccugaagggcgccugcaagcugaagcugugcggcgugcugggccugagacugauggacggcaccugggccgccauccagaccagcgacgaggccaaguggugcccccccgaccagcuggugaacauccacgacuucagaagcgacgagaucgagcaccuggugguggaggagcuggugaagaagagagaggagugccuggacgcccuggagagcaucaugaccaccaagagcgugagcuucagaagacugagccaccugagaaagcuggugcccggcuucggcaaggccuacaccaucuucaacaagacccugauggaggccgacgcccacuacaagagcgugagaaccuggaacgagaucauccccagcaagggcugccugagagugggcggcagaugccacccccacgugaacggcguguucuucaacggcaucauccugggccccgacggccacgugcugauccccgagaugcagagcagccugcugcagcagcacauggagcugcuggagagcagcgugaucccccugaugcugccccuggccgaccccagcaccguguucaaggacggcgacgaggccgaggacuucguggaggugcaccugcccgacgugcacaagcaggugagcggcguggaccugggccugcccagcuggggcaaguacgugcugaugagcgugggcgccaugaucgcccugaugcugaugaucuuccugaccaccugcugcagaaaggccaacggcgccagaaccaugcagcacgccagcggcgagaccggcagaaaggugagcgugaccuuccccagcggcagagugaucagcagcugggagagcuacaagagcggcggcgagaccaagcuguga

SEQ ID NO: 190966 - RNA, 1575 nt, Artificial Sequence
  derived and/or modified CDS sequence (opt4) from glycoprotein__RABV__EU086160.1
augaucccccaggcccugcuguucgugccccugcugguguucagccugugcuucggcaaguuccccaucuacaccauccccgacaagcugggccccuggagccccaucgacauccaccaccugagcugccccaacaaccuggugguggaggacgagggcugcaccaaccugagcggcuucagcuacauggagcugaaggugggcuacaucagcgccaucaaggugaacggcuucaccugcaccggcguggugaccgaggccgagaccuacaccaacuucgugggcuacgugaccaccaccuucaagagaaagcacuucagacccacccccgacgccugcagagccgccuacaacuggaagauggccggcgaccccagauacgaggagagccugcacaaccccuaccccgacuaccacuggcugagaaccgugaagaccaccaaggagagccuggugaucaucagccccagcgugagcgaccuggaccccuacgacaagagccugcacagcagaguguuccccagcggcaagugcagcggcaucaccgugagcagcaccuacugccccaccaaccacgacuacaccaucuggaugcccgagaaccccagacugggcaccagcugcgacaucuucaccaacagcagaggcaagagagccagcaagggcagcaagaccugcggcuucguggacgagagaggccuguacaagagccugaagggcgccugcaagcugaagcugugcggcgugcugggccugagacugauggacggcaccugggccgccauccagaccagcgacgaggccaaguggugcccccccgaccagcuggugaacauccacgacuucagaagcgacgagaucgagcaccuggugguggaggagcuggugaagaagagagaggagugccuggacgcccuggagagcaucaugaccaccaagagcgugagcuucagaagacugagccaccugagaaagcuggugcccggcuucggcaaggccuacaccaucuucaacaagacccugauggaggccgacgcccacuacaagagcgugagaaccuggaacgagaucauccccagcaagggcugccugagagugggcggcagaugccacccccacgugaacggcguguucuucaacggcaucauccugggccccgacggccacgugcugauccccgagaugcagagcagccugcugcagcagcacauggagcugcuggagagcagcgugaucccccugaugcacccccuggccgaccccagcaccguguucaaggacggcgacgaggccgaggacuucguggaggugcaccugcccgacgugcacaagcaggugagcggcguggaccugggccugcccagcuggggcaaguacgugcugaugagcgugggcgccaugaucgcccugaugcugaugaucuuccugaccaccugcugcagaaaggccaacggcgccgagaccauccagcacagacugggcgagaccggcagaaaggugagcgugaccagccagagcggcagagugaucagcagcugggagagcuacaagagcggcggcgagaccaagcuguga

SEQ ID NO: 190967 - RNA, 1575 nt, Artificial Sequence
  derived and/or modified CDS sequence (opt4) from glycoprotein__RABV__EU126641.1
auggugccccaggugcugcuguucgugcugcugcugggcuucagccugugcuucggcaaguuccccaucuacaccauccccgacaagcugggccccuggagccccaucgacauccaccaccugagaugccccaacaaccuggugguggaggacgagggcugcaccaaccugagcggcuucagcuacauggagcugaaggugggcuacaucagcgccaucaaggugaacggcuucaccugcaccggcguggugaccgaggccgagaccuacaccaacuucgugggcuacgugaccaccaccuucaagagaaagcacuucagacccacccccgacgccugcagagccgccuacaacuggaagauggccggcgaccccagauacgaggagagccugcagaaccccuaccccgacuaccacuggcugagaaccgugagaaccaccaaggagagccugaucaucaucagccccagcgugaccgaccuggaccccuacgacaagagccugcacagcagaguguuccccggcggcaagugcagcggcaucaccgugagcagcaccuacugcagcaccaaccacgacuacaccaucuggaugcccgaggaccccagacccggcacccccugcgacaucuucaccaacagcagaggcaagagagccagcaacggcaacaagaccugcggcuucguggacgagagaggccuguacaagagccugaagggcgccugcagacugaagcugugcggcgugcugggccugagacugauggacggcaccuggguggccaugcagaccagcgacgagaccaaguggugcagccccgaccagcuggugaaccugcacgacuucagaagcaacgagaucgagcaccuggugguggaggaccuggugaagaagagagaggagugccuggacacccuggagagcaucaugaccaccaagagcgugagcuucagaagacugagccaccugagaaagcuggugcccggcuucggcaaggccuacaccaucuucaacaagacccugauggaggccgacgugcacuacaagagcgugagaaccuggaacgagaucauccccagcaagggcugccugaaggugggcggcagaugccacccccacgugaacggcguguucuucaacggcaucauccugggccccgacgacagagugcugauccccgagaugcagagcagccugcugagacagcacauggagcugcuggagagcagcgugaucccccugaugcacccccuggccgaccccagcaccguguucaaggagggcgacgaggccgaggacuucguggaggugcaccugcccgacguguacaagaagaucagcggcguggaccugggccugcccaacuggggcaaguacgugcugaugaccgccggcgccaugaucggccuggugcugaucuucagccugaugaccuggugcagaagagccaacagacccgagagcaagcagagaagcuucggcggcaccggcggcaacgugagcgugaccagccagagcggcaaggugauccccagcugggagagcuacaagagcggcggcgagaucagacuguga

SEQ ID NO: 190968 - RNA, 1575 nt, Artificial Sequence
  derived and/or modified CDS sequence (opt4) from glycoprotein__RABV__EU182346.1
auggugccccaggcccugcuguucgugccccugcugguguucccccugugcuucggcaaguuccccaucuacaccauccccgacaagcugggccccuggagccccaucgacauccaccaccugagcugccccaacaaccuggugguggaggacgagggcugcaccaaccugagcggcuucagcuacauggagcugaaggugggcuacauccuggccaucaagaugaacggcuucaccugcaccggcguggugaccgaggccgagaccuacaccaacuucgugggcuacgugaccaccaccuucaagagaaagcacuucagacccacccccgacgccugcagagccgccuacaacuggaagauggccggcgaccccagauacgaggagagccugcacaaccccuaccccgacuacagauggcugagaaccgugaagaccaccaaggagagccuggugaucaucagccccagcguggccgaccuggaccccuacgacagaagccugcacagcagaguguuccccagcggcaagugcagcggcguggccgugagcagcaccuacugcagcaccaaccacgacuacaccaucuggaugcccgagaaccccagacugggcaugagcugcgacaucuucaccaacagcagaggcaagagagccagcaagggcagcgagaccugcggcuucguggacgagagaggccuguacaagagccugaagggcgccugcaagcugaagcugugcggcgugcugggccugagacugauggacggcaccuggguggccaugcagaccagcaacgagaccaaguggugcccccccgaccagcuggugaaccugcacgacuucagaagcgacgagaucgagcaccuggugguggaggagcuggugagaaagagagaggagugccuggacgcccuggagagcaucaugaccaccaagagcgugagcuucagaagacugagccaccugagaaagcuggugcccggcuucggcaaggccuacaccaucuucaacaagacccugauggaggccgacgcccacuacaagagcgugagaaccuggaacgagauccugcccagcaagggcugccugagagugggcggcagaugccacccccacgugaacggcguguucuucaacggcaucauccugggccccgacggcaacgugcugauccccgagaugcagagcagccugcugcagcagcacauggagcugcuggagagcagcgugaucccccuggugcacccccuggccgaccccagcaccguguucaaggacggcgacgaggccgaggacuucguggaggugcaccugcccgacgugcacaaccaggugagcggcguggaccugggccugcccaacuggggcaaguacgugcugcugagcgccggcgcccugaccgcccugaugcugaucaucuuccugaugaccugcugcagaagagugaacagaagcgagcccacccagcacaaccugagaggcaccggcagagaggugagcgugaccccccagagcggcagaaucaucagcagcugggagagccacaagagcggcggcgagaccagacuguga

SEQ ID NO: 190969 - RNA, 1575 nt, Artificial Sequence
  derived and/or modified CDS sequence (opt4) from glycoprotein__RABV__EU182347.1
auggugccccaggcccugcuguucgugccccugcugguguucccccugugcuucggcaaguuccccaucuacaccauccccgacaagcugggccccuggagccccaucgacauccaccaccugagcugccccaacaaccuggugguggaggacgagggcugcaccaaccugagcggcuucagcuacauggagcugaaggugggcuacaaccuggccaucaagaugaacggcuucaccugcaccggcguggugaccgaggccgagaccuacaccaacuucgugggcuacgugaccaccaccuucaagagaaagcacuucagacccacccccgacgccugcagagccgccuacaacuggaagauggccggcgaccccagauacgaggagagccugcacaaccccuaccccgacuacagauggcugagaaccgugaagaccaccaaggagagccuggugaucaucagccccagcguggccgaccuggaccccuacgacagaagccugcacagcagaguguuccccagcggcaagugcagcggcguggccgugagcagcaccuacugcagcaccaaccacgacuacaccaucuggaugcccgagaaccccagacugggcaugagcugcgacaucuucaccaacagcagaggcaagagagccagcaagggcagcgagaccugcggcuucguggacgagagaggccuguacaagagccugaagggcgccugcaagcugaagcugugcggcgugcugggccugagacugauggacggcaccuggguggccaugcagaccagcaacgagaccaaguggugcccccccgaccagcuggugaaccugcacgacuucagaagcgacgagaucgagcaccuggugguggaggagcuggugagaaagagagaggagugccuggacgcccuggagagcaucaugaccaccaagagcgugagcuucagaagacugagccaccugagaaagcuggugcccggcuucggcaaggccuacaccaucuucaacaagacccugauggaggccgacgcccacuacaagagcgugagaaccuggaacgagauccugcccagcaagggcugccugagagugggcggcagaugccacccccacgugaacggcguguucuucaacggcaucauccugggccccgacggcaacgugcugauccccgagaugcagagcagccugcugcagcagcacauggagcugcuggagagcagcgugaucccccuggugcacccccuggccgaccccagcaccguguucaaggacggcgacgaggccgaggacuucguggaggugcaccugcccgacgugcacaaccaggugagcggcguggaccugggccugcccaacuggggcaaguacgugcugcugagcgccggcgcccugaccgcccugaugcugaucaucuuccugaugaccugcugcagaagagugaacagaagcgagcccacccagcacaacaucagaggcaccggcagagaggugagcgugaccccccagagcggcaagaucaucagcagcugggagagccacaagagcggcggcgagaccagacuguga

SEQ ID NO: 190970 - RNA, 1575 nt, Artificial Sequence
  derived and/or modified CDS sequence (opt4) from glycoprotein__RABV__EU253477.1
augaccccccaggcccugcuguucgugccccugcugguguucagcagcugcuucggcaaguuccccaucuacaccauccccgacaagcugggccccuggagccccaccgacauccaccaccugagcugccccaacaaccuggugguggaggacgagggcugcaccaaccugagcggcuucagcuacauggagcugaaggugggcuacaucagcgccaucaaggugaacggcuucaccugcaccggcguggugaccgaggccgagaccuacaccaacuucgugggcuacgugaccaccaccuucaagagaaagcacuucagacccaugcccgacgccugcagagccgccuacaacuggaagauggccggcgaccccagauacgaggagagccugcacaaccccuaccccgacuaccacuggcugagaaccgugaagaccaccaaggagagccuggugaucaucagccccagcguggccgaccuggaccccuacgacaagagccugcacagcagaguguuccccggcggcaagugcagcggcaucaccgugagcagcaccugcugcagcaccaaccacgacuacaccaucuggaugcccgagaaccccagacugggcaccagcugcgacaucuucaccaacagcagaggcaagagagccagcaagggcggcaagaccugcggcuucguggacgagagaggccuguacaagagccugaagggcgccugcaagcugaagcugugcggcgugcugggccugagacugauggacggcaccuggguggccauccagaccagcgacgagaucaaguggugcagccccgaccagcuggugaaccugcacgacuuccacagcgacgagaucgagcaccuggugguggaggagcuggugaagaagagagaggagugccuggacgcccuggagaccaucaugaccaccaagagcgugagcuucagaagacugagccaccugagaaagcuggugcccggcuucagaaaggccuacaccaucuucaacaagacccugauggaggccgacgcccacuacaagagcaucagaaccuggaacgagaucauccccagcaagggcugccugagagugggcggcagaugccacccccacgugaacggcguguucuucaacggcaucauccugggccccgacggccacgugcugauccccgagaugcagagcagccugcugcaccagcacauggagcugcuggagagcagcgugaucccccugaugcacccccuggccgaccccagcaccguguucaaggacggcgacgaggccgaggacuucguggaggugcaccugcccgacgugcacaagcagaucagcggcguggaccugggccugcccaacuggggcaaguacgugcugaucagcgccggcgcccugaccgcccugaugcugaccaucuuccugaugaccugcugcagaaagaccaacagagccgagagcauccagcacagccccggcgagaccggcagaaaggugagcgugaccagccacaacggcagagugaucagcagcugggagagcuacaagagcggcggcgagaccaagcuguga

SEQ ID NO: 190971 - RNA, 1575 nt, Artificial Sequence
  derived and/or modified CDS sequence (opt4) from glycoprotein__RABV__EU267742.1
augaucccccaggugcugcugcuggugccccugcugguguucagcagcugcuucggcaaguuccccaucuacaccauccccgacaagcugggccccuggagccccaucgacauccaccaccugagcugccccaacaaccuggugguggaggacgagggcugcaccaaccugagcggcuucagcuacauggagcugaaggugggcuacaucagcgccaucaaggugaacggcuucaccugcaccggcguggugaccgaggccgagaccuacaccaacuucgugggcuacgugaccaccaccuucaagagaaagcacuucagacccacccccgacgccugcagagccgccuacaacuggaagauggccggcgaccccagauacgaggagagccugcacaaccccuaccccgacuaccacugguucagaaccgugaagaccagcaaggagagccuggugaucaucagccccagcguggccgaccuggaccccuacgacaagagccugcacagcagaguguuccccggcggcaagugcagcggcaucaccgugagcagcaccugcugcagcaccaaccacgacuacaccaucuggaugcccgagaaccccagacugggcaccagcugcgacaucuucaccaacagcagaggcaagagagccagcaagggcggcaagaccugcggcuucguggacgagagaggccuguacaagagccugaagggcgccugcaagcugaagcugugcggcgugcugggccugagacugauggacggcaccuggguggccauccagaccagcgacgagaucaaguggugcagccccgaccagcuggugaaccugcacgacuuccacagcgacgagaucgagcaccuggugguggaggagcuggugaagaagagagaggagugccuggacgcccuggagaccaucaugaccaccaagagcgugagcuucagaagacugagccaccugagaaagcuggugcccggcuucggcaaggccuacaccaucuucaacaagacccugauggaggccgacgcccacuacaagagcaucagaaccuggaacgagaucauccccagcaagggcugccugagagugggcggcagaugccacccccacgugaacggcguguucuacaacggcaucauccugggccccgacggccacgugcugauccccgagaugcagagcagccugcugcaccagcacauggagcugcuggagagcagcgugaucccccugaugcacccccuggccgaccccagcaccguguucaaggacggcgacgaggccgaggacuucguggaggugcaccugcccgacgugcacaagcagaucagcggcguggaccugggccugcccaacuggggcaaguacgugcuggugagcgccggcgcccugaccgcccugaugcugaugaucuuccugaugaccugcugcagaaagaccaacagagccgagagcauccagcacagccccggcgagaccggcagaaaggugagcgugaccagccacaacggcagagugaucagcagcugggagagcuacaagagcggcggcgagaccaagcuguga

SEQ ID NO: 190972 - RNA, 1575 nt, Artificial Sequence
  derived and/or modified CDS sequence (opt4) from glycoprotein__RABV__EU267743.1
augaucccccaggugcugcuguucgugccccugcugguguucagcagcugcuucggcaaguuccccaucuacaccaccagcgacaagcugggccccuggagccccaucgacaugcaccaccugagcugccccaacaaccuggugguggaggacgagggcugcaccaaccugagcggcuucagcuacauggagcugaaggugggcuacaucagcgccaucaaggugaacggcuucaccugcaccggcguggugaccgaggccgagaccuacaccaacuucgugggcuacgugaccaccaccuucaagagaaagcacuucagacccaugcccgacgccugcagagccgccuacaacuggaagauggccggcgaccccagauacgaggagagccugcacaaccccuaccccgacuaccacuggcugagaaccgugaagaccaccaaggagagccuggugaucaucagccccagcguggccgaccuggaccccuacgacaagagccugcacagcagaguguuccccggcggcaagugcagcggcaucaccgugagcagcaccugcugcagcaccaaccacgacuacaccaucuggaugcccgagaaccccagacugggcaccagcugcgacaucuucaccaacagcagaggcaagagagccagcaagggcggcaagaccugcggcuucguggacgagagaggccuguacaagagccugaagggcgccugcaagcugaagcugugcggcgugcugggccugagacugauggacggcaccuggguggccauccagaccagcgacgagaucaaguggugcagccccgaccagcuggugaaccugcacgacuuccacagcgacgagaucgagcaccuggugguggaggagcuggccaaggagagagaggagugccuggacgcccuggaggccaucaugaccaccaagagcgugagcuucagaagacugagccaccugagaaagcuggugcccggcuucggcaaggccuacaccaucuucaacaagacccugauggaggccgacgcccacuacaagagcaucagaaccuggaacgagaucauccccagcaagggcugccugagagugggcggcagaugccacccccacgugaacggcguguucuucaacggcaucauccugggccccgacggccacgugcugauccccgagaugcagagcagccugcugcaccagcacauggagcugcuggagagcagcgugaucccccugaugcacccccuggccgaccccagcaccguguucaaggacggcgacgaggccgaggacuucguggaggaccaccugcccgacgugcacaagcagaucagcggcguggaccugggccugcccaacuggggcaaguacgugcugaucagcgccggcgcccugaccgcccugaugagcaugaucuuccugaugaccugcugcagaaagaccaacagagccgagagcauccagcacagccccggcgagaccggcagaaaggugagcgugaccagccacaacggcagagugaucagcagcugggagagcuacaagagcggcggcgagaccaagcuguga

SEQ ID NO: 190973 - RNA, 1575 nt, Artificial Sequence
  derived and/or modified CDS sequence (opt4) from glycoprotein__RABV__EU267744.1
auggugccccaggugcugcuguucgugccccugcugguguucagcagcugcuucggcaaguuccccaucuacaccauccccgacaagcugggccccuggagccccaucgacauccaccaccugagcugccccaacaaccuggugguggaggacgagggcugcaccaaccugagcggcuucagcuacauggagcugaaggugggcuacaucagcgccaucaaggugaacggcuucaccugcaccggcguggugaccgaggccgagaccuacaccaacuucgugggcuacgugaccaccaccuucaagagaaagcacuucagacccaugcccgacgccugcagagccgccuacaacuggaagauggccggcgaccccagauacgaggagagccugcacaaccccuaccccgacuaccacuggcugagaaccgugaagaccaccaaggagagccuggugaucaucagccccagcguggccgaccuggaccccuacgacaagagccugcacagcagaguguuccccggcggcaagugcagcggcaucaccgugagcagcaccugcugcagcaccaaccacgacuacaccaucuggaugcccgagaaccccagacugggcaccagcugcgacaucuucaccaacagcagaggcaagagagccagcaagggcggcaagaccugcggcuucguggacgagagaggccuguacaagagccugaagggcgccugcaagcugaagcugugcggcgugcccggccugagacugauggacggcaccuggguggccauccagaccagcgacgagaucaaguggugcagccccgaccagcuggugaaccugcacgacuuccacagcgacgagaucgagcaccuggugguggaggagcuggugaagaagagagaggagugccuggacgcccuggagaccaucauggccaccaagagcgugagcuucagaagacugagccaccugagaaagcuggugcccggcuucggcaaggccuacaccaucuucaacaagacccugauggaggccgacgcccacuacaagagcaucagaaccuggaacgagaucauccccagcaagggcugccugagagugggcggcagaugccacccccacgugagcggcguguucuucaacggcaucauccugggccccgacggccacgugcugauccccgagaugcagagcagccugcugcaccagcacauggagcugcuggagagcagcgugaucccccugaugcacccccuggccgaccccagcaccguguucaaggacggcgacgaggccgaggacuucguggaggugcaccugcccgacgugcacaagcagaucagcggcguggaccugggccugcccaacugggagaaguacgugcugaucagcgccggcgcccugaccgcccugaugcugaugaucuuccugaugaccugcugcagaaaggccaacagagccgagagcauccagcacaaccccggcgagaccggcagaaaggugagcgugaccagccacaacggcagagugaucagcagcugggagagcuacaagagcggcggcgaggccaagcuguga

SEQ ID NO: 190974 - RNA, 1575 nt, Artificial Sequence
  derived and/or modified CDS sequence (opt4) from glycoprotein__RABV__EU267745.1
auggugccccaggcccugcuguucgugccccugcugguguucccccugugcuucggcaaguuccccaucuacaccauccccgacaagcugggccccuggagccccaucgacauccaccaccugagaugccccaacaaccuggugguggaggacgagggcugcaccaaccugagcggcuucagcuacauggagcugaaggugggcuacauccuggccaucaagaugaacggcuucaccugcaccggcguggugaccgaggccgagaccuacaccaacuucgugggcuacgugaccaccaccuucaagagaaagcacuucagacccacccccgacgccugcagagccgccuacaacuggaagauggccggcgaccccagauacgaggagagccugcacaaccccuaccccgacuacagauggcugagaaccgugaagaccaccaaggagagccuggugaucaucagccccagcguggccgaccuggaccccuacgacagaagccugcacagcagaguguuccccagcggcaagugcagcggcguggccgugagcagcaccuacugcagcaccaaccacgacuacaccaucuggaugcccgagaaccccagacugggcaugagcugcgacaucuucaccaacagcagaggcaagagagccagcaagggcagcgagaccugcggcuucguggacgagagaggccuguacaagagccugaagggcgccugcaagcugaagcugugcggcgugcugggccugagacugauggacggcaccuggguggccaugcagaccagcaacgagaccaaguggugcccccccgaccagcuggugaaccugcacgacuucagaagcgacgagaucgagcaccuggugguggaggagcuggugagaaagagagaggagugccuggacgugcuggagagcaucaugaccaccaagagcgugagcuucagaagacugagccaccugagaaagcuggugcccggcuucggcaaggccuacaccaucuucaacaagacccugauggaggccgacgcccacuacaagagcgugagaaccuggaacgagauccugcccagcaagggcugccugagagugggcggcagaugccacccccacgugagcggcguguucuucaacggcaucauccugggccccgacggcaacgugcugauccccgagaugcagagcagccugcugcagcagcacauggagcugcuggagagcagcgugaucccccuggugcacccccuggccgaccccagcaccguguucaaggacggcgacgaggccgaggacuucguggaggugcaccugcccgacgugcacaaccaggugagcggcguggaccugggccugcccaacuggggcaaguacgugcugcugagcgccggcgcccugaccgcccugaugcugaucaucuuccugaugaccugcugcagaagagugaacagaagcgagcccacccagcacaaccugagaggcaccggcagagaggugagcgugaccccccagagcggcaagaucaucagcagcugggagagccacaagagcggcggcgagaccagacuguga

SEQ ID NO: 190975 - RNA, 1575 nt, Artificial Sequence
  derived and/or modified CDS sequence (opt4) from glycoprotein__RABV__EU267746.1
auggugccccaggcccugcuguucgugccccugcuggccaucccccugugcuucggcaaguuccccaucuacaccauccccgacaagcugggccccuggagccccaucgacauccaccaccugagcugccccaacaaccuggugguggaggacgagggcugcaccaaccugagcggcuucagcuacauggagcugaaggugggcuacaucagcgccaucaaggugaacggcuucaccugcaccggcguggugaccgaggccgagaccuacaccaacuucgugggcuacgugaccaccaccuucaagagaaagcacuucagacccacccccgacgccugcagaagcgccuacaacuggaagauggccggcgaccccagauacgaggagagccugcacaaccccuaccccgacuaccacuggcugagaaccgugaagaccaccaaggagagcuucgugaucaucagccccagcguggccgaccuggaccccuacgacaagagccugcacagcagaguguuccccagaggcaagugcagcggcaucaccgugagcagcaccuacugcagcaccaaccacgacuacaccaucuggaugcccgagaaccccagacugggcaccagcugcgacaucuucaccaacagcagaggcaagagagccagcaagggcagcaagaccugcggcuucguggacgagagaggccuguacaagagccugaagggcgccugcaagcugaagcugugcggcgugcugggccugagacugauggacggcaccuggguggccauccagaccagcguggagaccaaguggugcccccccgaccagcuggugaaccugcacgacuuccacagcgacgagaucgagcaccuggugguggaggagcuggugaagaagagagaggagugccuggacgcccuggagagcaucaugaccaccaagagcgugagcuucagaagacugagccaccugagaaagcuggugcccggcuucggcaaggccuacaccaucuucaacaagacccugauggaggccgacgcccacuacaagagcgugagaaccuggaacgagaucauccccagcaagggcugccugagagugggcggcagaugccacccccacgugaacggcguguucuucaacggcaucauccugggccccgacggccacgugcugauccccgagaugcagagcagccugcugcagcagcacauggagcugcuggagagcagcgugaucccccugaugcacccccuggccgaccccagcaccguguucaaggacggcgacgaggccgaggacuucguggaggugcaccugcccgacgugcacaagcaggugagcggcguggaccugggccugcccagcuggggcaaguacgugcugaugagcgccggcauccugaccgcccugaugcugaugaucuuccugaugaccugcugcagaagaaccaacagagccgagagcauccagcacagccugggcgagaccggcagaaaggugagcgugaccagccagagcggcagagugaucagcagcugggagagcuacaagagcggcggcgagaccaagcuguga

SEQ ID NO: 190976 - RNA, 1575 nt, Artificial Sequence
  derived and/or modified CDS sequence (opt4) from glycoprotein__RABV__EU267747.1
auggugccccaggcccugcuguucgugccccugcuggccaucccccugugcuucggcaaguuccccaucuacaccauccccgacaagcugggccccuggagccccaucgacauccaccaccugagcugccccaacaaccuggugguggaggacgagggcugcaccaaccugcccggcuucagcuacauggagcugaaggugggcuacaucagcgccaucaaggugaacggcuucaccugcaccggcguggugaccgaggccgagaccuacaccaacuucgugggcuacgugaccaccaccuucaagagaaagcacuucagacccacccccgacgccugcagaagcgccuacaacuggaagauggccggcgaccccagauacgaggagagcccccacaaccccuaccccgacuaccacuggcugagaaccgugaagaccaccaaggagagcuucgugaucaucagccccagcguggccgaccuggaccccuacgacaagagccugcacagcagaguguuccccagaggcaagugcagcggcaucaccgugagcagcaccuacugcagcaccaaccacgacuacaccaucuggaugcccgagaaccccagacugggcaccagcugcgacaucuucaccaacagcagaggcaagagagccagcaagggcagcaagaccugcggcuucguggacgagagaggccuguacaagagccugaagggcgccugcaagcugaagcugugcggcgugcugggccugagacugauggacggcaccuggguggugauccagaccagcgacgagaccaaguggugcccccccgaccagcuggugaaccugcacgacuuccacagcgacgagaucgagcaccuggugguggaggagcuggugaagaagagagaggagugccuggacgcccuggagagcaucaugaccaccaagagcgugagcuucagaagacugagccaccugagaaagcuggugcccggcuucggcaaggccuacaccaucuucaacaagacccugauggaggccgacgcccacuacaagagcgugagaaccuggaacgagaucauccccagcaagggcugccugagagugggcggcagaugccacccccacgugaacggcguguucuucaacggcaucauccugggccccgacggccacgugcugauccccgagaugcagagcagccugcugcagcagcacauggagcugcuggagagcagcgugaucccccugaugcacccccuggccgaccccagcaccguguucaaggacggcgacgaggccgaggacuucguggaggugagacugcccgacgugcacaagcaggugagcggcguggaccugggccugcccagcuggggcaaguacgugcugaugagcgccggcauccugaccgcccugaugcugaugaucuuccugaugaccugcugcagaagaaccaacggcgccgagagcauccagcacagccugggcgagaccggcagaaaggugagcgugaccagccagagcggcagagugaucagcagcugggagagcuacaagagcggcggcgagaccaagcuguga

SEQ ID NO: 190977 - RNA, 1575 nt, Artificial Sequence
  derived and/or modified CDS sequence (opt4) from glycoprotein__RABV__EU267748.1
augaucccccaggugcugcuguucuucccccugcugguguucagcagcugcuucggcaaguuccccaucuacaccauccccgacaagcugggccccuggagccccaucgacauccaccaccugagcugccccaacaaccuggugguggaggacgagggcugcaccaaccugagcggcuucagcuacauggagcugaaggugggcuacaucagcgccaucaaggugaacggcuucaccugcaccggcguggugaccgaggccgagaccuacaccaacuucgugggcuacgugaccaccaccuucaagagaaagcacuucagacccaugcccgacgccugcagagccgccuacaacuggaagauggccggcgaccccagauacgaggagagccugcacaaccccuaccccgacuaccacuggcugagaaccgugaagaccaccaaggagagccuggugaucaucagccccagcguggccgaccuggaccccuacgacagaagccugcacagcagaguguuccccggcggcaagugcagcggcaucaccgugagcagcaccugcugcagcaccaaccacgacuacaccaucuggaugcccgagaaccccagacugagaaccagcugcgacaucuucaccaacagcagaggcaagagagcccccaagggcggcaagaccugcggcuucguggacgagagaggccuguacaagagccugaagggcgccugcaagcugaagcugugcggcgugcugggccugagacugauggacggcaccuggguggccauccagaccagcgacgagaucaaguggugcagccccgaccagcuggugaaccugcacgacuuccacagcgacgagaucgagcaccuggugguggaggagcuggugaagaagagagaggagugccuggacgcccuggagaccaucaugaccaccaagagcgugagcuucagaagacugagccaccugagaaagcuggugcccggcuucggcaaggccuacaccaucuucaacaagacccugauggaggccgacgcccacuacaagagcaucagaaccuggaacgagaucauccccagcaagggcugccugagagugggcggcagaugccacccccacgugaacggcguguucuucaacggcaucauccugggccccgacggccacgugcugauccccgagaugcagagcagccugcugcaccagcacauggagcugcuggagagcagcgugaucccccugaugcacccccuggccgaccccagcaccguguucaaggacggcgacgaggccgaggacuucguggaggugcaccugcccgacgugcacaagcagaucagcggcguggaccugggccugcccaacuggggcaaguacgugcugaucagcgccggcgcccugaccgcccugaugagcaugaucuuccugaugaccugcugcagaaagaccaacagagccgagagcauccagcacagccccggcgagaccggcagaaaggugagcgugaccagccacaacggcagagugaucagcagcugggagagcuacaagagcggcggcgagaccaagcuguga

SEQ ID NO: 190978 - RNA, 1575 nt, Artificial Sequence
  derived and/or modified CDS sequence (opt4) from glycoprotein__RABV__EU267749.1
auggugccccaggugcugcuguucgugccccugcugguguucagcagcugcuucggcaaguuccccaucuacaccauccccgacaagcugggccccuggagccccaucgacauccaccaccugagcugccccaacaaccuggugguggaggacgagggcugcaccaaccugagcggcuucagcuacauggagcugaaggugggcuacaucagcgccaucaaggugaacggcuucaccugcaccggcguggugaccgaggccgagaccuacaccaacuucgugggcuacgugaccaccaccuucaagagaaagcacuucagacccaugcccgacgccugcagagccgccuacaacuggaagauggccggcgaccccagauacgaggagagccugcacaaccccuaccccgacuaccacuggcugagaaccgugaagaccaccaaggagagccuggugaucaucagccccagcguggccgaccuggaccccuacgacaagagccugcacagcagaguguuccccggcggcaagugcagcggcaucaccgugagcagcaccugcugcagcaccaaccacgacuacaccaucuggaugcccgagaaccccagacugggcaccagcugcgacaucuucaccaacagcagaggcaagagagccagcaagggcggcaagaccugcggcuucguggacgagagaggccuguacaagagccugaagggcgccugcaagcugaagcugugcggcgugcugggccugagacugauggacggcaccuggguggccauccagaccagcgacgagaucaaguggugcagccccgaccagcuggugaaccugcacgacuuccacagcgacgagaucgagcaccuggugguggaggagcuggugaagaagagagaggagugccuggacgcccuggagaccaucaugaccaccaagagcgugagcuucagaagacugagccaccugagaaagcuggugcccggcuucggcaaggccuacaccaucuucaacaagacccugaugggcgccgacgcccacuacaagagcaucagaaccuggaacgagaucauccccagcaagggcugccugagagugggcggcagaugccacccccacgugaacggcguguucuucaacggcaucauccugggccccgacggccacgcccugauccccgagaugcagagcagccugcugcaccagcacauggagcugcuggagagcagcgugaucccccugaugcacccccuggccgaccccagcaccguguucaaggacggcgacgaggccgaggacuucguggaggugcaccugcccgacgugcacaagcagaucagcggcguggaccugggccugcccaacuggggcaaguacgugcugaucagcgccggcgcccugaccgcccugaugcugaugaucuuccugaugaccugcugcagaaaggccgacagagccgagagcauccagcacaaccccggcgagaccggcagaaaggugagcgugaccagcagaaacggcagagugaucagcagcugggagagcuacaagagcggcggcgagaccaagcuguga

SEQ ID NO: 190979 - RNA, 1575 nt, Artificial Sequence
  derived and/or modified CDS sequence (opt4) from glycoprotein__RABV__EU267750.1
auggugccccaggugcugcuguucgugccccugcugguguucagcagcugcuucggcaaguuccccaucuacaccauccccgacaagcugggccccuggagccccaucgacauccaccaccugagcugccccaacaaccuggugguggaggacgagggcugcaccaaccugagcggcuucagcuacauggagcugaaggugggcuacaucagcgccaucaaggugaacggcuacaccugcaccggcguggugaccgaggccgagaccuacaccaacuucgugggcuacgugaccaccaccuucaagagaaagcacuucagacccaugcccgacgccugcagagccgccuacaacuggaagauggccggcgaccccagauacgaggagagccugcacaaccccuaccccgacuaccacuggcugagaaccgugaagaccaccaaggagagccuggugaucaucagccccagcguggccgaccuggaccccuacgacaagagccugcacagcagaguguuccccggcggcaagugcagcggcaucaccgugagcagcaccugcugcagcaccaaccacgacuacaccaucuggaugcccgagaaccccagacugggcaccagcugcgacaucuucaccaacagcagaggcaagagagccagcaagggcggcaagaccugcggcuucguggacgagagaggccuguacaagagccugaagggcgccugcaagcugaagcugugcggcgugcugggccugagacugauggacggcaccuggguggccauccagaccagcgacgagaucaaguggugcagccccgaccagcuggugaaccugcacgacuuccacagcgacgagaucgagcaccuggugguggaggagcuggugaagaagggcgaggagugccuggacgcccuggagaccaucaugaccaccaagagcgugagcuucagaagacugagccaccugagaaagcuggugcccggcuucggcaaggccuacaccaucuucaacaagacccugauggaggccgacgcccacuacaagagcaucagaaccuggaacgagaucauccccagcaagggcugccugagagugggcggcagaugccacccccacgugaacggcguguucuucaacggcaucauccugggccccgacggccacgugcugauccccgagaugcagagcagccugcugcaccagcacauggagcugcuggagagcagcgugaucccccugaugcacccccuggccgaccccagcaccguguucaaggacggcgacgaggccgaggacuucguggaggugcaccugcccgacgugcacaagcagaucagcggcguggaccugggccugcccaacuggggcagauacgugcugaucagcgccggcgcccugaccgcccugaugcugaugaucuuccugaugaccugcugcagaaaggccaacagagccgagagcauccagcacaaccccgaggagaccggcagaaaggugagcgugaccagccacaacggcagagugaucagcagcugggagagcuacaagagcggcggcgagaccaagcuguga

SEQ ID NO: 190980 - RNA, 1575 nt, Artificial Sequence
  derived and/or modified CDS sequence (opt4) from glycoprotein__RABV__EU267751.1
auggugccccaggugcugcuguucgugccccugcugguguucagcagcugcuucggcaaguuccccaucuacaccauccccgacaagcugggccccuggagccccaucgacauccaccaccugggcugccccaacaaccuggugguggaggacgagggcugcaccaaccugagcggcuucagcuacauggagcugaaggugggcuacaucagcgccaucaaggugaacggcuucaccugcaccggcguggugaccgaggccgagaccuacaccaacuucgugggcuacgugaccaccaccuucaagagaaagcacuucagacccaugcccgacgccugcagagccgccuacaacuggaagauggccggcgaccccagauacgaggagagccugcacaaccccuaccccgacuaccacuggcugagaaccgugaagaccaccaaggagagccuggugaucaucagccccagcguggccgaccuggaccccuacgacaagagccugcacagcagaguguuccccggcggcaagugcagcggcaucaccgugagcagcaccugcugcagcaccaaccacgacuacaccaucuggaugcccgagaaccccagacugggcaccagcugcgacaucuucaccaacagcagaggcaagagagccagcaagggcggcaagaccugcggcuucguggacgagagaggccuguacaagagccugaagggcgccugcaagcugaagcugugcggcgugcugggccugagacugauggacagaaccuggguggccauccagaccagcgacgagaucaaguggugcagccccgaccagcuggugaaccugcacgacuuccacagcgacgagaucgagcaccuggugguggaggagcuggugaagaagagagaggagugccuggacgcccuggagaccaucaugaccaccaagagcgugagcuucagaagacugagccaccugagaaagcuggugcccggcuucggcaaggccuacaccaucuucaacaagacccugauggaggccgacgcccacuacaagagcaucagaaccuggaacgagaucauccccagcaagggcugccugagagugggcggcagaugccacccccacgugaacggcguguucuucaacggcaucauccugggccccgacggccacgugcugauccccgagaugcagagcagccugcugcaccagcacauggagcugcuggagagcagcgugaucccccugaugcacccccuggccgaccccagcaccguguucaaggacggcgacgaggccgaggacuucguggaggugcaccugcccgacgugcacaagcagaucagcggcguggaccugggccugcccaacuggggcaaguacgugcugaucagcgccggcgcccugaccgcccugaugcugaugauccugcugaugaccugcugcagaaaggccaacagagccgagagcauccagcacaaccccggcgagaccggcagaaaggugagcgugaccagccacaacggcagagugaucagcagcugggagagcuacaagagcggcggcgagaccaagcuguga

SEQ ID NO: 190981 - RNA, 1575 nt, Artificial Sequence
  derived and/or modified CDS sequence (opt4) from glycoprotein__RABV__EU267752.1
augaucccccaggugcugcuguucgugccccugcugguguucagcagcugcuucggcaaguuccccaucuacaccauccccgacaagcugggccccuggagccccaucuucauccacccccugcugagacccaacaaccuggugguggaggacgagggcugcaccaaccugagcggcuucagcuacauggagcugaaggugggcuacaucagcgccaucaaggugaacggcuucaccugcaccggcguggugaccgaggccgagaccuacaccaacuucgugggcuacgugaccaccaccuucaagagaaagcacuucagacccaugcccgacgccugcagagccgccuacaacuggaagauggccggcgaccccagauacgaggagagccugcacaaccccuaccccgacuaccacuggcugagaaccgugaagaccaccaaggagagccuggugaucaucagccccagcguggccgaccuggaccccuacgacaagagccugcacagcagaguguuccccggcggcaagugcagcggcaucaccgugagcagcaccugcugcagcaccaaccacgacuacaccaucuggaugcccgagaaccccagacugggcaccagcugcgacaucuucaccaacagcagaggcaagagagccagcaagggcggcaagaccugcggcuucguggacgagagaggccuguacaagagccugaagggcgccugcaagcugaagcugugcggcgugcugggccugagacugauggacggcaccuggguggccauccagaccagcgacgagaucaaguggugcagccccgaccagcuggugaaccugcacgacuuccacagcgacgagaucgagcaccuggugguggaggagcuggugaagaagagagaggagugccuggacgcccuggagaccaucaugaccaccaagagcgugagcuucagaagacugagccaccugagaaagcuggugcccggcuucggcaaggccuacaccaucuucaacaagacccugauggaggccgacgcccacuacaagagcaucagaaccuggaacgagaucauccccagcaagggcugccugagagugggcggcagaugccacccccacgugaacggcguguucuucaacggcaucauccugggccccgacggccacgugcugauccccgagaugcagagcagccugcugcaccagcacauggagcugcuggagagcagcgugaucccccugaugcacccccuggccgaccccagcaccguguucaaggacggcgacgaggccgaggacuucguggaggugcaccugcccgacgugcacaagcagaucagcggcguggaccugggccugcccaacuggggcaaguacgugcugaucagcgccggcgcccugaccgcccugaugcugaccaucuuccugaugaccugcugcagaaagaccaacagagccggcagcauccagcacagccccggcgagaccggcagaaaggugagcgugaccagccacaacggcagagugaucagcagcugggagagcuacaagagcggcagcgagaccaagcuguga

SEQ ID NO: 190982 - RNA, 1575 nt, Artificial Sequence
  derived and/or modified CDS sequence (opt4) from glycoprotein__RABV__EU267753.1
augaucccccaggugcugcuguucgugccccugcugguguucagcagcugcuucggcaaguuccccaucuacaccauccccgacaagcugggccccuggagccccaucgacauccaccaccugagcugccccaacaaccuggugguggaggacgagggcugcaccaaccugagcggcuucagcuacauggagcugaaggugggcuacaucagcgccaucaaggugaacggcuucaccugcaccggcguggugaccgaggccgagaccuacaccaacuucgugggcuacgugaccaccaccuucaagagaaagcacuucagacccacccccgacgccugcagagccgccuacaacuggaagauggccggcgaccccagauacgaggagagccugcacaaccccuaccccgacuaccacuggcugagaaccgugaagaccagcaaggagagccuggugaucaucagccccagcguggccgaccuggaccccuacgacaagagccugcacagcagaguguuccccggcggcaagugcagcggcaucaccgugagcagcaccugcugcagcaccaaccacgacuacaccaucuggaugcccgagaaccccagacugggcaccagcugcgacaucuucaccaacagcagaggcaagagagccagcaagggcggcaagaccugcggcuucguggacgagagaggccuguacaagagccugaagggcgccugcaagcugaagcugugcggcgugcugggccugagacugauggacggcaccuggguggccauccagaccagcgacgagaucaaguggugcagccccgaccagcuggugaaccugcacgacuuccacagcgacgagaucgagcaccuggugguggaggagcuggugaagaagagagaggagugccuggacgcccuggagaccaucaugaccaccaagagcgugagcuucagaagacugagccaccugagaaagcuggugcccggcuucggcaaggccuacaccaucuucaacaagacccugauggaggccgacgcccacuacaagagcaucagaaccuggaacgagaucauccccagcaagggcugcuucagagugggcggcagaugccacccccacgugaacggcguguucuucagcggcaucauccugggccccgacggccacgugcugauccccgagaugcagagcagccugcugcaccagcacauggagcugcuggagagcagcgugaucccccugaugcacccccuggccgaccccagcaccguguucaaggacggcgacgaggccgaggacuucguggaggugcaccugcccgacgugcacaagcagaucagcggcguggaccugggccugcccaacuggggcaaguacgugcuggugggcgccggcgcccugaccgcccugaugcugaugaucuuccugaugaccugcugcagaaagaccaacagagccgagagcauccagcacagccccggcgagaccggcagaaaggugagcgugaccagccacaacggcagagugaucagcagcugggagagcuacaagagcggcggcgagaccaagcuguga

SEQ ID NO: 190983 - RNA, 1575 nt, Artificial Sequence
  derived and/or modified CDS sequence (opt4) from glycoprotein__RABV__EU267754.1
augaucccccaggugcugcuguucgugccccugcugguguucagcagcugcuucggcaaguuccccaucuacaccauccccgacagacugggccccuggagccccaucgacauccaccaccugagcugccccaacaacauggugguggaggacgagggcugcaccaaccugagcggcuucagcuacauggagcugaaggugggcuacaucagcgccaucaaggugaacggcuucaccugcaccggcguggugaccgaggccgagaccuacaccaacuucgugggcuacgugaccaccaccuucaagagaaagcacuucagacccaugcccgacgccugcagagccgccuacaacuggaagauggccggcgaccccagauacgaggagagccugcacaaccccuaccccgacuaccacuggcugagaaccgugaagaccaccaaggagagccuggugaucaucagccccagcguggccgaccuggaccccuacgacaagagccugcacagcagaguguuccccggcggcaagugcagcggcaucaccgugagcagcaccugcugcagcaccaaccacgacuacaccaucuggaugcccgagaaccccagacugggcaccagcugcgacaucuucaccaacagcagaggcaagagagccagcaagggcggcaagaccugcggcuucguggacgagagaggccuguacaagagccugaagggcgccugcaagcugagacugugcggcgugcugggccugagacugauggacggcaccuggguggccauccagaccagcgacgagaucaaguggugcagccccgaccagcuggugaaccugcacgacuuccacagcgacgagaucgagcaccugguggccgaggagcuggugaagaagagagaggagugccuggacgcccuggagaccaucaugaccaccaagagcgugagcuucagaagacugagccaccugagaaagcuggugcccggcuucggcaaggccuacaccaucuucaacaagacccugauggaggccgacgcccacuacaagagcaucagaaccuggaacgagaucauccccagcaagggcugccugagagugggcggcagaugccacccccacgugaacggcguguucuucaacggcaucauccugggccccgacggccacgugcugauccccgagaugcagagcagccugcugcaccagcacauggagcugcuggagagcagcgugaucccccugaugcacccccuggccgaccccagcaccguguucaaggacggcgacgaggccgaggacuucguggaggugcaccugcccgacgugcacaagcagaucagcggcguggaccugggccugcccaacuggggcaaguacgugcugaucagcgccggcgcccugaccgcccugaugcugaccaucuuccugaugaccugcugcagaaagaccagcagagccgagagcauccagcacagccccggcgagaccggcagaaaggugagcgugaccagccacaacggcagagugaucagcagcugggagagcuacaagagcggcggcgagaccaagcuguga

SEQ ID NO: 190984 - RNA, 1575 nt, Artificial Sequence
  derived and/or modified CDS sequence (opt4) from glycoprotein__RABV__EU267755.1
augaucccccaggugcugcuguucgugccccugcugguguucagcagcugcuucggcaaguuccccaucuacaccauccccgacaagcugggccccuggagccccaucgacauccaccaccugagcugccccaacaaccuggugguggaggacgagggcugcaccaaccugagcggcuucagcuacauggagcugaaggugggcuacaucagcgccaucaaggugaacggcuucaccugcaccggcguggugaccgaggccgagaccuacaccaacuucgugggcuacgugaccaccaccuucaagagaaagcacuucagacccacccccgacgccugcagagccgccuacaacuggaagauggccggcgaccccagauacgaggagagccugcacagccccuaccccgacuaccacuggcccagaaccgugaagaccagcaaggagagccuggugaucaucagccccggcguggccgaccuggaccccuacgacaagagccugcacagcagaguguuccccggcggcaagugcagcggcaucaccgugagcagcaccugcugcagcaccaaccacgacuacaccaucuggaugcccgagaaccccagacugggcaccagcugcgacaucuucaccaacagcagaggcaagagagccagcaagggcggcaagaccugcggcuucguggacgagagaggccuguacaagagccugaagggcgccugcaagcugaagcugugcggcgugcugggccugagacugauggacggcaccuggguggccauccagaccagcgacgagaucgaguggugcagccccgaccagcuggugaaccugcacgacuuccacagcgacgagaucgagcaccuggugguggaggaguucgugaagaagagagaggagugccuggacgcccuggagaccaucaugaccaccaagagcgugagcuucagaagacugagccaccugagaaagcuggugcccggcuucggcaaggccuacaccaucuucaacaagacccugauggaggccgacgcccacuacaagagcaucagaaccuggaacgagaucauccccagcaagggcugccugagagugggcggcagaugccacccccacguguacggcguguucuucaacggcaucauccugggccccgacggccacgugcugauccccgagaugcagagcagccugcugagacagcacauggagcugcuggagagcagcgugaucccccugaugcacccccuggccgaccccagcaccguguucaaggacggcgacgaggccgaggacuucguggaggugcaccugcccgacgugcacaagcagaucagcggcguggaccccggccugcccaacuggggcaaguacgugcuggugagcgccggcgcccugaccgcccugaugcugaugaucuuccugaccaccugcugcagaaagaccaacagagccgagagcauccagcacagccccggcgagaccggcagaaaggugagcgugaccagccacaacggcagagugaucagcagcugggagagcuacaagagcggcggcgagaccaagcuguga

SEQ ID NO: 190985 - RNA, 1575 nt, Artificial Sequence
  derived and/or modified CDS sequence (opt4) from glycoprotein__RABV__EU267756.1
augaucccccaggugcugcuguucgugccccugcugguguucagccugugcuucggcaaguuccccaucuacaccauccccgacaagcugggccccuggagccccaucgacauccugcaccugagcugccccaacaaccuggugguggaggacgagggcugcaccgaccugagcggcuucagcuacauggagcugaaggugggcuacaucagcgccaucaaggugaacggcuucaccugcaccggcguggugaccgaggccgagaccuacaccaacuucgugggcuacgugaccaccaccuucaagagaaagcacuucagacccacccccgacgccugcagagccgccuacaacuggaagauggccggcgaccccagauacgaggagagccugcacaaccccuaccccgacuaccacuggcugagaaccgugaagaccagcaaggagagccuggugaucaucagccccagcgacgccgaccuggaccccuacgacaagagccugcacagcagaguguuccccggcggcaagugcagcggcaucaccgugagcagcaccugcugcagcaccaaccacgacuacaccaucuggaugcccgagaaccccagacugggcaccagcugcgacaucuucaccaacagcagaggcaagagagccagcaagggcggcaagaccugcggcuucguggacgagagaggccuguacaagagccugaagggcgccugcaagcugaagcugugcggcgugcugggccugagacugauggacggcaccuggguggccauccagaccagcgacgagaucaaguggugcagccccgaccagcuggugaaccugcacgacuuccacagcgacgagaucgagcaccuggugguggaggagcuggugaagaagagagaggagugccuggacgcccuggagaccaucaugaccaccaagagcgugagcuucagaagacugagccaccugagaaagcuggugcccggcuucggcaaggccuacaccaucuucaacaagacccugauggaggccgacgcccacuacaagagcaucagaaccuggaacgagaucauccccagcaagggcugccugagagugggcggcagaugccacccccacgugaacggcguguucuucaacggcaucauccugggccccgacggccacgugcugauccccgagaugcagagcagccugcugcaccagcacauggagcugcuggagagcagcgugaucccccugaugcacccccuggccgaccccagcaccguguucaaggacggcgacgaggccgaggacuucguggaggugcaccugcccgacgugcacaagcagaucagcggcguggaccugggccugcccaacuggggcaaguacgugcuggugagcgccggcgcccugaccgcccugaugcugaugaucuuccugaugaccugcugcagaaagaccaacagagccgagagcauccagcacagccccggcgagaccggcagaaaggugagcgugaccagccacaacggcagagugaucagcagcugggagagcuacaagagcggcggcgagaccaagcuguga

SEQ ID NO: 190986 - RNA, 1575 nt, Artificial Sequence
  derived and/or modified CDS sequence (opt4) from glycoprotein__RABV__EU267757.1
augaucccccaggugcugcuguucgugccccugcugguguucagcagcugccugggcaaguuccccaucuacaccauccccgacaagcugggccccuggagccccaucgacauccaccaccugagcugccccaacaaccuggugguggaggacgagggcugcaccaaccugagcggcuucagcuacauggagcugaaggugggcuacaucagcgccaucaaggugaacggcuucaccugcaccggcguggugaccgaggccgagaccuacaccaacuucgugggcuacgugaccaccaccuucaagagaaagcacuucagacccacccccgacgccugcagagccgccuacaacuggaagauggccggcgaccccagauacgaggagagccugcacaaccccuaccccgacuaccacuggcugagaaccgugaagaccagcaaggagagccuggugaucaucagccccagcguggccgaccuggaccccuacgacaagagccugcacagcagaguguuccccggcggcaagugcagcggcaucaccgugagcagcaccugcugcagcaccaaccacgacuacaccaucuggaugcccgagaaccccagacugggcaccagcugcgacaucuucaccaacagcagaggcaagagagccagcaagggcggcaagaccugcggcuucguggacgagagaggccuguacaagagccugaagggcgccugcaagcugaagcugugcggcgugcugggccugagacugauggacggcaccuggguggccauccagaccagcgacgagaucaaguggugcagccccgaccagcuggugaaccugcacgacuuccacagcgacgagaucgagcaccuggugguggaggagcugguggagaagagagaggagugccuggacgcccugggcaccaucaugaccaccaagagcgugagcuucggcagacugagccaccugagaaagcuggugcccggcuucggcaaggccuacaccaucuucaacaagacccugauggaggccgacgcccacuacaagagcaucagaaccuggaacgagaucauccccagcaagggcugccugagagugggcggcagaugccacccccacgugaacggcguguucuucaacggcaucauccugggccccgacagacacgugcugauccccgagaugcagagcagccugcugcaccagcacauggagcugcuggagagcagcgugaucccccugaugcacccccuggccgaccccagcaccguguucaaggacggcgacgaggccgaggacuucguggaggugcaccugcccgacgugcacaagcagaucagcggcguggaccugggccugcccaacuggggcaaguacgugcuggugagcgccggcgcccugaccgcccugaugcugaugaucuuccugaugaccugcugcagaaagaccaacagagccgagagcauccagcacagccccggcgagaccggcagaaaggugagcgugaccagccacaacggcagagugaucagcagcugggagagcuacaagagcggcggcgagaccaagcuguga

SEQ ID NO: 190987 - RNA, 1575 nt, Artificial Sequence
  derived and/or modified CDS sequence (opt4) from glycoprotein__RABV__EU267758.1
augaucccccaggugcugcuguucgugccccugcugguguucagcagcugcuucggcaaguuccccaucuacaccauccccgacaagcugggccccuggauccccaucgacauccaccaccugagcugccccaacaaccuggugguggaggacgagggcugcaccaaccugagcggcuucagcuacauggagcugaaggugggcuacaucagcgccaucaaggugaacggcuucaccugcaccggcguggugaccgaggccgagaccuacaccaacuucgugggcuacgugaccaccaccuucaagagaaagcacuucagacccaugcccgacgugugcagagccgccuacaacuggaagauggccggcgaccccagauacgaggagagccugcacaaccccuaccccgacuaccacuggcugagaaccgugaagaccaccaaggagagccuggugaucaucagccccagcguggccgaccuggaccccuacgacaagagccugcacagcagaguguuccccggcggcaagugcagcggcaucaccgugagcagcaccugcugcagcaccaaccacgacuacaccaucuggaugcccgagaaccccagacugggcaccagcugcgacaucuucaccaacagcagaggcaagagagccagcaagggcggcaagaccugcggcuucguggacgagagaggccuguacaagagccugaagggcgccugcagacugaagcugugcggcgugcugggccugagacugauggacggcaccuggguggccauccagaccagcgacgagaucaaguggugcagccccgaccagcuggugaaccugcacgacuuccacagcgacgagaucgagcaccuggugguggaggagcuggugaagaagagaggcgagugccuggacgcccuggagaccaucaugaccaccaagagcgugagcuucagaagacugagccaccugagaaagcuggugcccagauucggcaaggccuacaccaucuucaacaagacccugauggaggccgacgcccacuacaagagcaucagaaccuggaacgagaucauccccagcaagggcugccugagagugggcggcagaugcagaccccacgugaacggcguguucuucaacggcaucauccugggccccgacggccacgugcugauccccgagaugcagagcagccugcugcaccagcacauggagcugcuggagagcagcgugaucccccugaugcacccccuggccgaccccagcaccguguucaaggacggcgacgaggccgaggacuucguggagguguaccugcccgacgugcacaagcagaucagcggcguggaccugggccugcccaacuggggcaaguacgugcugaucagcgccggcgcccugaccgcccugaugagcaugaucuuccugaugaccugcugcagaaagaccaacagagccgagagcauccagcacagccccggcgagaccggcagaaaggugagcgugaccagccacaacggcagagacaucuucagcugggagagcuacaagagcggcggcgagaccaagcuguga

SEQ ID NO: 190988 - RNA, 1575 nt, Artificial Sequence
  derived and/or modified CDS sequence (opt4) from glycoprotein__RABV__EU267759.1
augaucccccaggugcugcuguucgugccccugcugguguucagcagcugcuucggcaaguuccccaucuacaccauccccgacaagcugggccccuggagccccaucgacauccaccaccugagcugccccaacaaccuggugguggaggacgagggcugcaccaaccugagcggcuucagcuacauggagcugaaggugggcuacaucagcgccaucaaggugaacggcuucaccugcaccggcguggugaccgaggccgagaccuacaccaacuucgugggcuacgugaccaccaccuucaagagaaagcacuucagacccacccccgacgccugcagagccgccuacaacuggaagauggccggcgaccccagauacgaggagagccugcacaaccccuaccccgacuaccacuggcugagaaccguggagaccagcaaggagagccuggugaucaucagccccagcguggccgaccuggaccccuacgacaagagccugcacagcagaguguuccccggcggcaagugcagcggcaucaccgugagcagcaccugcugcagcaccaaccacgacuacaccaucuggaugcccgagaaccccagacugggcaccagcugcgacaucuucaccaacagcagaggcaagagagccagcaagggcggcaagaccugcggcuucguggacgagagaggccuguacaagagccugaagggcgccugcaagcugaagcugugcggcgugcugggccugagacugauggacggcaccuggguggccauccagaccagcgacgagaucaaguggugcagccccgaccagcuggugaaccugcacggcuuccacagcgacgagaucgagcaccuggugguggaggagcuggugaagaagagagaggagugccuggacgcccuggagaccaucaugaccaccaagagcgugagcuucagaagacugagccaccugagaaagcuggugcccggcuucggcaaggccuacaccaucuucaacaagacccugauggaggccgacgcccacuacaagagcaucagaaccuggaacgagaucauccccagcaagggcugccugagagugggcggcagaugccacccccacgugaacggcguguucuucaacggcaucauccugggccccgacggccacgugcugauccccgagaugcagagcagccugcugcaccagcacauggagcugcuggagagcagcgugaucccccugaugcacccccuggccgaccccagcaccguguucaaggacggcgacgaggccgaggacuucguggaggugcaccugcccgacgugcacaagcagaucagcggcguggaccugggccugcccaacuggggcaaguacgugcuggugagcgccggcgcccugaccgcccugaugcugaugaucuuccugaugaccugcugcagaaagaccaacagagccgagagcauccagcacagccccggcgagaccggcagaaaggugagcgugaccagccacaacggcagagugaucagcagcugggagagcuacaagagcggcggcgagaccaagcuguga

SEQ ID NO: 190989 - RNA, 1575 nt, Artificial Sequence
  derived and/or modified CDS sequence (opt4) from glycoprotein__RABV__EU267760.1
augaucccccaggugcugcuguucgugccccugcugguguucagcagcugcuucggcaaguuccccaucuacaccauccccgacaagcugggccccuggagccccaucgacauccaccaccugagcugccccaacaaccuggugguggaggacgagggcugcaccaaccugagcggcuucagcuacauggagcugaaggugggcuacaucagcgccaucaaggugaacggcuucaccugcaccggcguggugaccguggccgagaccuacaccaacuucgugggcuacgugaccaccaccuucaagagaaagcacuucagacccaugcccgacgccugcagagccgccuacaacuggaagauggccggcgaccccagauacgaggagagccugcacaacagcuaccccgacuaccacuggcugagaaccgugaagacccccaaggagagccuggugaucaucagccccagcguggccgaccuggaccccuacgacaagagccugcacagcagaguguuccccggcggcaagugcagcggcaucaccgugagcagcaccugcugcagcaccaaccacgacuacaccaucuggaugcccgagaaccccagacugggcaccagcugcgacaucuucaccaacagcagaggcaagagagccagcaagggcggcaagaccugcggcuucguggacgagagaggccuguacaagagccugaagggcgccugcaagcugaagcugugcggcgugcugggccugagacugauggacggcaccuggguggccauccagaccagcgacgagaucaaguggugcagccccgaccagcuggugaaccugcacgacuuccacagcgacgagaucgagcaccuggugguggaggagcuggugaagaagagagaggagugccuggacgcccuggagaccaucaugaccaccaagagcgugagcuucagaagacugagccaccugagaaagcuggugcccggcuucggcaaggccuacaccaucuucaacaagacccugauggaggccgacgcccacuacaagagcaucagaaccuggaacgagaucauccccagcaagggcugccugagagugggcggcagaugccacccccacgugaacggcguguucuucaacggcaucauccugggccccgacggccacgugcugauccccgagaugcagagcagccugcugcaccagcacauggagcugcuggagagcagcgugaucccccugaugcacccccuggccgaccccagcaccguguucaaggacggcgacgaggccgaggacuucguggaggugcaccugcccgacgugcacaagcagaucagcggcguggaccugggccugcccaacuggggcaaguacgugcugaucagcgccggcgcccugaccgcccugaugcugaugaucuuccugaugaccugcugcagaaagaccaacagagccgagagcauccagcacagccccggcgagaccggcagaaaggugagcgugaccagccacaacggcagagugaucagcagcugggagcccuacaagagcggcggcgagaccaagcuguga

SEQ ID NO: 190990 - RNA, 1575 nt, Artificial Sequence; identical to SEQ ID NO: 190903
  derived and/or modified CDS sequence (opt4) from glycoprotein__RABV__EU267761.1

SEQ ID NO: 190991 - RNA, 1575 nt, Artificial Sequence; identical to SEQ ID NO: 190899
  derived and/or modified CDS sequence (opt4) from glycoprotein__RABV__EU267762.1

SEQ ID NO: 190992 - RNA, 1575 nt, Artificial Sequence
  derived and/or modified CDS sequence (opt4) from glycoprotein__RABV__EU267763.1
augaucccccaggugcugcuguucgugccccugcugguguucagcagcugcuucggcaaguuccccaucuacaccauccccgacaagcugggccccuggagccccaucgacauccaccaccugagcugccccaacaaccuggugguggaggacgagggcugcaccaaccugagcggcuucagcuacauggagcugaaggugggcuacaucagcgccaucaaggugaacggcuucaccugcaccggcguggugaccgaggccgagaccuacaccaacuucgugggcuacgugaccaccacccugaagagaaagcacuucagacccaugcccgacgccugcagagccgccuacaacuggaagaucgccggcgaccccagauacgaggagagccugcacaaccccuaccccgacuaccacagacugagaaccgugaagaccaccaaggagagccuggugaucaucagccccagcguggccgaccuggaccccuacgacaagagccugcacagcagaguguuccccggcggcaagugcagcggcaucaccgugagcagcaccugcugcagcaccaaccacgacuacaccaucuggaugcccgagaaccccagacugggcaccagcugcgacaucuucaccaacagcagaggcaagagagccagcaagggcggcaagaccugcggcuucguggacgagagaggccuguacaagagccugaagggcgccugcaagcugaagcugugcggcgugcugggccugagacugauggacggcaccuggguggccauccagaccagcgacgagaucaaguggugcagccccgaccagcuggugaaccugcacgacuuccacagcgacgagaucgagcaccuggugguggaggagcuggugaagaugagagaggagugccuggacgcccuggagaccaucaugaccaccaagagcgugagcuucagaagacugagccaccugagaaagcuggugcccggcuucggcaaggccuacaccaucuucaacaagacccugauggaggccgacgcccacuacaagagcaucagaaccuggaacgagaucauccccagcaagggcugccugagagugggcggcagaugccacccccacgugaacggcguguucuucaacggcaucauccugggccccgacggccacgugcugauccccgagaugcagagcagccugcugcaccagcacauggagcugcuggagagcagcgugaucccccugaugcacccccuggccgaccccagcaccguguucaaggacggcgacgaggccgaggacuucguggaggugcaccugcccgacgugcacaagcagaucagcggcguggaccugggccugcccaacuggggcaaguacgugcugaucagcgccggcgcccugaccgcccugaugagcaugaucuuccugaugaccugcugcagaaagaccaacagagccgagagcauccagcacagccccggcgagaccggcagaaaggugagcgugaccagccacaacggcagagugaucagcagcugggagagcuacaagagcggcggcgagaccaagcuguga

SEQ ID NO: 190993 - RNA, 1575 nt, Artificial Sequence
  derived and/or modified CDS sequence (opt4) from glycoprotein__RABV__EU267764.1
augaucccccaggugcugcuguucgugccccugcuggugagcagcagcugcuucggcaaguuccccaucuacaccauccccgacaagcugggccccuggagccccaucgacauccaccaccugagcugccccaacaaccuggugguggaggacgagggcugcaccagccugagcggcuucagcuacauggagcugaaggugggcuacaucagcgccaucaaggugaacggcuucaccugcaccggcguggugaccgaggccgagaccuacaccaacuucgugggcuacgugaccaccaccuucaagagaaagcacuucagacccaugcccgacgccugcagagccgccuacaacuggaagauggccggcgaccccagauacgaggagagccugcacaaccccuaccccgacuaccacuggcugagaaccgugaagaccaccaaggagagccuggugaucaucagccccagcguggccgaccuggaccccuacgacaagagccugcacagcagaguguuccccggcggcaagugcagcggcaucaccgugagcagcaccugcugcagcaccaaccacgacuacaccaucuggaugcccgagaaccccagacugggcaccagcugcgacguguucaccaacagcagaggcaagagagccagcaagggcggcaagaccugcggcuucguggacgagagaggccuguacaagagccugaagggcgccugcaagcugaagcugugcggcgugcugggccugagacugauggacggcaccuggguggccauccagaccagcgacggcaucaaguggugcagccccgaccagcuggugaaccugcacgacuuccacagcgacgagaucgagcaccuggugguggaggagcuggugaagaagagagaggagugccuggacgcccuggagaccaucaugaccaccaagagcgugagcuucagaagacugagccaccugagaaagcuggugcccggcuucggcaaggccuacaccaucuucaacaagacccugauggaggccgacgcccacuacaagagcaucagaaccuggaacgagaucauccccagcaagggcugccugagagugggcggcagaugccacccccacgugaacggcguguucuucaacggcaucauccugggccccgacggccacgugcugauccccgagaugcagagcagccugcugcaccagcacauggagcugcuggagagcagcgugaucccccugaugcacccccuggccgaccccagcaccguguucaaggacggcgacgaggccgaggacuucguggaggugcaccugcccgacgugcacaagcagaucagcggcguggaccugggccugcccaacuggggcaaguacgugcugaucagcgccggcgcccugaccgcccugaugagcaugaucuuccugaugaccugcugcagaaagaccaacagagccgagagcauccagcacagccccggcgagaccggcagaaaggugagcgugaccagccacaacggcagagugaucagcagcugggagagcuacaagagcggcggcgagaccaagcuguga

SEQ ID NO: 190994 - RNA, 1575 nt, Artificial Sequence
  derived and/or modified CDS sequence (opt4) from glycoprotein__RABV__EU267765.1
augaucccccaggugcugcuguucgugccccugcugguguucagcagcugcuucuggaaguuccccaucuacaccauccccgacaagcugggccccuggagccccaucgacauccaccaccugagcugccccagcaaccuggugguggaggacgagggcugcaccaaccuguucggcuucagcuacauggagcugaaggugggcuacaucagcgccaucaaggugaacggcuucaccugcaccggcguggugaccgaggccgagaccuacaccaacuucgugggcuacgugaccaccaccuucaagagaaagcacuucagacccaugcccgacgccugcagagccgccuacaacuggaagauggccggcgaccccagauacgaggagagccugcacaaccccuaccccgacuaccacuggcugagaaccgugaagaccaccaaggagagccuggugaucaucagccccagcguggccgaccuggaccccuacgacaagagccugcacagcagaguguuccccggcggcaagugcagcggcaucaccgugagcagcaccugcugcagcaccaaccacgacuacaccaucuggaugcccgagaaccccagacugggcaccagcugcgacaucuucaccaacagcagaggcaagagagccagcaagggcggcaagaccugcggcuucguggacgagagaggccuguacaagagccugaagggcgccugcaagcugaagcugugcggcgugcugggccugagacugauggacggcaccuggguggccauccagaccagcgacgagaucaaguggugcagccccgaccagcuggugaaccugcacgacuuccacagcgacgagaucgagcaccuggugguggaggagcuggugaagaagagagaggagugccuggacgcccuggagaccaucaugaccaccaagagcgugagcuucagaagacugagccaccugagaaagcuggugcccggcuucggcaaggccuacaccaucuucaacaagacccugauggaggccgacgcccacuacaagagcaucagaaccuggaacgagaucauccccagcaagggcugccugagagugggcggcagaugccacccccacgugaacggcguguucuucaacggcaucauccugggccccgacggccacgugcugauccccgagaugcagagcagccugcugcaccagcacauggagcugcuggagagcagcgugaucccccugaugcacccccuggccgaccccagcaccguguucaaggacggcgacgaggccgaggacuucguggaggugcaccugcccgacgugcacaagcagaucagcggcguggaccugggccugcccaacuggggcaaguacgugcugaucagcgccggcgcccugaccgcccugaugagcaugaucuuccugaugaccugcugcagaaagaccaucagagccgagagcauccagcacagccccggcgagaccggcagaaaggugagcgugaccagccacaacggcagagugaucagcagcugggagagcuacaagagcggcggcgagaccaagcuguga

SEQ ID NO: 190995 - RNA, 1575 nt, Artificial Sequence
  derived and/or modified CDS sequence (opt4) from glycoprotein__RABV__EU267766.1
augaucccccaggugcugcuguucgugccccugcugguguucagcagcugcuucggcaaguuccccaucuacaccauccccgacaagcugggccccuggagccccaucgacauccaccaccugagcugccccaacaaccuggugguggaggacgacggcugcaccaaccugagcggccugagcuacauggagcugaaggugggcuacaucagcgccaucaaggugaacggcuucaccugcaccggcguggugaccgaggccgagaccuacaccaacuucgugggcuacgugaccaccaccuucaagagaaagcacuucagacccaugcccgacgccugcagagccgccuacaacuggaagaucgccggcgaccccagauacgaggagagccugcacaaccccuaccccgacuaccacuggcugagaaccgugaagaccaccaaggagagccccgugaucaucagccccagcguggccgaccuggaccccuacgacaagagccugcacagcagaguguuccccggcggcaagugcagcggcaucaccgugagcagcaccugcugcagcaccaaccacgacuacaccaucuggaugcccgagaaccccagacugggcaccagcugcgacaucuucaccaacagcagaggcaagagagccagcaagggcggcaagaccugcggcuucguggacgagagaggccuguacaagagccugaagggcgccugcaagcugaagcugugcggcgugcugggccugaagcugauggacggcaccuggguggccauccagaccagcgacgagaucaaguggugcagccccgaccagcuggugaaccugcacgacuuccacagcgacgagaucgagcaccuggugguggaggagcuggugaagaagagagaggagugccuggacgcccuggagaccaucaugaccaccaagagcgugagcuucagaagacugagccaccugagaaagcuggugcccggcuucggcaaggccuacaccaucuucaacaagacccugauggaggccgacgcccacuacaagagcaucagaaccuggaacgagaucauccccagcaagggcugccugagagugggcggcagaugccacccccacgugaacggcguguucuucaacggcaucauccugggccccgacggccacgugcugauccccgagaugcagagcagccugcugcaccagcacauggagcugcuggagagcagcgugaucccccugaugcacccccuggccgaccccagcaccguguucaaggacggcgacgaggccgaggacuucguggaggugcaccugcccgacgugcacaagcagaucagcggcguggaccugggccugcccaacuggggcaaguacgugcugaucagcgccggcgcccugaccgcccugaugagcaugaucuuccugaugaccugcugcagaaagaccaacagagccgagagcauccagcacagccccggcgagaccggcagaaaggugagcgugaccagccacaacggcagagugaucagcagcugggagagcuacaagagcggcggcgagaccaagcuguga

SEQ ID NO: 190996 - RNA, 1575 nt, Artificial Sequence
  derived and/or modified CDS sequence (opt4) from glycoprotein__RABV__EU267767.1
augaccccccaggugcugcuguucgugccccugcugguguucagcagcugcuucggcagauuccccaucuacaccauccccgacaagcugggccccuggagccccaucgacauccaccaccugagcugccccaacaaccuggugguggaggacgagggcugcaccaaccugagcggcuucagcugcauggagcugaaggugggcuacaucagcgccaucaaggugaacggcuucaccugcaccggcguggugaccgaggccgagaccuacaccaacuucgugggcuacgugaccaccaccuucaagagaaagcacuucagacccaugcccgacgccugcagagccgccuacaacuggaagauggccggcgaccccagauacgaggagagccugcacaaccccuaccccgacuaccacuggcugagaaccgugaagaccaccaaggagagccuggugaucaucagccccagcguggccgaccuggaccccuacgacaagagccugcacagcagaguguuccccggcggcaagugcagcggcaucaccgugagcagcaccagaugcagcaccaaccacgacuacaccaucuggaugcccgagaaccccagacugggcaccagcugcgacaucuucaccaacagcagaggcaagagagccagcaagggcggcaagaccugcggcuucguggacgagagaggccuguacaagagccugaagggcgccugcaagcugaagcugugcggcgugcuggagcugagacugauggacggcaccugggccgccauccagaccagcgacgagaucaaguggugcagccccgaccagcuggugaaccugcacgacuuccacagcgacgagaucgaccaccuggugguggaggagcuggugaagaagagagaggagugccuggacgcccuggagaccaucaugaccaccaagagcgugagcuucagaagacugagccaccugagaaagcuggugcccggcuucggcaaggccuacaccaucuucaacaagacccugauggaggccgacgcccacuacaagagcaucagaaccuggaacgagaucauccccagcaagggcugccugagagugggcggcagaugccacccccacgugaacggcguguucuucaacggcaucauccugggccccgacggccacgugcugauccccgagaugcagagcagccugcugcaccagcacauggagcugcuggagagcagcgugaucccccugaugcacccccuggccggccccagcaccguguucaaggacggcgacgaggccgaggacuucguggaggugcaccugcccgacgugcacaagcagaucagcggcguggaccugggccugcccaacuggggcaaguacgugcugaucagcgccggcgcccugaccgcccugaugagcaugaucuuccugaugaccugcugcagaaagaccaacagagccgagagcauccagcacagccccggcgagaccggcagaaaggugagcgugaccagccacaacggcagagugaucagcagcugggagagcuacaagagcggcggcgagaccaagcuguga

SEQ ID NO: 190997 - RNA, 1575 nt, Artificial Sequence
  derived and/or modified CDS sequence (opt4) from glycoprotein__RABV__EU267768.1
augaucccccaggugcugcuguucgugccccugcugguguucagcagcugcuucggcaaguuccccaucuacaccauccccgacaagcugggccccuggagccccaucgacauccaccaccugagcugccccaacaaccuggugguggaggacgagggcugcaccaaccugagcggcuucagcuacauggagcugaaggugggcuacaucagcgccaucaaggugagcggcuucaccugcaccggcguggugaccgaggccgagaccuacaccaacuucgugggcuacgugaccaccaccuucaagagaaagcacuucagacccaugcccgacgccugcagagccgccuacaacuggaagauggccggcgaccccagauacgaggagagccugcacaaccccuaccccgacuaccacuggcugagaaccgugaagaccaccaaggagagccuggugaucaucagccccagcguggccgaccuggaccccuacgacaagagccugcacagcagaguguuccccggcggcaagugcagcggcaucaccgugagcagcaccugcugcagcaccaaccacgacuacaccaucuggaugcccgagaaccccagacugggcaccagcugcgacaucuucaccaacagcagaggcaagagagccagcaagggcggcaagaccugcggcuucguggacgagagaggccuguacaagagccugaagggcgccugcaagcugaagcugugcggcgugcugggccugagacugauggacggcaccuggguggccauccagaccagcgacgagaucaaguggugcagccccgaccagcuggugaaccugcacgacuuccacagcgacgagaucgagcaccuggugguggaggagcuggugaagaagagagaggagugccuggacgcccuggagaccgugaugaccaccaagagcgugagcuucagaagacugagccaccugagaaagcuggugcccggcuucggcaaggccuacaccaucuucaacaagacccugauggaggccgacgcccacuacaagagcaucagaaccuggaacgagaucauccccagcaagggcugccugagagugggcggcagaugccacccccacgugaacggcguguucuucgacggcaucauccugggccccgacggcagagugcugauccccgagaugcagagcagccugcugcaccagcacauggagcugcuggagagcagcgugaucccccugaugcacccccuggccgaccccagcaccguguucaaggacggcgacgaggccgaggacuucguggaggugcaccugcccgacgugcacaagcugaucagcggcguggaccugggccugcccaacuggggcaaguacgugcugaucagcgccggcgcccugaccgcccugaugagcaugaucuuccugaugaccugcugcagaaagaccaacagagccgagagcauccagcacagccccggcgagaccggcagaaaggugagcgugaccagccacaacggcagagugaucagcagcugggagagcuacaagagcggcggcgagaccaagcuguga

SEQ ID NO: 190998 - RNA, 1575 nt, Artificial Sequence
  derived and/or modified CDS sequence (opt4) from glycoprotein__RABV__EU267769.1
augaucccccaggugcugcuguucgugccccugcugguguucagcagcugcuucggcaaguuccccaucuacaccauccccgacaagcugggccccuggagccccaucgacauccaccaccugagcugccccaacaacauggugguggaggacgagggcugcaccaaccugagcggcuucagcuacauggagcugaaggugggcuacaucagcgccaucaaggugaacggcuucaccugcaccggcguggugaccgaggccgagaccuacaccaacuucgugggcuacgugaccaccaccuucaagagaaagcacuucagacccaugcccgacgccugcagagccgccuacaacuggaagauggccggcgaccccagauacgaggagagccugcacaaccccuaccccgacuaccacuggcugagaaccgugaagaccaccaaggagagccuggugaucaucagccccagcguggccgaccuggaccccuacgacaagagccugcacagcagaguguuccccggcggcaagugcagcggcaucaccgccagcagcaccugcugcagcaccaaccacgacuacaccaucuggaugcccgagaaccccagacugggcaccagcugcgacaucuucaccaacagcagaggcaagagagccagcaagggcggcaagaccugcggcuucgugggcggcagaggccuguacaagagccugaagggcgccugcaagcugaagcugugcggcgugcugggccugagacugauggacggcaccuggguggccauccagaccagcgacggcaucaaguggugcagccccgaccagcuggugaaccugcacgacuuccacagcgacgagaucgagcaccuggugguggaggagcuggugaagaagagagaggagugccuggacgcccuggugaccaucaugaccaccaagagcgugagcuucagaagacugagccaccugagaaagcuggugcccggcuucggcaaggccuacaccaucuucaacaagacccugauggaggccgacgcccacuacaagagcaucagaaccuggaacgagaucauccccagcaagggcugccugagagugggcggcagaugccacccccacgugaacggcguguucuucaacggcaucauccugggccccgacggccacgugcugauccccgagaugcagagcagccugcugcaccagcacauggagcugcuggagagcagcgugaucccccugaugcacccccuggccgaccccagcaccguguucaaggacggcgacgaggccgaggacuucguggaggugcaccugcccgacgugcacaagcagaucagcggcguggaccugggccugcccaacuggggcaaguacgugcugaucagcgccggcgcccugaccgcccugaugcugaccaucuuccugaugaccugcugcagaaagaccagcagagccgagagcauccagcacagccccggcgagaccggcagaaaggugagcgugaccagccacaacggcagagugaucagcagcugggagagcuacaagagcggcggcgagaccaagcuguga

SEQ ID NO: 190999 - RNA, 1575 nt, Artificial Sequence
  derived and/or modified CDS sequence (opt4) from glycoprotein__RABV__EU267770.1
augaucccccaggugcugcuguucgugccccugcugguguucagcagcugcuucggcaaguuccccaucuacaccauccccgacaagcugggccccuggagccccaucgacauccaccaccugagcugccccaacaacauggugguggaggacgagggcugcaccaaccugagcggcuucagcuacauggagcugaaggugggcuacaucagcgccaucaaggugaacggcuucaccugcaccggcguggugaccgaggccgagaccuacaccaacuucgugggcuacgugaccaccaccuucaagagaaagcacuucagacccaugcccgacgccugcagagccgccuacaacuggaagauggccggcgaccccagauacgaggagagccugcacaaccccuaccccgacuaccacuggcugagaaccgugaagaccaccaaggagagccuggugaucaucagccccagcguggccgaccuggaccccuacgacaagagccugcacagcagaguguuccccggcggcaagugcagcggcaucaccgugagcagcaccugcugcagcaccaaccacgacuacaccaucuggaugcccgagaaccccagacugggcaccagcugcgacaucuucaccaacagcagaggcaagagagccagcaagggcggcaagaccugcggcuucguggacgagagaggccuguacaagagccugaagggcgccugcaagcugaagcugugcggcgugcugggccugagacugauggacggcaccuggguggccauccagaccagcgacgagaucaaguggugcagccccgaccagcuggugaaccugcacgacuuccacagcgacgagaucgagcaccuggugguggaggagcuggugaagaagagagaggagugccuggacgcccuggagaccaucaugaccaccaagagcgugagcuucagaagacugaaccaccugagaaagcuggugcccggcuucggcaaggccuacaccaucuucaacaagacccugauggaggccgacgcccacuacaagagcaucagaaccuggaacgagaucauccccagcaagggcugccugagagugggcggcagaugccacccccacgugaacggcguguucuucaacggcaucauccugggccccgacggccacgugcugauccccgagaugcagagcagccugcugcaccagcacauggagcugcuggagagcagcgugaucccccugaugcacccccuggccgaccccagcaccguguucaaggacggcgacgaggccgaggacuucguggaggugcaccugcccgacgugcacaagcagaucagcggcguggaccugggccugcccaacuggggcaaguacgugcugaucagcgccggcgcccugaccgcccugaugcugaccaucuuccugaugaccugcugcagaaagaccagcagagccgagagcauccagcacagccccggcgagaccggcagaaaggugagcgugaccagccacaacggcagagugaucagcagcugggagagcuacaagagcggcggcgagaccaagcuguga

SEQ ID NO: 191000 - RNA, 1575 nt, Artificial Sequence
  derived and/or modified CDS sequence (opt4) from glycoprotein__RABV__EU267771.1
augaucccccaggugcugcuguucgugccccugcugguguucagcagcugcuucggcaaguuccccaucuacaccauccccgacaagcugggccccuggagccccaucgacauccaccaccugagcugccccaacaacauggugguggaggacgagggcugcaccaaccugagcggcuucagcuacauggagcugaaggugggcuacaucagcgccaucaaggugagcggcuucaccugcaccggcguggugaccgaggccgagaccuacaccaacuucgugggcuacgugaccaccaccuucaagagaaagcacuucagacccaugcccgacgccugcagagccgccuacaacuggaagauggccggcgaccccagauacgaggagagccugcacaacccccaccccgacuaccacuggcugagaaccgugaagaccaccaaggagagccuggugaucaucagccccagcguggccgaccuggaccccuacgacaagagccugcacagcagaguguuccccggcggcaagugcagcggcaucaccgugagcagcaccugcugcagcaccaaccacgacuacaccaucuggaugcccgagaaccccagacugggcaccagcugcgacaucuucaccaacagcagaggcaagagagccagcaagggcggcaagaccugcggcuucguggacgagagaggccuguacaagagccugaagggcgccugcaagcugaagcugugcggcgugcugggccugagacugauggacggcaccuggguggccauccagaccagcgacgagaucaaguggugcagccccgaccagcuggugaaccugcacgacuuccacagcgacggcaucgagcaccuggugguggaggagcuggugaagaagagagaggagugccuggacgcccuggagaccaucaugaccaccaagagcgugagcuucagaagacugagccaccugagaaagcuggugcccggcuucggcaaggccuacaccaucuucaacaagacccugauggaggccgacgcccacuacaagagcaucagaaccuggaacgagaucauccccagcaagggcugccugagagugggcggcagaugccacccccacgugaacggcguguucuucaacggcaucauccugggccccgacggccacgugcugauccccgagaugcagagcagccugcugcaccagcacauggagcugcuggagagcagcgugaucccccugaugcacccccuggccgaccccagcaccguguucaaggacggcgacgaggccgaggacuucguggaggugcaccugcccgacgugcacaagcagaucagcggcguggaccugggccugcccaacuggggcaaguacgugcugaucagcgccggcgcccugaccgcccugaugcugaccaucuuccugaugaccugcugcagaaagaccagcagagccgagagcauccagcacagccccggcgagaccggcagaaaggugagcgugaccagccacagcggcagagugaucagcagcugggagagcuacaagagcggcggcgagaccaagcuguga

SEQ ID NO: 191001 - RNA, 1575 nt, Artificial Sequence
  derived and/or modified CDS sequence (opt4) from glycoprotein__RABV__EU267772.1
auggugccccaggcccugcuguucgugccccugcugguguucccccugugcuucggcaaguuccccaucuacaccauccccgacaagcugggccccuggagccccaucgacauccaccaccugagcugccccaacaaccuggugguggaggacgagggcugcaccaaccugagcggcuucagcuacauggagcugaaggugggcuacauccuggccaucaagaugaacggcuucaccugcaccggcguggugaccgaggccgagaccuacaccaacuucgugggcuacgugaccaccaccuucaagagaaagcacuucagacccacccccgacgccugcagagccgccuacaacuggaagauggccggcgaccccagauacgaggagagccugcacaaccccuaccccgacuacagauggcugagaaccgugaagaccaccaaggagagccuggugaucaucagccccagcguggccgaccuggaccccuacgacagaagccugcacagcagaguguuccccagcggcaagugcagcggcguggccgugagcagcaccuacugcagcaccaaccacgacuacaccaucuggaugcccgagaaccccagacugggcaugagcugcgacaucuucaccaacagcagaggcaagagagccagcaagggcagcgagaccugcggcuucguggacgagagaggccuguacaagagccugaagggcgccugcaagcugaagcugugcggcgugcugggccugagacugauggacggcaccuggguggccaugcagaccagcaacgagaccaaguggugcccccccgaccagcuggugaaccuguacgacuucagaagcgacgagaucgagcaccuggugguggaggagcuggugagaaagagagaggagugccuggacgcccuggagagcaucaugaccaccaagagcgugagcuucagaagacugagccaccugagaaagcuggugcccggcuucggcaaggccuacaccaucuucaacaagacccugauggaggccgacgcccacuacaagagcgugagaaccuggaacgagauccugcccagcaagggcugccugagagugggcggcagaugccacccccacgugaacggcguguucuucaacggcaucauccugggccccgacggcaacgugcugauccccgagaugcagagcagccugcugcagcagcacauggagcugcuggagagcagcgugaucccccuggugcacccccuggccgaccccagcaccguguucaaggacggcgacgaggccgaggacuucguggaggugcaccugcccgacgugcacaaccaggugagcggcguggaccugggccugcccaacuggggcaaguacgugcugcugagcgccggcgcccugaccgcccugaugcugaucaucuuccugaugaccugcugcagaagagugaacagaagcgagcccacccagcacaaccugagaggcaccggcagagaggugagcgugaccccccagagcggcaagaucaucagcagcugggagagccacaagagcggcggcgagaccagacuguga

SEQ ID NO: 191002 - RNA, 1575 nt, Artificial Sequence
  derived and/or modified CDS sequence (opt4) from glycoprotein__RABV__EU267773.1
augaucccccaggugcugcuguucgugccccugcugguguucagcagcugcuucggcaaguuccccaucuacaccauccccgacaagcugggccccuggagccccaucgacauccaccaccugagcugccccaacaaccuggugguggaggacgagggcugcaccaaccugagcggcuucagcuacauggagcugaaggugggcuacaucagcgccaucaaggugaacggcuucaccugcaccggcguggugaccgaggccgagaccuacaccaacuucgugggcuacgugaccaccaccuucaagagaaagcacuucagacccaugcccgacgccugcagagccgccuacaacuggaagauggccggcgaccccagauacgaggagagccugcacaaccccuaccccgacuaccacuggcugagaaccgugaagaccaccaaggagagccuggugaucaucagccccagcguggccgaccuggaccccuacgacaagagccugcacagcagaguguuccccggcggcaagugcagcggcaucgccgugagcagcaccugcugcagcaccaaccacgacuacaccaucuggaugcccgagaaccccagacugggcaccagcugcgacaucuucaccaacagcagaggcaagagagccagcaagggcggcaagaccugcggcuucguggacgagagaggccuguacaagagccugaagggcgccugcaagcugaagcugugcggcgugcugggccugagacugauggacggcaccuggguggccauccagaccagcgacgagaucaaguggugcagccccgugcagcuggugaaccugcacgacuuccacagcgacgagaucgagcaccuggugguggaggagcuggugaagaagagagaggagugccuggacgugcuggagaccaucaugaccaccaagagcgugagcuucagaagacugagccaccugagaaagcuggugcccggcuucggcaaggccuacaccaucuucaacaagacccugauggaggccgacgcccacuacaagagcaucagaaccuggaacaagaucauccccagcaagggcugccugagagugggcggcagaugccacccccacgugaacggcguguucuucaacggcaucauccugggccccgacggccacgugcugauccccgagaugcagagcagccugcugcaccagcacauggagcugcuggagagcagcgugaucccccugaugcacccccuggccgaccccagcaccguguucaaggacggcgacgaggccgaggacuucguggaggugcaccugcccgacgugcacaagcagaucagcggcguggaccugggccugcccaacuggggcaaguacgugcugaucagcgccggcgcccugaccgcccugaugcugaccaucuuccugaugaccugcugcagaaagaccaacagagccgagagcauccagcacagccccggcgagaccggcagaaaggugagcgugaccagccacaacggcagagugaucagcagcugggagagcuacaagagcggcagcgagaccaagcuguga

SEQ ID NO: 191003 - RNA, 1575 nt, Artificial Sequence
  derived and/or modified CDS sequence (opt4) from glycoprotein__RABV__EU267774.1
augaucccccaggugcugcuguucgugccccugcugguguucagcagcugcuucggcaaguuccccaucuacaccauccccgacaagcugggccccuggagccccaccgacauccaccaccugagcugccccaacaaccuggugguggaggacgagggcugcaccaaccugagcggcuucagcuacauggagcugaaggugggcuacaucagcgccaucaaggugaacggcuucaccugcaccggcguggugaccgaggccgagaccuacaccaacuucgugggcuacgugaccaccaccuucaagagaaagcacuucagacccaugcccgacgccugcagagccgccuacaacuggaagauggccggcgaccccagauacgaggagagccugcacaaccccuaccccgacuaccacuggcugagaaccgugaagaccaccaaggagagccuggugaucaucagccccagcguggccgaccuggaccccuacgacaagagccugcacagcagaguguuccccggcggcaagugcagcggcaucaccgugagcagcaccugcugcagcaccaaccacgacuacaccaucuggaugcccgagaaccccagacugggcaccagcugcgacaucuucaccaacagcagaggcaagagagccagcaagggcggcaagaccugcggcuucguggacgagagaggccuguacaagagccugaagggcgccugcaagcugaagcugugcggcgugcugggccugagacugauggacggcaccuggguggccauccagaccagcgacgagaucaaguggugcagccccgaccagcuggugaaccugcacgacuuccacagcgacgagaucgagcaccuggugguggaggagcuggugaagaagagagaggagugccuggacgcccuggagaccaucaugaccaccagaagcgugagcuucagaagacugagccaccugagaaagcuggugcccggcuucggcaaggccuacaccaucuucaacaagacccugauggaggccgacgcccacuacaagagcaucagaaccuggaacgagaucauccccagcaagggcugccugagagugggcggcagaugccacccccacgugaacggcguguucuucaacggcaucauccugggccccgacggccacgugcugauccccgagaugcagagcagccugcugcaccagcacauggagcugcuggagagcagcgugaucccccugaugcacccccuggccgaccccagcaccguguucaaggacggcggcgaggccgaggacuucguggaggugcaccugcccgacgugcacaagcagaucagcggcguggaccugggccugcccaacuggggcaaguacgugcugaucagcgccggcgcccugaccgcccugaugagcaugaucuuccugaugaccugcugcagaaagaccaacagagccgagagcauccagcacagccccggcgagaccggcagaaaggugagcgugaccagccacaacggcagagugaucagcagcugggagagcuacaagagcggcggcgagaccaagcuguga

SEQ ID NO: 191004 - RNA, 1575 nt, Artificial Sequence
  derived and/or modified CDS sequence (opt4) from glycoprotein__RABV__EU267775.1
augaucccccaggugcugcuguucgugccccugcugguguucagcagcugcuucagaaaguuccccaucuacaccauccccgacaagcugggccccuggagccccaucgacauccaccaccugagcugccugaacaaccuggugguggaggacgagggcugcaccaaccugagcggcuucagcuacauggagcugaaggugggcuacaucagcgccaucaaggugaacggcuucaccugcaccggcguggugaccgaggccgagaccuacaccaacuucgugggcuacgugaccaccaccuucaagagaaagcacuucagacccaugcccgacgccugcagagccgccuacaacuggaagauggccggcgaccccagauacgaggagagccugcacaaccccuaccccgacuaccacuggcugagaaccgugaagaccaccaaggagagccuggugaucaucagccccagcguggccgaccuggaccccuacgacaagagccugcacagcagaguguuccccagcggcaagugcagcggcaucaccgugagcagcaccugcugcagcaccaaccacgacuacaccaucuggaugcccgagaaccccagacugggcaccagcugcgacaucuucaccaacagcagaggcaagagagccagcaagggcggcaagaccugcggcuucguggacgagagaggccuguacaagagccugagaggcgccugcaagcugaagcugugcggcgugcugggccugagacugauggacggcaccuggguggccauccagaccagcgacgagaucaaguggugcagccccgaccagcuggugaaccugcacgacuuccacagcgacgagaucgagcaccuggugguggaggagcuggugaagaagagagaggagugccuggacgcccuggagaccaucaugaccaccaagagcgugagcuucagaagacugagccaccugagaaagcuggugcccggcuucggcaaggccuacaccaucuucaacaagacccugauggaggccgacgcccaccacaagagcaucagaaccuggaacgagaucauccccagcaagggcugccugagagugggcggcagaugccacccccacgugaacggcguguucagcaacggcaucauccugggccccgacggccacgugcugauccccgagaugcagagcagccugcugcaccagcacauggagcugcuggagagcagcgugaucccccugaugcacccccuggccgaccccagcaccguguucaaggacagcgacgaggccgaggacuucguggaggugcaccugcccgacgugcacaagcagaucagcggcguggaccugggccugcccaacuggggcaaguacgugcugaucagcgccggcgcccugaccgcccugaugcugaugaucuuccugaugaccugcugcagaaagaccaacagagccgagagcauccagcacagccccggcgagaccggcagaaaggugagcgugaccagccacaacggcagagugaucagcagcugggagagcuacaagagcggcagcgagaccaagcuguga

SEQ ID NO: 191005 - RNA, 1575 nt, Artificial Sequence
  derived and/or modified CDS sequence (opt4) from glycoprotein__RABV__EU267776.1
augaucccccaggugcugcuguucgugccccugcugguguucagcagcugcuucggcaaguuccccaucuacaccauccccgacaagcugggccccuggagccccaucgacauccaccaccugagcugccccaacaaccuggugguggaggacgagggcugcaccaaccugagcggcuucagcuacauggagcugaaggugggcuacaucagcgccaucaaggugaacggcuucaccugcaccggcguggugaccgaggccgagaccuacaccaacuucgugggcuacgugaccaccaccuucaagagaaagcacuucagacccaugcccgacgccugcagagccgccuacaacuggaagauggccggcgaccccagauacgaggagagccugcacaaccccuaccccgacuaccacuggcugagaaccgugaagaccaccaaggagagccuggugaucaucagccccagcguggccgaccuggaccccuacgacaagagccugcacagcagaguguuccccagcggcaagugcagcggcaucaccgugagcagcaccugcugcagcaccaaccacgacuacaccaucuggaugcccgagaaccccagacugggcaccagcugcgacaucuucaccaacagcagaggcaagagagccagcaagggcggcaagaccugcggcuucguggacgagagaggccuguacaagagccugagaggcgccugcaagcugaagcugugcggcgugcugggccugagacugauggacggcaccuggguggccauccagaccagcgacgagaucaaguggugcagccccgaccagcuggugaaccugcacgacuuccacagcgacgagaucgagcaccuggugguggaggagcuggugaagaagagagaggagugccuggacgcccuggagaccaucaugaccaccaagagcgugagcuucagaagacugagccaccugagaaagcuggugcccggcuucggcaaggccuacaccaucuucaacaagacccugauggaggccgacgcccacuacaagagcaucagaaccuggaacgagaucauccccagcaagggcugccugagagugggcggcagaugccacccccacgugaacggcguguucuucaacggcaucauccugggccccgacggccacgugcugauccccgagaugcagagcagccugcugcaccagcacauggagcugcuggagagcagcgugaucccccugaugcacccccuggccgaccccagcaccguguucaaggacggcgacgaggccgaggacuucguggaggugcaccugcccgacgugcacaagcagaucagcggcguggaccugggccugcccaacuggggcaaguacgugcugaucagcgccggcgcccugaccgcccugaugcugaugaucuuccugaugaccugcagaagaaagaccaacagagccgagagcauccagcacagccccggcgagaccggcagaaaggugagcgugaccagccacaacggcagagugaucagcagcugggagagcuacaagagcggcagcgagaccaagcuguga

SEQ ID NO: 191006 - RNA, 1575 nt, Artificial Sequence
  derived and/or modified CDS sequence (opt4) from glycoprotein__RABV__EU275240.1
augaucccccaggcccugcuguucgugccccugcugguguucagcagcugcuucggcaaguuccccaucuacaccauccccgacaagcugggccccuggagccccaucgacauccaccaccugagcugccccaacaaccuggugguggaggacgagggcugcaccaaccugagcggcuucagcuacauggagcugaaggugggcuacaucagcgccaucaaggugaacggcuucaccugcaccggcguggugaccgaggccgagaccuacaccaacuucgugggcuacgugaccaccaccuucaagagaaagcacuucagacccaugcccgacgccugcagagccgccuacaacuggaagauggccggcgaccccagauacgaggagagccugcacaaccccuaccccgacuaccacuggcugagaaccgugaagaccaccaaggagagccuggugaucaucagccccagcguggccgaccuggaccccuacgacaagagccugcacagcagaguguuccccgacggcaagugcagcggcaucaccgugagcagcaccugcugcagcaccaaccacgacuacaccaucuggaugcccgagaaccccagacugggcaccagcugcgacaucuucaccaacagcagaggcaagagagccagcaagggcggcaagaccugcggcuucguggacgagagaggccuguacaagagccugaagggcgccugcaagcugaagcugugcggcgugcugggccugagacugauggacggcaccuggguggccauccagaccagcgacgagaucaaguggugcagccccgaccagcuggugaaccugcacgacuuccacagcgacgagaucgagcaccuggugguggaggagcuggugaagaagagagaggagugccuggacgcccuggagaccaucaugaccaccaagagcgugagcuucagaagacugagccaccugagaaagcuggugcccggcuucggcaaggccuacaccaucuucaacaagacccugauggaggccgacgcccacuacaagagcaucagaaccuggaacgagaucauccccagcaagggcugccugagagugggcggcagaugccacccccacgugaacggcguguucuucaacggcaucauccugggccccgacggccacgugcugauccccgagaugcagagcagccugcugcaccagcacauggagcugcuggagagcagcgugaucccccugaugcacccccuggccgaccccagcaccguguucaaggacggcgacgaggccgaggacuucguggaggugcaccugcccgacgugcacaagcagaucagcggcguggaccugggccugcccaacuggggcaaguacgugcugaucagcgccggcgcccugaccgcccugaugcugaugaucuuccugaugaccugcugcagaaaggccaacagagccgagagcauccagcacaaccccggcgagaccggcagaaaggugagcgugaccagccacaacggcagagugaucagcagcugggagagcuacaagagcggcagcgagaccaagcuguga

SEQ ID NO: 191007 - RNA, 1575 nt, Artificial Sequence
  derived and/or modified CDS sequence (opt4) from glycoprotein__RABV__EU275241.1
augaucccccaggcccugcuguucgugccccugcugguguucagcagcagauucggcaaguuccccaucuacaccauccccgacaagcugggccccuggagccccaucgacauccaccaccugagcugccccaacuaccuggugguggaggacgagggcugcaccaaccugagcggcuucagcuacauggagcugaaggugggcuacaucagcgccaucaaggugaacggcuucaccugcaccggcguggugaccgaggccgagaccuacaccaacuucgugggcuacgugaccaccaccuucaagagaaagcacuucagacccacccccgacgccugcagagccgccuacaacuggaagauggccggcgaccccagauacgaggagagccugcacaaccccuaccccgacuaccacuggcugagaaccgugaagaccagcaaggagagccuggugaucaucagccccagcguggccgaccuggaccccuacgacaagccccugcacagcagaguguuccccggcggcaagugcagcggcaucaccgugagcagcaccugcugcagcaccaaccacgacuacaccaucuggaugcccgagaaccccagacugagaaccagcugcgacaucuucaccaacagcagaggcaagagagccagcaagggcggcaagaccugcggcuucguggacgagagaggccuguacaagagccugaagggcgccugcaagcugaagcugugcggcgugcugggccugagacugauggacggcaccuggguggccauccagaccagcgacgagaucaaguggugcagccccgaccagcuggugaaccugcacgacuuccacagcgacgagaucgagcaccuggugguggaggagcuggugaagaagagagaggagugccuggacgcccuggagaccaucaugaccaccaagagcgugagcuucagaagacugagccaccugagaaagcuggugcccggcuucggcaaggccuacaccaucuucaacaagacccugauggaggccgacgcccacuacaagagcaucagaaccuggaacgagaucauccccagcaagggcugccugagagugggcggcagaugccacccccacgugaacggcguguucuucaacggcaucauccugggccccgacggccacgugcugauccccgagaugcagagcagccugcugcaccagcacauggagcugcuggagagcagcgugaucccccugaugcacccccuggccgaccccagcaccguguucaaggacggcgacgaggccgaggacuucguggaggugcaccugcccgacgugcacaagcagaucagcggcguggaccugggccugcccaacuggggcaaguacgugcuggugagcgccggcgcccugaccgcccugaugcugaugaucuuccugaugaccugcugcagaaagaccaacagagccgagagcauccagcacagccccggcgagaccggcagaaaggugagcgugaccagccacaacggcagagugaucagcagcugggagagcuacaagagcggcagcgagaccaagcuguga

SEQ ID NO: 191008 - RNA, 1575 nt, Artificial Sequence
  derived and/or modified CDS sequence (opt4) from glycoprotein__RABV__EU275242.1
augaccccccaggcccugcuguucgugccccugcugguguucagccugugcuucggcaaguuccccaucuacaccauccccgacaagcugggccccuggagccccaucgacauccaccaccugagcugccccaacaaccuggugguggaggacgagggcugcaccaaccugcccggcuucagcuacauggagcugaaggugggcuacaucagcgccaucaaggugaacggcuucaccugcaccggcguggugaccgaggccgagaccuacaccaacuucgugggcuacgugaccaccaccuucaagagaaagcacuucagacccacccccgacgccugcagagccgccuacaacuggaagauggccggcgaccccagauacgaggagagccugcacaaccccuaccccgacuaccacuggcugagaaccgugaagaccaccaaggagagccuggugaucaucagccccagcgugagcgaccugggccccuacgacaagagccugcacagcagaguguuccccagcggcaagugcagcggcaucaccgugagcagcaccuacugccccaccaaccacgacuacaccaucuggaugcccgagaaccccagacugggcaccagcugcgacaucuucaccaacagcagaggcaagagagccagcaagggcagcaagaccugcggcuucguggacgagagaggccuguacaagagccugaagggcgccugcaagcugaagcugugcggcgugcugggccugagacugauggacggcaccugggccgccauccagaccagcgacgaggccaaguggugcccccccgaccagcuggugaacauccacgacuucagaagcgacgagaucgagcaccuggugguggaggagcuggugaagaagagagaggagugccuggacgcccuggagagcaucaugaccaccaagagcgugagcuucagaagacugagccaccugagaaagcuggugcccggcuucggcaaggccuacaccaucuucaacaagacccugauggaggccgacgcccacuacaagagcgugagaaccuggaacgagaucauccccagcaagggcugccugagagugggcggcagaugccacccccacgccaacggcguguucuucaacggcaucauccugggccccgacggccacgugcugauccccgagaugcagagcagccugcugcagcagcacauggagcugcuggagagcagcgugaucccccugaugcacccccuggccgaccccagcaccguguucaaggacggcgacgaggccgaggacuucguggaggugcaccugcccgacgugcacaagcaggugagcggcguggaccugggccugcccagcuggggcaaguacgugcugaugagcgugggcgcccugaucgcccugaugcugaugaucuuccuggccaccugcugcagaaaggccaacggcgccgagagcauccagcacagacugggcgagaccggcagaaaggugagcgugaccagccagaacggcagagugaucagcagcugggagagcuacaagagcggcggcgagaccaagcuguga

SEQ ID NO: 191009 - RNA, 1575 nt, Artificial Sequence
  derived and/or modified CDS sequence (opt4) from glycoprotein__RABV__EU293111.1
augaucccccaggcccugcuguuccugccccugcugguguucagccugugcagcggcaaguuccccaucuacaccauccccgacaagcugggccccuggagccccaucgacauccaccaccugagcugccccaacaaccuggugguggaggacgagggcugcaccaaccugagcggcuucagcuacauggagcugaaggugggcuacaucagcgccaucaaggugaacggcuucaccugcaccggcguggugaccgaggccgagaccuacaccaacuucgugggcuacgugaccaccaccuucaagagaaagcacuucagacccacccccgacgccugcagagccgccuacaacuggaagauggccggcgaccccagauacgaggagagccugcacaaccccuaccccgacuaccacuggcugagaaccgugaagaccaccaaggagagccuggugaucaucagccccagcgugagcgaccuggaccccuacgacaagagccugcacagcagaguguuccccagcggcaagugcagcggcaucaccgugagcagcaccuacugccccaccagccacgacuacaccaucuggaugcccgagaaccccagacugggcaccagcugcgacaucuucaucaacagcagaggcaagagagccagcaagggcagcaagaccugcggcuucguggacgagagaggccuguacaagagccugaagggcgccugcaagcugaagcugugcggcgugcugggccugagacugauggacggcaccuggguggccauccagaccagcgacgaggccaaguggugcccccccgaccagcuggugaacauccacgacuuccacagcgacgagaucgagcaccuggugguggaggagcuggugaagaagagagaggagugccuggacgcccuggagagcaucaugaccaccaagagcgugagcuucagaagacugagccaccugagaaagcuggugcccggcuucggcaaggccuacaccaucuucaacaagacccugauggaggccgacgcccacuacaagagcgugagaaccuggaacgagaucauccccagcaagggcugccugagagugggcggcagaugccacccccacgugaacggcguguucuucaacggcaucauccugggccccgacggccacgugcugauccccgagaugcagagcagccugcugcagcagcacauggagcugcuggagagcagcgugaucccccugaugcacccccuggccgaccccagcaccguguucaaggacggcgacgaggccgaggacuucguggaggugcaccugcccgacgugcacaagcaggugagcggcguggaccugggccugcccaacuggggcaaguacgugcuggugagcgugggcgcccugaucgcccugaugcugaugaucuuccugaugaccugcugcagaaaggccaacggcguggagagcaugcagcacagacugggcgagaccggcagaaaggugagcgugaccagccagagcggcagagugaucagcagcugggagagcuacaagagcggcggcgagaccaagcuguga

SEQ ID NO: 191010 - RNA, 1575 nt, Artificial Sequence
  derived and/or modified CDS sequence (opt4) from glycoprotein__RABV__EU293115.1
auggugccccaggcccugcuguucgugccccugcugguguucagccugugcuucggcaaguuccccaucuacaccauccccgacaagcugggccccuggagccccaucgacauccaccaccugagcugccccaacaaccuggugguggaggacgagggcugcaccaaccugagcggcuucagcuacauggagcugaaggugggcuacaucagcagcaucaaggugaacggcuucaccugcaccggcguggugaccgaggccgagaccuacaccaacuucgugggcuacgugaccaccaccuucaagagaaagcacuucagacccacccccgacgccugcagagccgccuacaacuggaagauggccggcgaccccagauacgaggagagccugcacaaccccuaccccgacuaccacuggcugagaaccgugaagaccaccaaggagagccuggugaucaucagccccagcguggccgaccuggaccccuacgacaagagccugcacagcagaguguuccccggcggcaagugcagcggcaucaccgugagcagcaccuacugcagcaccaaccacgacuacaccaucuggcugcccgagaaccccagacugggcaccagcugcgacaucuucaccaacagcagaggcaagagagccagcaagggcagcaagaccugcggcuucguggacgagagaggccuguacaagagccugaagggcgccugcaagcugaagcugugcggcgugcugggccugagacugauggacggcaccuggguggccaugcagaccagcgacgagaccaaguggugcccccccgaccagcuggugaaccugcacgacuucagaagcgacgagaucgagcaccuggugguggaggagcuggugaagaagagagaggagugccuggacgcccuggagagcaucaugaccaccaagagcgugagcuucagaagacugagccaccugagaaagcuggugcccggcuucggcaaggccuacaccaucuucaacaagacccugauggaggccgacgcccacuacaagagcgugagaaccuggaacgagaucauccccagcaagggcugccugagagugggcggcagaugccaccaccacgugaacggcguguucuucaacggcaucauccugggccccgacggccacgugcugauccccgagaugcagagcagccugcugcagcagcacauggagcugcuggagagcagcgugaucccccugaugcacccccuggccgaccccagcaccguguucaaggacggcgacgaggccgaggacuucguggaggugcaccugcccgacgugcacaagcaggugagcggcguggaccugggccugcccaacuggggcaaguacgugcugcugagcgccggcgcccugguggcccugaugcugaucaucuuccugaugaccugcugcagaagagugaacagacccgagagcaccagaagaagcuucggcggcaccgagagaaaggugagcaucaccccccagagcggcaaggugaucagcagcugggagagcuacaagagcggcagcgagaccagacuguga

SEQ ID NO: 191011 - RNA, 1575 nt, Artificial Sequence
  derived and/or modified CDS sequence (opt4) from glycoprotein__RABV__EU293116.1
augauccugcaggcccugcuguucgugccccugcugaucagcagccugugcuucggcaaguuccccaucuacaccauccccgacaagcugggccccuggagccccaucgacauccaccaccugagcugccccaacaaccuggugguggaggacgagggcugcaccagccugagcggcuucagcuacauggagcugaaggugggcuacaucagcgccaucaaggugaacggcuucaccugcaccggcguggugaccgaggccgagaccuacaccaacuucgugggcuacgugaccaccaccuucaagagaaagcacuucagacccacccccgacgccugcagagccgccuacaacuggaagguggccggcgaccccagauacgaggagagccugcagaaccccuaccccgacuaccacuggcugagaaccgugaagaccaccaaggagagccugaucaucaucagccccagcguggccgaccuggaccccuacgacaagagccugcacagcagaguguuccccagcggcaagugccugggcaucaccaucagcagcaccuacugcagcaccaaccacgacuacaccaucuggaugcccgaggaggccagacugggcaccagcugcgacaucuucaccaacagcaagggcaagaaggccagcaagggcggcagaaccugcggcuucguggacgagagaggccuguacaagagccugaagggcgccugcaagcugaagcugugcggcgugcccggccugagacugauggacggcaccugggugaccauccagaccagcgacgagaccaaguggugcccccccgaccagcuggugaaccugcacgacuuccacagcgacgagaucgagcaccuggugguggaggagcuggugaagaagagagaggagugccuggacgcccuggagagcaucaugaccaccaagagcgugagcuucagaagacugagccaccugagaaagcuggugcccggcuucggcaaggccuacaccaucuucaacaagacccugauggaggccgacgcccacuacaagagcgugagaaccuggaacgagaucauccccagcaagggcugccugaaggugggcggcagaugccacccccacguggacggcguguucuucaacggcaucauccugggccccgacggcaacgugcugauccccgagaugcagagcagccugcugcagcagcacauggagcugcuggagagcagcgugaucccccugaugcacccccuggccgaccccagcaccguguucaaggacggcgacgaggccgaggacuucguggaggugcaccugcccgacgugcacaagcagaucagcggcguggaccugggccugcccaacuggggcaaguaccugcugaugaucgccggcgcccuggccggccugauccugaucaucuuccugauggccugcugcagaagagccaagagaaccgagagcagaagaagaggcagcggcgagagcgagagaaaggugcccgugcccccccagaacggcaaggugaucagcagcugggagcuguacaagagcgagggcgagaccggccuguga

SEQ ID NO: 191012 - RNA, 1575 nt, Artificial Sequence
  derived and/or modified CDS sequence (opt4) from glycoprotein__RABV__EU293121.1
augaucccccaggcccugcuguucgugccccugcugguguucagccugugcuucggcaaguuccccaucuacaccauccccgacaagcugggccccuggagccccaucgacauccaccaccugagcugccccaacaaccuggugguggaggacgagggcugcaccaaccugagcggcuucagcuacauggagcugaaggugggcuacaucagcgccaucaaggugaacggcuucaccugcaccggcguggugaccgaggccgagaccuacaccaacuucgugggcuacgugaccaccaccuucaagagaaagcacuucagacccacccccgacgccugcagagccgccuacaacuggaagauggccggcgaccccagauacgaggagagccugcacaaccccuaccccgacuaccacuggcugagaaccgugaagaccaccaaggagagccuggugaucaucagccccagcgugagcgaccuggaccccuacgacaagagccugcacagcagaguguuccccagcggcaagugcagcggcaucaccgugagcagcaccuacugccccaccaaccacgacuacaccaucuggaugcccgagaaccccagacugggcaccagcugcgacaucuucaccaacagcagaggcaagagagccagcaagggcagcaagaccugcggcuucguggacgagagaggccuguacagaagccugaagggcgccugcaagcugaagcugugcggcgugcugggccugagacugauggacggcaccugggccgccauccagaccagcgacgaggccaaguggugcccccccgaccagcuggugaacauccacgacuucagaagcgacgagaucgagcaccuggugguggaggagcuggugaagaagagagaggagugccuggacgcccuggagagcaucaugaccaccaagagcgugagcuucagaagacugagccaccugagaaagcuggugcccggcuucggcaaggccuacaccaucuucaacaagacccugauggaggccgacgcccacuacaagagcgugagaaccuggaacgagaucauccccagcaagggcugccugagagugggcggcagaugccacccccacgugaacggcguguucuucaacggcaucauccugggccccgacggccacgugcugauccccgagaugcagagcagccugcugagacagcacauggagcugcuggagagcagcgugaucccccugaugcacccccuggccgaccccagcaccguguucaaggacggcgacgaggccgaggacuucguggaggugcaccugcccgacgugcacgagcagaucagcggcguggaccugggccugcccagcuggggcaaguacgugcugaugagcgugggcgccaugaucgcccugaugcuggugaucuuccugaccaccugcugcagaaaggccaacggcgccgagaccauccagcacagacugggcgagaccggcagaaaggugagcgugaccagccagagcggcagagugaucagcagcugggagagcuacaagagcggcggcgagaccaagcuguga

SEQ ID NO: 191013 - RNA, 1575 nt, Artificial Sequence
  derived and/or modified CDS sequence (opt4) from glycoprotein__RABV__EU352767.1
auggugccccaggugcugcuguucgugccccugcugggcuucagccugugcuucggcaaguuccccaucuacaccauccccgacgagcugggccccuggagccccaucgacauccaccaccugagcugccccaacaaccuggugguggaggacgagggcugcaccaaccugagcgaguucagcuacauggagcugaaggugggcuacaucagcgccaucaaggugaacggcuucaccugcaccggcguggugaccgaggccgagaccuacaccaacuucgugggcuacgugaccaccaccuucaagagaaagcacuucagacccacccccgacgccugcagagccgccuacaacuggaagauggccggcgaccccagauacgaggagagccugcacaaccccuaccccgacuaccacuggcugagaaccgugagaaccaccaaggagagccugaucaucaucagccccagcgugaccgaccuggaccccuacgacaagagccugcacagcagaguguuccccggcggcaagugcagcggcaucaccgugagcagcaccuacugcagcaccaaccacgacuacaccaucuggaugcccgaggaccccagacccagaacccccugcaacaucuucaccaacagcagaggcaagagagccagcaagggcaacaagaccugcggcuucguggacgagagaggccuguacaagagccugaagggcgccugcagacugaagcugugcggcgugcugggccugagacugauggacggcaccuggguggccaugcagaccagcgacgagaccaaguggugcccccccgaccagcuggugaaccugcacgacuuccacagcgacgagaucgagcaccuggugguggaggagcuggugaagaagagagaggagugccuggacgcccuggagagcaucaugaccaccaagagcgugagcuucagaagacugagccaccugagaaagcuggugcccggcuucggcaaggccuacaccaucuucaacaagacccugauggaggccgacgcccacuacaagagcgugagaaccuggaacgagaucauccccagcaagggcugccugaaggugggcggcagaugccacccccacgugaacggcguguucuucaacggcaucauccugggccccgacggccacgugcugauccccgagaugcagagcagccugcugcagcagcacauggagcugcugaagagcagcgugaucccccugaugcacccccuggccgaccccagcaccguguucaaggagggcgacgaggccgaggacuucguggaggugcaccugcccgacguguacaagagaaucagcggcguggaccugggccugcccaacuggggcaaguacgugcugaugaccgccggcgccaugaucggccuggugcugaucuucagccugaugaccuggugcagaagagccaacagacccgagagcaagcagagaagcuucggcggcaccggcagaaacgugagcgugaccagccagagcggcaaggugauccccagcugggagagcuacaagagcggcggcgagaucagacuguga

SEQ ID NO: 191014 - RNA, 1575 nt, Artificial Sequence
  derived and/or modified CDS sequence (opt4) from glycoprotein__RABV__EU549783.1
augaucccccaggugcugcuguucgugccccugcugguguucagcagcugcuucggcaaguuccccaucuacaccauccccgacaagcugggccccuggagccccaucgacauccaccaccugagcugccccaacaaccuggugguggaggacgagggcugcaccaaccugagcggcuucagcuacauggagcugaaggugggcuacagcagcgccaucaaggugaacggcuucaccugcaccggcguggugaccgaggccgagaccuacaccaacuucgugggcuacgugaccaccaccuucaagagaaagcacuucagacccaugcccgacgccugcagagccgccuacaacuggaagauggccggcgaccccagauacgaggagagccugcacaaccccuaccccgacuaccacuggcugagaaccgugaagaccaccaaggagagccuggugaucaucagccccagcgugaccgaccuggaccccuacgacaagagccugcacagcagaguguuccccggcggcaagugcagcggcaucaccgugagcagcaccugcugcagcaccaaccacgacuacaccaucuggaugcccgagaaccccagacugggcaccagcugcgacaucuucaccaacagcagaggcaagagagccagcaagggcggcaagaccugcggcuucguggacgagagaggccuguacaagagccugaagggcgccugcaagcugaagcugugcggcgugcugggccugagacugauggacggcaccuggguggccauccagaccagcgacgagaucaaguggugcagccccgaccagcuggugaaccugcacgacuuccacagcgacgagaucgagcaccuggugguggaggagcuggugaagaagagagaggagugccuggacgcccuggagaccaucaugaccaccaagagcgugagcuucagaagacugagccaccugagaaagcuggugcccggcuucggcaaggccuacaccaucuucaacaagacccugauggaggccgacgcccacuacaagagcaucagaaccuggaacgagaucauccccagcaagggcugccugagagugggcggcagaugccacccccacgugaacggcguguucuucaacggcaucauccugggccccgacggccacgugcugauccccgagaugcagagcagccugcugcaccagcacauggagcugcuggagagcagcgugaucccccugaugcacccccuggccgaccccagcaccguguucaaggacggcgacgaggccgaggacuucguggaggugcaccugcccgacgugcacaagcagaucagcggcguggaccugggccugcccaacuggggcaaguacgugcugaucagcgccggcgcccugaccgcccugaugcugaccaucuuccugaugaccugcugcagaaagaccaacagagccggcagcauccagcacagccccggcggcaccggcagaaaggugagcgugaccccccacaacggcagagugaucugcagcugggagagcuacaagagcggcagcgagaccaagcuguga

SEQ ID NO: 191015 - RNA, 1575 nt, Artificial Sequence
  derived and/or modified CDS sequence (opt4) from glycoprotein__RABV__EU643590.1
auggugccccaggcccugcuguucgugccccugcuggccgugccccugugcuucggcaaguuccccaucuacaccauccccgacaagcugggccccuggagccccaucgacauccaccaccugagcugccccaacaaccuggugguggaggacgagggcugcaccaaccugagcggcuucagcuacauggagcugaaggugggcuacaucagcgccaucaaggugaacggcuucaccugcaccggcguggugaccgaggccgagaccuacaccaacuucgugggcuacgugaccaccaccuucaagagaaagcacuucagacccacccccgacgccugcagaagcgccuacaacuggaagauggccggcgaccccagauacgaggagagccugcacaaccccuaccccgacuaccacuggcugagaaccgugaagaccaccaaggagagcuucgugaucaucagccccagcguggccgaccuggaccccuacgacaagagccugcacagcagaguguuccccagaggcaagugcagcggcaucaccgugagcagcaccuacugcagcaccaaccacgacuacaccaucuggaugcccgagaaccccagacugggcaccagcugcgacaucuucaccaacagcagaggcaagagagccagcaagggcagcaagaccugcggcuucguggacgagagaggccuguacaagagccugaagggcgccugcaagcugaagcugugcggcgugcugggccugagacugauggacggcaccuggguggccauccagaccagcgacgagaccaaguggugcccccccgaccagcuggugaaccugcacgacuuccacagcgacgagaucgagcaccuggugguggaggagcuggugaagaagagagaggagugccuggacgcccuggagagcaucaugaccaccaagagcgugagcuucagaagacugagccaccugagaaagcuggugcccggcuucggcaaggccuacaccaucuucaacaagacccugauggaggccgacgcccacuacaagagcgugagaaccuggaacgagaucauccccagcaagggcugccugagagugggcggcagaugccacccccacgugaacggcguguucuucaacggcaucauccugggccccgacggccacgugcugauccccgagaugcagagcagccugcugcagcagcacauggagcugcuggagagcagcgugaucccccugaugcacccccuggccgaccccagcaccguguucaaggacggcgacgaggccgaggacuucguggaggugcaccugcccgacgugcacaagcaggugagcggcguggaccugggccugcccagcuggggcaaguacgugcugaugagcgccggcauccugaccgcccugaugcugaccaucuuccugaugaccugcugcagaagaaccaacagagccgagagcauccagcacagccugggcgagaccggcagaaaggugagcgugaccagccagagcggcagagugaucagcagcugggagagcuacaagagcggcggcgagaccaagcuguga

SEQ ID NO: 191016 - RNA, 1575 nt, Artificial Sequence
  derived and/or modified CDS sequence (opt4) from glycoprotein__RABV__EU700029.1
augaucccccaggugcugcuguucgugccccugcugguguucagcagcugcuucggcaaguuccccaucuacaccauccccgacaagcugggccccuggagccccaucgacauccaccaccugagcugccccaacaaccuggugguggaggacgagggcugcaccaaccugagcggcuucagcuacauggagcugaaggugggcuacaucagcgccaucaaggugaacggcuucaccugcaccggcguggugaccgaggccgagaccuacaccaacuucgugggcuacgugaccaccaccuucaagagaaagcacuucagacccaugcccgacgccugcagagccgccuacaacuggaagauggccggcgaccccagauacgaggagagccugcacaaccccuaccccgacuaccacuggcugagaaccgugaagaccaccaaggagagccuggugaucaucagccccagcguggccgaccuggaccccuacgacaagagccugcacagcagaguguuccccggcggcaagugcagcggcaucaccgugagcagcaccugcugcagcaccaaccacgacuacaccaucuggaugcccgagaaccccagacugggcaccagcugcgacaucuucaccaacagcagaggcaagagagccagcaagggcggcaagaccugcggcuucguggacgagagaggccuguacaagagccugaagggcgccugcaagcugaagcugugcggcgugcugggccugagacugauggacggcaccuggguggccauccagaccagcgacgagaucaaguggugcccccccgaccagcuggugaaccugcacgacuuccacagcgacgagaucgagcaccuggugguggaggagcuggugaagaagagagaggagugccuggacgcccuggagaccaucaugaccaccaagagcgugagcuucagaagacugagccaccugagaaagcuggugcccggcuucggcaaggccuacaccaucuucaacaagacccugauggaggccgacgcccacuacaagagcaucagaaccuggaacgagaucauccccagcaagggcugccugagagugggcggcagaugccacccccacgugaacggcguguucuucaacggcaucauccugggccccgacggccacgugcugauccccgagaugcagagcagccugcugcaccagcacauggagcugcuggagagcagcgugaucccccugaugcacccccuggccgaccccagcaccguguucaaggacggcgacgaggccgaggacuucguggaggugcaccugcccgacgugcacaagcagaucagcggcguggaccugggccugcccaacuggggcaaguacgugcugaucagcgccggcgcccugaccgcccugaugcugaccaucuuccugaugaccugcugcagaaagaccaacagagccggcagcauccagcacagccccggcgagaccggcagaaaggugagcgugaccagccacaacggcagagugaucagcagcugggagagcuacaagagcggcagcgagaccaagcuguga

SEQ ID NO: 191017 - RNA, 1575 nt, Artificial Sequence
  derived and/or modified CDS sequence (opt4) from glycoprotein__RABV__EU700030.1
auggugccccuggcccugcugcuggugccccugcugguguucagcagcugcuucggcaaguuccccaucuacaccauccccgacaagcugggccccuggagccccaucgacauccaccaccugagcugccccaacaaccuggugguggaggacgagggcugcaccaaccugagcggcuucagcuacauggagcugaaggugggcuacaucagcgccaucaaggugaacggcuucaccugcaccggcguggugaccgaggccgagaccuacaccaacuucgugggcuacgugaccaccaccuucaagagaaagcacuucagacccaugcccgacgccugcagagccgccuacaacuggaagauggccggcgaccccagauacgaggagagccugcacaaccccuaccccgacuaccacuggcugagaaccgugaagaccaccaaggagagccuggugaucaucagccccagcguggccgaccuggaccccuacgacaagagccugcacagcagaguguuccccggcggcaagugcagcggcaucaccgugagcagcaccugcugcagcaccaaccacgacuacaccaucuggaugcccgagaaccccagacugggcaccagcugcgacaucuucaccaacagcagaggcaagagagccagcaagggcggcaagaccugcggcuucguggacgagagaggccuguacaagagccugaagggcgccugcaagcugaagcugugcggcgugcugggccugagacugauggacggcaccuggguggccauccagaccagcgacgagaucaaguggugcagccccgaccagcuggugaaccugcacgacuuccacagcgacgagaucgagcaccuggugguggaggagcuggugaagaagagagaggagugccuggacgcccuggagaccaucaugaccaccaagagcgugagcuucagaagacugagccaccugagaaagcuggugcccggcuucggcaaggccuacaccaucuucaacaagacccugauggaggccgacgcccacuacaagagcaucagaaccuggaacgagaucauccccagcaagggcugccugagagugggcggcagaugccacccccacgugaacggcguguucuucaacggcaucauccugggccccgacggccacgugcugauccccgagaugcagagcagccugcugcaccagcacauggagcugcuggagagcagcgugaucccccugaugcacccccuggccgaccccagcaccguguucaaggacggcgacgaggccgaggacuucguggaggugcaccugcccgacgugcacaagcagaucagcggcguggaccugggccugcccaacuggggcaaguacgugcugaucagcgccggcgcccugaccgcccugaugcugaccaucuuccugaugaccugcugcagaaagaccaacagagccgagagcauccagcacagccccggcgagaucggcagaaaggugagcgugaccagccacaacggcagagugaucagcagcugggagagcuacaagagcggcagcgagaccaagcuguga

SEQ ID NO: 191018 - RNA, 1575 nt, Artificial Sequence
  derived and/or modified CDS sequence (opt4) from glycoprotein__RABV__EU827276.1
auggugccccugacccugcugguggccccccugcuggugcugagccugugcagcggcaaguuccccaucuacaccauccccgacaagcugggccccuggagccccaucgacauccaccaccugagcugccccaacaaccuggugguggaggacgagggcugcaccaaccugagcggcuucagcuacauggagcugaaggugggcuacaucagcgccaucaaggugaacggcuucaccugcaccggcguggugaccgaggccgagaccuacaccaacuucgugggcuacgugaccaccaccuucagaagaaagcacuucagacccacccccgacgccugcagaaccgccuacaacuggaagauggccggcgaccccagauacgaggagagccugcacaaccccuaccccgacuaccacuggcugagaaccgugaagaccaccaaggagagccuggugaucaucagccccagcguggccgaccuggaccccuacgacagaagccugcacagcagaguguuccccaacggcaagugcagcggcaucaccgugagcagcaccuacugccccaccaaccacgacuacaccaucuggaugcccgagaaccccagacugggcaccagcugcgacaucuucgugaacagcagaggcaagagagccagcaagggcagcaagaccugcggcuucguggacgagagaggccuguacaagagccugaagggcgccugcaagcugaagcugugcggcgugcugggccugagacugauggacggcaccuggguggccaugagaaccagcgacgagaccaaguggugcccccccgaccagcuggugaacauccacgacuuccacagcgacgagaucgagcaccuggugguggaggagcuggugaagaagagagaggagugccuggacgcccuggagagcaucaugaccaccaagagcgugagcuucagaagacugagccaccugagaaagcuggugcccggcuucggcaaggccuacaccaucuucaacaagacccugauggaggccgacgcccacuacaagagcgugagaaccugggacgagaucauccccagcaagggcugccugagagugggcggcagaugccacccccacgugcacggcguguucuucaacggcaucauccugggccccgacggccacgugcugauccccgagaugcagagcagccugcugcagcagcacauggagcugcuggagagcagcgugaucccccugaugcacccccuggccgaccccagcaccguguucaaggacgacgacgaggccgaggacuucguggaggugcaccugcccgacgugcacaagcagaucagcggcguggaccugggccugcccaacuggggcaaguacgugcugaugagcgccggcgcccugaucgcccugaugcugcugaucuuccugaugaccugcugcagaaagaucaagagacccgagagcacccagcacagccccagaggcaccggcagaaaggugagcgugaccagccagaacggcaaggugaucagcagcugggagagcuacaagagcggcggcgagaccagacuguga

SEQ ID NO: 191019 - RNA, 1575 nt, Artificial Sequence
  derived and/or modified CDS sequence (opt4) from glycoprotein__RABV__EU827277.1
auggugccccugacccugcugguggugccccugcuggugcugagccugugcagcggcaaguuccccaucuacaccauccccgacaagcugggccccuggagccccaucgacauccaccaccugagcugccccaacaaccuggugguggaggacgagggcugcaccaaccugagcggcuucagcuacauggagcugaaggugggcuacaucagcgccaucaaggugaacggcuucaccugcaccggcguggugaccgaggccgagaccuacaccaacuucgugggcuacgugaccaccaccuucagaagaaagcacuucagacccacccccgacgccugcagaaccgccuacaacuggaagauggccggcgaccccagauacgaggagagccugcacaaccccuaccccgacuaccacuggcugagaaccgugaagaccaccaaggagagccugaucaucaucagccccagcguggccgaccuggaccccuacgacagaagccugcacagcagaguguuccccaacggcaagugcagcggcaucaccgugagcagcaccuacugccccaccaaccacgacuacaccaucuggaugcccgagaaccccagacugggcaccagcugcgacaucuucgugaacagcagaggcaagagagccagcaagggcagcaagaccagcggcuucguggacgagagaggccuguacaagagccugaagggcgccugcaagcugaagcugugcggcgugcugggccugagacugauggacggcaccuggguggccaugagaaccagcgacgagaccaaguggugcccccccgugcagcuggugaacauccacgacuuccacagcgacgagaucgagcaccuggugguggaggagcuggugaagaagagagaggagugccuggacgcccuggagagcaucaugaccaccaagagcgugagcuucagaagacugagccaccugagaaagcuggugcccggcuucggcaaggccuacaccaucuucaacaagacccugauggaggccgacgcccacuacaagagcgugagaaccugggacgagaucauccccagcaagggcugccugagagugggcggcagaugccacccccacgugcacggcguguucuucaacggcaucauccugggccccgacggccacgugcugauccccgagaugcagagcagccugcugcagcagcacauggagcugcuggagagcagcgugaucccccugaugcacccccuggccgaccccagcaccguguucaaggacggcgacgaggccgaggacuucguggaggugcaccugcccgacgugcacaagcagaucagcggcguggaccugggccugcccaacuggggcaaguacgugcugaugagcgccggcgcccugaucgcccugaugcugaucaucuuccugaugaccugcugcagaaagaucaagagacccgagagcacccagcacagccccggcggcaccggcagaaaggugagcgugaccagccagaacggcaaggugaucagcagcugggagagcuacaagagcggcggcgagaccagacuguga

SEQ ID NO: 191020 - RNA, 1575 nt, Artificial Sequence; identical to SEQ ID NO: 190918
  derived and/or modified CDS sequence (opt4) from glycoprotein__RABV__EU877067.1

SEQ ID NO: 191021 - RNA, 1575 nt, Artificial Sequence
  derived and/or modified CDS sequence (opt4) from glycoprotein__RABV__FJ418876.1
augaucccccaggcccugcuguucgugccccugcugguguucagccugugcuucggcaaguuccccaucuacaccauccccgacaagcugggccccuggagccccaucgacauccaccaccugagcugccccaacaaccuggugguggaggacgagggcugcaccaaccugagcggcuucagcuacauggagcugaaggugggcuacaucagcgccaucaaggugaacggcuucaccugcaccggcguggugaccgaggccgagaccuacaccaacuucgugggcuacgugaccaccaccuucaagagaaagcacuucagacccacccccgacgccugcagagccgccuacaacuggaagauggccggcgaccccagauacgaggagagccugcacaaccccuaccccgacuaccacuggcugagaaccgugaagaccaccaaggagagccuggugaucaucagccccagcguggccgaccuggaccccuacgacaagagccugcacagcagaguguuccccagcggcaagugcagcggcaucaccgugagcagcaccuacugcagcaccaaccacgacuacaccaucuggaugcccgagaaccccagacugggcaccagcugcgacaucuucgugaacagcagaggcaagagagccagcaagggcagcaagaccugcggcuucguggacgagagaggccuguacaagagccugaagggcgccugcaagaucaagcugugcggcgugcugggccugagacugauggacggcaccuggguggccauccagaccagcgacgagaccaaguggugcccccccgaccagcuggugaaccugcacgacuucagaagcgacgagaucgagcaccuggugguggaggagcuggugaagaagagagaggagugccuggacgcccuggagagcaucaugaccaccaagagcgugagcuucagaagacugagccaccugagaaagcuggugcccggcuucggcaaggccuacaccaucuucaacaagacccugauggaggccgacgcccacuacaagagcgugagaaccuggaacgagaucauccccagcaagggcugccugagagugggcggcagaugccacccccacgugaacggcguguucuucaacggcaucauccugggccccgacggccacgugcugauccccgagaugcagagcagccugcugcagcagcacauggagcugcuggagagcagcgugaucccccugaugcacccccuggccgaccccagcaccaucuucaaggacggcgacgaggccgaggacuucguggaggugcaccugcccgacgugcacaagcaggugagcggcguggaccugggccugcccaacuggggcaaguacgugcugaugagcgccggcgcccugaucgcccugaugcugaugaucuuccugaugaccugcugcagaaagaccgacagaaccggcagcacccaccacagccccggcgagaccggcagaaaggugagcgugaccagccagaacggcagagugaucgccagcugggagagcuacaagagcggcggcgagaccagacuguga

SEQ ID NO: 191022 - RNA, 1575 nt, Artificial Sequence
  derived and/or modified CDS sequence (opt4) from glycoprotein__RABV__FJ418877.1
auggugccccaggcccugcuguucgugccccugcuggccaucccccugugcuucggcaaguuccccaucuacaccauccccgacaagcugggccccuggagccccaucgacauccaccaccugagcugccccaacaaccuggugguggaggacgagggcugcaccaaccugagcggcuucagcuacauggagcugaaggugggcuacaucagcgccaucaaggugaacggcuucaccugcaccggcguggugaccgaggccgagaccuacaccaacuucgugggcuacgugaccaccaccuucaagagaaagcacuucagacccacccccgacgccugcagaagcgccuacaacuggaagauggccggcgaccccagauacgaggagagccugcacaaccccuaccccgacuaccacuggcugagaaccgugaagaccaccaaggagagcuucgugaucaucagccccagcguggccgaccuggaccccuacgacaagagccugcacagcagaguguuccccagaggcaagugcagcggcaucaccgugagcagcaccuacugcagcaccaaccacgacuacaccaucuggaugcccgagaaccccagacugggcaccagcugcgacaucuucaccaacagcagaggcaagagagccagcaagggcagcaagaccugcggcuucguggacgagagaggccuguacaagagccugaagggcgccugcaagaugaagcugugcggcgugcugggccugagacugauggacggcaccuggguggccauccagaccagcgacgagaccaaguggugcccccccgaccagcuggugaaccugcacgacuuccacagcgacgagaucgagcaccuggugguggaggagcuggugaagaagagagaggagugccuggacgcccuggagagcaucaugaccaccaagagcgugagcuucagaagacugagccaccugagaaagcuggugcccggcuucggcaaggccuacaccaucuucaacaagacccugauggaggccgacgcccacuacaagagcgugagaaccuggaacgagaucauccccagcaagggcugccugagagugggcggcagaugccacccccacgugaacggcguguucuucaacggcaucauccugggccccgacggccacgugcugauccccgagaugcagagcagccugcugcagcagcacauggagcugcuggagagcagcgugaucccccugaugcacccccuggccgaccccagcaccguguucaaggacggcgacgaggccgaggacuucguggaggugcaccugcccgacgugcacaagcaggugagcggcguggaccugggccugcccagcuggggcaaguacgugcugaugagcgccggcauccugaccgcccugaugcugaugaucuuccugaugaccugcugcagaagaaccaacagagccgagagcauccagcacagccugggcgagaccggcagaaaggugagcgugaccagccagagcggcagagugaucagcagcugggagagcuacaagagcggcggcgagaccaagcuguga

SEQ ID NO: 191023 - RNA, 1575 nt, Artificial Sequence
  derived and/or modified CDS sequence (opt4) from glycoprotein__RABV__FJ418878.1
augaucccccaggugcugcuguucgugccccugcugguguucagcagcugcuucggcaaguuccccaucuacaccauccccgacaagcugggccccuggagccccaucgacauccaccaccugagcugccccaacaaccuggugguggaggacgagggcugcaccaaccugagcggcuucagcuacauggagcugaaggugggcuacaucagcgccaucaaggugaacggcuucaccugcaccggcguggugaccgaggccgagaccuacaccaacuucgugggcuacgugaccaccaccuucaagagaaagcacuucagacccaugcccgacgccugcagagccgccuacaacuggaagauggccggcgaccccagauacgaggagagccugcacaaccccuaccccgacuaccacuggcugagaaccgugaagaccaccaaggagagccuggugaucaucagccccagcguggccgaccuggaccccuacgacaagagccugcacagcagaguguuccccggcggcaagugcagcggcaucaccgugagcagcaccugcugcagcaccaaccacgacuacaccaucuggaugcccgagaaccccagacugggcaccagcugcgacaucuucaccaacagcagaggcaagagagccagcaagggcggcaagaccugcggcuucguggacgagagaggccuguacaagagccugaagggcgccugcaagaugaagcugugcggcgugcugggccugagacugauggacggcaccuggguggccauccagaccagcgacgagaucaaguggugcagccccgaccagcuggugaaccugcacgacuuccacagcgacgagaucgagcaccuggugguggaggagcuggugaagaagagagaggagugccuggacgcccuggagaccaucaugaccaccaagagcgugagcuucagaagacugagccaccugagaaagcuggugcccggcuucggcaaggccuacaccaucuucaacaagacccugauggaggccgacgcccacuacaagagcaucagaaccuggaacgagaucauccccagcaagggcugccugagagugggcggcagaugccacccccacgugaacggcguguucuucaacggcaucauccugggccccgacggccacgugcugauccccgagaugcagagcagccugcugcaccagcacauggagcugcuggagagcagcgugaucccccugaugcacccccuggccgaccccagcaccguguucaaggacggcgacgaggccgaggacuucguggacgugcaccugcccgacgugcacaagcagaucagcggcguggaccugggccugcccaacuggggcaaguacgugcugaucagcgccggcgcccugaccgcccugaugcugaugaucuuccugaugaccugcugcagaaaggccaacagagccgagagcauccagcacaaccccggcgagaccggcagaaaggugagcgugaccagccacaacggcagagugaucagcagcugggagagcuacaagagcggcggcgagaccaagcuguga

SEQ ID NO: 191024 - RNA, 1575 nt, Artificial Sequence
  derived and/or modified CDS sequence (opt4) from glycoprotein__RABV__FJ418879.1
augaucccccaggugcugcuguucgugccccugcugguguucagcagcugccugggcaaguuccccaucuacaccauccccgacaagcugggccccuggagccccaucgacauccaccaccugagcugccccaacaaccuggugguggaggacgagggcugcaccaaccugagcggcuucagcuacauggagcugaaggugggcuacaucagcgccaucaaggugaacggcuucaccugcaccggcguggugaccgaggccgagaccuacaccaacuucgugggcuacgugaccaccaccuucaagagaaagcacuucagacccaugcuggacgccugcagagccgccuacaacuggaagauggccggcgaccccagauacgaggagagccugcacaaccccuaccccgacuaccacuggcugagaaccgugaagaccagcaaggagagccuggugaucaucagccccagcguggccgaccuggaccccuacgacaagagccugcacagcagaguguuccccggcggcaagugcagcggcaucaccgugagcagcaccugcugcagcaccaaccacgacuacaccaucuggaugcccgagaaccccagacugggcaccagcugcgacaucuucaccaacagcagaggcaagagagccagcaagggcggcaagaccugcggcuucguggacgagagaggccuguacaagagccugaagggcgccugcaaggugaagcugugcggcgugcugggccugagacugauggacggcaccuggguggccauccagaccagcgacgagaucaaguggugcagccccgaccagcuggugaaccugcacgacuuccacagcgacgagaucgagcaccuggugguggaggagcuggugaagaagagagaggagugccuggacgcccuggagaccaucaugaccaccaagagcgugagcuucagaagacugagccaccugagaaagcuggugcccggcuucggcaaggccuacaccaucuucaacaagacccugauggaggccgacgcccacuacaagagcaucagaaccuggaacgagaucauccccagcaagggcugccugagagugggcggcagaugccacccccacgugaacggcguguucuucaacggcaucauccugggccccgacggccacgugcugauccccgagaugcagagcagccugcugcaccagcacauggagcugcuggagagcagcgugaucccccugaugcacccccuggccgaccccagcaccguguucaaggacggcgacgaggccgaggacuucguggaggugcaccugcccgacgugcacaagcagaucagcggcguggaccugggccugcccaacuggggcaaguacgugcugaucagcgccggcgcccugaccgccagcaugcugaugaucuuccugaugaccugcugcagaaagaccaacagagccgagagcauccagcacagccccggcgagaccggcagaaaggugagcgugaccagccacaacggcagagugaucagcagcugggagagcuacaagagcggcggcgagaccaagcuguga

SEQ ID NO: 191025 - RNA, 1575 nt, Artificial Sequence; identical to SEQ ID NO: 191022
  derived and/or modified CDS sequence (opt4) from glycoprotein__RABV__FJ418880.1

SEQ ID NO: 191026 - RNA, 1575 nt, Artificial Sequence
  derived and/or modified CDS sequence (opt4) from glycoprotein__RABV__FJ418881.1
augaucccccaggugcugcuguucgugccccugcugguguucagcagcugcuucggcaaguuccccaucuacaccauccccgacaagcugggccccuggagccccaucgacauccaccaccugagcugccccaacaaccuggugguggaggacgagggcugcaccaaccugagcggcuucagcuacauggagcugaaggugggcuacaucagcgccaucaaggugaacggcuucaccugcaccggcguggugaccgaggccgagaccuacaccaacuucgugggcuacgugaccaccaccuucaagagaaagcacuucagacccaugcccgacgccugcagagccgccuacaacuggaagauggccggcgaccccagauacgaggagagccugcacaaccccuaccccgacuaccacuggcugagaaccgugaagaccagcaaggagagccuggugaucaucagccccagcguggccgaccuggaccccuacgacaagagccugcacagcagaguguuccccggcggcaagugcagcggcaucaccgugagcagcaccugcugcagcaccaaccacgacuacaccaucuggaugcccgagaaccccagacccggcaccagcugcgacaucuucaccaacagcagaggcaagagagccagcaagggcggcaagaccugcggcuucguggacgagagaggccuguacaagagccugaagggcgccugcaaggugaugcugugcggcgugcugggccugagacugauggacggcaccuggguggccauccagaccagcgacgagaucaaguggugcagccccgaccagcuggugaaccugcacgacuuccacagcgacgagaucgagcaccuggugguggaggagcuggugaagaagagagaggagugccuggacgcccuggagaccaucaugaccaccaagagcgugagcuucagaagacugagccaccugagaaagcuggugcccggcuucggcaaggccuacaccaucuucaacaagacccugauggaggccgacgcccacuacaagagcaucagaaccuggaacgagaucauccccagcaagggcugccugagagugggcggcagaugccacccccacgugaacggcguguucuucaacggcaucauccugggccccgacggccacgugcugauccccgagaugcagagcagccugcugcaccagcacauggagcugcuggagagcagcgugaucccccugaugcacccccuggccgaccccagcaccguguucaaggacggcgacgaggccgaggacuucguggaggugcaccugcccgacgugcacaagcagaucagcggcguggaccugggccugcccaacuggggcaaguacgugcugaucagcgccggcgcccugaccgcccugaugcugaugaucuuccugaugaccugcugcagaaagaccaacagagccgagagcauccagcacagccccggcgagaccggcagaaaggugagcgugaccagccacaacggcagagugaucagcagcugggagagcuacaagagcggcggcgagaccaagcuguga

SEQ ID NO: 191027 - RNA, 1575 nt, Artificial Sequence
  derived and/or modified CDS sequence (opt4) from glycoprotein__RABV__FJ418883.1
augaucccccaggugcugcuguucgugccccugcugguguucagcagcugcuucggcaaguuccccaucuacaccauccccgacaagcugggccccuggagccccaucgacauccaccaccugagcugccccaacaaccuggugguggaggacgagggcugcaccaaccugagcggcuucagcuacauggagcugaaggugggcuacaucagcgccaucaaggugaacggcuucaccugcaccggcguggugaccgaggccgagaccuacaccaacuucgugggcuacgugaccaccaccuucaagagaaagcacuucagacccaugcccgacgccugcagagccgccuacaacuggaagauggccggcgaccccagauacgaggagagccugcacaaccccuaccccgacuaccacuggcugagaaccgugaagaccaccaaggagagccuggugaucaucagccccagcguggccgaccuggaccccuacgacaagagccugcacagcagaguguuccccggcggcaagugcagcggcaucaccgugagcagcaccugcugcagcaccaaccacgacuacaccaucuggaugcccgagaaccccagacugggcaccagcugcgacaucuucaccaacagcagaggcaagagagccagcaagggcggcaagaccugcggcuucguggacgagagaggccuguacaagagccugaagggcgccugcaagaugaagcugugcggcgugcugggccugagacugauggacggcaccuggguggccauccagaccagcgacgagaucaaguggugcagccccgaccagcuggugaaccugcacgacuuccacagcgacgagaucgagcaccuggugguggaggagcuggugaagaagagagaggagugccuggacgcccuggagaccaucaugaccaccaagagcgugagcuucagaagacugagccaccugagaaagcuggugcccggcuucggcaaggccuacaccaucuucaacaagacccugauggaggccgacgcccacuacaagagcaucagaaccuggaacgagaucauccccagcaagggcugccugagagugggcggcagaugccacccccacgugaacggcguguucuucaacggcaucauccugggccccgacggccacgugcugauccccgagaugcagagcagccugcugcaccagcacauggagcugcuggagagcagcgugaucccccugaugcacccccuggccgaccccagcaccguguucaaggacggcgacgaggccgaggacuucguggaggugcaccugcccgacgugcacaagcagaucagcggcguggaccugggccugcccaacuggggcaaguacgugcugaucagcgccggcgcccugaccgcccugaugcugaagaucuuccugaugaccugcugcagaaagaccaacagagccgagagcauccagcacagccccggcgagaucggcagaaaggugagcgugaccagccacaacggcagagugaucagcagcugggagagcuacaagagcggcagcgagaccaagcuguga

SEQ ID NO: 191028 - RNA, 1575 nt, Artificial Sequence
  derived and/or modified CDS sequence (opt4) from glycoprotein__RABV__FJ418884.1
augaucccccaggugcugcuguucgugccccugcugguguucagcagcugcuucggcaaguuccccaucuacaccauccccgacaagcugggccccuggagccccaucgacauccaccaccugagcugccccaacaaccuggugguggaggacgagggcugcaccaaccugagcggcuucagcuacauggagcugaaggugggcuacaucagcgccaucaaggugaacggcuucaccugcaccggcguggugaccgaggccgagaccuacaccaacuucgugggcuacgugaccaccaccuucaagagaaagcacuucagacccaugcccgacgccugcagagccgccuacaacuggaagauggccggcgaccccagauacgaggagagccugcacaaccccuaccccgacuaccacuggcugagaaccgugaagaccaccaaggagagccuggugaucaucagccccagcguggccgaccuggaccccuacgacaagagccugcacagcagaguguuccccggcggcaagugcagcggcaucaccgugagcagcaccugcugcagcaccaaccacgacuacaccaucuggaugcccgagaaccccagacugggcaccagcugcgacaucuucaccaacagcagaggcaagagagccagcaagggcggcaagaccugcggcuucguggacgagagaggccuguacaagagccugaagggcgccugcaagaugaagcugugcggcgugcugggccugagacugauggacggcaccuggguggccauccagaccagcgacgagaucaaguggugcagccccgaccagcuggugaaccugcacgacuuccacagcgacgagaucgagcaccuggugguggaggagcuggugaagaagagagaggagugccuggacgcccuggagaccaucaugaccaccaagagcgugagcuucagaagacugagccaccugagaaagcuggugcccggcuucggcaaggccuacaccaucuucaacaagacccugauggaggccgacgcccacuacaagagcaucagaaccuggaacgagaucauccccagcaagggcugccugagagugggcggcagaugccacccccacgugaacggcguguucuucaacggcaucauccugggccccgacggccacgugcugauccccgagaugcagagcagccugcugcaccagcacauggagcugcuggagagcagcgugaucccccugaugcacccccuggccgaccccagcaccguguucaaggacggcgacgaggccgaggacuucguggaggugcaccugcccgacgugcacaagcagaucagcggcguggaccugggccugcccaacuggggcaaguacgugcugaucagcgccggcgcccugaccgcccugaugcugaccaucuuccugaugaugugcugcagaaagaccaacagagccgagagcauccagcacagccccggcgagaucggcagaaaggugagcgugaccagccacaacggcagagugaucagcagcugggagagcuacaagagcggcagcgagaccaagcuguga

SEQ ID NO: 191029 - RNA, 1575 nt, Artificial Sequence
  derived and/or modified CDS sequence (opt4) from glycoprotein__RABV__FJ418885.1
auggugccccaggugcugcuguucgugccccugcugguguucagcagcugcuucggcaaguuccccaucuacaccauccccgacaagcugggccccuggagccccaucgacauccaccaccugagcugccccaacaaccuggugguggaggacgagggcugcaccaaccugagcggcuucagcuacauggagcugaaggugggcuacaucagcgccaucaaggugaacggcuucaccugcaccggcguggugaccgaggccgagaccuacaccaacuucgugggcuacgugaccaccaccuucaagagaaagcacuucagacccaugcccgacgccugcagagccgccuacaacuggaagauggccggcgaccccagauacgaggagagccugcacaaccccuaccccgacuaccacuggcugagaaccgugaagaccaccaaggagagccuggugaucaucagccccagcguggccgaccuggaccccuacgacaagagccugcacagcagaguguuccccggcggcaagugcagcggcaucaccgugagcagcaccugcugcagcaccaaccacgacuacaccaucuggaugcccgagaaccccagacugggcaccagcugcgacaucuucaccaacagcagaggcaagagagccagcaagggcggcaagaccugcggcuucguggacgagagaggccuguacaagagccugaagggcgccugcaagaugaagcugugcggcgugcugggccugagacugauggacggcaccuggguggccauccagaccagcgacgagaucaaguggugcagccccgaccagcuggugaaccugcacgacuuccacagcgacgagaucgagcaccuggugguggaggagcuggugaagaagagagaggagugccuggacgcccuggagaccaucaugaccaccaagagcgugagcuucagaagacugagccaccugagaaagcuggugcccggcuucggcaaggccuacaccaucuucaacaagacccugauggaggccgacgcccacuacaagagcaucagaaccuggaacgagaucauccccagcaagggcugccugagagugggcggcagaugccacccccacgugaacggcguguucuucaacggcaucauccugggccccgacggccacgugcugauccccgagaugcagagcagccugcugcaccagcacauggagcugcuggagagcagcgugaucccccugaugcacccccuggccgaccccagcaccguguucaaggacggcgacgaggccgaggacuucguggaggugcaccugcccgacgugcacaagcagaucagcggcguggaccugggccugcccaacuggggcaaguacgugcugaucagcgccggcgcccugaccgcccugaugcugaugaucuuccugaugaccugcugcagaaaggccaacagagccgagagcauccagcacaaccccggcgagaccggcagaaaggugagcgugaccagccacaacggcagagugaucagcagcugggagagcuacaagagcggcggcgagaccaagcuguga

SEQ ID NO: 191030 - RNA, 1575 nt, Artificial Sequence
  derived and/or modified CDS sequence (opt4) from glycoprotein__RABV__FJ418886.1
augaucccccaggugcugcuguucgugccccugcugguguucagcagcugcuucggcaaguuccccaucuacaccauccccgacaagcugggccccuggagccccaucgacauccaccaccugagcugccccaacaaccuggugguggaggacgagggcugcaccaaccugagcggcuucagcuacauggagcugaaggugggcuacaucagcgccaucaaggugaacggcuucaccugcaccggcguggugaccgaggccgagaccuacaccaacuucgugggcuacgugaccaccaccuucaagagaaagcacuucagacccaugcccgacgccugcagagccgccuacaacuggaagauggccggcgaccccagauacgaggagagccugcacaaccccuaccccgacuaccacuggcugagaaccgugaagaccaccaaggagagccuggugaucaucagccccagcguggccgaccuggaccccuacgacaagagccugcacagcagaguguuccccggcggcaagugcagcggcaucaccgugagcagcaccugcugcagcaccaaccacgacuacaccaucuggaugcccgagaaccccagacugggcaccagcugcgacaucuucaccaacagcagaggcaagagagccagcaagggcggcaagaccugcggcuucguggacgagagaggccuguacaagagccugaagggcgccugcaagaugaagcugugcggcgugcugggccugagacugauggacggcaccuggguggccauccagaccagcgacgagaucaaguggugcagccccgaccagcuggugaaccugcacgacuuccacagcgacgagaucgagcaccuggugguggaggagcuggugaagaagagagaggagugccuggacgcccuggagaccaucaugaccaccaagagcgugagcuucagaagacugagccaccugagaaagcuggugcccggcuucggcaaggccuacaccaucuucaacaagacccugauggaggccgacgcccacuacaagagcaucagaaccuggaacgagaucauccccagcaagggcugccugagagugggcggcagaugccacccccacgugaacggcguguucuucaacggcaucauccugggccccgacggccacgugcugauccccgagaugcagagcagccugcugcaccagcacauggagcugcuggagagcagcgugaucccccugaugcacccccuggccgaccccagcaccguguucaaggacggcgacgaggccgaggacuucguggaggugcaccugcccgacgugcacaagcagaucagcggcguggaccugggccugcccaacuggggcaaguacgugcugaucagcgccggcgcccugaccgcccugaugcugcagaucuuccugaugaccugcugcagaaagaccaucagagccgagagcauccagcacagccccggcgagaccggcagaaaggugagcgugaccuuccacaacggcagagugaucagcagcugggagagcuacaagagcggcagcgagaccaagcuguga

SEQ ID NO: 191031 - RNA, 1575 nt, Artificial Sequence
  derived and/or modified CDS sequence (opt4) from glycoprotein__RABV__FJ418887.1
auggugccccaggugcugcuguucgugccccugcugguguucagcagcugcuucggcaaguuccccaucuacaccauccccgacaagcugggccccuggagccccaucgacauccaccaccugagcugccccaacaaccuggugguggaggacgagggcugcaccaaccugagcggcuucagcuacauggagcugaaggugggcuacaucagcgccaucaaggugaacggcuucaccugcaccggcguggugaccgaggccgagaccuacaccaacuucgugggcuacgugaccaccaccuucaagagaaagcacuucagacccaugcccgacgccugcagagccgccuacaacuggaagauggccggcgaccccagauacgaggagagccugcacaaccccuaccccgacuaccacuggcugagaaccgugaagaccaccaaggagagccuggugaucaucagccccagcguggccgaccuggaccccuacgacaagagccugcacagcagaguguuccccggcggcaagugcagcggcaucaccgugagcagcaccugcugcagcaccaaccacgacuacaccaucuggaugcccgagaaccccagacugggcaccagcugcgacaucuucaccaacagcagaggcaagagagccagcaagggcggcaagaccugcggcuucguggacgagagaggccuguacaagagccugaagggcgccugcaagaugaagcugugcggcgugcugggccugagacugauggacggcaccuggguggccauccagaccagcgacgagaucaaguggugcagccccgaccagcuggugaaccugcacgacuuccacagcgacgagaucgagcaccuggugguggaggagcuggugaagaagagagaggagugccuggacgcccuggagaccaucaugaccaccaagagcgugagcuucagaagacugagccaccugagaaagcuggugcccggcuucggcaaggccuacaccaucuucaacaagacccugauggaggccgacgcccacuacaagagcaucagaaccuggaacgagaucauccccagcaagggcugccugagagugggcggcagaugccacccccacgugaacggcguguucuucaacggcaucauccugggccccgacggccacgugcugauccccgagaugcagagcagccugcugcaccagcacauggagcugcuggagagcagcgugaucccccugaugcacccccuggccgaccccagcaccguguucaaggacggcgacgaggccgaggacuucguggaggugcaccugcccgacgugcacaagcagaucagcggcguggaccugggccugcccaacuggggcaaguacgugcugaucagcgccggcgcccugaccgcccugaugcugaugaucuuccugaugaccugcugcagaagagccaacagagccgagagcauccagcacaaccccggcgagaccggcagaaaggugagcgugaccagccacaacggcagagugaucagcagcugggagagcuacaagagcggcggcgagaccaagcuguga

SEQ ID NO: 191032 - RNA, 1575 nt, Artificial Sequence
  derived and/or modified CDS sequence (opt4) from glycoprotein__RABV__FJ465384.1
auggugagccagagccugcuguucgugccccugcugggcuucagccugugcuucggcaaguuccccaucuacaccauccccgacaagcugggccccuggagccccaucgacauccaccaccugagcugccccaacaaccuggugguggaggacgagggcugcaccaaccugagcggcuucagcuacauggagcugaaggugggcuacaucagcgccaucaaggugaacggcuucaccugcaccggcguggugaccgaggccgagaccuacaccaacuucgugggcuacgugaccaccaccuucagaagaaagcacuucagacccacccccgacgccugcagagccgccuaccacuggaagauggccggcgaccccagauacgaggagagccugcacaaccccuaccccgacuaccacuggcugagaaccgugaagaccaccaaggagagccuggugaucaucagccccagcguggccgaccuggaccccuacgacaagagccugcacagcagaguguuccccaacggcaagugcagcggccugaccgugagcagcaccuacugcagcaccaaccacgacuacaccauguggaugcccgagaaccccagacugggcaccagcugcgacaucuucaccaacagcagaggcaagagagccagcagaggcaacaagaccugcggcuucguggacgagagaggccuguacaagagccugaagggcgccugcaagcugaagcugugcggcgugcugggccugagacugaucgacggcaccuggguggccaugcagaccagcgacgagaccaaguggugcccccccgaccagcuggugaaccugcacgacuucagaagcgacgagaucgagcaccuggugguggaggagcuggugaagaagagagaggagugccuggacgcccuggagagcaucaugaccaccaagagcgugagcuucagaagacugagccaccugagaaagcuggugcccggcuucggcaaggccuacaccaucuucaacaagacccugauggaggccgacgcccacuacaagagcaucagaaccugggacgagaucgugcccagcaagggcugccugagagugggcggcaagugccacccccacaucaacggcguguucuucaacggcaucauccugggcagcgacggccacgugcugauccccgagaugcagagcagccugcugcagcagcacaucgagcugcuggagagcagcguggugccccugaugcacccccuggccgaccccagcaccguguucaaggacggcaacgaggccgaggacuucguggaggugcaccugcccgacgugcacaagcaggugagcgagaucgaccugggccugcccaacuggggcaaguacauccuggugagcgccggcgcccugaucgcccugaugcugaccauccugcugaucaccugcugcagaagagugcacagacccgagcccaagcagcacagacugagaggcaccgagagaaagguggccgugaccagccagagcggcaaggccaucagcagcugggagagcuacaagaacggcggcgagaccagaauguga

SEQ ID NO: 191033 - RNA, 1575 nt, Artificial Sequence
  derived and/or modified CDS sequence (opt4) from glycoprotein__RABV__FJ465385.1
auguucccccaggcccugcuguucgugccccugcugggccugagccugugcagcggcagauuccccaucuacaccauccccgacaagcugggccccuggagccccaucgacauccaccaccugagcugccccaacaaccuggugguggaggacgagggcugcaccaaccugagcggcuucagcuacauggagcugaaggugggcuacaucagcagcaucaaggugagcggcuucaccugcaccggcguggugaccgaggccgagaccuacaccaacuucgugggcuacgugaccaccaccuucagaagaaagcacuucagacccacccccgacgccugcagagccgcccacaacuggaagauggccggcgaccccagauacgaggagagccugcacaaccccuaccccgacuaccacuggcugagaaccgugaagaccaccaaggagagccuggugaucaucagccccagcguggccgaccuggaccccuacgacaagagccugcacagcagaguguuccccaacggcaagugcagcggccugaccguguucagcaccuacugcagcaccaaccacgaguacaccguguggaugcccgagaaccccagacugggcaccagcugcgacaucuucaccaacagcagaggcaagagagccagcaagggcaacaagaccugcggcuucguggacgagagaggccuguacaagagccugaagggcgccugcaagcugaagcugugcggcgugcugggccugagacugauggacggcaccuggguggccaugcagaccagcgacgagaccaaguggugcccccccgaccagcuggugaaccugcacgacuucagaagcgacgagaucgagcaccuggugguggaggagcuggugaagaagagagaggagugccuggacgcccuggagagcaucaugaccaccaagagcgugagcuucagaagacugagccaccugagaaagcuggugcccggcuucggcaaggccuacaccaucuucaacaagacccugauggaggccgacgcccacuacaagagcgugagaaccuggaacgagaucauccccagcaagggcugccugagagugggcggcagaugccacccccacgugaacggcguguucuucaacggcaucauccugggcagcgacggccacgugcugauccccgagaugcagagcagccugcugcagcagcacguggagcugcuggagagcagcgugaucccccugaugcacccccuggccgaccccagcaccguguucaagggcggcgacgaggccgaggacuucguggaggugcaccugcccgacgugcacaagcaggugagcggcguggaccugggccugcccaacuggggcaaguacauccuggugagcgccggcgcccugaucgcccugauccugaucaucuuccugaugaccugcugcagaagauucagaagacccaagcccgcccagcacaaccugggcggcaccggcagaaaggugagcgugaccagccagagcggcaagguggugagcagcugggagagcuacaagaacggcggcgagaccagacuguga

SEQ ID NO: 191034 - RNA, 1575 nt, Artificial Sequence
  derived and/or modified CDS sequence (opt4) from glycoprotein__RABV__FJ465386.1
auguucagcagaagccugcuguucgugagccugcugggcuucccccugugcuucggcaaguuccccaucuacaccauccccgacaagcugggccccuggagccccaucgacauccaccaccugagcugccccaacaaccuggugguggaggacgagggcugcaccaaccugagcggcuucagcuacauggagcugaaggugggcuacaucagcgccaucaaggugaacggcuucaccugcaccggcguggugaccgaggccgagaccuacaccaacuucgugggcuacgugaccaccaccuucagaagaaagcaccugagacccacccccgacgccugcagaagcgccuacaacuggaagauggccggcgaccccagauacgaggagagccugcacaaccccuaccccgacuaccacuggcugagaaccgugaagaccaccaaggagagccuggugaucaucagccccagcguggccgaccuggaccccuacgacaagagccugcacagcagaguguuccccaacggcaagugcagcggccugaccgugagcagcaccuacugcagcaccaaccacgacuacaccaucuggaugcccgagaaccccagacugggcaccagcugcgacaucuucaccaacagcaagggcaagagagccagcagaggcaacaagaccugcggcuucguggacgagagaggccuguacaagagccugaagggcgccugcaagcugaagcugugcggcgugcugggccugagacugaucgacggcaccuggguggccaugcacaccagcgacgagaccaaguggugcccccccgaccagcuggugaaccugcacgacuucagaagcgacgagaucgagcaccuggugguggaggagcuggugaagaagagagaggagugccuggacgcccuggagagcaucaugaccaccaagagcgugagcuucagaagacugagccaccugagaaagcuggugcccggcuucggcaaggccuacaccaucuucaacaagacccugauggaggccgacgcccacuacaagagcaucagaaccugggacgagaucgugcccagcaagggcugccugagagugggcggcagaugccacccccacgugaacggcguguucuucaacggcaucauccugggcagcgacggccacgugcugauccccgagaugcagagcagccugcugcagcagcacguggagcugcuggagagcagcguggugccccugaugcacccccuggccgaccccagcaccguguucaaggacggcaacgaggccgaggacuucguggaggugcaccugcccgacgugcacaagcaggugagcggcguggaccugggccugcccgacuggggcaaguacauccuggugagcgccggcgcccugaucgcccugaugcugaucaucuuccugaugaccugcugcagaagaguguacagaagagagagcaagcagcacagccugagaggcaccgagagaaaggugagcgugaccagccagaacggcaaggccaucagcagcugggagagcuacaagaacggcagcgagaccagaauguga

SEQ ID NO: 191035 - RNA, 1575 nt, Artificial Sequence
  derived and/or modified CDS sequence (opt4) from glycoprotein__RABV__FJ465387.1
auguucagcagaagccugcuguucgugagccugcugggcuucccccugugcuucggcaaguuccccaucuacaccauccccgacaagcugggccccuggagccccaucgacauccaccaccugagcugccccaacaaccuggugguggaggacgagggcugcaccaaccugagcggcuucagcuacauggagcugaaggugggcuacaucagcgccaucaaggugaacggcuucaccugcaccggcguggugaccgaggccgagaccuacaccaacuucgugggcuacgugaccaccaccuucagaagaaagcaccugagacccacccccgacgccugcagaagcgccuacaacuggaagauggccggcgaccccagauacgaggagagccugcacaaccccuaccccgacuaccacuggcugagaaccgugaagaccaccaaggagagccuggugaucaucagccccagcguggccgaccuggaccccuacgacaagagccugcacagcagaguguuccccaacggcaagugcagcggccugaccgugagcagcaccuacugcagcaccaaccacgacuacaccaucuggaugcccgagaaccccagacugggcaccagcugcgacaucuucaccaacagcaagggcaagagagccagcagaggcaacaagaccugcggcuucguggacgagagaggccuguacaagagccugaagggcgccugcaagcugaagcugugcggcgugcugggccugagacugaucgacggcaccuggguggccaugcacaccagcgacgagaccaaguggugcccccccgaccagcuggugaaccugcacgacuucagaagcgacgagaucgagcaccuggugguggaggagcuggugaagaagagagaggagugccuggacgcccuggagagcaucaugaccaccaagagcgugagcuucagaagacugagccaccugagaaagcuggugcccggcuucggcaaggccuacaccaucuucaacaagacccugauggaggccgacgcccacuacaagagcaucagaaccugggacgagaucauccccagcaagggcugccugagagugggcggcagaugccacccccacgugaacggcguguucuucaacggcaucauccugggcagcgacggccacgugcugauccccgagaugcagagcagccugcugcagcagcacguggagcugcuggagagcagcguggugccccugaugcacccccuggccgaccccagcaccguguucaaggacggcaacgaggccgaggacuucguggaggugcaccugcccgacgugcacaagcaggugagcggcguggaccugggccugcccgacuggggcaaguacauccuggugagcgccggcgcccugaucgcccugaugcugaucaucuuccugaugaccugcugcagaagagugcacagaagagagagcaagcagcacagccugagaggcaccgagagaaaggugagcgugaccagccagaacggcaaggccaucagcagcugggagagcuacaagaacggcagcgagaccagaauguga

SEQ ID NO: 191036 - RNA, 1575 nt, Artificial Sequence
  derived and/or modified CDS sequence (opt4) from glycoprotein__RABV__FJ465388.1
auguucagccagagccugcuguucgugccccugcugggcuucagccugugcuucggcaaguuccccaucuacaccauccccgacaagcugggccccuggagccccaucgacauccaccaccugagcugccccaacaaccuggugguggaggacgagggcugcaccaaccugagcggcuucagcuacauggagcugaaggugggcuacaucagcgccaucagagugagcggcuucaccugcaccggcguggugaccgaggccgagaccuacaccaacuucgugggcuacgugaccaccaccuucaagagaaagcacuucagacccacccccgacgccugcagagccgccuaccacuggaagauggccggcgaccccagauacgaggagagccugcacaaccccuaccccgacuaccacuggcugagaaccgugaagaccaccaaggagagccuggugaucaucagccccagcguggccgaccuggaccccuacgacaagagccugcacagcagaguguuccccaacggcaagugcagcggccugaccgugagcagcaccuacugccugaccaaccacgacuacaccaucuggaugcccgagaaccccagacugggcaccagcugcgacaucuucaccaacagcagaggcaagagagccagcagaggcaacaagaccugcggcuucguggacgagagaggccuguacaagagccugaagggcgccugcaagcugaagcugugcggcgugcugggccugagacugaucgacggcaccuggguggccaugcagaccagcgacgagaccaaguggugcccccccgaccagcuggugaaccugcacgacuucagaagcgacgagaucgagcaccuggugguggaggagcuggugaagaagagagaggagugccuggacgcccuggagagcaucaugaccaccaagagcgugagcuucagaagacugagccaccugagaaagcuggugcccggcuucggcaaggccuacaccaucuucaacaagacccugauggaggccgacgcccacuacaagagcaucagaaccugggacgagaucgugcccagcaagggcugccugagagugggcggcagaugccacccccacgugaacggcguguucuucaacggcaucauccugggcagcgacggccacgugcugauccccgagaugcagagcagccugcugcagcagcacguggagcugcuggagagcagcguggugccccugaugcacccccuggccgaccccagcaccguguucaaggacggcaacgaggccgaggacuucguggaggugcaccugcccgacgugcacaagcaggugagcggcguggaccugggccugcccaacuggggcaaguacauccuggugagcgccggcgcccugaucgcccugaugcugaccaucuuccugaugaccugcugcagaagagugagaagacccgagcccaagcagcacagacugagaggcaccgagaagaagguggccgugaccccccagagcggcaaggccaucagcagcugggagagcuacaagaacggcgacgagaccagaauguga

SEQ ID NO: 191037 - RNA, 1575 nt, Artificial Sequence
  derived and/or modified CDS sequence (opt4) from glycoprotein__RABV__FJ465389.1
augcugagccagagccugcugcuggugagccugcugggcuucccccugugcuucggcaaguuccccaucuacaccauccccgacaagcugggccccuggagccccaucgacauccaccaccugagcugccccaacaaccuggugguggaggacgagggcugcaccagccugagcggcuucagcuacauggagcugaaggugggcuacaucagcgccaucaaggugaacggcuucaccugcaccggcguggugaccgaggccgagaccuacaccaacuucgugggcuacgugaccaccaccuucagaagaaagcaccugagacccacccccgacgccugcagaagcgccuacaacuggaagauggccggcgaccccagauacgaggagagccugcacaaccccuaccccgacuaccacuggcugagaaccgugaagaccaccaaggagagccuggugaucaucagccccagcguggccgaccuggaccccuacgacaagagccugcacagcagaguguuccccaacggcaagugcagcggccugaccgugagcagcaccuacugcagcaccaaccacgacuacaccaucuggaugcccgagaaccccagacugggcaccagcugcgacaucuucaccaacagcagaggcaagagagccagcagaggcaacaagaccugcggcuucguggacgagagaggccuguacaagagccugaagggcgccugcaagcugaagcugugcggcgugcugggccugagacugaucgacggcaccuggguggccaugcacaccagcgacgagaccaaguggugcccccccgaccagcuggugaaccugcacgacuucagaagcgacgagaucgagcaccuggugguggaggagcuggugaagaagagagaggagugccuggacgcccuggagagcaucaugaccaccaagagcgugagcuucagaagacugagccaccugagaaagcuggugcccggcuucggcaaggccuacaccaucuucaacaagacccugauggaggccgacgcccacuacaagagcaucagaaccugggacgagaucgugcccagcaagggcugccugagagugggcggcagaugccacccccacgugaacggcguguucuucaacggcaucauccugggcagcgacggccacgugcugauccccgagaugcagagcagccugcugcagcagcacguggagcugcuggagagcagcguggugccccugaugcacccccuggccgaccccagcaccguguucaaggacggcaacgaggccgaggacuucguggaggugcaccugcccgacgugcacaagcaggugagcggcguggaccugggccugcccgacuggggcaaguacauccuggugagcgccggcgcccugaucgcccugaugcugaucaucuuccugaugaccugcugcagaagagugcacagaagagagagcaagcagcacagccugagaggcaccgagagaaaggugagcgugaucagccagaacggcaagaccaucagcagcugggagagcuacaagaacggcagcgacaccagaauguga

SEQ ID NO: 191038 - RNA, 1575 nt, Artificial Sequence
  derived and/or modified CDS sequence (opt4) from glycoprotein__RABV__FJ465390.1
auguucagccagacccugcuguucgugccccugcugggccugagccugugcuucggcaaguuccccaucuacaccauccccgacaagcugggccccuggagccccaucgacauccaccaccugagcugccccaacaaccuggugguggaggacgagggcugcaccaaccugagcggcuucagcuacauggagcugaaggugggcuacaucagcgccaucaaggugaacggcuucaccugcaccggcguggugaccgaggccgagaccuacaccaacuucgugggcuacgugaccaccaccuucagaagaaagcacuucagacccacccccgacgccugcagagccgccuacaacuggaagauggccggcgaccccagauacgaggagagccugcacaaccccuaccccgacuaccacuggcugagaaccgugaagaccaccaaggagagccuggugaucaucagccccagcguggccgaccuggaccccuacgacaagagccugcacagcagaguguuccugaacggcaagugcagcggccugaccgugagcagcaccuacugcagcaccaaccacgacuacaccaucuggaugcccgaggaccccagacugggcaccagcugcgacaucuucaucaacagcagaggcaagagagccagcaagggcagcaagaccugcggcuucguggacgagagaggccuguacaagagccugaagggcgccugcaagcugaagcugugcggcgugcugggccugagacugaucgacggcaccuggguggccaugcagaccagcgaggagcccaaguggugcccccccgaccagcuggugaaccugcacaacuucagaagcgacgagaucgagcaccuggugguggaggagcuggugaagaagagagaggagugccuggacgcccuggagagcaucaucaccaccaagagcgugagcuucagaagacugagccaccugagaaagcuggugcccggcuucggcaaggccuacaccaucuucaacaagacccugauggaggccgacgcccacuacaagagcaucagaaccugggacgagaucauccccagcaagggcugccugagagugggcggcagaugccacccccacgugaacggcguguucuucaacggcaucauccugggcagcgacggccacgugcugauccccgagaugcagagcagccugcugcagcagcacguggagcugcuggagagcagcgugaucccccugaugcacccccuggccgaccccagcaccguguucaagggcggcgacgaggccgaggacuucguggagauccaccugcccgacgugcacaagcagaucagcggcguggaccugggccugcccaacuggggcaaguacauccuggugggcgccggcgcccugaucgcccugaugcugaucaucuuccugaucaccugcugcagaggcuuccacagacccaagagcacccagcacagccugggcggcaccggcagaaaggugagcgugaccccccagagcggcaaggugaucagcagcugggagagcuacaagaagggcagcgagaccagacuguga

SEQ ID NO: 191039 - RNA, 1575 nt, Artificial Sequence
  derived and/or modified CDS sequence (opt4) from glycoprotein__RABV__FJ465391.1
augcccagccagagccugcuguucgugagccugcugggcuucagccugugcuucggcaaguuccccaucuacaccauccccgacaagcugggccccuggagccccaucgacauccaccaccugagcugccccaacaaccuggugguggaggacgagggcugcaccaaccugagcggcuucagcuacauggagcugaaggugggcuacaucagcgccaucaaggugaacggcuucaccugcaccggcguggugaccgaggccgagaccuacaccaacuucgugggcuacgugaccaccaccuucagaagaaagcacuucagacccacccccgacgccugcagaagcgccuacaacuggaagauggccggcgaccccagauacgaggagagccugcacaaccccuaccccgacuaccacuggcugagaaccgugaagaccaccaaggagagccuggugaucaucagccccagcguggccgaccuggaccccuacgacaagagccugcacagcagaguguuccccaacggcaagugcagcggccugaccgugagcagcaccuacugcagcaccaaccacgacuacaccaucuggaugcccgagaaccccagacugggcaccagcugcgacaucuucaccaacagcagaggcaagagagccagcagaggcaacaagaccugcggcuucguggacgagagaggccuguacaagagccugaagggcgccugcaagcugaagcugugcggcgugcugggccugagacugaucgacggcaccuggguggccaugcacaccagcgacgagaccaaguggugcccccccgaccagcuggugaaccugcacgacuucagaagcgacgagaucgagcaccuggugguggaggagcuggugaagaagagagaggagugccuggacgcccuggagagcaucaugaccaccaagagcgugagcuucagaagacugagccaccugagaaagcuggugcccggcuucggcaaggccuacaccaucuucaacaagacccugauggaggccgacgcccacuacaagagcaucagaaccugggacgagaucgugcccagcaagggcugccugagagugggcggcagaugccacccccacgugaacggcguguucuucaacggcaucauccugggcagcgacggccacgugcugauccccgagaugcagagcagccugcugcagcagcacguggagcugcuggagagcagcguggugccccugaugcacccccuggccgaccccagcaccguguucaaggacggcaacgaggccgaggacuucguggaggugcaccugcccgacgugcacaagcaggugagcggcguggaccugggccugcccgacuggggcagauacauccuggugagcgccggcgcccugaucacccugaugcugaucaucuuccugaugaccugcugcagaagagugcacagaagagagagcaagcagcacagccugagaggcaccgagagaaaggugagcgugaccagccagagcggcaaggccaucagcagcugggagagcuacaagaacggcagcgagaccagaauguga

SEQ ID NO: 191040 - RNA, 1575 nt, Artificial Sequence
  derived and/or modified CDS sequence (opt4) from glycoprotein__RABV__FJ465392.1
auguucccccagacccugcuguucgugccccugcugggccugagccugugcuucggcaaguuccccaucuacaccauccccgacaagcugggccccuggagccccaucgacauccaccaccugagcugccccaacaaccuggugguggaggacgagggcugcaccaaccugagcggcuucagcuacauggagcugaaggugggcuacaucagcgccaucaaggugaacggcuucaccugcaccggcguggugaccgaggccgagaccuacaccaacuucgugggcuacgugaccaccaccuucagaagaaagcacuucagacccacccccgacgccugcagagccgccuacaacuggaagauggccggcgaccccagauacgaggagagccugcacaaccccuaccccgacuaccacuggcugagaaccgugaagaccaccaaggagagccuggugaucaucagccccagcguggccgaccuggaccccuacgacaagagccugcacagcagaguguuccugaacggcaagugcagcggccugaccgugagcagcaccuacugcagcaccaaccacgacuacaccaucuggaugcccgagaaccccagacugggcaccagcugcgacaucuucaucaacagcagaggcaagagagccagcaagggcaacaagaccugcggcuucguggacgagagaggccuguacaagagccugaagggcgccugcaagcugaagcugugcggcgugcugggccugagacugaucgacggcaccuggguggccaugcagaccagcgaggagcccaaguggugcccccccgaccagcuggugaaccugcacaacuucagaagcgacgagaucgagcaccuggugguggaggagcuggugaagaagagagaggagugccuggacgcccuggagagcaucaugaccaccaagagcgugagcuucagaagacugagccaccugagaaagcuggugcccggcuucggcaaggccuacaccaucuucaacaagacccugauggaggccgacgcccacuacaagagcaucagaaccugggacgagaucauccccagcaagggcugccugagagugggcggcagaugccacccccacgugaacggcguguucuucaacggcaucauccugggcagcgacggccacgugcugauccccgagaugcagagcagccugcugcagcagcacguggagcugcuggagagcagcgugaucccccugaugcacccccuggccgaccccagcaccguguucaaggacggcgacgaggccgaggacuucguggagauccaccugcccgacgugcacaagcagaucagcggcguggaccugggccugcccaacuggggcaaguacauccuggugagcgccggcgcccugaucacccugaugcugaccaucuuccugaucaccugcugcagaggcuucagaagacccaagagcacccagcacagccugggcggcaccggcaugaaggugagcgugaccccccagagcggcaaggugaucagcagcugggagagcuacaagaagggcggcgagaccagacuguga

SEQ ID NO: 191041 - RNA, 1575 nt, Artificial Sequence
  derived and/or modified CDS sequence (opt4) from glycoprotein__RABV__FJ465393.1
auguucagccagagccugcuguucgugccccugcugggcuucagccugugcagcggcaaguuccccaucuacaccauccccgacaagcugggccccuggagccccaucgacauccaccaccugagcugccccaacaaccuggugguggaggacgagggcugcaccaaccugagcggcuucagcuacauggagcugaaggugggcuacaucagcgccaucagagugagcggcuucaccugcaccggcguggugaccgaggccgagaccuacaccaacuucgugggcuacgugaccaccaccuucaagagaaagcacuucagacccacccccgacgccugcagagccgccuaccacuggaagauggccggcgaccccagauacgaggagagccugcacaaccccuaccccgacuaccacuggcugagaaccgugaagaccaccaaggagagccugaucaucaucagccccagcguggccgaccuggaccccuacgacaagagccugcacagcagaguguuccccaacggcaagugcagcggccugaccgugagcagcaccuacugcagcaccaaccacgacuacaccaucuggaugcccgagaaccccagacugggcaccagcugcgacaucuucaccaacagcagaggcaagagagccagcagaggcaacaagaccugcggcuucguggacgagagaggccuguacaagagccugaagggcgccugcaagcugaagcugugcggcgugcugggccugagacugaucgacggcaccuggguggccaugcagaccagcgacgagaccaaguggugcccccccgaccagcuggugaaccugcacgacuucagaagcgacgagaucgagcaccuggugguggaggagcuggugaagaagagagaggagugccuggacgcccuggagagcaucaugaccaccaagagcgugagcuucagaagacugagccaccugagaaagcuggugcccggcuucggcaaggccuacaccaucuucaacaagacccugauggaggccgacgcccacuacaagagcaucagaaccugggacgagaucgugcccagcaagggcugccugagagugggcggcagaugccacccccacgugaacggcguguucuucaacggcaucauccugggcagcgacggccacgugcugauccccgagaugcagagcagccugcugcagcagcacguggagcugcuggagagcagcguggugccccugaugcacccccuggccgaccccagcaccguguucaaggacggcaacgaggccgaggacuucguggaggugcaccugcccgacgugcacaagcaggugagcggcguggaccugggccugcccaacuggggcagauacauccuggugggcgccggcgcccugaucgcccugaugcugaccaucuuccugcugaccugcugcagaagagugcaccagcccgagcccaagcagcacagacugagagaggccgagagaaagguggccgugaccagccagagcggcaaggccaucagcagcugggagagcuacaagaacggcggcgagaccagaauguga

SEQ ID NO: 191042 - RNA, 1575 nt, Artificial Sequence
  derived and/or modified CDS sequence (opt4) from glycoprotein__RABV__FJ465394.1
auguucagcagaagccugcuguucgugagccugcugggcuucccccugugcuucggcaaguuccccaucuacaccauccccgacaagcugggccccuggagccccaucgacauccaccaccugagcugccccaacaaccuggugguggaggacgagggcugcaccaaccugagcggcuucagcuacauggagcugaaggugggcuacaucagcgccaucaaggugaacggcuucaccugcaccggcguggugaccgaggccgagaccuacaccaacuucgugggcuacgugaccaccaccuucagaagaaagcaccugagacccacccccgacgccugcagaagcgccuacaacuggaagauggccggcgaccccagauacgaggagagccugcacaaccccuaccccgacuaccacuggcugagaaccgugaagaccaccaaggagagccuggugaucaucagccccagcguggccgaccuggaccccuacgacaagagccugcacagcagaguguuccccaacggcaagugcagcggccugaccgugagcagcaccuacugcagcaccaaccacgacuacaccaucuggaugcccgagaaccccagacugggcaccagcugcgacaucuucaccaacagcaagggcaagagagccagcagaggcaacaagaccugcggcuucguggacgagagaggccuguacaagagccugaagggcgccugcaagcugaagcugugcggcgugcugggccugagacugaucgacggcaccuggguggccaugcacaccagcgacgagaccaaguggugcccccccgaccagcuggugaaccugcacgacuucagaagcgacgagaucgagcaccuggugguggaggagcuggugaagaagagagaggagugccuggacgcccuggagagcaucaugaccaccaagagcgugagcuucagaagacugagccaccugagaaagcuggugcccggcuucggcaaggccuacaccaucuucaacaagacccugauggaggccgacgcccacuacaagagcaucagaaccugggacgagaucgugcccagcaagggcugccugagagugggcggcagaugccacccccacgugaacggcguguucuucaacggcaucauccugggcagcgacggccacgugcugauccccgagaugcagagcagccugcugcagcagcacguggagcugcuggagagcagcguggugccccugaugcacccccuggccgaccccagcaccguguucaaggacggcaacgaggccgaggacuucguggaggugcaccugcccgacgugcacaagcaggugagcggcguggaccugggccugcccgacuggggcaaguacauccuggugagcgccggcgcccugaucgcccugaugcugaucaucuuccugaugaccugcugcagaagagugcacagaagagagagcaagcagcacagccugagaggcaccgagagaaaggugagcgugaccagccagaacggcaaggccaucagcagcugggagagcuacaagaacggcagcgagaccagaauguga

SEQ ID NO: 191043 - RNA, 1575 nt, Artificial Sequence
  derived and/or modified CDS sequence (opt4) from glycoprotein__RABV__FJ465395.1
augagcagccagagccugcuguucgugagccugcugggcuucagccugugcuucggcaaguuccccaucuacaccauccccgacaagcugggccccuggagccccaucgacauccaccaccugagcugccccaacaaccuggugguggaggacgagggcugcaccaaccugagcggcuucagcuacauggagcugaaggugggcuacaucagcgccaucaaggugaacggcuucaccugcaccggcguggugaccgaggccgagaccuacaccaacuucgugggcuacgugaccaccaccuucagaagaaagcacuucagacccacccccgacgccugcagaagcgccuacaacuggaagauggccggcgaccccagauacgaggagagccugcacaaccccuaccccgacuaccacuggcugagaaccgugaagaccaccaaggagagccuggugaucaucagccccagcguggccgaccuggaccccuacgacaagagccugcacagcagaguguuccccaacggcaagugcagcggccugaccguguucagcaccuacugcagcaccaaccacgacuacaccaucuggaugcccgagaaccccagacugggcaccagcugcgacaucuucaccaacagcagaggcaagagagccagcagaggcaacaagaccugcggcuucguggacgagagaggccuguacaagagccugaagggcgccugcaagcugaagcugugcggcgugcugggccugagacugaucgacggcaccugggugagcaugcacaccagcgacgagaccaaguggugcccccccgaccagcuggugaaccugcacgacuucagaagcgacgagaucgagcaccuggugguggaggagcuggugaagaagagagaggagugccuggacgcccuggagagcaucaugaccaccaagagcgugagcuucagaagacugagccaccugagaaagcuggugcccggcuucggcaaggccuacaccaucuucaacaagacccugauggaggccgacgcccacuacaagagcaucagaaccugggacgagaucgugcccagcaagggcugccugagagugggcggcagaugccacccccacgugaacggcguguucuucaacggcaucauccugggcagcgacggccacgugcugauccccgagaugcagagcagccugcugcagcagcacguggagcugcuggagagcagcguggugccccugaugcacccccuggccgaccccagcaccguguucaaggacggcaacgaggccgaggacuucguggaggugcaccugcccgacgugcacaagcaggugagcggcguggaccugggccugcccgacuggggcagauaccugcuggugagcgccggcgcccugaucacccugaugcugaucaucuuccugaugaccugcugcagaagagugcacagaagagagagcaagcagcacagccugagaggcaccgagagaaaggugagcgugaccagccagagcggcaaggccaucagcagcugggagagcuacaagaacggcagcgagaccagaauguga

SEQ ID NO: 191044 - RNA, 1575 nt, Artificial Sequence
  derived and/or modified CDS sequence (opt4) from glycoprotein__RABV__FJ465396.1
augcugagccagagccugcugcuggugagccugcugggcuucccccugugcuucggcaaguuccccaucuacaccauccccgacaagcugggccccuggagccccaucgacauccaccaccugagcugccccaacaaccuggugguggaggacgagggcugcaccaaccugagcggcuucagcuacauggagcugaaggugggcuacaucagcgccaucaaggugaacggcuucaccugcaccggcguggugaccgaggccgagaccuacaccaacuucgugggcuacgugaccaccaccuucagaagaaagcaccugagacccacccccgacgccugcagaagcgccuacaacuggaagauggccggcgaccccagauacgaggagagccugcacaaccccuaccccgacuaccacuggcugagaaccgugaagaccaccaaggagagccuggugaucaucagccccagcguggccgaccuggaccccuacgacaagagccugcacagcagaguguuccccaacggcaagugcagcggccugaccgugagcagcaccuacugcagcaccaaccacgacuacaccaucuggaugcccgagaaccccagacugggcaccagcugcgacaucuucaccaacagcagaggcaagagagccagcagaggcaacaagaccugcggcuucguggacgagagaggccuguacaagagccugaagggcgccugcaagcugaagcugugcggcgugcugggccugagacugaucgacggcaccuggguggccaugcacaccagcgacgagaccaaguggugcccccccgaccagcuggugaaccugcacgacuucagaagcgacgagaucgagcaccuggugguggaggagcuggugaagaagagagaggagugccuggacgcccuggagagcaucaugaccaccaagagcgugagcuucagaagacugagccaccugagaaagcuggugcccggcuucggcaaggccuacaccaucuucaacaagacccugauggaggccgacgcccacuacaagagcaucagaaccugggacgagaucgugcccagcaagggcugccugagagugggcggcagaugccacccccacgugaacggcguguucuucaacggcaucauccugggcagcgacggccacgugcugauccccgagaugcagagcagccugcugcagcagcacguggagcugcuggagagcagcguggugccccugaugcacccccuggccgaccccagcaccguguucaaggacggcaacgaggccgaggacuucguggaggugcaccugcccgacgugcacaagcaggugagcggcguggaccugggccugcccgacuggggcaaguacauccuggugagcgccggcgcccugaucgcccugaugcugaucaucuuccugaugaccugcugcagaagagugcacagaagagagagcaagcagcacagccugagaggcaccgagagaaaggugagcgugaucagccagaacggcaaggccaucagcagcugggagagcuacaagaacggcagcgacaccagaauguga

SEQ ID NO: 191045 - RNA, 1575 nt, Artificial Sequence
  derived and/or modified CDS sequence (opt4) from glycoprotein__RABV__FJ465397.1
auggugagccagagccugcuguucgugccccugcugggcuucagccugugcuucggcaaguuccccaucuacaccauccccgacaagcugggccccuggagccccaucgacauccaccaccugagcugccccaacaaccuggugguggaggacgagggcugcaccaaccugagcggcuucagcuacauggagcugaaggugggcuacaucagcgccaucaaggugaacggcuucaccugcaccggcguggugaccgaggccgagaccuacaccaacuucgugggcuacgugaccaccaccuucagaagaaagcacuucagacccauccccgacgccugcagagccgccuaccacuggaagauggccggcgaccccagauacgaggagagccugcacaaccccuaccccgacuaccacuggcugagaaccgugaagaccaccaaggagagccuggugaucaucagccccagcguggccgaccuggaccccuacgacaagagccugcacagcagaguguuccccaacggcaagugcagcggccugaccgugagcagcaccuacugcagcaccaaccacgacuacaccaucuggaugcccgagaaccccagacugggcaccagcugcgacaucuucaccaacagcagaggcaagagagccagcagaggcaacaagaccugcggcuucguggacgagagaggccuguacaagagccugaagggcgccugcaagcugaagcugugcggcgugcugggccugagacugaucgacggcaccuggguggccaugcagaccagcgacgagaccaaguggugcccccccgaccagcuggugaaccugcacgacuucagaagcgacgagaucgagcaccuggugguggaggagcuggugaagaagagagaggagugccuggacgcccuggagagcaucaugaccaccaagagcgugagcuucagaagacugagccaccugagaaagcuggugcccggcuucggcaaggccuacaccaucuucaacaagacccugauggaggccgacgcccacuacaagagcaucagaaccugggacgagaucgugcccagcaagggcugccugagagugggcggcagaugccacccccacaucaacggcguguucuucaacggcaucauccugggcagcgacggccacgugcugauccccgagaugcagagcagccugcugcagcagcacauggagcugcuggagagcagcguggugccccugaugcacccccuggccgaccccagcaccguguucaaggacggcaacgaggccgaggacuucguggaggugcaccugcccgacgugcacaagcaggugagcgagaucgaccugggccugcccaacuggggcaaguacauccuggugagcgccggcgcccugaucgcccugaugcugaccauccugcugaucaccugcugcagaaaggugcacagacccaagcccaagcagcacagacugagaggcaccgagagaaagguggccgugaccagccagagcggcaaggccaucagcagcugggagagcuacaagaacggcggcgagaccagaauguga

SEQ ID NO: 191046 - RNA, 1575 nt, Artificial Sequence
  derived and/or modified CDS sequence (opt4) from glycoprotein__RABV__FJ465398.1
augagcagccagagccugcuguucgugagccugcugggcuucagccugugcuucggcaaguuccccaucuacaccauccccgacaagcugggccccuggagccccaucgacauccaccaccugagcugccccaacaaccuggugguggaggacgagggcugcaccaaccugagcggcuucagcuacauggagcugaaggugggcuacaucagcgccaucaaggugaacggcuucaccugcaccggcguggugaccgaggccgagaccuacaccaacuucgugggcuacgugaccaccaccuucagaagaaagcacuucagacccacccccgacgccugcagaagcgccuacaacuggaagauggccggcgaccccagauacgaggagagccugcacaaccccuaccccgacuaccacuggcugagaaccgugaagaccaccaaggagagccuggugaucaucagccccagcguggccgaccuggaccccuacgacaagagccugcacagcagaguguuccccaacggcaagugcagcggccugaccgugagcagcaccuacugcagcaccaaccacgacuacaccaucuggaugcccgagaaccccagacugggcaccagcugcgacaucuucaccaacagcagaggcaagagagccagcagaggcaacaagaccugcggcuucguggacgagagaggccuguacaagagccugaagggcgccugcaagcugaagcugugcggcgugcugggccugagacugaucgacggcaccuggguggccaugcacaccagcgacgagaccaaguggugcccccccgaccagcuggugaaccugcacgacuucagaagcgacgagaucgagcaccuggugguggaggagcuggugaagaagagagaggagugccuggacgcccuggagagcaucaugaccaccaagagcgugagcuucagaagacugagccaccugagaaagcuggugcccggcuucggcaaggccuacaccaucuucaacaagacccugauggaggccgacgcccacuacaagagcaucagaaccugggacgagaucgugcccagcaagggcugccugagagugggcggcagaugccacccccacgugaacggcguguucuucaacggcaucauccugggcagcgacggccacgugcugauccccgagaugcagagcagccugcugcagcagcacguggagcugcuggagagcagcguggugccccugaugcacccccuggccgaccccagcaccguguucaaggacggcaacgaggccgaggacuucguggaggugcaccugcccgacgugcacaagcaggugagcggcguggaccugggccugcccgacuggggcagauacauccuggugagcgccggcgcccugaucacccugaugcugaucaucuuccugaugaccugcugcagaagagugcaccugagagagagcaagagacacagccugagaggcaccgagagaaaggugagcgugaccagccagagcggcaaggccaucagcagcugggagagcuacaagaacggcagcgagaccagaauguga

SEQ ID NO: 191047 - RNA, 1575 nt, Artificial Sequence
  derived and/or modified CDS sequence (opt4) from glycoprotein__RABV__FJ465399.1
augagcagccagagccugcuguucgugagccugcugggcuucagccugugcuucggcaaguuccccaucuacaccauccccgacaagcugggccccuggagccccaucgacauccaccaccugagcugccccaacaaccuggugguggaggacgagggcugcaccaaccugagcggcuucagcuacauggagcugaaggugggcuacaucagcgccaucaaggugaacggcuucaccugcaccggcguggugaccgaggccgagaccuacaccaacuucgugggcuacgugaccaccaccuucagaagaaagcacuucagacccacccccgacgccugcagaagcgccuacaacuggaagauggccggcgaccccagauacgaggagagccugcacaaccccuaccccgacuaccacuggcugagaaccgugaagaccaccaaggagagccuggugaucaucagccccagcguggccgaccuggaccccuacgacaagagccugcacagcagaguguuccccaacggcaagugcagcggccugaccguguucagcaccuacugcagcaccaaccacgacuacaccaucuggaugcccgagaaccccagacugggcaccagcugcgacaucuucaccaacagcagaggcaagagagccagcagaggcaacaagaccugcggcuucguggacgagagaggcugguacaagagccugaagggcgccugcaagcugaagcugugcggcgugcugggccugagacugaucgacggcaccuggguggccaugcacaccagcgacgagaccaaguggugcccccccgaccagcuggugaaccugcacgacuucagaagcgacgagaucgagcaccuggugguggaggagcuggugaagaagagagaggagugccuggacgcccuggagagcaucaugaccaccaagagcgugagcuucagaagacugagccaccugagaaagcuggugcccggcuucggcaaggccuacaccaucuucaacaagacccugauggaggccgacgcccacuacaagagcaucagaaccugggacgagaucgugcccagcaagggcugccugagagugggcggcagaugccacccccacgugaacggcguguucuucaacggcaucauccugggcagcgacggccacgugcugauccccgagaugcagagcagccugcugcagcagcacguggagcugcuggagagcagcguggugccccugaugcacccccuggccgaccccagcgccguguucaaggacggcaacgaggccgaggacuucguggaggugcaccugcccgacgugcacaagcaggugagcggcguggaccugggccugcccgacuggggcagauacauccuggugagcgccggcgcccugaucacccugaugcugaucaucuuccugaugaccugcugcagaagagugcacagaagagagagcaagcagcacagccugagaggcaccgagagaaaggugagcgugaccagccagagcggcaaggccaucagcagcugggagagcuacaagaacggcagcgagaccagaauguga

SEQ ID NO: 191048 - RNA, 1575 nt, Artificial Sequence
  derived and/or modified CDS sequence (opt4) from glycoprotein__RABV__FJ465400.1
auguucccccagacccugcuguucgugccccugcugggccugagccugugcuucggcaaguuccccaucuacaccauccccgacaagcugggccccuggagccccaucgacauccaccaccugagcugccccaacaaccuggugguggaggacgagggcugcaccaaccugagcggcuucagcuacauggagcugaaggugggcuacaucagcgccaucaaggugaacggcuucaccugcaccggcguggugaccgaggccgagaccuacaccaacuucgugggcuacgugaccaccaccuucagaagaaagcacuucagacccacccccgacgccugcagagccgccuacaacuggaagauggccggcgaccccagauacgaggagagccugcacaaccccuaccccgacuaccacuggcugagaaccgugaagaccaccaaggagagccuggugaucaucagccccagcguggccgaccuggaccccuacgacaagagccugcacagcagaguguuccugaacggcaagugcagcggccugaccgugagcagcaccuacugcagcaccaaccacgacuacagcaucuggaugcccgagaaccccagacugggcaccagcugcgacaucuucgugaacagcagaggcaagagagccagcaagggcaacaagaccugcggcuucguggacgagagaggccuguacaagagccugaagggcgccugcaagcugaagcugugcggcgugcugggccugagacugaucgacggcaccuggguggccaugcagaccagcgaggagcccaaguggugcccccccgaccagcuggugaaccugcacaacuucagaagcgacgagaucgagcaccuggugguggaggagcuggugaagaagagagaggagugccuggacgcccuggagagcaucaugaccaccaagagcgugagcuucagaagacugagccaccugagaaagcuggugcccggcuucggcaaggccuacaccaucuucaacaagacccugauggaggccgacgcccacuacaagagcaucagaaccugggacgagaucauccccagcaagggcugccugagagugggcggcagaugccacccccacgugaacggcguguucuucaacggcaucauccugggcagcgacggccacgugcugauccccgagaugcagagcagccugcugcagcagcacguggagcugcuggagagcagcgugaucccccugaugcacccccuggccgaccccagcaccgccuucaaggacggcgacgaggccgaggacuucguggagauccaccugcccgacgugcacaagcagaucagcggcguggaccugggccugcccaacuggggcaaguacauccuggugagcgccggcgcccugaucgcccugaugcugaccaucuuccugaucaccugcugcagaggcuuccaccagcccaagagcacccagcacagccugggcggcaccgagagaaaggugagcgugaccccccugagcggcaaggugaucagcagcugggagagcuacaagaagggcggcgagaccagacuguga

SEQ ID NO: 191049 - RNA, 1575 nt, Artificial Sequence
  derived and/or modified CDS sequence (opt4) from glycoprotein__RABV__FJ465401.1
augagcagccagagccugcuguucgccagccugcugggcuucagccugugcuucggcaaguuccccaucuacaccauccccgacaagcugggccccuggagccccaucgacauccaccaccugagcugccccaacaaccuggugguggaggacgagggcugcaccaaccugagcggcuucagcuacauggagcugaaggugggcuacaucagcgccaucaaggugaacggcuucaccugcaccggcguggugaccgaggccgagaccuacaccaacuucgugggcuacgugaccaccaccuucagaagaaagcacuucagacccacccccgacgccugcagaagcgccuacaacuggaagauggccggcgaccccagauacgaggagagccugcacaaccccuaccccgacuaccacuggcugagaaccgugaagaccaccaaggagagccuggugaucaucagccccagcguggccgaccuggaccccuacgacaagagccugcacagcagaguguuccccaacggcaagugcagcggccugaccgugagcagcaccuacugcagcaccaaccacgacuacaccaucuggaugcccgagaaccccagacugggcaccagcugcgacaucuucaccaacagcagaggcaagagagccagcagaggcaacaagaccugcggcuucguggacgagagaggccuguacaagagccugaagggcgccugcaagcugaagcugugcggcgugcugggccugagacugaucgacggcaccuggguggccaugcacaccagcgacgagaccaaguggugcccccccgaccagcuggugaaccugcacgacuucagaagcgacgagaucgagcaccuggugguggaggagcuggugaagaagagagaggagugccuggacgcccuggagagcaucaugaccaccaagagcgugagcuucagaagacugagccaccugagaaagcuggugcccggcuucggcaaggccuacaccaucuucaacaagacccugauggaggccgacgcccacuacaagagcaucagaaccugggacgagaucgugcccagcaagggcugccugagagugggcggcagaugccacccccacgugaacggcguguucuucaacggcaucauccugggcagcgacggccacgugcugauccccgagaugcagagcagccugcugcagcagcacguggagcugcuggagagcagcguggugccccugaugcacccccuggccgaccccagcaccguguucaaggacggcaacgaggccgaggacuucguggaggugcaccugcccgacgugcacaagcaggugagcggcguggaccugggccugcccgacuggggcagauaccugcuggugagcgccggcgcccugaucacccugaugcugaucaucuuccugaugaccugcugcagaagagugcacagaagagagagcaagcagcacagccugagaggcaccgagagaaaggugagcgugaccagccagagcggcaaggccaucagcagcugggagagcuacaagaacggcagcgagaccagaauguga

SEQ ID NO: 191050 - RNA, 1575 nt, Artificial Sequence
  derived and/or modified CDS sequence (opt4) from glycoprotein__RABV__FJ465402.1
auguucccccaggcccugcuguucgugccccugcugggcuucagccugugcuucggcaaguuccccaucuacaccauccccgacaagcugggccccuggagccccaucgacauccaccaccugagcugccccaacaaccuggugguggaggacgagggcugcaccaaccugagcggcuucagcuacauggagcugaaggugggcuacaucagcgccaucaaggugaacggcuucaccugcaccggcguggugaccgaggccgagaccuacaccaacuucgugggcuacgugaccaccaccuucagaagaaagcacuucagacccaccagcgacgccugcagagccgccuacaacuggaagauggccggcgaccccagauacgaggagagccugcacaaccccuaccccgacuaccacuggcugagaaccgugaagaccaccaaggagagccuggugaucaucagccccagcguggccgaccuggaccccuacgacaagagccugcacagcagaguguuccccaacggcagaugcagcggccugaccgugagcagcaccuacugcagcaccaaccacgacuacaccaucuggaugcccgagaaccccagacugggcaccagcugcgacaucuucaccaacagcagaggcaagagagccagcaagggcaacagaaccugcggcuucguggacgagagaggccuguacaagagccugaagggcgccugcaagcugaagcugugcggcgugcugggccugagacugauggacggcaccuggguggccaugcagaccagcgaggagaccaaguggugcccccccgaccagcuggugaaccugcacgacuucagaagcgacgagaucgagcaccuggugguggaggagcuggugaagaagagagaggagugccuggacgcccuggagagcaucaugaccaccaagagcgugagcuucagaagacugagccaccugagaaagcuggugcccggcuucggcaaggccuacaccaucuucaacaagacccugauggaggccgacgcccacuacaagagcaucagaaccuggaacgagaucauccccagcaagggcugccugagagugggcggcagaugccacccccacgugaacggcguguucuucaacggcaucauccugggcagcgacggccacgugcugauccccgagaugcagagcagccugcugcagcagcacguggagcugcuggagagcagcguggugccccugaugcacccccuggccgaccccagcaccguguucaaggacggcggcgaggccgaggacuucguggaggugcaccugcccgacgugcacaagcaggugagcggcguggaccugggccugcccagcuggggcaaguacauccuggugggcagcggcgcccugaucgcccuggugcugaucaucuuccugaugaccugcugcagaagagugagcagacccgagagcacccagcacagccugagaggcaccggcaugaaggugagcaucaccagccagagcggcaaggccauccccagcugggagagcuacaagagcaagaacgagaccaagauguga

SEQ ID NO: 191051 - RNA, 1575 nt, Artificial Sequence
  derived and/or modified CDS sequence (opt4) from glycoprotein__RABV__FJ465403.1
auguucccccagacccugcuguucgugccccugcugggccugagccugugcuucggcaaguuccccaucuacaccauccccgacaagcugggccccuggagccccaucgacauccaccaccugagcugccccaacaaccuggugguggaggacgagggcugcaccaaccugagcggcuucagcuacauggagcugaaggugggcuacaucagcgccaucaaggugaacggcuucaccugcaccggcguggugaccgaggccgagaccuacaccaacuucgugggcuacgugaccaccaccuucagaagaaagcacuucagacccacccccgacgccugcagagccgccuacaacuggaagguggccggcgaccccagauacgaggagagccugcacaaccccuaccccgacuaccacuggcugagaaccgugaagaccaccaaggagagccuggugaucaucagccccagcguggccgaccuggaccccuacgacaagagccugcacagcagaguguuccugaacggcaagugcagcggccugaccgugagcagcaccuacugcagcaccaaccacgacuacaccaucuggaugcccgagaaccccagacugggcaccagcugcgacauccugagcaacagcagaggcaagagagccagcaagggcaacaagaccugcggcuucguggacgagagaggccuguacaagagccugaagggcgccugcaagcugaagcugugcggcgugcugggccugagacugaucgacggcaccuggguggccaugcagaccagcgaggagcccaaguggugcccccccgaccagcuggugaaccugcacaacuucagaagcgacgagaucgagcaccuggugguggaggagcuggugaagaagagagaggagugccuggacgcccuggagagcaucaugaccaccaagagcgugagcuucagaagacugagccaccugagaaagcuggugcccggcuucggcaaggccuacaccaucuucaacaagacccugauggaggccgacgcccacuacaagagcaucagaaccugggacgagaucauccccagcaagggcugccugagagugggcggcagaugccacccccacgugaacggcguguucuucaacggcaucauccugggcagcgacggccacgugcugauccccgagaugcagagcagccugcugcagcagcacguggagcugcuggagagcagcgugaucccccugaugcacccccuggccgaccccagcaccguguucaaggacggcgacgaggccgaggacuucguggagauccaccugcccgacgugcacaagcagaucagcggcguggaccugggccugcccaacuggggcaaguacauccugaugagcgccggcgcccugaucacccugaugcugaccaucuuccugaucaccugcugcagaggcuucagaagacccaagagcacccagcacagccugggcggcaccggcaugaaggugagcgugaccccccagagcggcaaggugaucagcagcugggagagcuacaagaagggcggcgagaccagacuguga

SEQ ID NO: 191052 - RNA, 1575 nt, Artificial Sequence
  derived and/or modified CDS sequence (opt4) from glycoprotein__RABV__FJ465404.1
auguucccccaggcccugcuguucgugccccugcugggcuucagccugugcuucggcaaguuccccaucuacaccauccccgacaagcugggccccuggagccccaucgacauccaccaccugagcugccccaacaaccuggugguggaggacgagggcugcaccaaccugagcggcuucagcuacauggagcugaaggugggcuacaucagcgccaucaaggugaacggcuucaccugcaccggcguggugaccgaggccgagaccuacaccaacuucgugggcuacgugaccaccaccuucagaagaaagcacuucagacccaccagcgacgccugcagagccgccuacaacuggaagauggccggcgaccccagauacgaggagagccugcacaaccccuaccccgacuaccacuggcugagaaccgugaagaccaccaaggagagccuggugaucaucagccccagcguggccgaccuggaccccuacgacaagagccugcacagcagaguguuccccaacggcagaugcagcggccugaccgugagcagcaccuucugcagcaccaaccacgacuacaccaucuggaugcccgagaaccccagacugggcaccagcugcgacaucuucaccaacagcagaggcaagagagccagcaagggcaacagaaccugcggcuucguggacgagagaggccuguacaagagccugaagggcgccugcaagcugaagcugugcggcgugcugggccugagacugauggacggcaccuggguggccaugcagaccagcgaggagaccaaguggugcccccccgaccagcuggugaaccugcacgacuucagaagcgacgagaucgagcaccuggugguggaggagcuggugaagaagagagaggagugccuggacgcccuggagagcaucaugaccaccaagagcgugagcuucagaagacugagccaccugagaaagcuggugcccggcuucggcaaggccuacaccaucuucaacaagacccugauggaggccgacgcccacuacaagagcaucagaaccuggaacgagaucauccccagcaagggcugccugagagugggcggcagaugccacccccacgugaacggcguguucuucaacggcaucauccugggcagcgacggccacgugcugauccccgagaugcagagcagccugcugcagcagcacguggagcugcuggagagcagcguggugccccugaugcacccccuggccgaccccagcaccguguucaagaacggcggcgaggccgaggacuucguggaggugcaccugcccgacgugcacaagcaggugagcggcguggaccugggccugcccagcuggggcaaguacauccuggugagcagcggcgcccugaucgcccuggugcuggugaucuuccugaugaccugcugcagaaaggugaacagacccgagagcacccagcacagccugagaggcaccggcaugaaggugagcaucaccagccagagcggcaaggccauccccagcugggagagcuacaagagcgagaacgagaccaagauguga

SEQ ID NO: 191053 - RNA, 1575 nt, Artificial Sequence
  derived and/or modified CDS sequence (opt4) from glycoprotein__RABV__FJ465405.1
auguucagccagagccugcugcuggugagccugcugggcuucccccugagcuucggcaaguuccccaucuacaccauccccgacaagcugggccccuggagccccaucgacauccaccaccugagcugccccaacaaccuggugguggaggacgagggcugcaccaaccugagcggcuucagcuacauggagcugaaggugggcuacaucagcgccaucaaggugaacggcuucaccugcaccggcguggugaccgaggccgagaccuacaccaacuucgugggcuacgugaccaccaccuucagaagaaagcaccugagacccacccccgacgccugcagaagcgccuacaacuggaagguggccggcgaccccagauacgaggagagccugcacaaccccuaccccgacuaccacuggcugagaaccgugaagaccaccaaggagagccuggugaucaucagccccagcguggccgaccuggaccccuacgacaagagccugcacagcagaguguuccccaacggcaagugcagcggccugaccgugagcagcaccuacugcagcaccaaccacgacuacaccaucuggaugcccgagaaccccagacugggcaccagcugcgacaucuucaccaacagcagaggcaagagagccagcaagggcaacaagaccugcggcuucguggacgagagaggccuguacaagagccugaagggcgccugcaagcugaagcugugcggcgugcugggccugagacugaucgacggcaccuggguggccaugcacaccagcgacgagaccaaguggugcccccccgaccagcuggugaaccugcacgacuucagaagcgacgagaucgagcaccuggugguggaggagcuggugaagaagagagaggagugccuggacgcccuggagagcaucaugaccaccaagagcgugagcuucagaagacugagccaccugagaaagcuggugcccggcuucggcaaggccuacaccaucuucaacaagacccugauggaggccgacgcccacuacaagagcaucagaaccugggacgagaucauccccagcaagggcugccugagagugggcggcagaugccacccccacgugaacggcguguucuucaacggcaucauccugggcagcgacggccacgugcugauccccgagaugcagagcagccugcugcagcagcacaucgagcugcuggagagcagcguggugccccugaugcacccccuggccgaccccagcaccguguucaaggacggcgacgaggccgaggacuucguggaggugcaccugcccgacgugcacaagcaggugagcggcguggaccugggccugcccgacuggggcaaguacauccuggugagcgccggcgcccugaucgcccugaugcugaucaucuuccugaugaccugcugcagaagagugcacagaagagagagcaagcagcacagcuucagaggcaccgagagaaaggugagcgugaccagccagaacggcaaggccaucagcagcugggagagcuacaagaacggcagcgacaccagaauguga

SEQ ID NO: 191054 - RNA, 1575 nt, Artificial Sequence
  derived and/or modified CDS sequence (opt4) from glycoprotein__RABV__FJ465406.1
auguucagccagagccugcugcuggugagccugcugggcuucccccugugcuucggcaaguuccccaucuacaccauccccgacaagcugggccccuggagccccaucgacauccaccaccugagcugccccaacaaccuggugguggaggacgagggcugcaccaaccugagcggcuucagcuacauggagcugaaggugggcuacaucagcgccaucaaggugaacggcuucaccugcaccggcguggugaccgaggccgagaccuacaccaacuucgugggcuacgugaccaccaccuucagaagaaagcaccugagacccacccccgacgccugcagaagcgccuacaacuggaagauggccggcgaccccagauacgaggagagccugcacaaccccuaccccgacuaccacuggcugagaaccgugaagaccaccaaggagagccuggugaucaucagccccagcguggccgaccuggaccccuacgacaagagccugcacagcagaguguuccccaacggcaagugcagcggccugaccgugagcagcaccuacugcagcaccaaccacgacuacaccaucuggaugcccgagaaccccagacugggcaccagcugcgacaucuucaccaacagcagaggcaagagagccagcagaggcaacaagaccugcggcuucguggacgagagaggccuguacaagagccugaagggcgccugcaagcugaagcugugcggcgugcugggccugagacugaucgacggcaccuggguggccaugcacaccagcgacgagaccaaguggugcccccccgaccagcuggugaaccugcacgacuucagaagcgacgagaucgagcaccuggugguggaggagcuggugaagaagagagaggagugccuggacgcccuggagagcaucaugaccaccaagagcgugagcuucagaagacugagccaccugagaaagcuggugcccggcuucggcaaggccuacaccaucuucaacaagacccugauggaggccgacgcccacuacaagagcaucagaaccugggacgagaucgugcccagcaagggcugccugagagugggcggcagaugccacccccacgugaacggcguguucuucaacggcaucauccugggcagcgacggccacgugcugauccccgagaugcagagcagccugcugcagcagcacguggagcugcuggagagcagcguggugccccugaugcacccccuggccgaccccagcaccguguucaaggagggcaacgaggccgaggacuucguggaggugcaccugcccgacgugcacaagcaggugagcggcguggaccugggccugcccgacuggggcaaguacauccuggugagcgccggcgcccugaucgcccugaugcugaucauccugcugaugaccugcugcagaagagugcacagaagagagagcaagcagcacagccugagaggcaccgagagaaaggugagcgugaccagccagaacggcaaggccaucagcagcugggagagcuacaagaacagaagcgacaccagaauguga

SEQ ID NO: 191055 - RNA, 1575 nt, Artificial Sequence
  derived and/or modified CDS sequence (opt4) from glycoprotein__RABV__FJ465407.1
auguucccccaggcccugcuguucgugccccugcugggcuucagccugugcuucggcaaguuccccaucuacaccauccccgacaagcugggccccuggagccccaucgacauccaccaccugagcugccccaacaaccuggugguggaggacgagggcugcaccaaccugagcggcuucagcuacauggagcugaaggugggcuacaucagcgccaucaaggugaacggcuucaccugcaccggcguggugaccgaggccgagaccuacaccaacuucgugggcuacgugaccaccaccuucagaagaaagcacuucagacccaccagcgacgccugcagagccgccuacaacuggaagauggccggcgaccccagauacgaggagagccugcacaaccccuaccccgacuaccacuggcugagaaccgugaagaccaccaaggagagccuggugaucaucagccccagcguggccgaccuggaccccuacgacaagagccugcacagcagaguguuccccaacggcagaugcagcggccugaccgugagcagcaccuucugcagcaccaaccacgacuacaccaucuggaugcccgagaaccccagacugggcaccagcugcgacaucuucaccaacagcagaggcaagagagccagcaagggcaacagaaccugcggcuucguggacgagagaggccuguacaagagccugaagggcgccugcaagcugaagcugugcggcgugcugggccugagacugauggacggcaccuggguggccaugcagaccagcgaggagaccaaguggugcccccccgaccagcuggugaaccugcacgacuucagaagcgacgagaucgagcaccuggugguggaggagcuggugaagaagagagaggagugccuggacgcccuggagagcaucaugaccaccaagagcgugagcuucagaagacugagccaccugagaaagcuggugcccggcuucggcaaggccuacaccaucuucaacaagacccugauggaggccgacgcccacuacaagagcaucagaaccuggaacgagaucauccccagcaagggcugccugagagugggcggcagaugccacccccacgugaacggcguguucuucaacggcaucauccugggcagcgacggccacgugcugauccccgagaugcagagcagccugcugcagcagcacguggagcugcuggagagcagcguggugccccugaugcacccccuggccgaccccagcaccguguucaaggacggcggcgaggccgaggacuucguggaggugcaccugcccgacgugcacaagcaggugagcggcguggaccugggccugcccagcuggggcaaguacauccuggugggcagcggcgcccugaucgcccuggugcuggugaucuuccugaugaccugcugcagaaaggugaacagacccgagagcacccagcacagccugagaggcaccggcaugaaggugagcaucaccagccagagcggcaaggccauccccagcugggagagcuacaagagcgagaacgagaccaagauguga

SEQ ID NO: 191056 - RNA, 1575 nt, Artificial Sequence
  derived and/or modified CDS sequence (opt4) from glycoprotein__RABV__FJ465409.1
auguucccccagacccugcuguucgugccccugcugggccugagccugugcuucggcaaguuccccaucuacaccauccccgacaagcugggccccuggagccccaucgacauccaccaccugagcugccccaacaaccuggugguggaggacgagggcugcaccaaccugagcggcuucagcuacauggagcugaaggugggcuacaucagcgccaucaaggugaacggcuucaccugcaccggcguggugaccgaggccgagaccuacaccaacuucgugggcuacgugaccaccaccuucagaagaaagcacuucagacccacccccgacgccugcagagccgccuacaacuggaagauggccggcgaccccagauacgaggagagccugcacaaccccuaccccgacuaccacuggcugagaaccgugaagaccaccaaggagagccuggugaucaucagccccagcguggccgaccuggaccccuacgacaagagccugcacagcagaguguuccugaacggcaagugcagcggccugaccgugagcagcaccuacugcagcaccaaccacgacuacagcaucuggaugcccgagaaccccagacugggcaccagcugcgacaucuucgugaccagcagaggcaagagagccagcaagggcagcaagaccugcggcuucguggacgagagaggccuguacaagagccugaagggcgccugcaagcugaagcugugcggcgugcugggccugagacugaucgacggcaccuggguggccaugcagaccagcgaggagcccaaguggugcccccccgaccagcuggugaaccugcacaacuucagaagcgacgagaucgagcaccuggugguggaggagcuggugaagaagagagaggagugccuggacgcccuggagagcaucaugaccaccaagagcgugagcuucagaagacugagccaccugagaaagcuggugcccggcuucggcaaggccuacaccaucuucaacaagacccugauggaggccgacgcccacuacaagagcaucagaaccugggacgagaucauccccagcaagggcugccugagagugggcggcagaugccacccccacgugaacggcguguucuucaacggcaucauccugggcagcgacggccacgugcugauccccgagaugcagagcagccugcugcagcagcacguggagcugcuggagagcagcgugaucccccugaugcacccccuggccgaccccagcaccgccuucaaggacggcgacgaggccgaggacuucguggagauccaccugcccgacgugcacaagcagaucagcggcguggaccugggccugcccaacuggggcaaguacauccuggugagcgccggcgcccugaucgcccugaugcugaccaucuuccugaucaccugcugcagaggcuuccaccagcccaagagcacccagcacagccugggcggcaccggcagaaaggugagcgugaccccccugagcggcaaggugaucagcagcugggagagcuacaagaagggcggcgagaccagacuguga

SEQ ID NO: 191057 - RNA, 1575 nt, Artificial Sequence
  derived and/or modified CDS sequence (opt4) from glycoprotein__RABV__FJ602447.1
augaucccccagguguuccuguucgugccccugcugguguucagcagcugcuucggcaaguuccccaucuacaccauccccgacaagcugggccccuggagccccaucgacauccaccaccugagcugccccaacaaccuggugguggaggacgagggcugcaccaaccugagcggcuucagcuacauggagcugaaggugggcuacaucagcgccaucaaggugaacggcuucaccugcaccggcguggugaccgaggccgagaccuacaccaacuucgugggcuacgugaccaccaccuucaagagaaagcacuucagacccaugcccgacgccugcagagccgccuacaacuggaagauggccggcgaccccagauacgaggagagccugcacaaccccuaccccgacuaccacuggcugagaaccgugaagaccaccaaggagagccuggugaucaucagccccagcguggccgaccuggaccccuacgacaagagccugcacagcagaguguuccccggcggcaagugcagcggcaucaccgugagcagcaccugcugcagcaccaaccacgacuacaccaucuggaugcccgagaaccccagacugggcaccagcugcgacaucuucaccaacagcagaggcaagagagccagcaagggcggcaagaccugcggcuucguggacgagagaggccuguacaagagccugaagggcgccugcaagcugaagcugugcggcgugcugggccugagacugauggacggcaccuggguggccauccagaccagcgacgagaucaaguggugcagccccgaccagcuggugaaccugcacgacuuccacagcgacgagaucgagcaccuggugguggaggagcuggugaagaagagagaggagugccuggacgcccuggagaccaucaugaccaccaagagcgugagcuucagaagacugagccaccugagaaagcuggugcccggcuucggcaaggccuacaccaucuucaacaagacccugauggaggccgacgcccacuacaagagcaucagaaccuggaacgagaucauccccagcaagggcugccugagagugggcggcagaugccacccccacgugaacggcguguucuucaacggcaucauccugggccccgacggccacgugcugauccccgagaugcagagcagccugcugcaccagcacauggagcugcuggagagcagcgugaucccccugaugcacccccuggccgaccccagcaccguguucaaggacggcgacgaggccgaggacuucguggaggugcaccugcccgacgugcacaagcagaucagcggcguggaccugggccugcccaacuggggcaaguacgugcugaucagcgccggcgcccugaccgcccugaugcugaccaucuuccugaugaccugcugcagaaagaccaacagagccgagagcauccagcacagccccggcgagaccggcagaaaggugagcgugaccagccacaacggcagagugaucagcagcugggagagcuacaagagcggcagcgagaccaagcuguga

SEQ ID NO: 191058 - RNA, 1575 nt, Artificial Sequence; identical to SEQ ID NO: 190905
  derived and/or modified CDS sequence (opt4) from glycoprotein__RABV__FJ602448.1

SEQ ID NO: 191059 - RNA, 1575 nt, Artificial Sequence
  derived and/or modified CDS sequence (opt4) from glycoprotein__RABV__FJ602449.1
augaucccccaggugcugcuguucgugccccugcugguguucagcagcugcuucggcaaguuccccaucuacaccauccccgacaagcugggccccuggagccccaucgacauccaccaccugagcugccccaacaaccuggugguggaggacgagggcugcaccaaccugagcggcuucagcuacauggagcugaaggugggcuacaucagcgccaucaaggugaacggcuucaccugcaccggcguggugaccgaggccgagaccuacaccaacuucgugggcuacgugaccaccaccuucaagagaaagcacuucagacccaugcccgacgccugcagagccgccuacaacuggaagauggccggcgaccccagauacgaggagagccugcacaaccccuaccccgacuaccacuggcugagaaccgugaagaccaccaaggagagccuggugaucaucagccccagcguggccgaccuggaccccuacgacaagagccugcacagcagaguguuccccggcggcaagugcagcggcaucaccgugagcagcaccugcugcagcaccaaccacgacuacaccaucuggaugcccgagaaccccagacugggcaccagcugcgacaucuucaccaacagcagaggcaagagagccagcaagggcggcaagaccugcggcuucguggacgagagaggccuguacaagagccugaagggcgccugcaagcugaagcugugcggcgugcugggccugagacugauggacggcaccuggguggccauccagaccagcgacgagaucaaguggugcagccccgaccagcuggugaaccugcacgacuuccacagcgacgagaucgagcaccuggugguggaggagcuggugaagaagagagaggagugccuggacgcccuggagaccaucaugaccaccaagagcgugagcuucagaagacugagccaccugagaaagcuggugcccggcuucggcaaggccuacaccaucuucaacaagacccugauggaggccgacgcccacuacaagagcaucagaaccuggaacgagaucauccccagcaagggcugccugagagugggcggcagaugccacccccacgugaacggcguguucuucaacggcaucauccugggccccgacggccacgugcugauccccgagaugcagagcagccugcugcaccagcacauggagcugcuggagagcagcgugaucccccugaugcacccccuggccgaccccagcaccguguucaaggacggcgacgacgccgaggacuucguggaggugcaccugcccgacgugcacaagcagaucagcggcguggaccugggccugcccaacuggggcaaguacgugaugaucagcgccggcgcccugaccgcccugaugcugaugaucuuccugaugaccugcugcagaaagaccaacagagccgagagcauccagcacagccccggcgagaccggcagaaaggugagcgugaccagccacaacggcagagugaucagcagcugggagagcuacaagagcggcggcgagaccaagcuguga

SEQ ID NO: 191060 - RNA, 1575 nt, Artificial Sequence
  derived and/or modified CDS sequence (opt4) from glycoprotein__RABV__FJ602450.1
augaucccccaggugcugcuguucgugccccugcugaucuucagcagcugccugggcaaguuccccaucuacaccauccccgacaagcugggccccuggagccccaucgacauccaccaccugagcugccccaacaaccuggugguggaggacgagggcugcaccaaccugagcggcuucagcuacauggagcugaaggugggcuacaucagcgccaucaaggugaacggcuucaccugcaccggcguggugaccgaggccgagaccuacaccaacuucgugggcuacgugaccaccaccuucaagagaaagcacuucagacccaugcccgacgccugcagagccgccuacaacuggaagauggccggcgaccccagauacgaggagagccugcacaaccccuaccccgacuaccacuggcugagaaccgugaagaccagcaaggagagccuggugaucaucagccccagcguggccgaccuggaccccuacgacaagagccugcacagcagaguguuccccggcggcaagugcagcggcaucaccgugagcagcaccugcugcagcaccaaccacgacuacaccaucuggaugcccgagaaccccagacugggcaccagcugcgacaucuucaccaacagcagaggcaagagagccagcaagggcggcaagaccugcggcuucguggacgagagaggccuguacaagagccugaagggcgccugcaagcugaagcugugcggcgugcugggccugagacugauggacggcaccuggguggccauccagaccagcgacgagaucaaguggugcagccccgaccagcuggugaaccugcacgacuuccacagcgacgagaucgagcaccuggugguggaggagcuggugaagaagagagaggagugccuggacgcccuggagaccaucaugaccaccaagagcgugagcuucagaagacugagccaccugagaaagcuggugcccggcuucggcaaggccuacaccaucuucaacaagacccugauggaggccgacgcccacuacaagagcaucagaaccuggaacgagaucauccccagcaagggcugccugagagugggcggcagaugccacccccacgugaacggcguguucuucaacggcaucauccugggccccgacggccacgugcugauccccgagaugcagagcagccugcugcaccagcacauggagcugcuggagagcagcgugaucccccugaugcacccccuggccgaccccagcaccguguucaaggacggcgacgaggccgaggacuucguggaggugcaccugcccgacgugcacaagcagaucagcggcguggaccugggccugcccaacuggggcaaguacgugcugaucagcgccggcgcccugaccgccagcaugcugaugaucuuccugaugaccugcugcagaaagaccaacagagccgagagcauccagcacagccccggcgagaccggcagaaaggugagcgugaccagccacaacggcagagugaucagcagcugggagagcuacaagagcggcggcgagaccaagcuguga

SEQ ID NO: 191061 - RNA, 1575 nt, Artificial Sequence; identical to SEQ ID NO: 190903
  derived and/or modified CDS sequence (opt4) from glycoprotein__RABV__FJ602451.1

SEQ ID NO: 191062 - RNA, 1575 nt, Artificial Sequence; identical to SEQ ID NO: 190587
  derived and/or modified CDS sequence (opt4) from glycoprotein__RABV__FJ602452.1

SEQ ID NO: 191063 - RNA, 1575 nt, Artificial Sequence; identical to SEQ ID NO: 190887
  derived and/or modified CDS sequence (opt4) from glycoprotein__RABV__FJ602453.1

SEQ ID NO: 191064 - RNA, 1575 nt, Artificial Sequence; identical to SEQ ID NO: 190903
  derived and/or modified CDS sequence (opt4) from glycoprotein__RABV__FJ602454.1

SEQ ID NO: 191065 - RNA, 1575 nt, Artificial Sequence; identical to SEQ ID NO: 190903
  derived and/or modified CDS sequence (opt4) from glycoprotein__RABV__FJ602455.1

SEQ ID NO: 191066 - RNA, 1575 nt, Artificial Sequence; identical to SEQ ID NO: 190903
  derived and/or modified CDS sequence (opt4) from glycoprotein__RABV__FJ602456.1

SEQ ID NO: 191067 - RNA, 1575 nt, Artificial Sequence; identical to SEQ ID NO: 190905
  derived and/or modified CDS sequence (opt4) from glycoprotein__RABV__FJ602457.1

SEQ ID NO: 191068 - RNA, 1575 nt, Artificial Sequence; identical to SEQ ID NO: 190905
  derived and/or modified CDS sequence (opt4) from glycoprotein__RABV__FJ602458.1

SEQ ID NO: 191069 - RNA, 1575 nt, Artificial Sequence
  derived and/or modified CDS sequence (opt4) from glycoprotein__RABV__FJ602459.1
augaucccccaggugcugcuguucgugccccugcugguguucagcagcugccugggcaaguuccccaucuacaccauccccgacaagcugggccccuggagccccaucgacauccaccaccugagcugccccaacaaccuggugguggaggacgagggcugcaccaaccugagcggcuucagcuacauggagcugaaggugggcuacaucagcgccaucaaggugaacggcuucaccugcaccggcguggugaccgaggccgagaccuacaccaacuucgugggcuacgugaccaccaccuucaagagaaagcacuucagacccaugcuggacgccugcagagccgccuacaacuggaagauggccggcgaccccagauacgaggagagccugcacaaccccuaccccgacuaccacuggcugagaaccgugaagaccagcaaggagagccuggugaucaucagccccagcguggccgaccuggaccccuacgacaagagccugcacagcagaguguuccccggcggcaagugcagcggcaucaccgugagcagcaccugcugcagcaccaaccacgacuacaccaucuggaugcccgagaaccccagacugggcaccagcugcgacaucuucaccaacagcagaggcaagagagccagcaagggcggcaagaccugcggcuucguggacgagagaggccuguacaagagccugaagggcgccugcaagcugaagcugugcggcgugcugggccugagacugauggacggcaccuggguggccauccagaccagcgacgagaucaaguggugcagccccgaccagcuggugaaccugcacgacuuccacagcgacgagaucgagcaccuggugguggaggagcuggugaagaagagagaggagugccuggacgcccuggagaccaucaugaccaccaagagcgugagcuucagaagacugagccaccugagaaagcuggugcccggcuucggcaaggccuacaccaucuucaacaagacccugauggaggccgacgcccacuacaagagcaucagaaccuggaacgagaucauccccagcaagggcugccugagagugggcggcagaugccacccccacgugaacggcguguucuucaacggcaucauccugggccccgacggccacgugcugauccccgagaugcagagcagccugcugcaccagcacauggagcugcuggagagcagcgugaucccccugaugcacccccuggccgaccccagcaccguguucaaggacggcgacgaggccgaggacuucguggaggugcaccugcccgacgugcacaagcagaucagcggcguggaccugggccugcccaacuggggcaaguacgugcugaucagcgccggcgcccugaccgccagcaugcugaugaucuuccugaugaccugcugcagaaagaccaacagagccgagagcauccagcacagccccggcgagaccggcagaaaggugagcgugaccagccacaacggcagagugaucagcagcugggagagcuacaagagcggcggcgagaccaagcuguga

SEQ ID NO: 191070 - RNA, 1575 nt, Artificial Sequence
  derived and/or modified CDS sequence (opt4) from glycoprotein__RABV__FJ712193.1
augaucccccaggugcugcuguucgugccccugcugguguucagcagcugcuucggcaaguuccccaucuacaccauccccgacaagcugggccccuggagccccaucgacauccaccaccugagcugccccaacaaccuggugguggaggacgagggcugcaccaaccugagcggcuucagcuacauggagcugaaggugggcuacaucagcgccaucaaggugaacggcuucaccugcaccggcguggugaccgaggccgagaccuacaccaacuucgugggcuacgugaccaccaccuucaagagaaagcacuucagacccaugcccgacgccugcagagccgccuacaacuggaagauggccggcgaccccagauacgaggagagccugcacaaccccuaccccgacuaccacuggcugagaaccgugaagaccaccaaggagagccuggugaucaucagccccagcguggccgaccuggaccccuacgacaagagccugcacagcagaguguuccccggcggcaagugcagcggcaucaccgugagcagcaccugcugcagcaccaaccacgacuacaccaucuggaugcccgagaaccccagacugggcaccagcugcgacaucuucaccaacagcagaggcaagagagccagcaagggcggcaagaccugcggcuucguggacgagagaggccuguacaagagccugaagggcgccugcaagcugaagcugugcggcgugcugggccugagacugauggacggcaccuggguggccauccagaccagcgacgagaucaaguggugcagccccgaccagcuggugaaccugcacgacuuccacagcgacgagaucgagcaccuggugguggaggagcuggugaagaagagagaggagugccuggacgcccuggagaccaucaugaccaccaagagcgugagcuucagaagacugagccaccugagaaagcuggugcccggcuucggcaaggccuacaccaucuucaacaagacccugauggaggccgacgcccacuacaagagcaucagaaccuggaacgagaucauccccagcaagggcugccugagagugggcggcagaugccacccccacgugaacggcguguucuucaacggcaucauccugggccccgacggccacgugcugauccccgagaugcagagcagccugcugcaccagcacauggagcugcuggagagcagcgugaucccccugaugcacccccuggccgaccccagcaccguguucaaggacggcgacgaggccgaggacuucguggaggugcaccugcccgacgugcacaagcagaucagcggcaucgaccugggccugcccaacuggggcaaguacgugcugaucagcgccggcgcccugaccgcccugaugcugaccaucuuccugaugaccugcugcagaaagaccaacagagccgagagcauccagcacagccccggcgagaccggcagaaaggugagcgugaccagccacaacggcagagugaucagcagcugggagagcuacaagagcggcagcgagaccaagcuguga

SEQ ID NO: 191071 - RNA, 1575 nt, Artificial Sequence; identical to SEQ ID NO: 190905
  derived and/or modified CDS sequence (opt4) from glycoprotein__RABV__FJ712194.1

SEQ ID NO: 191072 - RNA, 1575 nt, Artificial Sequence
  derived and/or modified CDS sequence (opt4) from glycoprotein__RABV__FJ712195.1
augaucccccaggcccugcuguucgugccccugcugguggugccccugugcuucggcaaguuccccaucuacaccauccccgacaagcugggccccuggagccccaucgacauccaccaccugagcugccccaacaaccuggugguggaggacgagggcugcaccaaccugagcggcuucagcuacauggagcugaaggugggcuacaucagcgccaucaaggugaacggcuucaccugcaccggcguggugaccgaggccgagaccuacaccaacuucgugggcuacgugaccaccaccuucaagagaaagcacuucagacccacccccgacgccugcagaagcgccuacaacuggaagauggccggcgaccccagauacgaggagagccugcacaaccccuaccccgacuaccacuggcugagaaccgugaagaccaccaaggagagcuucgugaucaucagccccagcguggccgaccuggaccccuacgacaagagccugcacagcagaguguuccccagaggcaagugcagcggcaucaccgugagcagcaccuacugcagcaccaaccacgacuacaccaucuggaugcccgagaaccccagacugggcaccagcugcgacaucuucaccaacagcagaggcaagagagccuucaagggcagcaagaccugcggcuucguggacgagagaggccuguacaagagccugaagggcgccugcaagcugaagcugugcggcgugcugggccugagacugauggacggcaccuggguggccauccagaccagcgacgagaccaaguggugcccccccgaccagcuggugaaccugcacgacuuccacagcgacgagaucgagcaccuggugguggaggagcuggugaagaagagagaggagugccuggacgcccuggagagcaucaugaccaccaagagcgugagcuucagaagacugagccaccugagaaagcuggugcccggcuucggcaaggccuacaccaucuucaacaagacccugauggaggccgacgcccacuacaagagcgugagaaccuggaacgagaucauccccagcaagggcugccugagagugggcggcagaugccacccccacgugaacggcguguucuucaacggcaucauccugggccccgacggccacgugcugauccccgagaugcagagcagccugcugcagcagcacauggagcugcuggagagcagcgugaucccccugaugcacccccuggccgaccccagcaccguguucaagaacggcgacgaggccgaggacuucguggaggugcaccugcccgacgugcacaagcaggugagcggcguggaccugggccugcccagcuggggcaaguacgugcugaugagcgccggcauccugaccgcccugaugcugaugaucuuccugaugaccugcugcagaagaaccaacagacccgagagcauccagcacagccugggcgagaccggcagaaaggugagcgugaccagccagagcggcagagugaucagcagcugggagagcuacaagagcggcggcgagaccaagcuguga

SEQ ID NO: 191073 - RNA, 1575 nt, Artificial Sequence
  derived and/or modified CDS sequence (opt4) from glycoprotein__RABV__FJ712196.1
augaucccccaggcccugcuguucgugccccugcugguggugccccugugcuucggcaaguuccccaucuacaccauccccgacaagcugggccccuggagccccaucgacauccaccaccugagcugccccaacaaccuggugguggaggacgagggcugcaccaaccugagcggcuucagcuacauggagcugaaggugggcuacaucagcgccaucaaggugaacggcuucaccugcaccggcguggugaccgaggccgagaccuacaccaacuucgugggcuacgugaccaccaccuucaagagaaagcacuucagacccacccccgacgccugcagaagcgccuacaacuggaagauggccggcgaccccagauacgaggagagccugcacaaccccuaccccgacuaccacuggcugagaaccgugaagaccaccaaggagagcuucgugaucaucagccccagcguggccgaccuggaccccuacgacaagagccugcacagcagaguguuccccagaggcaagugcagcggcaucaccgugagcagcaccuacugcagcaccaaccacgacuacaccaucuggaugcccgagaaccccagacugggcaccagcugcgacaucuucaccaacagcagaggcaagagagccuucaagggcagcaagaccugcggcuucguggacgagagaggccuguacaagagccugaagggcgccugcaagcugaagcugugcggcgugcugggccugagacugauggacggcaccuggguggccauccagaccagcagagagaccaaguggagaccccccgaccagcuggugaaccugcacgacuuccacagcgacgagaucgagcaccuggugguggaggagcuggugaagaagagagaggagugccuggacgcccuggagagcaucaugaccaccaagagcgugagcuucagaagacugagccaccugagaaagcuggugcccggcuucggcaaggccuacaccaucuucaacaagacccugauggaggccgacgcccacuacaagagcgugagaaccuggaacgagaucauccccagcaagggcugccugagagugggcggcagaugccacccccacgugaacggcguguucuucaacggcaucauccugggccccgacggccacgugcugauccccgagaugcagagcagccugcugcagcagcacauggagcugcuggagagcagcgugaucccccugaugcacccccuggccgaccccagcaccguguucaagaacggcgacgaggccgaggacuucguggaggugcaccugcccgacgugcacaagcaggugagcggcguggaccugggccugcccagcuggggcaaguacgugcugaugagcgccggcauccugaccgcccugaugcugaugaucuuccugaugaccugcugcagaagaaccaacagacccgagagcauccagcacagccugggcgagaccggcagaaaggugagcgugaccagccagagcggcagagugaucagcagcugggagagcuacaagagcggcggcgagaccaagcuguga

SEQ ID NO: 191074 - RNA, 1575 nt, Artificial Sequence
  derived and/or modified CDS sequence (opt4) from glycoprotein__RABV__FJ719749.1
augaucccccaggcccugcuguucgugccccugcugguggugccccugugcuucggcaaguuccccaucuacaccauccccgacaagcugggccccuggagcagcaucgacauccaccaccugagcugccccaacaaccuggugguggaggacgagggcugcaccaaccugagcggcuucagcuacauggagcugaaggugggcuacaucagcgccaucaaggugaacggcuucaccugcaccggcguggugaccgaggccgagaccuacaccaacuucgugggcuacgugaccaccaccuucaagagaaagcacuucagacccacccccgacgccugcagaagcgccuacaacuggaagauggccggcgaccccagauacgaggagagccugcacaaccccuaccccgacuaccacuggcugagaaccgugaagaccaccaaggagagcuucgugaucaucagccccagcguggccgaccuggaccccuacgacaagagccugcacagcagaguguuccccagaggcaagugcagcggcaucaccgugagcagcaccuacugccccaccaaccacgacuacaccaucuggaugcccgagaaccccagacugggcaccagcugcgacaucuucaccaacagcagaggcaagagagcccugaagggcagcaagaccugcggcuucguggacgagagaggccuguacaagagccugaagggcgccugcaagcugaagcugugcggcgugcccggccugagacugauggacggcaccuggguggccauccagaccagcgacgagaccaaguggugcccccccgaccagcuggugaaccugcacgacuuccacagcgacgagaucgagcaccuggugguggaggagcuggugaagaagagagaggagugccuggacgcccuggagagcaucaugaccaccaagagcgugagcuucagaagacugagccaccugagaaagcuggugcccggcuucggcaaggccuacaccaucuucaacaagacccugauggaggccgacgcccacuacaagagcgugagaaccuggaacgagaucauccccagcaagggcugccugagagugggcggcagaugccacccccacgugaacggcguguucuucaacggcaucauccugggccccgacggccacgugcugauccccgagaugcagagcagccugcugcagcagcacauggagcugcuggagagcagcgugaucccccugaugcacccccuggccgaccccagcaccguguucaagaacggcgacgagguggaggacuucguggaggugcaccugcccgacgugcacaagcaggugagcggcguggacuucggccugcccagcuggggcaaguacgugcugaugagcgccggcauccugaccgcccugaugcuggugaucuuccugaugaccugcugcagaagaaccaacagaagcgagagcauccagcacagccugggcgagaccggcagaaaggugagcgugaccagccagagcggcagagugaucagcagcugggagagcuacaagagcggcggcgagaccaagcuguga

SEQ ID NO: 191075 - RNA, 1575 nt, Artificial Sequence
  derived and/or modified CDS sequence (opt4) from glycoprotein__RABV__FJ719752.1
augaucccccaggcccugcuguucgugccccugcugguggugccccugugcuucggcaaguuccccaucuacaccauccccgacaagcugggccccuggagccccaucgacauccaccaccugagcugccccaacaaccuggugguggaggacgagggcugcaccaaccugagcggcuucagcuacauggagcugaaggugggcuacaucagcgccaucaaggugaacggcuucaccugcaccggcguggugaccgaggccgagaccuacaccaacuucgugggcuacgugaccaccaccuucaagagaaagcacuucagacccacccccgacgccugcagaagcgccuacaacuggaagauggccggcgaccccagauacgaggagagccugcacaaccccuaccccgacuaccacuggcugagaaccgugaagaccaccaaggagagcuucgugaucaucagccccagcguggccgaccuggaccccuacgacaagagccugcacagcagaguguuccccagaggcaagugcagcggcaucaccgugagcagcaccuacugccccaccaaccacgacuacaccaucuggaugcccgagaaccccagacugggcaccagcugcgacaucuucaccaacagcagaggcaagagagccuucaagggcagcaagaccugcggcuucguggacgagagaggccuguacaagagccugaagggcgccugcaagcugaagcugugcggcgugcugggccugagacugauggacggcaccuggguggccauccagaccagcgacgagaccaaguggugcccccccgaccagcuggugaaccugcacgacuuccacagcgacgagaucgagcaccuggugguggaggagcuggugaagaagagagaggagugccuggacgcccuggagagcaucaugaccaccaagagcgugagcuucagaagacugagccaccugagaaagcuggugcccggcuucggcaaggccuacaccaucuucaacaagacccugauggaggccgacgcccacuacaagagcgugagaaccuggaacgagaucauccccagcaagggcugccugagagugggcggcagaugccacccccacgugaacggcguguucuucaacggcaucauccugggccccgacggccacgugcugauccccgagaugcagagcagccugcugcagcagcacauggagcugcuggagagcagcgugaucccccugaugcacccccuggccgaccccagcaccguguucaagaacggcgacgaggccgaggacuucguggaggugcaccugcccgacgugcacaagcaggugagcggcguggaccugggccugcccagcuggggcaaguacgugcugaugagcgccggcauccugaccgcccugaugcugaugaucuuccugaugaccugcugcagaagaaccaacagacccgagagcauccagcacagccugggcgagaccggcagaaaggugagcgugaccagccagagcggcagagugaucagcagcugggagagcuacaagagcggcggcgagaccaagcuguga

SEQ ID NO: 191076 - RNA, 1575 nt, Artificial Sequence; identical to SEQ ID NO: 191072
  derived and/or modified CDS sequence (opt4) from glycoprotein__RABV__FJ719756.1

SEQ ID NO: 191077 - RNA, 1575 nt, Artificial Sequence
  derived and/or modified CDS sequence (opt4) from glycoprotein__RABV__FJ825129.1
augaucccccaggugcugcuguucgugccccugcugguguucagcagcugcuucggcaaguuccccaucuacaccauccccgacaagcugggccccuggagccccaucgacauccaccaccugagcugccccaacaaccuggugguggaggacgagggcugcaccaaccugagcggcuucagcuacauggagcugaaggugggcuacaucagcgccaucaaggugaacggcuucaccugcaccggcguggugaccgaggccgagaccuacaccaacuucgugggcuacgugaccaccaccuucaagagaaagcacuucagacccaugcccgacgccugcagagccgccuacaacuggaagauggccggcgaccccagauacgaggagagccugcacaaccccuaccccgacuaccacuggcugagaaccgugaagaccaccaaggagagccuggugaucaucagccccagcguggccgaccuggaccccuacgacaagagccugcacagcagaguguuccccggcggcaagugcagcagaaucaccgugagcagcaccugcugcagcaccaaccacgacuacaccaucuggaugcccgagaaccccagacugagaaccagcugcgacaucuucaccaacagcagaggcaagagagccagcaagagaggcaagaccugcggcuucguggacgagagaggccuguacaagagccugaagggcgccugcaagcugaagcugugcggcgugcugggccugagacugauggacggcaccuggguggccauccagaccagcgacgagaucaaguggugcagccccgaccagcuggugaaccugcacgacuuccacagcgacgagaucgagcaccuggugguggaggagcuggugaagaagagagaggagugccuggacgcccuggagaccaucaugaccaccaagagcgugagcuucagaagacugagccaccugagaaagcuggugcccggcuucggcaaggccuacaccaucuucaacaagacccugauggaggccgacgcccacuacaagagcaucagaaccuggaacgagaucauccccagcaagggcugccugagagugggcggcagaugccacccccacgugaacggcguguucuucaacggcaucauccugggccccgacggccacgugcugauccccgagaugcagagcagccugcugcaccagcacauggagcugcuggagagcagcgugaucccccugaugcacccccuggccgaccccagcaccguguucaaggacggcgacgaggccgaggacuucguggaggugcaccugcccgacgugcacaagcagaucagcggcaucgaccugggccugcccaacuggggcaaguacgugcugaucagcgccggcgcccugaccgcccugaugcugaccaucuuccugaugaccugcugcagaaagaccaacagagccgagagcauccagcacagccccggcgagaccggcagaaaggugagcgugaccagccacaacggcagagugaucagcagcugggagagcuacaagagcggcagcgagaccaagcuguga

SEQ ID NO: 191078 - RNA, 1575 nt, Artificial Sequence; identical to SEQ ID NO: 190905
  derived and/or modified CDS sequence (opt4) from glycoprotein__RABV__FJ825130.1

SEQ ID NO: 191079 - RNA, 1575 nt, Artificial Sequence
  derived and/or modified CDS sequence (opt4) from glycoprotein__RABV__FJ825131.1
augaucccccaggugcugcuguucgugccccugcugguguucagcagcugcuucggcaaguuccccaucuacaccauccccgacaagcugggccccuggagccccaucgacauccaccaccugagcugccccaacaaccuggugguggaggacgagggcugcaccaaccugagcggcuucagcuacauggagcugaaggugggcuacaucagcgccaucaaggugaacggcuucaccugcaccggcguggugaccgaggccgagaccuacaccaacuucgugggcuacgugaccaccaccuucaagagaaagcacuucagacccaugcccgacgccugcagagccgccuacaacuggaagauggccggcgaccccagauacgaggagagccugcacaaccccuaccccgacuaccacuggcugagaaccgugaagaccaccaaggagagccuggugaucaucagccccagcguggccgaccuggaccccuacgacaagagccugcacagcagaguguuccccggcggcaagugcagcggcaucaccgugagcagcaccugcugcagcaccaaccacgacuacaccaucuggaugcccgagaaccccagacugggcaccagcugcgacaucuucaccaacagcagaggcaagagagccagcaagggcggcaagaccugcggcuucgugcacgagagaggccuguacaagagccugaagggcgccugcaagcugaagcugugcggcgugcugggccugagacugauggacggcaccuggguggccauccagaccagcgacgagaucaaguggugcagccccgaccagcuggugaaccugcacgacuuccacagcgacgagaucgagcaccuggugguggaggagcuggugaagaagagagaggagugccuggacgcccuggagaccaucaugaccaccaagagcgugagcuucagaagacugagccaccugagaaagcuggugcccggcuucggcaaggccuacaccaucuucaacaagacccugauggaggccgacgcccacuacaagagcaucagaaccuggaacgagaucauccccagcaagggcugccugagagugggcggcagaugccacccccacgugaacggcguguucuucaacggcaucauccugggccccgacggccacgugcugauccccgagaugcagagcagccugcugcaccagcacauggagcugcuggagagcagcgugaucccccugaugcacccccuggccgaccccagcaccguguucaaggacggcgacgaggccgaggacuucguggaggugcaccugcccgacgugcacaagcagaucagcggcguggaccugggccugcccaacuggggcaaguacgugcugaucagcgccggcgcccugaccgcccugaugcugaccaucuuccugaugaccugcugcagaaagaccaacagagccgagagcauccagcacagccccggcgagaccggcagaaaggugagcgugaccagccacaacggcagagugaucagcagcugggagagcuacaagagcggcagcgagaccaagcuguga

SEQ ID NO: 191080 - RNA, 1575 nt, Artificial Sequence
  derived and/or modified CDS sequence (opt4) from glycoprotein__RABV__FJ825132.1
augaucccccaggugcugcuguucgugccccugcugguguucagcagcugcuucggcaaguuccccaucuacaccauccccgacaagcugggccccuggagccccaucgacauccaccaccugagcugccccaacaaccuggugguggaggacgagggcugcaccaaccugagcggcuucagcuacauggagcugaaggugggcuacaucagcgccaucaaggugaacggcuucaccugcaccggcguggugaccgaggccgagaccuacaccaacuucgugggcuacgugaccaccaccuucaagagaaagcacuucagacccaugcccgacgccugcagagccgccuacaacuggaagauggccggcgaccccagauacgaggagagccugcacaaccccuaccccgacuaccacuggcugagaaccgugaagaccaccaaggagagccuggugaucaucagccccagcguggccgaccuggaccccuacgacaagagccugcacagcagaguguuccccggcggcaagugcagcggcaucaccgugagcagcaccugcugcagcaccaaccacgacuacaccaucuggaugcccgagaaccccagacugggcaccagcugcgacaucuucaccaacagcagaggcaagagagccagcaagggcggcaagaccugcggcuucguggacgagagaggccuguacaagagccugagaggcgccugcaagcugaagcugugcggcgugcugggccugagacugauggacggcaccuggguggccauccagaccagcgacgagaucaaguggugcagccccgaccagcuggugaaccugcacgacuuccacagcgacgagaucgagcaccuggugguggaggagcuggugaagaagagagaggagugccuggacgcccuggagaccaucaugaccaccaagagcgugagcuucagaagacugagccaccugagaaagcuggugcccggcuucggcaaggccuacaccaucuucaacaagacccugauggaggccgacgcccacuacaagagcaucagaaccuggaacgagaucauccccagcaagggcugccugagagugggcggcagaugccacccccacgugaacggcguguucuucaacggcaucauccugggccccgacggccacgugcugauccccgagaugcagagcagccugcugcaccagcacauggagcugcuggagagcagcgugaucccccugaugcacccccuggccgaccccagcaccguguucaaggacggcgacgaggccgaggacuucguggaggugcaccugcccgacgugcacaagcagaucagcggcguggaccugggccugcccaacuggggcaaguacgugcugaucagcgccggcgcccugaccgcccugaugcugaugaucuuccugaugaccugcugcagaaagaccaacagagccgagagcauccagcacagccccggcgagaccggcuggaaggugagcgugaccagccacaacggcagagugaucagcagcugggagagcuacaagagcggcagcgagaccaagcuguga

SEQ ID NO: 191081 - RNA, 1575 nt, Artificial Sequence
  derived and/or modified CDS sequence (opt4) from glycoprotein__RABV__FJ825133.1
augaucccccaggugcugcuguucgugccccugcugguguucagcagcugcuucggcaaguuccccaucuacaccauccccgacaagcugggccccuggagccccaucgacauccaccaccugagcugccccaacaaccuggugguggaggacgagggcugcaccaaccugagcggcuucagcuacauggagcugaaggugggcuacaucagcgccaucaaggugaacggcuucaccugcaccggcguggugaccgaggccgagaccuacaccaacuucgugggcuacgugaccaccaccuucaagagaaagcacuucagacccaugcccgacgccugcagagccgccuacaacuggaagauggccggcgaccccagauacgaggagagccugcacaaccccuaccccgacuaccacuggcugagaaccgugaagaccaccaaggagagccuggugaucaucagccccagcguggccgaccuggaccccuacgacaagagccugcacagcagaguguuccccggcggcaagugcagcagaaucaccgugagcagcaccugcugcagcaccaaccacgacuacaccaucuggaugcccgagaaccccagacugggcaccagcugcgacaucuucaccaacagcagaggcaagagagccagcaagggcggcaagaccugcggcuucguggacgagagaggccuguacaagagccugagaggcgccugcaagcugaagcugugcggcgugcugggccugagacugauggacggcaccuggguggccauccagaccagcgacgagaucaaguggugcagccccgaccagcuggugaaccugcacgacuuccacagcgacgagaucgagcaccuggugguggaggagcuggugaagaagagagaggagugccuggacgcccuggagaccaucaugaccaccaagagcgugagcuucagaagacugagccaccugagaaagcuggugcccggcuucggcaaggccuacaccaucuucaacaagacccugauggaggccgacgcccacuacaagagcaucagaaccuggaacgagaucauccccagcaagggcugccugagagugggcggcagaugccacccccacgugaacggcguguucuucaacggcaucauccugggccccgacggccacgugcugauccccgagaugcagagcagccugcugcaccagcacauggagcugcuggagagcagcgugaucccccugaugcacccccuggccgaccccagcaccguguucaaggacggcgacgaggccgaggacuucguggaggugcaccugcccgacgugcacaagcagaucagcggcguggaccugggccugcccaacuggggcaaguacgugcugaucagcgccggcgcccugaccgcccugaugcugaugaucuuccugaugaccugcugcagaaagaccaacagagccgagagcauccagcacagccccggcgagaccggcagaaaggugagcgugaccagccacaacggcagagugaucagcagcugggagagcuacaagagcggcagcgagaccaagcuguga

SEQ ID NO: 191082 - RNA, 1575 nt, Artificial Sequence; identical to SEQ ID NO: 191072
  derived and/or modified CDS sequence (opt4) from glycoprotein__RABV__FJ825134.1

SEQ ID NO: 191083 - RNA, 1575 nt, Artificial Sequence
  derived and/or modified CDS sequence (opt4) from glycoprotein__RABV__FJ866832.1
augaucccccaggugcugcuguucgugccccugcugguguucagcagcugcuucggcaaguuccccaucuacaccauccccgacaagcugggccccuggagccccaucgacauccaccaccugagcugccccaacaaccuggugguggaggacgagggcugcaccaaccugagcggcuucagcuacauggagcugaaggugggcuacaucagcgccaucaaggugaacggcuucaccugcaccggcguggugaccgaggccgagaccuacaccaacuucgugggcuacgugaccaccaccuucaagagaaagcacuucagacccaugcccgacgccugcagagccgccuacaacuggaagauggccggcgaccccagauacgaggagagccugcacaaccccuaccccgacuaccacuggcugagaaccgugaagaccaccaaggagagccuggugaucaucagccccagcguggccgaccuggaccccuacgacaagagccugcacagcagaguguuccccggcggcaagugcagcggcaucaccgugagcagcaccugcugcagcaccaaccacgacuacaccaucuggaugcccgagaaccccagacugggcaccagcugcgacaucuucgccaacagcagaggcaagagagccagcaagggcggcaagaccugcggcuucguggacgagagaggccuguacaagagccugaagggcgccugcaagcugaagcugugcggcgugcugggccugagacugauggacggcaccuggguggccauccagaccagcgacgagaucaaguggugcagccccgaccagcuggugaaccugcacgacuuccacagcgacgagaucgagcaccuggugguggaggagcuggugaagaagagagaggagugccuggacgcccuggagaccaucaugaccaccaagagcgugagcuucagaagacugagccaccugagaaagcuggugcccggcuucggcaaggccuacaccaucuucaacaagacccugauggaggccgacgcccacuacaagagcaucagaaccuggaacgagaucauccccagcaagggcugccugagagugggcggcagaugccacccccacgugaacggcguguucuucaacggcaucauccugggccccgacggccacgugcugauccccgagaugcagagcagccugcugcaccagcacauggagcugcuggagagcagcgugaucccccugaugcacccccuggccgaccccagcaccguguucaaggacggcgacgaggccgaggacuucguggaggugcaccugcccgacgugcacaagcagaucagcggcguggaccugggccugcccaacuggggcaaguacgugcugaucagcgccggcgcccugaccgcccugaugcugaccaucuuccugaugaccugcugcagaaagaccaacagagccgagagcauccagcacagccccggcgagaccggcagaaaggugagcgugaccagccacaacggcagagugaucagcagcugggagagcuacaagagcggcagcgagaccaagcuguga

SEQ ID NO: 191084 - RNA, 1575 nt, Artificial Sequence
  derived and/or modified CDS sequence (opt4) from glycoprotein__RABV__FJ866834.1
augaucccccaggugcugcuguucgugccccugcugguguucagcagcugcuucggcaaguuccccaucuacaccauccccgacaagcugggccccuggagccccaucgacauccaccaccugagcugccccaacaaccuggugguggaggacgagggcugcaccaaccugagcggcuucagcuacauggagcugaaggugggcuacaucagcgccaucaaggugaacggcuucaccugcaccggcguggugaccgaggccgagaccuacaccaacuucgugggcuacguggccaccaccuucaagagaaagcacuucagacccaugcccgacgccugcagagccgccuacaacuggaagauggccggcgaccccagauacgaggagagccugcacaaccccuaccccgacuaccacuggcugagaaccgugaagaccaccaaggagagccuggugaucaucagccccagcguggccgaccuggaccccuacgacaagagccugcacagcagaguguuccccggcggcaagugcagcggcaucaccgugagcagcaccugcugcagcaccaaccacgacuacaccaucuggaugcccgagaaccccagacugggcaccagcugcgacaucuucaccaacagcagaggcaagagagccagcaagggcggcaagaccugcggcuucguggacgagagaggccuguacaagagccugaagggcgccugcaagcugaagcugugcggcgugcugggccugagacugauggacggcaccuggguggccauccagaccagcgacgagaucaaguggugcagccccgaccagcuggugaaccugcacgacuuccacagcgacgagaucgagcaccuggugguggaggagcuggugaagaagagagaggagugccuggacgcccuggagaccaucaugaccaccaagagcgugagcuucagaagacugagccaccugagaaagcuggugcccggcuucggcaaggccugcaccaucuucaacaagacccugauggaggccgacgcccacuacaagagcaucagaaccuggaacgagaucauccccagcaagggcugccugagagugggcggcagaugccacccccacgugaacggcguguucuucaacggcaucauccugggccccgacggccacgugcugauccccgagaugcagagcagccugcugcaccagcacauggagcugcuggagagcagcgugaucccccugaugcacccccuggccgaccccagcaccguguucaaggacggcgacgaggccgaggacuucguggaggugcaccugcccgacgugcacaagcagaucagcggcguggaccugggccugcccaacuggggcaaguacgugcugaucagcgccggcgcccugaccgcccugaugcugaccaucuuccugaugaccugcugcagaaagaccaacagagccgagagcauccagcacagccccggcgagaccggcagaaaggugagcgugaccagccacaacggcagagugaucagcagcugggagagcuacaagagcggcagcgagaccaagcuguga

SEQ ID NO: 191085 - RNA, 1575 nt, Artificial Sequence
  derived and/or modified CDS sequence (opt4) from glycoprotein__RABV__FJ866835.1
augaucccccaggugcugcuguucgugccccugcugguguucagcagcugcuucggcaaguuccccaucuacaccauccccgacaagcugggccccuggagccccaucgacauccaccaccugagcugccccaacaaccuggugguggaggacgagggcugcaccaaccugagcggcuucagcuacauggagcugaaggugggcuacaucagcgccaucaaggugaacggcuucaccugcaccggcguggugaccgaggccgagaccuacaccaacuucgugggcuacgugaccaccaccuucaagagaaagcacuucagacccaugcccgacgccugcagagccgccuacaacuggaagauggccggcgaccccagauacgaggagagccugcacaaccccuaccccgacuaccacuggcugagaaccgugaagaccaccaaggagagccuggugaucaucagccccagcguggccgaccuggaccccuacgacaagagccugcacagcagaguguuccccggcggcaagugcagcggcaucaccgugagcagcaccugcugcagcaccaaccacgacuacaccaucuggaugcccgagaaccccagacugggcaccagcugcgacaucuucaccaacagcagaggcaagggcgccagcaagggcggcaagaccugcggcuucguggacgagagaggccuguacaagagccugaagggcgccugcaagcugaagcugugcggcgugcugggccugagacugauggacggcaccuggguggccauccagaccagcgccgagaucaaguggugcagccccgaccagcuggugaaccugcacgacuuccacagcgacgagaucgagcaccuggugguggaggagcuggugaagaagagagaggagugccuggacgcccuggagaccaucaugaccaccaagagcgugagcuucagaagacugagccaccugagaaagcuggugcccggcuucggcaaggccuacaccaucuucaacaagacccugauggaggccgacgcccacuacaagagcaucagaaccuggaacgagaucauccccagcaagggcugccugagagugggcggcagaugccacccccacgugaacggcguguucuucaacggcaucauccugggccccgacggccacgugcugauccccgagaugcagagcagccugcugcaccagcacauggagcugcuggagagcagcgugaucccccugaugcacccccuggccgaccccagcaccguguucaaggacggcgacgaggccgaggacuucguggaggugcaccugcccgacgugcacaagcagaucagcggcguggaccugggccugcccaacuggggcaaguacgugcugaucagcgccggcgcccugaccgcccugaugcugaccaucuuccugaugaccugcugcagaaagaccaacagagccgagagcauccagcacagccccggcgagaccggcagaaaggugagcgugaccagccacaacggcagagugaucagcagcugggagagcuacaagagcggcagcgagaccaagcuguga

SEQ ID NO: 191086 - RNA, 1575 nt, Artificial Sequence
  derived and/or modified CDS sequence (opt4) from glycoprotein__RABV__FJ959397.1
augaucccccaggcccugcuguucgugccccugcugguguucccccugugcuucggcaaguuccccaucuacaccauccccgacaagcugggccccuggagccccaucgacauccaccaccugagcugccccaacaaccuggugguggaggacgagggcugcaccaaccugagcggcuucagcuacauggagcugaaggugggcuacaucagcgccaucaaggugaacggcuucaccugcaccggcguggugaccgaggccgagaccuacaccaacuucgugggcuacgugaccaccaccuucaagagaaagcacuucagacccacccccgacgccugcagaagcgccuacaacuggaagauggccggcgaccccagauacgaggagagccugcacaaccccuaccccgacuaccacuggcugagaaccgugaagaccaccaaggagagcguggugaucaucagccccagcguggccgaccuggaccccuacgacaagagccugcacagcagaguguuccccagaggcaagugcagcggcaucaccgugagcagcgccuacugcagcaccaaccacgacuacaccaucuggaugcccgagaaccccagacugggcaccagcugcgacaucuucaccaacagcagaggcaagagagccagcaagggcagcaagaccugcggcuucguggacgagagaggccuguacaagagccugaagggcgccugcaagcugaagcugugcggcgugcugggccugagacugauggacggcaccuggguggccauccagaccagcaacgagaccaaguggugcccccccgaccagcuggugaaccugcacgacuuccacagcgacgagaucgagcaccuggugguggaggagcuggugaagaagagagaggagugccuggacgcccuggagagcaucaugaccaccaagagcgugagcuucagaagacugagccaccugagaaagcuggugcccggcuucggcaaggccuacaccaucuucaacaagacccugauggaggccgacgcccacuacaagagcgugagaaccuggaacgagaucauccccagcaagggcugccugagagugggcggcagaugccacccccacgugaacggcguguucuucaacggcaucauccugggccccgacggccacgugcugauccccgagaugcagagcagccugcugcagcagcacauggagcugcuggagagcagcgugaucccccugaugcacccccuggccgaccccagcaccguguucaaggacggcgacgagguggaggacuucguggaggugcaccugcccgacgugcacaagcaggugagcggcguggaccugggccugcccaacuggggcaaggacgugcugaugggcgccggcgugcugaccgcccugaugcugaugaucuuccugaugaccugcugcagaagaaccaacagagccgagagcauccagcacagccugggcgagaccggcagaaaggugagcgugaccagccagagcggcagagugaucagcagcugggagagcuacaagagcggcggcgagaccaagcuguga

SEQ ID NO: 191087 - RNA, 1575 nt, Artificial Sequence
  derived and/or modified CDS sequence (opt4) from glycoprotein__RABV__FJ979833.1
auggugccccaggcccugcuguucgugccccugcugggcuucagccugugcuucggcaaguuccccaucuacaccauccccgacgagcugggccccuggagccccaucgacauccaccaccugagcugccccaacaaccuggugguggaggacgagggcugcaccaaccugagcgaguucagcuacauggagcugaaggugggcuacaucagcgccaucaaggugaacggcuucaccugcaccggcguggugaccgaggccgaggccuacaccaacuucgugggcuacgugaccaccaccuucaagagaaagcacuucagacccacccccgacgccugcagagccgccuacaacuggaagauggccggcgaccccagauacgaggagagccugcacaaccccuaccccgacuaccacuggcugagaaccgugagaaccaccaaggagagccugaucaucaucagccccagcgugaccgaccuggaccccuacgacaagagccugcacagcagaguguuccccggcggcaagugcagcggcaucaccgugagcagcaccuacugcagcaccaaccacgacuacaccaucuggaugcccgaggaccccagacccagaacccccugcgacaucuucaccaacagcagaggcaagagagccagcaagggcaacaagaccugcggcuucguggacgagagaggccuguacaagagccugaagggcgccugcagacugaagcugugcggcgugcugggccugagacugauggacggcaccuggguggccaugcagaccagcgacgagaccaaguggugcccccccgaccagcuggugaaccugcacgacuuccagagcgacgagaucgagcaccuggugguggaggagcuggugaagaagagagagggcugccuggacgcccuggagagcaucaugaccaccaagagcgugagcuucagaagauucagccaccugagaaagcuggugcccggcuucggcaaggccuacaccaucuucaacaagacccugauggaggccgacgcccacuacaagagcgugagaaccuggaacgagaucauccccagcaagggcugccugaaggugggcggcagaugccacccccacgugaacggcguguucuucaacggcaucauccugggccccgacggccacgugcugauccccgagaugcagagcagccugcugcagcagcacauggagcugcugaagagcagcgugaucccccugaugcacccccuggccgaccccagcaccguguucaaggagggcgacgaggccgaggacuucguggaggugcaccugcccgacguguacaagagaaucagcggcguggaccugggccugcccaacuggggcaaguacgugcugaugaccgccggcgccaugaucggccuggugcugaucuucagccugaugaccuggugcagaagagccaacagacccgagagcaagcagagaagcuucggcggcaccggcagaaacgugagcgugaccagccagagcggcaaggugauccccagcugggagagcuacaagagcggcggcgagaccggccuguga

SEQ ID NO: 191088 - RNA, 1575 nt, Artificial Sequence
  derived and/or modified CDS sequence (opt4) from glycoprotein__RABV__GQ303557.1
augaucccccaggcccugcuguucgugccccugcugguguucagcagcugcuucggcaaguuccccaucuacaccauccccgacaagcugggccccuggagccccaucgacauccaccaccugagcugccccaacaaccuggugguggaggacgagggcugcaccaaccugagcggcuucagcuacauggagcugaaggugggcuacaucagcgccaucaaggugaacggcuucaccugcaccggcguggugaccgaggccgagaccuacaccaacuucgugggcuacgugaccaccaccuucaagagaaagcacuucagacccacccccgacgccugcagagccgccuacaacuggaagauggccggcgaccccagauacgaggagagccugcacaaccccuaccccgacuaccacuggcugagaaccgugaagaccaccaaggagagccuggugaucaucagccccagcgugagcgaccuggaccccuacgacaagagccugcacagcagaguguuccccagcggcaagugcagcggcaucaccgugagcagcaccuacugccccaccaaccacgacuacaccaucuggaugcccgagaaccccagacugggcaccagcugcgacaucuucaccaacagcagaggcaagagagccagcaagggcggcaagaccugcggcuucguggacgagagaggccuguacaagagccugaagggcgccugcaagcugaagcugugcggcgugcugggccugagacugauggacggcaccuggguggccauccagaccagcgacgaggccaaguggugcccccccgaccagcuggugaacauccacgacuucagaagcgacgagaucgagcaccuggugguggaggagcuggugaagaagagagaggagugccuggacgcccuggagagcaucaugaccaccaagagcgugagcuucagaagacugagccaccugagaaagcuggugcccggcuucggcaaggccuacaccaucuucaacaagacccugauggaggccgacgcccacuacaagagcgugagaaccuggaacgagaucauccccagcaagggcugccugagagugggcggcagaugccacccccacgugaacggcguguucuucaacggcaucauccugggccccgacggccacgugcugauccccgagaugcagagcagccugcugcagcagcacauggagcugcuggagagcagcgugaucccccugaugcacccccuggccgaccccagcaccguguucaaggacggcgacgaggccgaggacuucguggaggugcaccugcccgacgugcacaagcaggugagcggcguggaccugggccugcccagcuggggcaaguacgugcugaugagcgugggcgccaugaucgcccugaugcugaugaucuuccugaugaccugcugcagaaaggccaacggcgccgagaccauccagcacagacugggcgagaccggcagaaaggugagcgugaccagccagagcggcagagugaucagcagcugggagagcuacaagagcggcggcgagaccaagcuguga

SEQ ID NO: 191089 - RNA, 1575 nt, Artificial Sequence; identical to SEQ ID NO: 190917
  derived and/or modified CDS sequence (opt4) from glycoprotein__RABV__GQ406342.1

SEQ ID NO: 191090 - RNA, 1575 nt, Artificial Sequence
  derived and/or modified CDS sequence (opt4) from glycoprotein__RABV__GQ412744.1
auggugccccaggcccugcugcuggugccccugcugggcuucagccugugcuucggcaaguuccccaucuacaccauccccgacacccugggccccuggagccccaucgacauccaccaccugagcugccccaacaaccuggugguggaggacgagggcugcaccaaccugagcggcuucagcuacauggagcugaaggugggccacaucagcgccaucaaggugaacggcuucaccugcaccggcguggugaccgaggccgagaccuacaccaacuucgugggcuacgugaccaccaccuucaagagaaagcacuucagacccacccccgacgccugcagagccgccuacaacuggaagauggccggcgaccccagauacgaggagagccugcacagccccuaccccgacuaccacuggcugagaaccgugaagaccaccaaggagagccuggugaucaucagccccagcguggccaaccuggaccccuacgacaacagccugcacagcagaguguuccccagcggcaagugcagcggcaucaccgugcccagcguguacugcagcaccaaccacgacuacaccguguggaugcccgagauccugagacugggcaccagcugcgacaucuucaccaacagcagaggcaagagagccagcaagggcagcaagaccugcggcuucguggacgagagaggccuguacaagagccugaagggcgccugcaagcugaagcugugcggcgugcccggccugagacugauggacggcaccuggguggccaugcagaccagcaacgagaccaaguggugcccccccggccagcuggugaaccugcacgaccugcacagcgacgagaucgagcaccuggugguggaggagcuggugaagaagagagaggagugccuggacgcccuggagagcaucaucaccaccaagagcgugagcuucagaagacugagccaccugagaaagcuggugcccggcuucggcaaggccuacaccaucuucaacaagacccugauggaggccgaggcccacuacaagagcgugagaaccuggaacgagaucauccccagcaagggcugccugagagugggcggcagaugccacccccacgugaacggcguguucuucaacggcaucauccugggccccgacggccacgugcugauccccgagaugcagagcagccugcugcagcagcacaucgagcugcuggagagcagcgugaucccccugaugcacccccuggccgaccccuucaccguguucaaggacggcgacgagaucgaggacuucguggaggugcaccugcccgacgugcacgagcaggugagcggcguggaccugggccugcccaacuggggcgaguacgugcugcugagcgccggcacccugaucgcccugaugcugaucaucuuccugaucaccugcugcaagagaguggacagacccgagagcacccagagaagccugagaggcaccggcagaaacgugagcgugaccagccagagcggcaaguucauccccagcugggagagcuacaagagcggcggcgagaccggccuguga

SEQ ID NO: 191091 - RNA, 1575 nt, Artificial Sequence
  derived and/or modified CDS sequence (opt4) from glycoprotein__RABV__GQ472535.1
auggugccccaggcccugcuguucgugccccugcuggccgugccccugugcuucggcaaguuccccaucuacaccauccccgacaagcugggccccuggagccccaucgacauccaccaccugagcugccccaacaaccuggugguggaggacgagggcugcaccaaccugagcggcuucagcuacauggagcugaaggugggcuacaucagcgccaucaaggugaacggcuucaccugcaccggcguggugaccgaggccgagaccuacaccaacuucgugggcuacgugaccaccaccuucaagagaaagcacuucagacccacccccgacgccugcagaagcaccuacaacuggaagauggccggcgaccccagacacgaggagagccugcacaaccccuaccccgacuaccacuggcugagaaccgugaagaccaccaaggagagcuucgugaucaucagccccagcguggccgaccuggaccccuacgacaagagccugcacagcagaguguuccccagaggcaagugcagcggcaucaccgugagcagcaccuacugcagcaccaaccacgacuacaccaucuggaugcccgagaaccccagacugggcaccagcugcgacaucuucaccaacagcagaggcaagagagccagcaagggcagcaagaccugcggcuucguggacgagagaggccuguacaagagccugaagggcgccugcaagcugaagcugugcggcgugcugggccugagacugauggacggcaccuggguggccauccagaccagcgacgagaccaaguggugcccccccgaccagcuggugaaccugcacgacuuccacagcgacgagaucgagcaccuggugguggaggagcuggugaagaagagagaggagugccuggacgcccuggagagcaucaugaccaccaagagcgugagcuucagaagacugagccaccugagaaagcuggugcccggcuucggcaaggccuacaccaucuucaacaagacccugauggaggccgacgcccacuacaagagcgugagaaccuggaacgagaucauccccagcaagggcugccugagagugggcggcagaugccacccccacgugaacggcguguucuucaacggcaucauccugggccccgacggccacgugcugauccccgagaugcagagcagccugcugcagcagcacauggagcugcuggagagcagcgugaucccccugaugcacccccuggccgaccccagcaccguguucaaggacggcgacgaggccgaggacuucguggaggugcaccugcccgacgugcacaagcaggugagcggcguggaccugggccugcccagcuggggcaaguacgcccugaugagcgccggcauccugaccgcccugaugcugaugaucuuccugaugaccugcugcagaagaaccaacagagccgagagcauccagcacagccugggcgagaccggcagaaaggugagcgugaccagccagaacggcagagugaucagcagcugggagagcuacaagagcggcggcgagaccaagcuguga

SEQ ID NO: 191092 - RNA, 1575 nt, Artificial Sequence
  derived and/or modified CDS sequence (opt4) from glycoprotein__RABV__GQ472536.1
auggugccccaggcccugcuguucgugccccugcuggccaucccccugugcuucggcaaguuccccaucuacaccauccccgacaagcugggccccuggagccccaucgacauccaccaccugagcugccccaacaaccuggugguggaggacgagggcugcaccaaccugagcggcuucagcuacauggagcugaaggugggcuacaucagcgccaucaaggugaacggcuucaccugcaccggcguggugaccgaggccgagaccuacaccaacuucgugggcuacgugaccaccaccuucaagagaaagcacuucagacccacccccgacgccugcagaagcgccuacaacuggaagauggccggcgaccccagauacgaggagagccugcacaaccccuaccccgacuaccacuggcugagaaccgugaagaccaccaaggagagcuucgugaucaucagccccagcguggccgaccuggaccccuacgacaagagccugcugagcagaguguuccccagaggcaagugcagcggcaucaccgugagcagcaccuacugcagcaccaaccacgacuacaccaucuggaugcccgagaaccccagacugggcaccagcugcgacaucuucaccaacagcagaggcaagagagccagcaagggcagcaagaccugcggcuucguggacgagagaggccuguacaagagccugaagggcgccugcaagcugaagcugugcggcgugcugggccugagacugauggacggcaccuggguggccauccagaccagcgacgagaccaaguggugcccccccgaccagcuggugaaccugcacgacuuccacagcgacgagaucgagcaccuggugguggaggagcuggugaagaagagagaggagugccuggacgcccuggagagcaucaugaccaccaagagcgugagcuucagaagacugagccaccugagaaagcuggugcccggcuucggcaaggccuacaccaucuucaacaagacccugauggaggccgacgcccacuacaagagcgugagaaccuggaacgagaucauccccagcaagggcugccugagagugggcggcagaugccacccccacgugaacggcguguucuucaacggcaucauccugggccccgacggccacgugcugauccccgagaugcagagcagccugcugcagcagcacauggagcugcuggagagcagcgugaucccccugaugcacccccuggccgaccccagcaccguguucaaggacggcgacgaggccgaggacuucguggaggugcaccugcccgacgugcacaagcaggugagcggcguggaccugggccugcccagcuggggcaaguacgugcugaugagcgccggcauccugaccgcccugaugcugaugaucuuccugaugaccugcugcagaagaaccaacagagccgagagcauccagcacagccugggcgagaccggcagaaaggugagcgugaccagccagagcggcagagugaucagcagcugggagagcuacaagagcggcggcgagaccaagcuguga

SEQ ID NO: 191093 - RNA, 1575 nt, Artificial Sequence; identical to SEQ ID NO: 190587
  derived and/or modified CDS sequence (opt4) from glycoprotein__RABV__GQ472537.1

SEQ ID NO: 191094 - RNA, 1575 nt, Artificial Sequence
  derived and/or modified CDS sequence (opt4) from glycoprotein__RABV__GQ472539.1
augaucccccaggugcugcuguucgugccccugcugguguucagcagcugcuucggcaaguuccccaucuacaccauccccgacaagcugggccccuggagccccaucgacauccaccaccugagcugccccaacaaccuggugguggaggacgagggcugcaccaaccugagcggcuucagcuacauggagcugaaggugggcuacaucagcgccaucaaggugaacggcuucaccugcaccggcguggugaccgaggccgagaccuacaccaacuucgugggcuacgugaccaccaccuucaagagaaagcacuucagacccaugcccgacgccugcagagccgccuacaacuggaagauggccggcgaccccagauacgaggagagccugcacaaccccuaccccgacuaccacuggcugagaaccgugaagaccaccaaggagagccuggugaucaucagccccagcguggccgaccuggaccccuacgacaagagccugcacagcagaguguuccccggcggcaagugcagcggcaucaccgugagcagcaccugcugcagcaccaaccacgacuacaccaucuggaugcccgagaaccccagacugggcaccagcugcgacaucuucaccaacagcagaggcaagagagccagcaagggcggcaagaccugcggcuucguggacgagagaggccuguacaagagccugaagggcgccugcaagcugaagcugugcggcgugcugggccugagacugauggacggcaccuggguggccauccagaccagcgacgagaucaaguggugcagccccgaccagcuggugaaccugcacgacuuccacagcgacgagaucgagcaccuggugguggaggagcuggugaagaagagagaggagugccuggacgcccuggagaccaucaugaccaccaagagcgugagcuucagaagacugagccaccugagaaagcuggugcccggcuucggcaaggccuacaccaucuucaacaagacccugauggaggccgacgcccacuacaagagcaucagaaccuggaacgagaucauccccagcaagggcugccugagagugggcggcagaugccacccccacgugaacggcguguucuucaacggcaucauccugggccuggacggccacgugcugauccccgagaugcagagcagccugcugcaccagcacauggagcugcuggagagcagcgugaucccccugaugcacccccuggccgaccccagcaccguguucaaggacggcgacgaggccgaggacuucguggaggugcaccugcccgacgugcacaagcagaucagcggcguggaccugggccugcccaacuggggcaaguacgugcugaccagcgccggcgcccugaccgcccugaugcugaugaucuuccugaugaccugcugcagaaagaccaacagagccgagagcauccagagaagccccggcgagaccgagagaaaggugagcgugaccagccacaacggcagagugaucagcagcugggagagcuacaagagcggcggcgagaccaagcuguga

SEQ ID NO: 191095 - RNA, 1575 nt, Artificial Sequence
  derived and/or modified CDS sequence (opt4) from glycoprotein__RABV__GQ472540.1
auggugccccaggcccugcuguucgugccccugcuggccgugccccugugcuucggcaaguuccccaucuacaccauccccgacaagcugggccccuggagccccaucgacauccaccaccugagcugccccaacaaccuggugguggaggacgagggcugcaccaaccugagcggcuucagcuacauggagcugaaggugggcuacaucagcgccaucaaggugaacggcuucaccugcaccggcguggugaccgaggccgagaccuacaccaacuucgugggcuacgugaccaccaccuucaagagaaagcacuucagacccacccccgacgccugcagaagcgccuacaacuggaagauggccggcgaccccagauacgaggagagccugcacaaccccuaccccgacuaccacuggcugagaaccgugaagaccaccaaggagagcuucgugaucaucagccccagcguggccgaccuggaccccuacgacaagagccugcacagcagaguguuccccagaggcaagugcagcggcaucaccgugagcagcaccuacugcagcaccaaccacgacuacaccaucuggaugcccgagaaccccagacugggcaccagcugcgacaucuucaccaacagcagaggcaagagagccagcaagggcagcaagaccugcggcuucguggacgagggcggccuguacaagagccugaagggcgccugcaagcugaagcugugcggcgugcugggccugagacugauggacggcaccuggguggccauccagaccagcgacgagaccaaguggugcccccccgaccagcuggugaaccugcacgacuuccacagcgacgagaucgagcaccuggugguggaggagcuggugaagaagagagaggagugccuggacgcccuggagagcaucaugaccaccaagagcgugagcuucagaagacugagccaccugagaaagcuggugcccggcuucggcaaggccuacaccaucuucaacaagacccugauggaggccgacgcccacuacaagagcgugagaaccuggaacgagaucauccccagcaagggcugccugagagugggcggcagaugccacccccacgugaacggcguguucuucaacggcaucauccugggccccgacggccacgugcugauccccgagaugcagagcagccugcugcagcagcacauggagcugcuggagagcagcgugaucccccugaugcacccccuggccgaccccagcaccguguucaaggacggcgacgaggccgaggacuucguggaggugcaccugcccgacgugcacaagcaggugagcggcguggaccugggccugcccagcuggggcaaguacgugcugaugagcgccggcauccugaccgcccugaugcugaccaucuuccugaugaccugcugcagaagaaccaacagagccgagagcauccagcacagccugggcgagaccggcagaaaggugagcgugaccagccagagcggcagagugaucagcagcugggagagcuacaagagcggcggcgagaccaagcuguga

SEQ ID NO: 191096 - RNA, 1575 nt, Artificial Sequence
  derived and/or modified CDS sequence (opt4) from glycoprotein__RABV__GQ472541.1
auggugccccaggcccugcuguucgugccccugcuggccaucccccugugcuucggcaaguuccccaucuacaccauccccgacaagcugggccccuggagccccaucgacauccaccaccugagcugccccaacaaccuggugguggaggacgagggcugcaccaaccugagcggcuucagcuacauggagcugaaggugggcuacaucagcgccaucaaggugaacggcuucaccugcaccggcguggugaccgaggccgagaccuacaccaacuucgugggcuacgugaccaccaccuucaagagaaagcacuucagacccacccccgacgccugcagaagcgccuacaacuggaagauggccggcgaccccagauacgaggagagccugcacaaccccuaccccgacuaccacuggcugagaaccgugaagaccaccaaggagagcuucgugaucaucagccccagcguggccgaccuggaccccuacgacaagagccugcacagcagaguguuccccagaggcaagugcagcggcaucaccgugagcagcaccuacugcagcaccaaccacgacuacaccaucuggaugcccgagaaccccagacugggcaccagcugcgacaucuucaccaacagcagaggcaagagagccagcaagggcagcaagaccugcggcuucguggacgagagaggccuguacaagagccugaagggcgccugcaagcugaagcugugcggcgugcugggccugagacugauggacggcaccuggguggccauccagaccagcgacgagaccaaguggugcccccccgaccagcuggugaaccugcacgacuuccacagcgacgagaucgagcaccuggugguggaggagcuggugaagaagagagaggagugccuggacgcccuggagagcaucaugaccaccaagagcgugagcuucagaagacugagccaccugagaaagcuggugcccggcuucggcaaggccuacaccaucuucaacaagacccugauggaggccgacgcccacuacaagagcgugagaaccuggaacgagaucauccccagcaagggcugccugagagugggcggcagaugccacccccacgugaacggcguguucuucaacggcaucauccugggccccgacggccacgugcugauccccgagaugcagagcagccugcugcagcagcacauggagcugcuggagagcagcgugaucccccugaugcacccccuggccgaccccagcaccguguucaaggacggcgacgaggccgaggacuucgacgaggugcaccugcccgacgugcacaagcaggugagcggcguggaccugggccugcccagcuggggcaaguacgugcugaugagcgccggcauccugaccgcccugaugcugaugaucuuccugaugaccugcugcagaagaaccaacagagccgagagcauccagcacagccugggcgagaccggcagaaaggugagcgugaccagccagagcggcagagugaucagcagcugggagagcuacaagagcggcggcgagaccaagcuguga

SEQ ID NO: 191097 - RNA, 1575 nt, Artificial Sequence
  derived and/or modified CDS sequence (opt4) from glycoprotein__RABV__GQ472542.1
augaucccccaggugcugcuguucgugccccugcugguguucagcagcugcuucggcaaguuccccaucuacaccauccccgacaagcugggccccuggagccccaucgacauccaccaccugagcugccccaacaaccuggugguggaggacgagggcugcaccaaccugagcggcuucagcuacauggagcugaaggugggcuacaucagcgccaucaaggugaacggcuucaccugcaccggcguggugaccgaggccgagaccuacaccaacuucgugggcuacgugaccaccaccuucaagagaaagcacuucagacccaugcccgacgccugcagagccgccuacaacuggaagauggccggcgaccccagauacgaggagagccugcacaaccccuaccccgacuaccacuggcugagaaccgugaagaccaccaaggagagccuggugaucaucagccccagcguggccgaccuggaccccuacgacaagagccugcacagcagaguguuccccggcggcaagugcagcggcaucaccgugagcagcaccugcugcagcaccaaccacgacuacaccaucuggaugcccgagaaccccagacugggcaccagcugcgacaucuucaccaacagcagaggcaagagagccagcaagggcggcaagaccugcggcuucguggacgagagaggccuguacaagagccugaagggcgccugcaagcugaagcugugcggcgugcugggccugagacugauggacggcaccuggguggccauccagaccagcgacgagaucaaguggugcagccccgaccagcuggugaaccugcacgacuuccacagcgacgagaucgagcaccuggugguggaggagcuggugaagaagggcgaggagugccuggacgcccuggagaccaucaugaccaccaagagcgugagcuucagaagacugagccaccugagaaagcuggugcccggcuucggcaaggccuacaccaucuucaacaagacccugauggaggccgacgcccacuacaagagcaucagaaccuggaacgagaucauccccagcaagggcugccugagagugggcggcagaugccacccccacgugaacggcguguucuucaacggcaucauccugggccccgacggccacgugcugauccccgagaugcagagcagccugcugcaccagcacauggagcugcuggagagcagcgugaucccccugaugcacccccuggccgaccccagcaccguguucaaggacggcgacgaggccgaggacuucguggaggugcaccugcccgacgugcacaagcagaucagcggcguggaccugggccugcccaacuggggcaaguacgugcugaucagcgccggcgcccugaccgccagcaugcugaugaucuuccugaugaccugcugcagaaaggccaacagagccgagagcauccagcacaaccccggcgagaccggcagaaaggugagcgugaccagccacaacggcagagugaucagcagcugggagagcuacaagagcggcggcgagaccaagcuguga

SEQ ID NO: 191098 - RNA, 1575 nt, Artificial Sequence; identical to SEQ ID NO: 190587
  derived and/or modified CDS sequence (opt4) from glycoprotein__RABV__GQ472543.1

SEQ ID NO: 191099 - RNA, 1575 nt, Artificial Sequence
  derived and/or modified CDS sequence (opt4) from glycoprotein__RABV__GQ472544.1
augaucccccaggugcugcuguucgugccccugcugguguucagcagcugcuucggcaaguuccccaucuacaccauccccgacaagcugggccccuggagccccaucgacauccaccaccugagcugccccaacaaccuggugguggaggacgagggcugcaccaaccugagcggcuucagcuacauggagcugaaggugggcuacaucagcgccaucaaggugaacggcuucaccugcaccggcguggugaccgaggccgagaccuacaccaacuucgugggcuacgugaccaccaccuucaagagaaagcacuucagacccaugcccgacgccugcagagccgccuacaacuggaagauggccggcgaccccagauacgaggagagccugcacaaccccuaccccgacuaccacuggcugagaaccgugaagaccaccaaggagagccuggugaucaucagccccagcguggccgaccuggaccccuacgacaagagccugcacagcagaguguuccccggcggcaagugcagcggcaucaccgugagcagcaccugcugcagcaccaaccacgacuacaccaucuggaugcccgagaaccccagacugggcaccagcugcgacaucuucaccaacagcagaggcaagagagccagcaagggcggcaagaccugcggcuucguggacgagagaggccuguacaagagccugaagggcgccugcaagcugaagcugugcggcgugcugggccugagacugauggacggcaccuggguggccauccagaccagcgacgagaucaaguggugcagccccgaccagcuggugaaccugcacgacuuccacagcgacgagaucgagcaccuggugguggaggagcuggugaagaagagagaggagugccuggacgcccuggagaccaucaugaccaccaagagcgugagcuucagaagacugagccaccugagaaagcuggugcccggcuucggcaaggccuacaccaucuucaacaagacccugauggaggccgacgcccacuacaagagcaucagaaccuggaacgagaucauccccagcaagggcugccugagagugggcggcagaugccacccccacgugaacggcguguucuucaacggcaucauccugggccccgacggccacgugcugauccccgagaugcagagcagccugcugcaccagcacauggagcugcugggcagcagcgugaucccccugaugcacccccuggccgaccccagcaccguguucaaggacggcgacgaggccgaggacuucguggaggugcaccugcccgacgugcacaagcagaucagcggcguggaccugggccugcccaacuggggcaaguacgugcugaucagcgccggcgcccugaccgccagcaugcugaugaucuuccugaugaccugcugcagaaaggccaacagagccgagagcauccagcacaaccccggcgagaccggcagaaaggugagcgugaccagccacaacggcagagugaucagcagcugggagagcuacaagagcggcggcgagaccaagcuguga

SEQ ID NO: 191100 - RNA, 1575 nt, Artificial Sequence
  derived and/or modified CDS sequence (opt4) from glycoprotein__RABV__GQ472545.1
auggugccccaggugcugcuguucgugccccugcugguguucagcagcugcuucggcaaguuccccaucuacaccauccccgacaagcugggccccuggagccccaucgacauccaccaccugagcugccccaacaaccuggugguggaggacgagggcugcaccaaccugagcggcuucagcuacauggagcugaaggugggcuacaucagcgccaucaaggugaacggcuucaccugcaccggcguggugaccgaggccgagaccuacaccaacuucgugggcuacgugaccaccaccuucaagagaaagcacuucagacccaugcccgacgccugcagagccgccuacaacuggaagauggccggcgaccccagauacgaggagagccugcacaaccccuaccccgacuaccacuggcugagaaccgugaagaccaccaaggagagccuggugaucaucagccccagcguggccgaccuggaccccuacgacaagagccugcacagcagaguguuccccggcggcaagugcagcggcaucaccgugagcagcaccugcugcagcaccaaccacgacuacaccaucuggaugcccgagaaccccagacugggcaccagcugcgacaucuucaccaacagcagaggcaagagagccagcaagggcggcaagaccugcggcuucguggacgagagaggccuguacaagagccugaagggcgccugcaagcugaagcugugcggcgugcugggccugagacugauggacggcaccuggguggccauccagaccagcgacgagaucaaguggugcagccccgaccagcuggugaaccugcacgacuuccacagcgacgagaucgagcacuucgugguggaggagcuggugaagaagagagaggagugccuggacgcccuggagaccaucaugaccaccaagagcgugagcuucagaagacugagccaccugagaaagcuggugcccggcuucggcaaggccuacaccaucuucaacaagacccugauggaggccgacgcccacuacaagagcaucagaaccuggaacgagaucauccccagcaagggcugccugagagugggcggcagaugccacccccacgugaacggcguguucuucaacggcaucauccugggccccgacggccacgugcugauccccgagaugcagagcagccugcugcaccagcacauggagcugcuggagagcagcgugaucccccugaugcacccccuggccgaccccagcaccguguucaaggacggcgacgaggccgaggacuucguggaggugcaccugcccgacgugcacaagcagaucagcggcguggaccugggccugcccaacuggggcaaguacgugcugaucagcgccggcgcccugaccgcccugaugcugaugaucuuccugaugaccugcugcagaaaggccaacagagccgagagcauccagcacaaccccggcgagaccggcagaaaggugagcgugaccagccacaacggcagagugaucagcagcugggagagcuacaagagcggcggcgagaccaagcuguga

SEQ ID NO: 191101 - RNA, 1575 nt, Artificial Sequence; identical to SEQ ID NO: 190587
  derived and/or modified CDS sequence (opt4) from glycoprotein__RABV__GQ472546.1

SEQ ID NO: 191102 - RNA, 1575 nt, Artificial Sequence
  derived and/or modified CDS sequence (opt4) from glycoprotein__RABV__GQ472547.1
auggugccccaggcccugcuguucgugccccugcuggccaucccccugugcuucggcaaguuccccaucuacaccauccccgacaagcugggccccuggagccccaucgacauccaccaccugagcugccccaacaaccuggugguggaggacgagggcugcaccaaccugagcggcuucagcuacauggagcugaaggugggcuacaucagcgccaucaaggugaacggcuucaccugcaccggcguggugaccgaggccgagaccuacaccaacuucgugggcuacgugaccaccaccuucaagagaaagcacuucagacccacccccgacgccugcagaagcgccuacaacuggaagauggccggcgaccccagauacgaggagagccugcacaaccccuaccccgacuaccacuggcugagaaccgugaagaccaccaaggagagcuucgugaucaucagccccagcguggccgaccuggaccccuacgacaagagccugcacagcagaguguuccccagaggcaagugcagcggcaucaccgugagcagcaccuacugcagcaccaaccacgacuacaccaucuggaugcccgagaaccccagacugggcaccagcugcgacaucuucaccaacagcagaggcaagagagccagcaagggcagcaagaccugcggcuucguggacgagagaggccuguacaagagccugaagggcgccugcaagcugaagcugugcggcgugcugggccugagacugauggacggcaccuggguggccauccagaccagcgacgagaccaaguggugcccccccgaccagcuggugaaccugcacgacuuccacagcgacgagaucgagcaccuggugguggaggagcuggugaagaagagagaggagugccuggacgcccuggagagcaucaugaccaccaagagcgugagcuucagaagacugagccaccugagaaagcuggugcccggcuucggcaaggccuacaccaucuucaacaagacccugauggaggccgacgcccacuacaagagcgugagaaccuggaacgagaucauccccagcaagggcugccugagagugggcggcagaugccacccccacgugaacggcguguucuucaacggcaucauccugggccccgacggccacgugcugauccccgagaugcagagcagccugcugcagcagcacauggagcugcuggagagcagcgugaucccccugaugcacccccuggccgaccccagcaccguguucaaggacggcgacgaggccgaggacuucguggaggugcaccugcccgacgugcacaagcaggugagcggcguggaccugggccugcccagcuggggcaaguacgugcugaugagcgccggcauccugaccgcccugaugcugaugaucuuccugaugaccugcugcagaagaaccaacagagccgagagcauccagcacagccugggcgagaccggcagaaaggugagcgugaccagccagagcggcagagugaucagcagcugggagagcuacaagagcgagggcgagaccaagcuguga

SEQ ID NO: 191103 - RNA, 1575 nt, Artificial Sequence
  derived and/or modified CDS sequence (opt4) from glycoprotein__RABV__GQ472548.1
augaucccccaggugcugcuguucgugccccugcugguguucagcagcugcuucggcaaguuccccaucuacaccauccccgacaagcugggccccuggagccccaucgacauccaccaccugagcugccccaacaaccuggugguggaggacgagggcugcaccaaccugagcggcuucagcuacauggagcugaaggugggcuacaucagcgccaucaaggugaacggcuucaccugcaccggcguggugaccgaggccgagaccuacaccaacuucgugggcuacgugaccaccaccuucaagagaaagcacuucagacccaugcccgacgccugcagagccgccuacaacuggaagauggccggcgaccccagauacgaggagagccugcacaaccccuaccccgacuaccacuggcugagaaccgugaagaccaccaaggagagccuggugaucaucagccccagcguggccgaccuggaccccuacgacaagagccugcacagcagaguguuccccggcggcaagugcagcggcaucaccgugagcagcaccugcugcagcaccaaccacgacuacaccaucuggaugcccgagaaccccagacugggcaccagcugcgacaucuucaccaacagcagaggcaagagagccagcaagggcggcaagaccugcggcuucguggacgagagaggccuguacaagagccugaagggcgccugcaagcugaagcugugcggcgugcugggccugagacugauggacggcaccuggguggccauccagaccagcgacgagaucaaguggugcagccccgaccagcuggugaaccugcacgacuuccacagcgacgagaucgagcaccuggugguggaggagcuggugaagaagagagaggagugccuggacgcccuggagaccaucaugaccaccaagagcgugagcuucagaagacugagccaccugagaaagcuggugcccggcuucggcaaggccuacaccaucuucaacaagacccugauggaggccgacgcccacuacaagagcaucagaaccuggaacgagaucauccccagcaagggcugccugagagugggcggcagaugccacccccacgugaacggcguguucuucaacggcaucauccugggccccgacggccacgugcugauccccgagaugcagagcagccugcugcaccagcacauggagcugcuggagagcagcgugaucccccugaugcacccccuggccgaccccagcaccguguucaaggacggcgacgaggccgaggacuucguggaggugcaccugcccgacgugcacaagcagaucagcggcguggaccugggccugcccaacuggggcaaguacgugcugaccagcgccggcgcccugaccgcccugaugcugaugaucuuccugaugaccugcugcagagagaccaacagagccgagagcauccagagaagccccggcgagaccgagagaaaggugagcgugaccagccacaacggcagagugaucagcagcugggagagcuacaagagcggcggcgagaccaagcuguga

SEQ ID NO: 191104 - RNA, 1575 nt, Artificial Sequence
  derived and/or modified CDS sequence (opt4) from glycoprotein__RABV__GQ472549.1
auggugccccaggcccugcuguucgugccccugcuggccgugccccugugccugggcaaguuccccaucuacaccauccccgacaagcugggccccuggagccccaucgacauccaccaccugagcugccccaacaaccuggugguggaggacgagggcugcaccaaccugagcggcuucagcuacauggagcugaaggugggcuacaucagcgccaucaaggugaacggcuucaccugcaccggcguggugaccgaggccgagaccuacaccaacuucgugggcuacgugaccaccaccuucaagagaaagcacuucagacccacccccgacgccugcagaagcgccuacaacuggaagauggccggcgaccccagauacgaggagagccugcacaaccccuaccccgacuaccacuggcugagaaccgugaagaccaccaaggagagcuucgugaucaucagccccagcguggccgaccuggaccccuacgacaagagccugcacagcagaguguuccccagaggcaagugcagcggcaucaccgugagcagcaccuacugcagcaccaaccacgacuacaccaucuggaugcccgagaaccccagacugggcaccagcugcgacaucuucaccaacagcagaggcaagagagccagcaagggcagcaagaccugcggcuucguggacgagagaggccuguacaagagccugaagggcgccugcaagcugaagcugugcggcgugcugggccugagacugauggacggcaccuggguggccauccagaccagcgacgagaccaaguggugcccccccgaccagcuggugaaccugcacgacuuccacagcgacgagaucgagcaccuggugguggaggagcuggugaagaagagagaggagugccuggacgcccuggagagcaucaugaccaccaagagcgugagcuucagaagacugagccaccugagaaagcuggugcccggcuucggcaaggccuacaccaucuucaacaagacccugauggaggccgacgcccacuacaagagcgugagaaccuggaacgagaucauccccagcaagggcugccugagagugggcggcagaugccacccccacgugaacggcguguucuucaacggcaucauccugggccccgacggccacgugcugauccccgagaugcagagcagccugcugcagcagcacauggagcugcuggagagcagcgugaucccccugaugcacccccuggccgaccccagcaccguguucaaggacggcgacgaggccgaggacuucguggaggugcaccugcccgacgugcacaagcacgugagcggcguggaccugggccugcccagcuggggcaaguacgugcuggugagcgccggcauccugaccgcccugaugcugaccaucuuccugaugaccugcugcagaagaaccaacagagccgagagcauccagcacagccugggcgagaccggcagaaaggugagcgugaccagccagagcggcagagugaucagcagcugggagagcuacaagagcggcggcgagaccaagcuguga

SEQ ID NO: 191105 - RNA, 1575 nt, Artificial Sequence
  derived and/or modified CDS sequence (opt4) from glycoprotein__RABV__GQ472550.1
auggugccccaggcccugcuguucgugccccugcuggccaucccccugugcuucggcaaguuccccaucuacaccauccccgacaagcugggccccuggagccccaucgacauccaccaccugagcugccccaacaaccuggugguggaggacgagggcugcaccaaccugagcggcuucagcuacauggagcugaaggugggcuacaucagcgccaucaaggugaacggcuucaccugcaccggcguggugaccgaggccgagaccuacaccaacuucgugggcuacgugaccaccaccuucaagagaaagcacuucagacccacccccgacgccugcagaagcgccuacaacuggaagauggccggcgaccccagauacgaggagagccugcacaaccccuaccccgacuaccacuggcugagaaccgugaagaccaccaaggagagcuucgugaucaucagccccagcguggccgaccuggaccccuacgacaagagccugcacagcagaguguuccccagaggcaagugcagcggcaucaccgugagcagcaccuacugcagcaccaaccacgacuacaccaucuggaugcccgagaaccccagacugggcaccagcugcgacaucuucaccaacagcagaggcaagagagccagcaagggcagcaagaccugcggcuucguggacgagagaggccuguacaagagccugaagggcgccugcaagcugaagcugugcggcgugcugggccugagacugauggacggcaccuggguggccauccagaccagcgacgagaccaaguggugcccccccgaccagcuggugaaccugcacgacuuccacagcgacgagaucgagcaccuggugguggaggagcuggugaagaagagaggcgagugccuggacgcccuggagagcaucaugaccaccaagagcgugagcuucagaagacugagccaccugagaaagcuggugcccggcuucggcaaggccuacaccaucuucaacaagacccugauggaggccgacgcccacuacaagagcgugagaaccuggaacgagaucauccccagcaagggcugccugagagugggcggcagaugccacccccacgugaacggcguguucuucaacggcaucauccugggccccgacggccacgugcugauccccgagaugcagagcagccugcugcagcagcacauggagcugcuggagagcagcgugaucccccugaugcacccccuggccgaccccagcaccguguucaaggacggcgacgaggccgaggacuucguggaggugcaccugcccgacgugcacaagcaggugagcggcguggaccugggccugcccagcuggggcaaguacgugcugaugagcgccggcauccugaccgcccugaugcugaugaucuuccugaugaccugcugcagaagaaccaacagagccgagagcauccagcacagccugggcgagaccggcagaaaggugagcgugaccagccagagcggcagagugaucagcagcugggagagcuacaagagcggcggcgagaccaagcuguga

SEQ ID NO: 191106 - RNA, 1575 nt, Artificial Sequence
  derived and/or modified CDS sequence (opt4) from glycoprotein__RABV__GQ472551.1
auggugccccaggugcugcuguucgugccccugcugguguucagcagcugcuucggcaaguuccccaucuacaccauccccgacaagcugggccccuggagccccaucgacauccaccaccugagcugccccaacaaccuggugguggaggacgagggcugcaccaaccugagcggcuucagcuacauggagcugaaggugggcuacaucagcgccaucaaggugaacggcuucaccugcaccggcguggugaccgaggccgagaccuacaccaacuucgugggcuacgugaccaccaccuucaagagaaagcacuucagacccaugcccgacgccugcagagccgccuacaacuggaagauggccggcgaccccagauacgaggagagccugcacaaccccuaccccgacuaccacuggcugagaaccgugaagaccaccaaggagagccuggugaucaucagccccagcguggccgaccuggaccccuacgacaagagccugcacagcagaguguuccccggcggcaagugcagcggcaucaccgugagcagcaccugcugcagcaccaaccacgacuacaccaucuggaugcccgagaaccccagacugggcaccagcugcgacaucuucaccaacagcagaggcaagagagccagcaagggcggcaagaccugcggcuucguggacgagagaggccuguacaagagccugaagggcgccugcaagcugaagcugugcggcgugcugggccugagacugauggacggcaccuggguggccauccagaccagcgacgagaucaaguggugcagccccgaccagcuggugaaccugcacgacuuccacagcgacgagaucgagcaccuggugguggaggagcuggugaagaagagagaggagugccuggacgcccuggagaccaucaugaccaccaagagcgugagcuucagaagacugagccaccugagaaagcuggugcccggcuucggcaaggccuacaccaucuucaacaagacccugauggaggccgacgcccacuacaagagcaucagaaccuggaacgagaucauccccagcaagggcugccugagagugggcggcagaugccacccccacgugaacggcguguucuucaacggcaucauccugggccccgacggccacgugcugauccccgagaugcagagcagccugcugcaccagcacauggagcugcuggagagcagcgugaucccccugaugcacccccuggccgaccccagcaccguguucaaggacggcgacgaggccgaggacuucguggaggugcaccugcccgacgugcacaagcagaucagcggcguggaccugggccugcccaacuggggcaaguacgugcugaucagcgccggcgcccugaccgcccugaugcugaugaucuuccugaugaccugcugcagaaaggccaacagagccgagagcaugcagcacaaccccggcgagaccggcagaaaggugagcgugaccagccacaacggcagagugaucagcagcugggagagcuacaagagcggcggcgagaccaagcuguga

SEQ ID NO: 191107 - RNA, 1575 nt, Artificial Sequence
  derived and/or modified CDS sequence (opt4) from glycoprotein__RABV__GQ472552.1
augaucccccaggcccugcuguucgugccccugcugguguucagccugugcuucggcaaguuccccaucuacaccauccccgacaagcugggccccuggagccccaucgacauccaccaccugagcugccccaacaaccuggugguggaggacgagggcugcaccaaccugagcggcuucagcuacauggagcugaaggugggcuacaucagcgccaucaaggugaacggcuucaccugcaccggcguggugaccgaggccgagaccuacaccaacuucgugggcuacgugaccaccaccuucaagagaaagcacuucagacccacccccgacgccugcagagccgccuacaacuggaagauggccggcgaccccagauacgaggagagccugcacaaccccuaccccgacuaccacuggcugagaaccgugaagaccaccaaggagagccuggugaucaucagccccagcgugagcgaccuggaccccuacgacaagagccugcacagcagaguguuccccagcggcaagugcagcggcaucaccgugagcagcaccuacugccccaccaaccacgacuacaccaucuggaugcccgagaaccccagacugggcaccagcugcgacaucuucaccaacagcagaggcaagagagccagcaagggcagcaagaccugcggcuucguggacgagagaggccuguacaagagccugaagggcgccugcaagcugaagcugugcggcgugcugggccugagacugauggacggcaccugggccgccauccaggccagcgacgaggccaaguggugcccccccgaccagcuggugaacauccacgacuucagaagcgacgagaucgagcaccuggugguggaggagcuggugaagaagagagaggagugccuggacgcccuggagagcaucaugaccaccaagagcgugagcuucagaagacugagccaccugagaaagcuggugcccggcuucggcaaggccuacaccaucuucaacaagacccugauggaggccgacgcccacuacaagagcgugagaaccuggaacgagaucauccccagcaagggcugccugagagugggcggcagaugccacccccacgugaacggcguguucuucaacggcaucauccugggccccgacggccacgugcugauccccgagaugcagagcagccugcugcagcagcacauggagcugcuggagagcagcgugaucccccugaugcacccccuggccgaccccagcaccguguucaaggacggcgacgaggccgaggacuucguggaggugcaccugcccgacgugcacaagcaggugagcggcguggaccugggccugcccagcuggggcaaguacgugcugaugagcgugggcgccaugaucgcccugaugcugaugaucuuccugaccaccugcugcagaaaggccaacggcgccgagagcauccagcacagacugggcgagaccggcagaaaggugagcgugaccagccagagcggcagagugaucagcagcugggagagcuacaagagcggcggcgagaccaagcuguga

SEQ ID NO: 191108 - RNA, 1575 nt, Artificial Sequence; identical to SEQ ID NO: 191103
  derived and/or modified CDS sequence (opt4) from glycoprotein__RABV__GQ472553.1

SEQ ID NO: 191109 - RNA, 1575 nt, Artificial Sequence; identical to SEQ ID NO: 190587
  derived and/or modified CDS sequence (opt4) from glycoprotein__RABV__GQ472554.1

SEQ ID NO: 191110 - RNA, 1575 nt, Artificial Sequence
  derived and/or modified CDS sequence (opt4) from glycoprotein__RABV__GQ472555.1
auggugccccaggugcugcuguucgugccccugcugguguucagcagcugcuucggcaaguuccccaucuacaccauccccgacaagcugggccccuggagccccaucgacauccaccaccugagcugccccaacaaccuggugguggaggacgagggcugcaccaaccugagcggcuucagcuacauggagcugaaggugggcuacaucagcgccaucaaggugaacggcuucaccugcaccggcguggugaccgaggccgagaccuacaccaacuucgugggcuacgugaccaccaccuucaagagaaagcacuucagacccaugcccgacgccugcagagccgccuacaacuggaagauggccggcgaccccagauacgaggagagccugcacaaccccuaccccgacuaccacuggcugagaaccgugaagaccaccaaggagagccuggugaucaucagccccagcguggccgaccuggaccccuacgacaagagccugcacagcagaguguuccccggcggcaagugcagcggcaucaccgugagcagcaccugcugcagcaccaaccacgacuacacccuguggaugcccgagaaccccagacugggcaccagcugcgacaucuucaccaacagcagaggcaagagagccagcaagggcggcaagaccugcggcuucguggacgagagaggccuguacaagagccugaagggcgccugcaagcugaagcugugcggcgugcugggccugagacugauggacggcaccuggguggccauccagaccagcgacgagaucaaguggugcccccccgaccagcuggugaaccugcacgacuuccacagcgacgagaucgagcaccuggugguggaggagcuggugaagaagagagaggagugccuggacgcccuggagaccaucaugaccaccaagagcgugagcuucagaagacugagccaccugagaaagcuggugcccggcuucggcaaggccuacaccaucuucaacaagacccugauggaggccgacgcccacuacaagagcaucagaaccuggaacgagaucauccccagcaagggcugccugagagugggcggcagaugccacccccacgugaacggcguguucuucaacggcaucauccugggccccgacggccacgugcugauccccgagaugcagagcagccugcugcaccagcacauggagcugcuggagagcagcgugaucccccugaugcacccccuggccgaccccagcaccguguucaaggacggcgacgaggccgaggacuucguggaggugcaccugcccgacgagcacaagcagaucagcggcguggaccugggccugcccaacuggagaaaguacgugcugaucagcgccggcgcccugaccgcccugaugcugaugaucuuccugaugaccugcugcagaaaggccaacagagccgagagcauccagcacaaccccggcgagaccggcagaaaggugagcgugaccagccccaacggcagagugaucagcagcugggagagcuacaagagcggcggcgagaccaagcuguga

SEQ ID NO: 191111 - RNA, 1575 nt, Artificial Sequence
  derived and/or modified CDS sequence (opt4) from glycoprotein__RABV__GQ472556.1
auggugccccaggugcugcuguucgugccccugcugguguucagcagcugcuucggcaaguuccccaucuacaccauccccgacaagcugggccccuggagccccaucgacauccaccaccugagcugccccaacaaccuggugguggaggacgagggcugcaccaaccugagcggcuucagcuacauggagcugaaggugggcuacaucagcgccaucaaggugaacggcuucaccugcaccggcguggugaccgaggccgagaccuacaccaacuucgugggcuacgugaccaccaccuucaagagaaagcacuucagacccaugcccgacgccugcagaaccgccuacaacuggaagauggccggcgaccccagauacgaggagagccugcacaaccccuaccccgacuaccacuggcugagaaccgugaagaccaccaaggagagccuggugaucaucagccccagcguggccgaccuggaccccuacgacaagagccugcacagcagaguguuccccggcggcaagugcagcggcaucaccgugagcagcaccugcugcagcaccaaccacgacuacaccaucuggaugcccgagaaccccagacugggcaccagcugcgacaucuucaccaacagcagaggcaagagagccagcaagggcggcaagaccugcggcuucguggacgagagaggcagcuacaagagccugaagggcgccugcaagcugaagcugugcggcgugcugggccugagacugauggacggcaccuggguggccauccagaccagcgacgagaucaaguggugcagccccgaccagcuggugaaccugcacgacuuccacagcgacgagaucgagcaccuggugguggaggagcuggugaagaagagagaggagugccuggacgcccuggagaccaucaugaccaccaagagcgugagcuucagaagacugagccaccugagaaagcuggugcccggcuucggcaaggccuacaccaucuucaacaagacccugauggaggccgacgcccacuacaagagcaucagaaccuggaacgagaucauccccagcaagggcugccugagagugggcggcagaugccacccccacgugaacggcguguucuucaacggcaucauccugggccccgacggccacgugcugauccccgagaugcagagcagccugcugcaccagcacauggagcugcuggagagcagcgugaucccccugaugcacccccuggccgaccccagcaccguguucaaggacggcgacgaggccgaggacuucguggaggugcaccugcccgacgugcacaagcagaucagcggcguggaccugggccugcccaacuggggcaagcacgugcugaucagcgccggcgcccugaccgcccugaugcugaugaucuuccugaugaccugcugcagaaaggccaacagagccgagagcauccagcacaaccccggcgagaccggcagaaaggugagcgugaccagccacaacggcagagugaucagcagcugggagagcuacaagagcggcggcgagaccaagcuguga

SEQ ID NO: 191112 - RNA, 1575 nt, Artificial Sequence; identical to SEQ ID NO: 190587
  derived and/or modified CDS sequence (opt4) from glycoprotein__RABV__GQ472557.1

SEQ ID NO: 191113 - RNA, 1575 nt, Artificial Sequence
  derived and/or modified CDS sequence (opt4) from glycoprotein__RABV__GQ472558.1
auggccccccaggcccugcuguucgugccccugcuggccgugccccugugccugggcaaguuccccaucuacaccauccccgacaagcugggccccuggagccccaucgacauccaccaccugagcugccccaacaaccuggugguggaggacgagggcugcaccaaccugagcggcuucagcuacauggagcugaaggugggcuacaucagcgccaucaaggugaacggcuucaccugcaccggcguggugaccgaggccgagaccuacaccaacuucgugggcuacgugaccaccaccuucaagagaaagcacuucagacccacccccgacgccugcagaagcgccuacaacuggaagauggccggcgaccccagauacgaggagagccugcacaaccccuaccccgacuaccacuggcugagaaccgugaagaccaccaaggagagcuucgugaucaucagccccagcguggccgaccuggaccccuacgacaagagccugcacagcagaguguuccccagaggcaagugcagcggcaucaccgugagcagcaccuacugcagcaccaaccacgacuacaccaucuggaugcccgagaaccccagacugggcaccagcugcgacaucuucaccaacagcagaggcaagagagccagcaagggcagcaagaccugcggcuucguggacgagagaggccuguacaagagccugaagggcgccugcaagcugaagcugugcggcgugcugggccugagacugauggacggcaccuggguggccauccagaccagcgacgagaccaaguggugcccccccgaccagcuggugaaccugcacgacuuccacagcgacgagaucgagcaccuggugguggaggagcuggugaagaagagagaggagugccuggacgcccuggagagcaucaugaccaccaagagcgugagcuucagaagacugagccaccugagaaagcuggugcccggcuucggcaaggccuacaccaucuucaacaagacccugauggaggccgacgcccacuacaagagcgugagaaccuggaacgagaucauccccagcaagggcugccugagagugggcggcagaugccacccccacgugaacggcguguucuucaacggcaucauccugggccccgacggccacgugcugauccccgagaugcagagcagccugcugcagcagcacauggagcugcuggagagcagcgugaucccccugaugcacccccuggccgaccccagcaccguguucaaggacggcgacgaggccgaggacuucguggaggugcaccugcccgacgugcacaagcaggugagcggcguggaccugggccugcccagcuggggcaaguacgugcugaugagcgccggcauccugaccgcccugaugcugaccaucuuccugaugaccugcugcagaagaaccaacagagccgagagcauccagcacagccugggcgagaccggcagaaaggugagcgugaccagccagagcggcagagugaucagcagcugggagagcuacaagagcggcggcgagaccaagcuguga

SEQ ID NO: 191114 - RNA, 1575 nt, Artificial Sequence
  derived and/or modified CDS sequence (opt4) from glycoprotein__RABV__GQ472559.1
auggccagccaggcccugcuguucgugccccugcuggccaucccccugugcuucggcaaguuccccaucuacaccauccccgacaagcugggccccuggagccccaucgacauccaccaccugagcugccccaacaaccuggugguggaggacgagggcugcaccaaccugagcggcuucagcuacauggagcugaaggugggcuacaucagcgccaucaaggugaacggcuucaccugcaccggcguggugaccgaggccgagaccuacaccaacuucgugggcuacgugaccaccaccuucaagagaaagcacuucagacccacccccgacgccugcagaagcgccuacaacuggaagauggccggcgaccccagauacgaggagagccugcacaaccccuaccccgacuaccacuggcugagaaccgugaagaccaccaaggagagccuggugaucaucagccccagcguggccgaccuggaccccuacgacaagagccugcacagcagaguguuccccagaggcaagugcagcggcaucaccgugagcagcaccuacugcagcaccaaccacgacuacaccaucuggaugcccgagaaccccagacugggcaccagcugcgacaucuucaccaacagcagaggcaagagagccagcaagggcagcaagaccugcggcuucguggacgagagaggccuguacaagagccugaagggcgccugcaagcugaagcugugcggcgugcugggccugagacugauggacggcaccuggguggccauccagaccagcgacgagaccaaguggugcccccccgaccagcuggugaaccugcacgacuuccacagcgacgagaucgagcaccuggugguggaggagcuggugaagaagagagaggagugccuggacgcccuggagagcaucaugaccaccaagagcgugagcuucagaagacugagccaccugagaaagcuggugcccggcuucggcaaggccuacaccaucuucaacaagacccugauggaggccgacgcccacuacaagagcgugagaaccuggaacgagaucauccccagcaagggcugccugagagugggcggcagaugccacccccacgugaacggcguguucuucaacggcaucauccugggccccgacggccacgugcugauccccgagaugcagagcagccugcugcagcagcacauggagcugcuggagagcagcgugaucccccugaugcacccccuggccgaccccagcaccguguucaaggacggcgacgaggccgaggacuucguggaggugcaccugcccgacgugcacaagcaggugagcggcguggaccugggccugcccagcuggggcaaguacgugcugaugagcgccggcauccugaccgcccugaugcugaugaucuuccugaugaccugcugcagaagaaccaacagagccgagagcauccagcacagccugggcgagaccggcagaaaggugagcgugaccagccagagcggcagagugaucagcagcugggagagcuacaagagcggcggcgagaccaagcuguga

SEQ ID NO: 191115 - RNA, 1575 nt, Artificial Sequence
  derived and/or modified CDS sequence (opt4) from glycoprotein__RABV__GQ472560.1
auggugccccaggugcugcuguucgugccccugcugguguucagcagcugcuucggcaaguuccccaucuacaccauccccgacaagcugggccccuggagccccaucgacauccaccaccugagcugccccaacaaccuggugguggaggacgagggcugcaccaaccugagcggcuucagcuacauggagcugaaggugggcuacaucagcgccaucaaggugaacggcuucaccugcaccggcguggugaccgaggccgagaccuacaccaacuucgugggcuacgugaccaccaccuucaagagaaagcacuucagacccacccccgacgccugcagagccgccuacaacuggaagauggccggcgaccccagauacgaggagagccugcacaaccccuaccccgacuaccacuggcugagaaccgugaagaccaccaaggagagccuggugaucaucagccccagcguggccgaccuggaccccuacgacaagagccugcacagcggcguguuccccggcggcaagugcagcggcaucaccgugagcagcaccugcugcagcaccaaccacgacuacaccaucuggaugcccgagaaccccagacugggcaccagcugcgacaucuucaccaacagcagaggcaagagagccagcaagggcggcaagaccugcggcuucguggacgagagaggccuguacaagagccugaagggcgccugcaagcugaagcugugcggcgugcugggccugagacugauggacggcaccuggguggccauccagaccagcgacgagaucaaguggugcagccccgaccagcuggugaaccugcacgacuuccacagcgacgagaucgagcaccuggugguggaggagcuggugaagaagagaaaggagugccuggacgcccuggagaccaucaugaccaccaagagcgugagcuucagaagacugagccaccugagaaagcuggugcccggcuucggcaaggccuacaccaucuucaacaagacccugauggaggccgacgcccacuacaagagcaucagaaccuggaacgagaucauccccagcaagggcugccugagagugggcggcagaugccacccccacgugaacggcguguucuucaacggcaucauccugggccccgacggccacgugcugauccccgagaugcagagcagccugcugcaccagcacauggagcugcuggagagcagcgugaucccccugaugcacccccuggccgaccccagcaccguguucaaggacggcgacgaggccgaggacuucguggaggugcaccugcccgacgugcacaagcagaucagcggcguggaccugggccugcccaacuggggcaaguacgugcugaucagcgccggcgcccugaccgcccugaugcugaugaucuuccugaugaccuucugcagaaaggccaacagagccgagagcauccagcacaaccccggcgagaccggcagaaaggugagcgugaccagccacaacggcagagugaucagcagcugggagagcuacaagagcggcggcgagaccaagcuguga

SEQ ID NO: 191116 - RNA, 1575 nt, Artificial Sequence; identical to SEQ ID NO: 190887
  derived and/or modified CDS sequence (opt4) from glycoprotein__RABV__GQ857450.1

SEQ ID NO: 191117 - RNA, 1575 nt, Artificial Sequence
  derived and/or modified CDS sequence (opt4) from glycoprotein__RABV__GQ857451.1
augaucccccaggugcugcuguucgugccccugcugguguucagcagcugcuucggcaaguuccccaucuacaccauccccgacaagcugggccccuggagccccaucgacauccaccaccugagcugccccaacaaccuggugguggaggacgagggcugcaccaaccugagcggcuucagcuacauggagcugaaggugggcuacaucagcgccaucaaggugaacggcuucaccugcaccggcguggugaccgaggccgagaccuacaccaacuucgugggcuacgugaccaccaccuucaagagaaagcacuucagacccacccccgacgccugcagagccgccuacaacuggaagauggccggcgaccccagauacgaggagagccugcacaaccccuaccccgacuaccacuggcugagaaccgugaagaccagcaaggagagccuggugaucaucagccccagcguggccgaccuggaccccuacgacaagagccugcacagcagaguguuccccggcggcaagugcagcggcaucaccgugagcagcaccugcugcagcaccaaccacgacuacaccaucuggaugcccgagaaccccagacugagaaccagcugcgacaucuucaccaacagcagaggcaagagagccagcaagggcggcaagaccugcggcuucguggacgagagaggccuguacaagagccugaagggcgccugcaagcugaagcugugcggcgugcugggccugagacugauggacggcaccuggguggccauccagaccagcgacgagaucaaguggugcagccccgaccagcuggugaaccugcacgacuuccacagcgacgagaucgagcaccuggugguggaggagcuggugaagaagagagaggagugccuggacgcccuggagaccaucaugaccaccaagagcgugagcuucagaagacugagccaccugagaaagcuggugcccggcuucggcaaggccuacaccaucuucaacaagacccugauggaggccgacgcccacuacaagagcaucagaaccuggaacgagaucauccccagcaagggcugccugagagugggcggcagaugccacccccacgugaacggcguguucuucaacggcaucauccugggccccgacggccacgugcugauccccgagaugcagagcagccugcugcaccagcacauggagcugcuggagagcagcgugaucccccugaugcacccccuggccgaccccagcaccguguucaaggacggcgacgaggccgaggacuucguggaggugcaccugcccgacgugcacaagcagaucagcggcguggaccugggccugcccaacuggggcaaguacgugcuggugagcgccggcgcccugaccgcccugaugcugaugaucuuccugaugaccugcugcagaaagaccaacagagccgagagcauccagcacagccccggcgagaccggcagaaaggugagcgugaccagccacaacggcagagugaucagcagcugggagagcuacaagagcagaggcgagaccaagcuguga

SEQ ID NO: 191118 - RNA, 1575 nt, Artificial Sequence; identical to SEQ ID NO: 190887
  derived and/or modified CDS sequence (opt4) from glycoprotein__RABV__GQ857452.1

SEQ ID NO: 191119 - RNA, 1575 nt, Artificial Sequence
  derived and/or modified CDS sequence (opt4) from glycoprotein__RABV__GQ857453.1
augaucccccaggugcugcuguucgugccccugcugguguucagcagcugcuucggcaaguuccccaucuacaccauccccgacaagcugggccccuggagccccaucgacauccaccaccugagcugccccaacaaccuggugguggaggacgagggcugcaccaaccugagcggcuucagcuacauggagcugaaggugggcuacaucagcgccaucaaggugaacggcuucaccugcaccggcguggugaccgaggccgagaccuacaccaacuucgugggcuacgugaccaccaccuucaagagaaagcacuucagacccacccccgacgccugcagagccgccuacaacuggaagauggccggcgaccccagauacgaggagagccugcacaaccccuaccccgacuaccacuggcugagaaccgugaagaccagcaaggagagccuggugaucaucagccccagcguggccgaccuggaccccuacgacaagagccugcacagcagaguguuccccggcggcaagugcagcggcaucaccgugagcagcaccugcugcagcaccaaccacgacuacaccaucuggaugcccgagaaccccagacugggcaccagcugcgacaucuucaccaacagcagaggcaagagagccagcaagggcggcaagaccugcggcuucguggacgagagaggccuguacaagagccugaagggcgccugcaagcugaagcugugcggcgugcugggccugagacugauggacggcaccuggguggccauccagaccagcgacgagaucaaguggugcagccccgaccagcuggugaaccugcacgacuuccacagcgacgagaucgagcaccuggugguggaggagcuggugaagaagagagaggagugccuggacgcccuggagaccaucaugaccaccaagagcgugagcuucagaagacugagccaccugagaaagcuggugcccggcuucggcaaggccuacaccaucuucaacaagacccugauggaggccgacgcccacuacaagagcaucagaaccuggaacgagaucauccccagcaagggcugccugagagugggcggcagaugccacccccacgugaacggcguguucuucaacggcaucauccugggccccgacggccacgugcugauccccgagaugcagagcagccugcugcaccagcacauggagcugcuggagagcagcgugaucccccugaugcacccccuggccgaccccagcaccguguucaaggacggcgacgaggccgaggacuucguggaggugcaccugcccgacgugcacaagcagaucagcggcguggaccugggccugcccaacuggggcaaguacgugcuggugagcgccggcgcccugaccgcccugaugcugaugaucuuccugaugaccugcugcagaaagaccaacagaguggagagcauccagcacagccccggcgagaccggcagaaaggugagcgugaccagccacaacggcagagugaucagcagcugggagagcuacaagagcggcggcgagaccaagcuguga

SEQ ID NO: 191120 - RNA, 1575 nt, Artificial Sequence; identical to SEQ ID NO: 190887
  derived and/or modified CDS sequence (opt4) from glycoprotein__RABV__GQ857454.1

SEQ ID NO: 191121 - RNA, 1575 nt, Artificial Sequence
  derived and/or modified CDS sequence (opt4) from glycoprotein__RABV__GQ857455.1
augaucccccaggugcugcuguucgugccccugcugguguucagcagcugcuucggcaaguuccccaucuacaccauccccgacaagcugggccccuggagccccaucgacauccaccaccugagcugccccaacaaccuggugguggaggacgagggcugcaccaaccugagcggcuucagcuacauggagcugaaggugggcuacaucagcgccaucaaggugaacggcuucaccugcaccggcguggugaccgaggccgagaccuacaccaacuucgugggcuacgugaccaccaccuucaagagaaagcacuucagacccacccccgacgccugcagagccgccuacaacuggaagauggccggcgaccccagauacgaggagagccugcacaaccccuaccccgacuaccacuggcugagaaccgugaagaccagcaaggagagccuggugaucaucagccccagcguggccgaccuggaccccuacgacaagagccugcacagcagaguguuccccggcggcaagugcagcggcaucaccgugagcagcaccugcugcagcaccaaccacgacuacaccaucuggaugcccgagaaccccagacugggcaccagcugcgacaucuucaccaacagcagaggcaagagagccagcaagggcggcaagaccugcggcuucguggacgagagaggccuguacaagagccugaagggcgccugcaagcugaagcugugcggcgugcugggccugagacugauggacggcaccuggguggccauccagaccagcgacgagaucaaguggugcagccccgaccagcuggugaaccugcacgacuuccacagcgacgagaucgagcaccuggugguggaggagcuggugaagaagagagaggagugccuggacgcccuggagaccaucaugaccaccaagagcgugagcuucagaagacugagccaccugagaaagcuggugcccggcuucggcaaggccuacaccaucuucaacaagacccugauggaggccgacgcccacuacaagagcaucagaaccuggaacgagaucauccccagcaagggcugccugagagugggcggcagaugccacccccacgugaacggcguguucuucaacggcaucauccugggccccgacggccacgugcugauccccgagaugcagagcagccugcugcaccagcacauggagcugcuggagagcagcgugaucccccugaugcacccccuggccgaccccagcaccguguucaaggacggcgacgaggccgaggacuucguggaggugcaccugcccgacgugcacaagcagaucagcggcguggaccugggccugcccaacuggggcaaguacgugcuggugagcgccggcgcccugaccgcccuggugcugaugaucuuccugaugaccugcugcagaaagaccaacagagccgagagcauccagcacagccccggcgagaccggcagaaaggugagcgugaccagccacaacggcagagugaucagcagcugggagagcuacaagagcggcggcgagaccaagcuguga

SEQ ID NO: 191122 - RNA, 1575 nt, Artificial Sequence; identical to SEQ ID NO: 190887
  derived and/or modified CDS sequence (opt4) from glycoprotein__RABV__GQ857459.1

SEQ ID NO: 191123 - RNA, 1575 nt, Artificial Sequence; identical to SEQ ID NO: 190887
  derived and/or modified CDS sequence (opt4) from glycoprotein__RABV__GQ857460.1

SEQ ID NO: 191124 - RNA, 1575 nt, Artificial Sequence
  derived and/or modified CDS sequence (opt4) from glycoprotein__RABV__GQ857461.1
augaucccccaggugcugcuguucgugccccugcugguguucagcagcugcuucggcaaguuccccaucuacaccauccccgacaagcugggccccuggagccccaucgacauccaccaccugagcugccccaacaaccuggugguggaggacgagggcugcaccaaccugagcggcuucagcuacauggagcugaaggugggcuacaucagcgccaucaaggugaacggcuucaccugcaccggcguggugaccgaggccgagaccuacaccaacuucgugggcuacgugaccaccaccuucaagagaaagcacuucagacccacccccgacgccugcagagccgccuacaacuggaagauggccggcgaccccagauacgaggagagccugcacaaccccuaccccgacuaccacuggcugagaaccgugaagaccagcaaggagagccuggugaucaucagccccagcguggccgaccuggaccccuacgacaagagccugcacagcagaguguuccccggcggcaagugcagcggcaucaccgugagcagcaccugcugcagcaccaaccacgacuacaccaucuggaugcccgagaaccccagacugggcaccagcugcgacaucuucaccaacagcagaggcaagagagccagcaagggcggcaagaccugcggcuucguggacgagagaggccuguacaagagccugaagggcgccugcaagcugaagcugugcggcgugcugggccugagacugauggacggcaccuggguggccauccagaccagcgacgagaucaaguggugcagccccgaccagcuggugaaccugcacgacuuccacagcgacgagaucgagcaccuggugguggaggagcuggugaagaagagagaggagugccuggacgcccuggaggccaucaugaccaccaagagcgugagcuucagaagacugagccaccugagaaagcuggugcccggcuucggcaaggccuacaccaucuucaacaagacccugauggaggccgacgcccacuacaagagcaucagaaccuggaacgagaucauccccagcaagggcugccugagagugggcggcagaugccacccccacgugaacggcguguucuucaacggcaucauccugggccccgacggccacgugcugauccccgagaugcagagcagccugcugcaccagcacauggagcugcuggagagcagcgugaucccccugaugcacccccuggccgaccccagcaccguguucaaggacggcgacgaggccgaggacuucguggaggugcaccugcccgacgugcacaagcagaucagcggcguggaccugggccugcccaacuggggcaaguacgugcuggugagcgccggcgcccugaccgcccugaugcugaugaucuuccugaugaccugcugcagaaagaccaacagagccgagagcauccagcacagccccggcgagaccggcagaaaggugagcgugaccagccacaacggcagagugaucagcagcugggagagcuacaagagcggcggcgagaccaagcuguga

SEQ ID NO: 191125 - RNA, 1575 nt, Artificial Sequence; identical to SEQ ID NO: 190887
  derived and/or modified CDS sequence (opt4) from glycoprotein__RABV__GQ857463.1

SEQ ID NO: 191126 - RNA, 1575 nt, Artificial Sequence; identical to SEQ ID NO: 190887
  derived and/or modified CDS sequence (opt4) from glycoprotein__RABV__GQ857464.1

SEQ ID NO: 191127 - RNA, 1575 nt, Artificial Sequence
  derived and/or modified CDS sequence (opt4) from glycoprotein__RABV__GQ857465.1
augaucccccaggugcugcuguucgugccccugcugguguucagcagcugcuucggcaaguuccccaucuacaccauccccgacaagcugggccccuggagccccaucgacauccaccaccugagcugccccaacaaccuggugguggaggacgagggcugcaccaaccugagcggcuucagcuacauggagcugaaggugggcuacaucagcgccaucaaggugaacggcuucaccugcaccggcguggugaccgaggccgagaccuacaccaacuucgugggcuacgugaccaccaccuucaagagaaagcacuucagacccaugcccgacgccugcagagccgccuacaacuggaagauggccggcgaccccagauacgaggagagccugcacaaccccuaccccgacuaccacuggcugagaaccgugaagaccaccaaggagagccuggugaucaucagccccagcguggccgaccuggaccccuacgacaagagccugcacagcagaguguuccccggcggcaagugcagcggcaucaccgugagcagcaccugcugcagcaccaaccacgacuacaccaucuggaugcccgagaaccccagacugggcaccagcugcgacaucuucaccaacagcagaggcaagagagccagcaagggcggcaagaccugcggcuucguggacgagagaggccuguacaagagccugagaggcgccugcaagcugaagcugugcggcgugcugggccugagacugauggacggcaccuggguggccauccagaccagcgacgagaucaaguggugcagccccgaccagcuggugaaccugcacgacuuccacagcgacgagaucgagcaccuggugguggaggagcuggugaagaagagagaggagugccuggacgcccuggagaccaucaugaccaccaagagcgugagcuucagaagacugagccaccugagaaagcuggugcccggcuucggcaaggccuacaccaucuucaacaagacccugauggaggccgacgcccacuacaagagcaucagaaccuggaacgagaucauccccagcaagggcugccugagagugggcggcagaugccacccccacgugaacggcguguucuucaacggcaucauccugggccccgacggccacgugcugauccccgagaugcagagcagccugcugcaccagcacauggagcugcuggagagcagcgugaucccccugaugcacccccuggccgaccccagcaccguguucaaggacggcgacgaggccgaggacuucguggaggugcaccugcccgacgugcacaagcagaucagcggcguggaccugggccugcccaacuggggcaaguacgugcugaucagcgccggcgcccugaccgcccugaugcugaccaucuuccugaugaccugcugcagaaagaccaacagagccgagagcauccagcacagccccggcgagaccggcagaaaggugagcgugaccagccacaacggcagagugaucagcagcugggagagcuacaagagcggcagcgagaccaagcuguga

SEQ ID NO: 191128 - RNA, 1575 nt, Artificial Sequence
  derived and/or modified CDS sequence (opt4) from glycoprotein__RABV__GQ857466.1
augaucccccaggugcugcuguucgugccccugcugguguucagcagcugcuucggcaaguuccccaucuacaccauccccgacaagcugggccccuggagccccaucgacauccaccaccugagcugccccaacaaccuggugguggaggacgagggcugcaccaaccugagcggcuucagcuacauggagcugaaggugggcuacaucagcgccaucaaggugaacggcuucaccugcaccggcguggugaccgaggccgagaccuacaccaacuucgugggcuacgugaccaccaccuucaagagaaagcacuucagacccaugcccgacgccugcagagccgccuacaacuggaagauggccggcgaccccagauacgaggagagccugcacaaccccuaccccgacuaccacuggcugagaaccgugaagaccaccaaggagagccuggugaucaucagccccagcguggccgaccuggaccccuacgacaagagccugcacagcagaguguuccccggcggcaagugcagcggcaucaccgugagcagcaccugcugcagcaccaaccacgacuacaccaucuggaugcccgagaaccccagacugggcaccagcugcgacaucuucaccaacagcagaggcaagagagccagcaacggcggcaagaccugcggcuucguggacgagagaggccuguacaagagccugaagggcgccugcaagcugaagcugugcggcgugcugggccugagacugauggacggcaccuggguggccauccagaccagcgacgagaucaaguggugcagccccgaccagcuggugaaccugcacgacuuccacagcgacgagaucgagcaccuggugguggaggagcuggugaagaagagagaggagugccuggacgcccuggagaccaucaugaccaccaagagcgugagcuucagaagacugagccaccugagaaagcuggugcccggcuucggcaaggccuacaccaucuucaacaagacccugauggaggccgacgcccacuacaagagcaucagaaccuggaacgagaucauccccagcaagggcugccugagagugggcggcagaugccacccccacgugaacggcguguucuucaacggcaucauccugggccccgacggccacgugcugauccccgagaugcagagcagccugcugcaccagcacauggagcugcuggagagcagcgugaucccccugaugcacccccuggccgaccccagcaccguguucaaggacggcgacgaggccgaggacuucguggaggugcaccugcccgacgugcacaagcagaucagcggcaucgaccugggccugcccaacuggggcaaguacgugcugaucagcgccggcgcccugaccgcccugaugcugaccaucuuccugaugaccugcugcagaaagaccaacagagccgagagcauccagcacagccccggcgagaccggcagaaaggugagcgugaccagccacaacggcagagugaucagcagcugggagagcuacaagagcggcagcgagaccaagcuguga

SEQ ID NO: 191129 - RNA, 1575 nt, Artificial Sequence
  derived and/or modified CDS sequence (opt4) from glycoprotein__RABV__GQ857467.1
augaucccccaggugcugcuguucgugccccugcugguguucagcagcugcuucggcaaguuccccaucuacaccauccccgacaagcugggccccuggagccccaucgacauccaccaccugagcugccccaacaaccuggugguggaggacgagggcugcaccaaccugagcggcuucagcuacauggagcugaaggugggcuacaucagcgccaucaaggugaacggcuucaccugcaccggcguggugaccgaggccgagaccuacaccaacuucgugggcuacgugaccaccaccuucaagagaaagcacuucagacccaugcccgacgccugcagagccgccuacaacuggaagauggccggcgaccccagauacgaggagagccugcacaaccccuaccccgacuaccacuggcugagaaccgugaagaccaccaaggagagccuggugaucaucagccccagcguggccgaccuggaccccuacgacaagagccugcacagcagaguguuccccggcggcaagugcagcggcaucaccgugagcagcaccugcugcagcaccaaccacgacuacaccaucuggaugcccgagaaccccagacugggcaccagcugcgacaucuucaccaacagcagaggcaagagagccagcaaguggggcaagaccugcggcuucguggacgagagaggccuguacaagagccugaagggcgccugcaagcugaagcugugcggcgugcugggccugagacugauggacggcaccuggguggccauccagaccagcgacgagaucaaguggugcagccccgaccagcuggugaaccugcacgacuuccacagcgacgagaucgagcaccuggugguggaggagcuggugaagaagagagaggagugccuggacgcccuggagaccaucaugaccaccaagagcgugagcuucagaagacugagccaccugagaaagcuggugcccggcuucggcaaggccuacaccaucuucaacaagacccugauggaggccgacgcccacuacaagagcaucagaaccuggaacgagaucauccccagcaagggcugccugagagugggcggcagaugccacccccacgugaacggcguguucuucaacggcaucauccugggccccgacggccacgugcugauccccgagaugcagagcagccugcugcaccagcacauggagcugcuggagagcagcgugaucccccugaugcacccccuggccgaccccagcaccguguucaaggacggcgacgaggccgaggacuucguggaggugcaccugcccgacgugcacaagcagaucagcggcguggaccugggccugcccaacuggggcaaguacgugcugaucagcgccggcgcccugaccgcccugaugcugaccaucuuccugaugaccugcugcagaaagaccaacagagccgagagcauccagcacagccccggcgagaccggcagaaaggugagcgugaccagccacaacggcagagugaucagcagcugggagagcuacaagagcggcagcgagaccaagcuguga

SEQ ID NO: 191130 - RNA, 1575 nt, Artificial Sequence
  derived and/or modified CDS sequence (opt4) from glycoprotein__RABV__GQ857470.1
augaucccccaggugcugcuguucgugccccugcugguguucagcagcugcuucggcaaguuccccaucuacaccauccccgacaagcugggccccuggagccccaucgacauccaccaccugagcugccccaacaaccuggugguggaggacgagggcugcaccaaccugagcggcuucagcuacauggagcugaaggugggcuacaucagcgccaucaaggugaacggcuucaccugcaccggcguggugaccgaggccgagaccuacaccaacuucgugggcuacgugaccaccaccuucaagagaaagcacuucagacccaugcccgacgccugcagagccgccuacaacuggaagauggccggcgaccccagauacgaggagagccugcacaaccccuaccccgacuaccacuggcugagaaccgugaagaccaccaaggagagccuggugaucaucagccccagcguggccgaccuggaccccuacgacaagagccugcacagcagaguguuccccggcggcaagugcagcggcaucaccgugagcagcaccugcugcagcaccaaccacgacuacaccaucuggaugcccgagaaccccagacugggcaccagcugcgacaucuucaccaacagcagaggcaagagagccagcaagggcggcaagaccugcggcuucguggacgagagaggccuguacaagagccugaagggcgccugcaagaugaagcugugcggcgugcugggccugagacugauggacggcaccuggguggccauccagaccagcgacgagaucaaguggugcagccccgaccagcuggugaaccugcacgacuuccacagcgacgagaucgagcaccuggugguggaggagcuggugaagaagagagaggagugccuggacgcccuggagaccaucaugaccaccaagagcgugagcuucagaagacugagccaccugagaaagcuggugcccggcuucggcaaggccuacaccaucuucaacaagacccugauggaggccgacgcccacuacaagagcaucagaaccuggaacgagaucauccccagcaagggcugccugagagugggcggcagaugccacccccacgugaacggcguguucuucaacggcaucauccugggccccgacggccacgugcugauccccgagaugcagagcagccugcugcaccagcacauggagcugcuggagagcagcgugaucccccugaugcacccccuggccgaccccagcaccguguucaaggacggcgacgaggccgaggacuucguggaggugcaccugcccgacgugcacaagcagaucagcggcguggaccugggccugcccaacuggggcaaguacgugcugaucagcgccggcgcccugaccgcccugaugcugaccaucuuccugaugaccugcugcagaaagaccaacaaggccgagagcauccagcacagccccggcgagaccggcagaaaggugagcgugaccagccacaacggcagagugaucagcagcugggagagcuacaagagcggcagcgagaccaagcuguga

SEQ ID NO: 191131 - RNA, 1575 nt, Artificial Sequence
  derived and/or modified CDS sequence (opt4) from glycoprotein__RABV__GQ857471.1
augaucccccaggugcugcuguucgugccccugcugguguucagcagcugcuucggcaaguuccccaucuacaccauccccgacaagcugggccccuggagccccaucgacauccaccaccugagcugccccaacaaccuggugguggaggacgagggcugcaccaaccugagcggcuucagcuacauggagcugaaggugggcuacaucagcgccaucaaggugaacggcuucaccugcaccggcguggugaccgaggccgagaccuacaccaacuucgugggcuacgugaccaccaccuucaagagaaagcacuucagacccaugcccgacgccugcagagccgccuacaacuggaagauggccggcgaccccagauacgaggagagccugcacaaccccuaccccgacuaccacuggcugagaaccgugaagaccagcaaggagagccuggugaucaucagccccagcguggccgaccuggaccccuacgacaagagccugcacagcagaguguuccccggcggcaagugcagcggcaucaccgugagcagcaccugcugcagcaccaaccacgacuacaccaucuggaugcccgagaaccccagacugggcaccagcugcgacaucuucaccaacagcagaggcaagagagccagcaagggcggcaagaccugcggcuucguggacgagagaggccuguacaagagccugaagggcgccugcaagcugaagcugugcggcgugcugggccugagacugauggacggcaccuggguggccauccagaccagcgacgagaucaaguggugcagccccgaccagcuggugaaccugcacgacuuccacagcgacgagaucgagcaccuggugguggaggagcuggugaagaagagagaggagugccuggacgcccuggagaccaucaugaccaccaagagcgugagcuucagaagacugagccaccugagaaagcuggugcccggcuucggcaaggccuacaccaucuucaacaagacccugauggaggccgacgcccacuacaagagcaucagaaccuggaacgagaucauccccagcaagggcugccugagagugggcggcagaugccacccccacgugaacggcguguucuucaacggcaucauccugggccccgacggccacgugcugauccccgagaugcagagcagccugcugcaccagcacauggagcugcuggagagcagcgugaucccccugaugcacccccuggccgaccccagcaccguguucaaggacggcgacgaggccgaggacuucguggaggugcaccugcccgacgugcacaagcagaucagcggcguggaccugggccugcccaacuggggcaaguacgugcugaucagcgccggcgcccugaccgcccugaugcugaugaucuuccugaugaccugcugcagaaagaccaacagagccgagagcauccagcacagccccggcgagaccggcagaaaggugagcgugaccagccacagcggcagagugaucagcagcugggagagcuacaagagcggcggcgagaccaagcuguga

SEQ ID NO: 191132 - RNA, 1575 nt, Artificial Sequence
  derived and/or modified CDS sequence (opt4) from glycoprotein__RABV__GQ857472.1
augaucccccaggugcugcuguucgugccccugcugguguucagcagcugcuucggcaaguuccccaucuacaccauccccgacaagcugggccccuggagccccaucgacauccaccaccugagcugccccaacaaccuggugguggaggacgagggcugcaccaaccugagcggcuucagcuacauggagcugaaggugggcuacaucagcgccaucaaggugaacggcuucaccugcaccggcguggugaccgaggccgagaccuacaccaacuucgugggcuacgugaccaccaccuucaagagaaagcacuucagacccaugcccgacgccugcagagccgccuacaacuggaagauggccggcgaccccagauacgaggagagccugcacaaccccuaccccgacuaccacuggcugagaaccgugaagaccagcaaggagagccuggugaucaucagccccagcguggccgaccuggaccccuacgacaagagccugcacagcagaguguuccccggcggcaagugcagcggcaucaccgugagcagcaccugcugcagcaccaaccacgacuacaccaucuggaugcccgagaaccccagacugggcaccagcugcgacaucuucaccaacagcagaggcaagagagccagcaagggcggcaagaccugcggcuucguggacgagagaggccuguacaagagccugaagggcgccugcaagaugaagcugugcggcgugcugggccugagacugauggacggcaccuggguggccauccagaccagcgacgagaucaaguggugcagccccgaccagcuggugaaccugcacgacuuccacagcgacgagaucgagcaccuggugguggaggagcuggugaagaagagagaggagugccuggacgcccuggagaccaucaugaccaccaagagcgugagcuucagaagacugagccaccugagaaagcuggugcccggcuucggcaaggccuacaccaucuucaacaagacccugauggaggccgacgcccacuacaagagcaucagaaccuggaacgagaucauccccagcaagggcugccugagagugggcggcagaugccacccccacgugaacggcguguucuucaacggcaucauccugggccccgacggccacgugcugauccccgagaugcagagcagccugcugcaccagcacauggagcugcuggagagcagcgugaucccccugaugcacccccuggccgaccccagcaccguguucaaggacggcgacgaggccgaggacuucguggaggugcaccugcccgacgugcacaagcagaucagcggcguggaccugggccugcccaacuggggcaaguacgugcugaucagcgccggcgcccugaccgcccugaugcugaugaucuuccugaugaccugcugcagaaagaccaacagagccgagagcauccagcacagccccggcgagaccggcagaaaggugagcgugaccagccacaacggcagagugaucagcagcugggagagcuacaagagcggcggcgagaccaagcuguga

SEQ ID NO: 191133 - RNA, 1575 nt, Artificial Sequence
  derived and/or modified CDS sequence (opt4) from glycoprotein__RABV__GQ918139.1
auggugccccaggugcugcuguucgugcugcugcugggcuucagccugugcuucggcaaguuccccaucuacaccauccccgacgagcugggccccuggagccccaucgacauccaccaccugagcugccccaacaaccuggugguggaggacgagggcugcaccaaccugagcgaguucagcuacauggagcugaaggugggcuacaucagcgccaucaaggugaacggcuucaccugcaccggcguggugaccgaggccgagaccuacaccaacuucgugggcuacgugaccaccaccuucaagagaaagcacuucagacccacccccgacgccugcagagccgccuacaacuggaagauggccggcgaccccagauacgaggagagccugcacaaccccuaccccgacuaccacuggcugagaaccgugagaaccaccaaggagagccugaucaucaucagccccagcgugaccgaccuggaccccuacgacaagagccugcacagcagaguguuccccggcggcaagugcagcggcaucaccgugagcagcaccuacugcagcaccaaccacgacuacaccaucuggaugcccgagaaccccagacccagaacccccugcgacaucuucaccaacagcagaggcaagagagccagcaacggcaacaagaccugcggcuucguggacgagagaggccuguacaagagccugaagggcgccugcagacugaagcugugcggcgugcugggccugagacugauggacggcaccuggguggccaugcagaccagcgacgagaccaaguggugcccccccgaccagcuggugaaccugcacgacuucagaagcgacgagaucgagcaccuggugguggaggagcuggugaagaagagagaggagugccuggacgcccuggagagcaucaugaccaccaagagcgugagcuucagaagacugagccaccugagaaagcuggugcccggcuucggcaaggccuacaccaucuucaacaagacccugauggaggccgacgcccacuacaagagcgugagaaccuggaacgagaucauccccagcaagggcugccugaaggugggcggcagaugccacccccacgugaacggcguguucuucaacggcaucauccugggccccgacgaccacgugcugauccccgagaugcagagcagccugcugcagcagcacauggagcugcugaagagcagcgugaucccccugaugcacccccuggccgaccccagcaccguguucaaggagggcgacgaggccgaggacuucguggaggugcaccugcccgacguguacaagcagaucagcggcguggaccugggccugcccaacuggggcaaguacgugcugaugaccgccggcgccaugaucggccuggugcugaucuucagccugaugaccuggugcagaagagccaacagacccgagagcaagcagagaagcuucggcggcaccggcggcaacgugagcgugaccagccagagcggcaaggugauccccagcugggagagcuacagaagcggcggcgagaucagacuguga

SEQ ID NO: 191134 - RNA, 1575 nt, Artificial Sequence
  derived and/or modified CDS sequence (opt4) from glycoprotein__RABV__GU186379.1
auggugccccaggcccugcuguucgugccccugcuggccgugccccugugcuucggcaaguuccccaucuacaccauccccgacaagcugggccccuggagccccaucgacauccaccaccugagcugccccaacaaccuggugguggaggacgagggcugcaccaaccugagcggcuucagcuacauggagcugaaggugggcuacaucagcgccaucaaggugaacggcuucaccugcaccggcguggugaccgaggccgagaccuacaccaacuucgugggcuacgugaccaccaccuucaagagaaagcacuucagacccacccccgacgccugcagaagcgccuacaacuggaagauggccggcggccccagauacgaggagagccugcacaaccccuaccccgacuaccacuggcugagaaccgugaagaccaccaaggagagcuucgugaucaucagccccagcauggccgaccuggaccccuacgacaagagccugcacagcagaguguuccccagaggcaagugcagcggcaucaccgugagcagcaccuacugcagcaccaaccacgacuacaccaucuggaugcuggagaaccccagacugggcaccagcugcgacaucuucaccaacagcagaggcaagagagccagcaagggcagcaagaccugcggcuucguggacgagagaggccuguacaagagccugaagggcgccugcaagcugaagcugugcggcgugcugggccugagacugauggacggcaccuggguggccauccagaccagcgacgagaccaaguggugcccccccgaccagcuggugaaccugcacgacuuccacagcgacgagaucgagcaccuggugguggaggagcuggugaagaagagagaggagugccugggcgcccuggagagcaucaugaccaccaagagcgugagcuucagaagacugagccaccugagaaagcuggugcccggcuucggcaaggccuacaccaucuucaacaagacccugauggaggccgacgcccacuacaagagcgugagaaccuggaacgagaucauccccagcaagggcugccugagagugggcggcagaugccacccccacgugaacggcguguucuucaacggcaucauccugggccccgacggccacgugcugauccccgagaugcagagcagccugcugcagcagcacauggagcugcuggagagcagcgugaucccccugaugcacccccuggccgaccccagcaccguguucaaggacggcgacgaggccgaggacuucguggaggugcaccugcccgacgugcacaagcaggugagcggcguggaccugggccugcccagcuggggcaaguacgugcugaugagcgccggcauccugaccgcccugaugcugaugaucuuccugaugaccugcugcagaagaaccaacagagccgagagcauccagcacagccugggcgagaccggcagaaaggugagcgugaccagccagaacggcagagugaucagcagcugggagagcuacaagagcggcggcgagaccaagcuguga

SEQ ID NO: 191135 - RNA, 1575 nt, Artificial Sequence
  derived and/or modified CDS sequence (opt4) from glycoprotein__RABV__GU186380.1
auggugccccaggcccugcuguucgugccccugcuggccgugccccugugcuucggcaaguuccccaucuacaccauccccgacaagcugggccccuggagccccaucgacauccaccaccugagcugccccaacaaccuggugguggaggacgagggcugcaccaaccugagcggcuucagcuacauggagcugaaggugggcuacaucagcgccaucaaggugaacggcuucaccugcaccggcguggugaccgaggccgagaccuacaccaacuucgugggcuacgugaccaccaccuucaagagaaagcacuucagacccacccccgacgccugcagaagcgccuacaacuggaagauggccggcgaccccagauacgaggagagccugcacaaccccuaccccgacuaccacuggcugagaaccgugaagaccaccaaggagagcuucgugaucaucagccccagcguggccgaccuggaccccuacgacgagagccugcacagcagaguguuccccagaggcaagugcagcggcaucaccgugagcagcaccuacugcagcaccaaccacgacuacaccaucuggaugcccgagaaccccagacugggcaccagcugcgacaucuucaccaacagcagaggcaagagagccagcaagggcagcaagaccugcggcuucguggacgagagaggccuguacaagagccugaagggcgccugcaagcugaagcugugcggcgugcugggccugagacugauggacggcaccuggguggccauccagaccagcgacgagaccaaguggugcccccccgaccagcuggccaaccugcacgacuuccacagcgacgagaucgagcaccuggugguggaggagcuggugagaaagagagaggagugccuggacgcccuggagagcaucaugaccaccaagagcgugagcuucagaagacugagccaccugagaaagcuggugcccggcuucggcaaggccuacaccaucuucaacaagacccugauggaggccgacgcccacuacaagagcgugagaaccuggaacgagaucauccccagcaagggcugccugagagugggcggcagaugccacccccacgugaacggcguguucuucaacggcaucauccugggccccgacggccacgugcugauccccgagaugcagagcagccugcugcagcagcacauggagcugcuggagagcagcgugaucccccugaugcacccccuggccgaccccagcaccguguucaaggacggcgacgaggccgaggacuucguggaggugcaccugcccgacgugcacaagcaggugagcggcguggaccugggccugcccagcuggggcagauacgugcugaugagcgccggcauccugaccgcccugaugcugaugaucuuccugaugaccugcugcagaagaaccaacagagccaagagcauccagcacagccugggcgagaccggcagaaaggugagcgugaccagccagaacggcagagugaucagcagcugggagagcuacaagagcggcggcgagaccaagcuguga

SEQ ID NO: 191136 - RNA, 1575 nt, Artificial Sequence; identical to SEQ ID NO: 190899
  derived and/or modified CDS sequence (opt4) from glycoprotein__RABV__GU186381.1

SEQ ID NO: 191137 - RNA, 1575 nt, Artificial Sequence
  derived and/or modified CDS sequence (opt4) from glycoprotein__RABV__GU186382.1
augaucccccaggugcugcuguucgugccccugcugguguucagcagcugcuucggcaaguuccccaucuacaccauccccgacaagcugggccccuggagccccaucgacauccaccaccugagcugccccaacaaccuggugguggaggacgagggcugcaccaaccugagcggcuucagcuacauggagcugaaggugggcuacaucagcgccaucaaggugaacggcuucaccugcaccggcguggugaccgaggccgagaccuacaccaacuucgugggcuacgugaccaccaccuucaagagaaagcacuucagacccaugcccgacgccugcagagccgccuacaacuggaagauggccggcgaccccagauacgaggagagccugcacaaccccuaccccgacuaccacuggcugagaaccgugaagaccaccaaggagagccuggugaucaucagccccagcguggccgaccuggaccccuacgacaagagccugcacagcagaguguuccccggcggcaagugcagcggcaucaccgugagcagcaccugcugcagcaccaaccacgacuacaccaucuggaugcccgagaaccccagacugggcaccagcugcgacaucagcaccaacagcagaggcaagagagccagcaagggcggcaagaccugcggcuucguggacgagagaggccuguacaagagccugaagggcgccugcaagcugaagcugugcggcgugcugggccugagacugauggacggcaccuggguggccauccagaccagcgacgagaucaaguggugcagccccgaccagcuggugaaccugcacgacuuccacagcgacgagaucgagcaccuggugguggaggagcuggugaagaagagagaggagugccuggacgcccuggagaccaucaugaccaccaagagcgugagcuucagaagacugagccaccugagaaagcuggugcccggcuucggcaaggccuacaccaucuucaacaagacccugauggaggccgacgcccacuacaagagcaucagaaccuggaacgagaucauccccagcaagggcugccugagagugggcggcagaugccacccccacgugaacggcguguucuucaacggcaucauccugggccccgacggccacgugcugauccccgagaugcagagcagccugcugcaccagcacauggagcugcuggagagcagcgugaucccccugaugcacccccuggccgaccccagcaccguguucaaggacggcgacgaggccgaggacuucguggaggugcaccugcccgacgugcacaagcagaucagcggcguggaccugggcccccccaacuggggcaaguacgugcugaucagcgccggcgcccugaccgcccugaugagcaugaucuuccugaugaccugcugcagaaagaccaacagagccgagagcauccagcacagccccggcgagaccggcagaaaggugagcgugaccagccacaacggcagagugaucagcagcugggagagcuacaagagcggcggcgagaccaagcuguga

SEQ ID NO: 191138 - RNA, 1575 nt, Artificial Sequence
  derived and/or modified CDS sequence (opt4) from glycoprotein__RABV__GU186383.1
augaucccccaggugcugcuguucgugccccugcugguguucagcagcugcuucggcaaguuccccaucuacaccauccccgacaagcugggccccuggagccccaucgacauccaccaccugagcugccccaacaaccuggugguggaggacgagggcugcaccaaccugagcggcuucagcuacauggagcugaaggugggcuacaucagcgccaucaaggugaacggcuucaccugcaccggcguggugaccgaggccgagaccuacaccaacuucgugggcuacgugaccaccaccuucaagagaaagcacuucagacccaugcccgacgccugcagagccgccuacaacuggaagauggccggcgaccccagauacgaggagagccugcacaaccccuaccccgacuaccacuggcugagaaccgugaagaccaccaaggagagccuggugaucaucagccccagcguggccgaccuggaccccuacgacaagagccugcacagcagaguguuccccggcggcaagugcagcggcaucaccgugagcagcaccugcugcagcaccaaccacgacuacaccaucuggaugcccgagaaccccagacugggcaccagcugcgacaucuucaccaacagcagaggcaagagagccagcaagggcggcaagaccugcggcuucguggacgagagaggccuguacaagagccugaagggcgccugcaagcugaagcugugcggcgugcugggccugagacugauggacggcaccuggguggccauccagaccagcgacgagaucaaguggugcagccccgaccagcuggugaaccugcacgacuuccacagcgacgagaucgagcaccuggugguggaggagcuggugaagaagagagaggagugccuggacgcccuggagaccaucaugaccaccaagagcgugagcuucagaagacugagccaccugagagagcuggugcccggcuucggcaaggccuacaccaucuucaacaagacccugauggaggccgacgcccacuacaagagcaucagaaccuggaacgagaucauccccagcaagggcugccugagagugggcggcagaugccacccccacgugaacggcguguucuucaacggcaucauccugggccccgacggccacgugcugauccccgagaugcagagcagccugcugcaccagcacauggagcugcuggagagcagcgugaucccccugaugcacccccuggccgaccccagcaccguguucaaggacggcgacgaggccgaggacuucguggaggugcaccugcccgacgugcacaagcagaucagcggcguggaccugggccugcccaacuggggcaaguacgugcugaucagcgccggcgcccugaccgcccugaucagcaugaucuuccugaugaccugcugcagaaagaccaacagagccgagagcauccagcacagccccggcgagaccggcagaaaggugagcgugaccagccacaacggcagagugaucagcagcugggagagcuacaagagcggcggcgagaccaagcuguga

SEQ ID NO: 191139 - RNA, 1575 nt, Artificial Sequence
  derived and/or modified CDS sequence (opt4) from glycoprotein__RABV__GU186384.1
augaucccccaggugcugcuguucgugccccugcugguguucagcagcugcuucggcaaguuccccaucuacaccauccccgacaagcugggccccuggagccccaucgacauccaccaccugagcugccccaacaaccuggugguggaggacgagggcugcaccaaccugagcggcuucagcuacauggagcugaaggugggcuacaucagcgccaucaaggugaacggcuucaccugcaccggcguggugaccgaggccgagaccuacaccaacuucgugggcuacgugaccaccaccuucaagagaaagcacuucagacccaugcccgacgccugcagagccgccuacaacuggaagauggccggcgaccccagauacgaggagagccugcacaaccccuaccccgacuaccacuggcugagaaccgugaagaccaccaaggagagccuggugaucaucagccccagcguggccgaccuggaccccuacgacaagagccugcacagcagaguguuccccggcggcaagugcagcggcaucaccgugagcagcaccugcugcagcaccaaccacgacuacaccaucuggaugcccgagaaccccagacugggcaccagcugcgacaucuucaccaacagcagaggcaagagagccagcaagggcggcaagaccugcggcuucguggacgagagaggccuguacaagagccugaagggcgccugcaagcugaagcugugcggcgugcugggccugagacugauggacggcaccuggguggccauccagaccagcgacgagaucaaguggugcagccccgaccagcuggugaaccugcacgacuuccacagcgacgagaucgagcaccuggugguggaggagcuggugaagaagagagaggagugccuggacgcccuggagaccaucaugaccaccaagagcgugagcuucagaagacugagccaccugagaaagcuggugcccggcuucggcaaggccuacaccaucuucaacaagacccugauggaggccgacgcccacuacaagagcaucagaaccuggaacgagaucauccccagcaagggcugccugagagugggcggcagaugccacccccacgugaacggcguguucuucaacggcaucauccugggccccgacggccacgugcugauccccgagaugcagagcagccugcugcaccagcacauggagcugcuggagagcagcgugaucccccugaugcacccccuggccgaccccagcaccguguucaaggacggcgacgaggccgaggacuucguggacgugcaccugcccgacgugcacaagcagaucagcggcguggaccugggccugcccaacuggggcaaguacgugcugaucagcgccggcgcccugaccgcccugaugcugaugaucuuccugaugaccugcugcagaaaggccaacagagccgagagcauccagcacaaccccggcggcaccggcagaaaggugagcgugaccagccacaacggcagagugaucagcagcugggagagcuacaagagcggcggcgagaccaagcuguga

SEQ ID NO: 191140 - RNA, 1575 nt, Artificial Sequence
  derived and/or modified CDS sequence (opt4) from glycoprotein__RABV__GU186385.1
augaucccccaggugcugcuguucgugccccugcugguguucagcagcugcuucggcaaguuccccaucuacaccauccccgacaagcugggccccuggagccccaucgacauccaccaccugagcugccccaacaacauggugguggaggacgagggcugcaccaaccugagcggcuucagcuacauggagcugaaggugggcuacaucagcgccaucaaggugaacggcuucaccugcaccggcguggugaccgaggccgagaccuacaccaacuucgugggcuacgugaccaccaccuucaagagaaagcacuucagacccaugcccgacgccugcagagccgccuacaacuggaagauggccggcgaccccagauacgaggagagccugcacaaccccuaccccgacuaccacuggcugagaaccgugaagaccaccaaggagagccuggugaucaucagccccagcguggccgaccuggaccccuacgacaagagccugcacagcagaguguuccccggcggcaagugcagcggcaucaccgugagcagcaccugcugcagcaccaaccacgacuacaccaucuggaugcccgagaaccccagacugggcaccagcugcgacaucuucaccaacagcagaggcaagagagccagcaagggcggcaagaccugcggcuucguggacgagagaggccuguacaagagccugaagggcgccugcaagcugaagcugugcggcgugcugggccugagacugauggacggcaccuggguggccauccagaccagcgacgagaucaaguggugcagccccgaccagcuggugaaccugcacgacuuccacagcgacgagaucgagcaccuggugguggaggagcuggugaagaagagagaggagugccuggacgcccuggagaccaucaugaccaccaagagcgugagcuucagaagacugagccaccugagaaagcuggugcccggcuucggcaaggccuacaccaucuucaacaagacccugauggaggccgacgcccacuacaagagcaucagaaccuggaacgagaucauccccagcaagggcugccugagagugggcggcagaugccacccccacgugaacggcguguucuucaacggcaucauccugggccccgacggccacgugcugauccccgagaugcagagcagccugcugcaccagcacauggagcugcuggagagcagcgugaucccccugaugcacccccuggccgaccccagcaccguguucaaggacggcgacgaggccgaggacuucguggaggugcaccugcccgacgugcacaagcagaucagcggcguggaccugggccugcccaacuggggcaaguacgugcugaucagcgccggcgcccugaccgcccugaugcugaccaucuuccugaugaccugcugcagaaagaccagcagagccgagagcauccagcacagccccggcgagaccggcagaaaggugagcgugaccagccacaacggcagagugaucagcagcugggagagcuacaagagcggcggcgagaccaagcuguga

SEQ ID NO: 191141 - RNA, 1575 nt, Artificial Sequence
  derived and/or modified CDS sequence (opt4) from glycoprotein__RABV__GU186386.1
auggugccccaggcccugcuguucgugccccugcuggccgugccccugugcuucggcaaguuccccaucuacaccauccccgacaagcugggccccuggagccccaucgacauccaccaccugagcugccccaacaaccuggugguggaggacgagggcugcaccaaccugagcggcuucagcuacauggagcugaaggugggcuacaucagcgccaucaaggugaacggcuucaccugcaccggcguggugaccgaggccgagaccuacaccaacuucgugggcuacgugaccaccaccuucaagagaaagcacuucagacccacccccgacgccugcagaagcgccuacaacuggaagauggccggcgaccccagauacgaggagagccugcacaaccccuaccccgacuaccacuggcugagaaccgugaagaccaccaaggagagcuucgugaucaucagccccagcguggccgaccuggaccccuacgacaagagccugcacagcagaguguuccccagaggcaagugcagcggcaucaccgugagcagcaccuacugcagcaccaaccacgacuacaccaucuggaugcccgagaaccccagacugggcaccagcugcgacaucuucaccaacagcagaggcaagagagccagcaagggcagcaagaccugcggcuucguggacgagagaggccuguacaagagccugaagggcgccugcaagcugaagcugugcggcgugcugggccugagacugauggacggcaccuggguggccauccagaccagcgacgagaccaaguggugcccccccgaccagcuggugaaccugcacgacuuccacagcgacgagaucgagcaccuggugguggaggagcuggugaagaagagagaggagugccuggacgcccuggagagcaucaugaccaccaagagcgugagcuucagaagacugagccaccugagaaagcuggugcccggcuucggcaaggccuacaccaucuucaacaagacccugauggaggccgacgcccacuacaagagcgugagaaccuggaacgagaucauccccagcaagggcugccugagagugggcggcagaugccacccccacgugaacggcguguucuucaacggcaucauccugggccccgacggccacgugcugauccccgagaugcagagcagccugcugcagcagcacauggagcugcuggagagcagcgugaucccccugaugcacccccuggccgaccccagcaccguguucaaggacggcgacgaggccgaggacuucguggaggugcaccugcccgacgugcacaagcaggugagcggcguggaccugggccugcccagcuggggcaaguacgugcugaugagcgccggcauccugaccgcccugaugcugaugaucuuccugaccaccugcugcagaagaaccaacagagccgagagcauccagcacagccugggcgagaccggcagaaaggugagcgugaccagccagaacggcagagugaucagcagcugggagagcuacaagagcggcggcgagaccaagcuguga

SEQ ID NO: 191142 - RNA, 1575 nt, Artificial Sequence
  derived and/or modified CDS sequence (opt4) from glycoprotein__RABV__GU186387.1
augaucccccaggcccugcuguucgugccccugcugguguucagccugugcuucggcaaguuccccguguacgccauccccgacaagcugggccccuggagccccaucgacauccaccaccugagcugccccaacaaccuggugguggaggacgagggcugcaccaaccugagcggcuucagcuacauggagcugaaggugggcuacaucagcgccaucaaggugaacggcuucaccugcaccggcguggugaccgaggccgagaccuacaccaacuucaucggcuacgugaccaccaccuucaagagaaagcacuucagacccacccccgacgccugcagagccgccuacaacuggaagauggccggcgaccccagauacgaggagagccugcacaaccccuaccccgacuaccacuggcugagaaccgugaagaccaccaaggagagccugguggugaucagccccagcguggccgaccuggaccccuacgacaagagccugcacagcagaguguuccccagcggcaagugcagcggcaucaccgugagcagcaccugcugcagcaccaaccacgacuacaccaucuggaugcccgagaaccccagacugggcaccagcugcgacaucuucgugaacagcagaggcaagagagccagcaagggcagcaagaccugcggcuucguggacgagagaggccuguacaagagccugaagggcgccugcaagcugaagcugugcggcgugcugggccugagacugauggacggcaccuggguggccauccagaccagcgacgagaccaaguggugcccccccgaccagcuggugaaccugcacgacuucagaagcgacgagaucgagcaccuggugguggaggagcuggugaagaagagagaggagugccuggacgcccuggagagcaucaugaccaccaagagcgugagcuucagaagacugagccaccugagaaagcuggugcccggcuucggcaaggccuacaccaucuucaacaagacccugauggaggccgacgcccacuacaagagcgugagaaccuggaacgagaucauccccagcaagggcugccugagagugggcggcagaugccacccccacgugaacggcguguucuucaacggcaucauccugggccccgacggccacgugcugauccccgagaugcagagcagccugcugcagcagcacauggagcugcuggagagcagcgugaucccccugaugcacccccuggccgaccccagcaccaucuucaagaacggcgacgaggccgaggacuucguggaggugcaccugcccgacgugcacaagcaggugagcggcguggaccugggccugcccaacuggggcaaguacgugcugaugagcgccggcgcccugaucgcccugaugcugaugaucuuccugaugaccugcugcagaaagaccgacagaaccggcagcacccaccacagccccggcgagaccggcagaaaggugagcgugaccagccagaacggcagagugaucgccagcugggagagcuacaagagcggcggcgagaccaagcuguga

SEQ ID NO: 191143 - RNA, 1575 nt, Artificial Sequence; identical to SEQ ID NO: 190899
  derived and/or modified CDS sequence (opt4) from glycoprotein__RABV__GU186388.1

SEQ ID NO: 191144 - RNA, 1575 nt, Artificial Sequence
  derived and/or modified CDS sequence (opt4) from glycoprotein__RABV__GU186389.1
augaucccccaggugcugcuguucgugccccugcugguguucagcagcugcuucggcaaguuccccaucuacaccauccccgacaagcugggccccuggagccccaucgacauccaccaccugagcugccccaacaaccuggugguggaggacgagggcugcaccaaccugagcggcuucagcuacauggagcugaaggugggcuacaucagcgccaucaaggugaacggcuucaccugcaccggcguggugaccgaggccgagaccuacaccaacuucgugggcuacgugaccaccaccuucaagagaaagcacuucagacccaugcccgacgccugcagagccgccuacaacuggaagauggccggcgaccccagauacgaggagagccugcacaaccccuaccccgacuaccacuggcugagaaccgugaagaccaccaaggagagccuggugaucaucagccccagcguggccgaccuggaccccuacgacaagagccugcacagcagaguguuccccggcggcaagugcagcggcaucaccgugagcagcaccugcugcagcaccaaccacgacuacaccaucuggaugcccgagaaccccagacugggcaccagcugcgacaucuucaccaacagcagaggcaagagagccagcaagggcggcaagaccugcggcuucguggacgagagaggccuguacaagagccugagaggcgccugcaagcugaagcugugcggcgugcugggccugagacugauggacggcaccuggguggccauccagaccagcgacgagaucaaguggugcagccccgaccagcuggugaaccugcacgacuuccacagcgacgagaucgagcaccuggugguggaggagcuggugaagaagagagaggagugccuggacgcccuggagaccaucaugaccaccaagagcgugagcuucagaagacugagccaccugagaaagcuggugcccggcuucggcaaggccuacaccaucuucaacaagacccugauggaggccgacgcccacuacaagagcaucagaaccuggaacgagaucauccccagcaagggcugccugagagugggcggcagaugccacccccacgugaacggcguguucuucaacggcaucauccugggccccgacggccacgugcugauccccgagaugcagagcagccugcugcaccagcacauggagcugcuggagagcagcgugaucccccugaugcacccccuggccgaccccagcaccguguucaaggacggcgacgaggccgaggacuucguggaggugcaccugcccgacgugcacaagcagaucagcggcguggaccugggccugcccaacuggggcaaguacgugcugaucagcgccggcgcccugaccgcccugaugcugaugaucuuccugaugaccugcugcagaaagaccaacagagccgagagcauccagcacagccccggcgagaccggcagaaaggugagcgugaccagccacaacggcagagugaucagcagcugggagagcuacaagagcggcagcgagaccaagcuguga

SEQ ID NO: 191145 - RNA, 1575 nt, Artificial Sequence; identical to SEQ ID NO: 190887
  derived and/or modified CDS sequence (opt4) from glycoprotein__RABV__GU186390.1

SEQ ID NO: 191146 - RNA, 1575 nt, Artificial Sequence
  derived and/or modified CDS sequence (opt4) from glycoprotein__RABV__GU186392.1
augaucccccaggugcugcuguucgugccccugcugguguucagcagcugcuucggcaaguuccccaucuacaccauccccgacaagcugggccccuggagccccaucgacauccaccaccugagcugccccaacaaccuggugguggaggacgagggcugcaccaaccugagcggcuucagcuacauggagcugaaggugggcuacaucagcgccaucaaggugaacggcuucaccugcaccggcguggugaccgaggccgagaccuacaccaacuucgugggcuacgugaccaccaccuucaagagaaagcacuucagacccacccccgacgccugcagagccgccuacaacuggaagauggccggcgaccccagauacgaggagagccugcacaaccccuaccccgacuaccacuggcugagaaccgugaagaccagcaaggagagccuggugaucaucagccccagcguggccgaccuggaccccuacgacaagagccugcacagcagaguguuccccggcggcaagugcagcggcaucaccgugagcagcaccugcugcagcaccaaccacgacuacaccaucuggaugcccgagaaccccagacugggcaccagcugcgacaucuucaccaacagcagaggcaagagagccagcaagggcggcaagaccugcggcuucguggacgagagaggccuguacaagagccugaagggcgccugcaagcugaagcugugcggcgugcugggccugagacugauggacggcaccuggguggccauccagaccagcgacgagaucaaguggugcagccccgaccagcuggugaaccugcacgacuuccacagcgacgagaucgagcaccuggugguggaggagcuggugaagaagagagaggagugccuggacgcccuggagaccaucaugaccaccaagagcgugagcuucagaagacugagccaccugagaaagcuggugcccggcuucggcaaggccuacaccaucuucaacaagacccugauggaggccgacgcccacuacaagagcaucagaaccuggaacgagaucauccccagcaagggcugccugagagugggcggcagaugccacccccacgugaacggcguguucuucaacggcaucauccugggccccgacggccacgugcugauccccgagaugcagagcagccugcugcaccagcacauggagcugcuggagagcagcgugaucccccugaugcacccccuggccgaccccagcaccguguucaaggacggcgacgaggccgaggacuucguggaggugcaccugcccgacgugcacaagcagaucagcgagguggaccugggccugcccaacuggggcaaguacgugcuggugagcgccggcgcccugaccgcccugaugcugaugaucuuccugaugaccugcugcagaaagaccaacagagccgagagcauccagcacagccccggcgagaccggcagaaaggugagcgugaccagccacaacggcagagugaucagcagcugggagagcuacaagagcggcggcgagaccaagcuguga

SEQ ID NO: 191147 - RNA, 1575 nt, Artificial Sequence
  derived and/or modified CDS sequence (opt4) from glycoprotein__RABV__GU186396.1
augaucccccaggcccugcuguucgugccccugcugguguucagccugugcuucggcaaguuccccaucuacaccauccccgacaagcugggccccuggagccccaucgacauccaccaccugagcugccccaacaaccuggugguggaggacgagggcugcaccaaccugagcggcuucagcuacauggagcugaaggugggcuacaucagcgccaucaaggugaacggcuucaccugcaccggcguggugaccgaggccgagaccuacaccaacuucgugggcuacgugaccaccaccuucaagagaaagcacuucagacccacccccgacgccugcagagccgccuacaacuggaagauggccggcgaccccagauacgaggagagccugaacaaccccuaccccgacuaccacuggcugagaaccgugaagaccaccaaggagagccugguggugaucagccccagcguggccgaccuggaccccuacgacgagagccugcacagcagaguguuccccagcggcaagugcagcggcaucaccgugagcagcaccugcugcagcaccaaccacgacuacaccaucuggaugcccgagaaccccagacugggcaccagcugcgacaucuucgugaacagcagaggcaagagagccagcaagggcagcaagaccugcggcuucguggacgagagaggccuguacaagagccugaagggcgccugcaagcugaagcugugcggcgugcugggccugagacugauggacggcaccuggguggccauccagaccagcgacgagaccaaguggugcccccccgaccagcuggugaaccugcacgacuucagaagcgacgagaucgagcaccuggugguggaggagcuggugaagaagagagaggagugccuggacgcccuggagagcaucaugaccaccaagagcgugagcuucagaagacugagccaccugagaaagcuggugcccggcuucggcaaggccuacaccaucuucaacaagacccugauggaggccgacgcccacuacaagagcgugagaaccuggaacgagaucauccccagcaagggcugccugagagugggcggcagaugccacccccacgugaacggcguguucuucaacggcaucauccugggccccgacggccacgugcugauccccgagaugcagagcagccugcugcagcagcacauggagcugcuggagagcagcgugaucccccugaugcacccccuggccgaccccagcaccaucuucaaggacggcgacgaggccgaggacuucguggaggugcaccugcccgacgugcacaagcaggugagcggcguggaccugggccugcccaacuggggcaaguacgugcugaugagcgccggcgcccugaucgcccugaugcugaugaucuucagcaugaccugcugcagaaagaccgacagaaucggcagcacccaccacggccccggcgagaccggcagaaaggugagcgugaccagccagaacggcagagugaucgccagcugggagagcuacaagagcggcggcgagaccaagcuguga

SEQ ID NO: 191148 - RNA, 1575 nt, Artificial Sequence
  derived and/or modified CDS sequence (opt4) from glycoprotein__RABV__GU186397.1
augaucccccaggcccugcuguucgugccccugcugguguucagccugugcuucggcaaguuccccaucuacaccauccccgacaagcugggccccuggagccccaucgacauccaccaccugagcugccccaacaaccuggugguggaggacgagggcugcaccaaccugagcggcuucagcuacauggagcugaaggugggcuacaucagcgccaucaaggccaacggcuucaccugcaccggcguggugaccgaggccgagaccuacaccaacuucgugggcuacgugaccaccaccuucaagagaaagcacuucagacccacccccgacgccugcagagccgcccacaacuggaagauggccggcgagcccagauacgaggagagccugcacaaccccuaccccgacuaccacuggcugagaaccgugaagaccaccaaggagagccuggugaucaucagccccagcguggccgaccuggaccccuacgacaagagccugcacagcagaguguuccccagcggcaagugcagcggcaucaccgugagcagcaccuacugcagcaccaaccacgacuacaccaucagaaugcccgagaaccccagacugggcaccagcugcgacaucuucgugaacagcagaggcaagagagccagcaagggcagcaagaccugcggcuucguggacgagagaggccuguacaagagccugaagggcgccugcaagcugaagcugugcggcgugcugggccugagacugauggacggcaccuggguggccauccagaccagcgacgagaccaaguggugcccccccgaccagcuggugaaccugcacgacuucagaagcgacgagaucgagcaccuggugguggaggagcuggugaagaagagagaggagugccuggacgcccuggagagcaucaugaccaccaagagcgugagcuucagaagacugagccaccugagaaagcuggugcccggcuucggcaaggccuacaccaucuucaacaagacccugauggaggccgacgcccacuacaagagcgugagaaccuggaacgagaucauccccagcaagggcugccugagagugggcggcagaugccacccccacgugaacggcguguucuucaacggcaucauccugggccccgacggccacgugcugauccccgagaugcagagcagccugcugcagcagcacauggagcugcuggagagcagcgugaucccccugaugcacccccuggccgaccccagcaccaucuucaaggacggcgacgaggccgaggacuucguggaggugcaccugcccgacgugcacagacaggugagcggcguggaccugggccugcccaacuggggcaaguacgugcugaugagcgccggcgcccugguggcccugaugcugaugaucuuccugaugaccugcugcgugaagaccgacagaaccggcagcacccaccacagccccggcgagaccggcagaaaggugagcgugaccagccagaacggcagagugaucgccagcugggagagcuacaagagcggcggcgagaccaagcuguga

SEQ ID NO: 191149 - RNA, 1575 nt, Artificial Sequence; identical to SEQ ID NO: 190587
  derived and/or modified CDS sequence (opt4) from glycoprotein__RABV__GU186398.1

SEQ ID NO: 191150 - RNA, 1575 nt, Artificial Sequence
  derived and/or modified CDS sequence (opt4) from glycoprotein__RABV__GU186400.1
auggugccccaggcccugcuguucgugccccugcuggccgugccccugugcuucggcaaguuccccaucuacaccauccccgacaagcugggccccuggagccccaucgacauccaccaccugagcugccccaacaaccuggugguggaggacgagggcugcaccaaccugagcggcuucagcuacauggagcugaaggugggcuacaucagcgccaucaaggugaacggcuucaccugcaccggcguggugaccgaggccgagaccuacaccaacuucgugggcuacgugaccaccaccuucaagagaaagcacuucagacccaccagcgacgccugcagaagcgccuacaacuggaagauggccggcgaccccagauacgaggagagccugcacaaccccuaccccgacuaccacuggcugagaaccgugaagaccaccaaggagagcuucgugaucaucagccccagcguggccgaccuggaccccuacgacaagagcccccacagcagaguguuccccagaggcaagugcagcggcaucaccgugagcagcaccuacugcagcaccaaccacgacuacaccaucuggaugcccgagaaccccagacugggcaccagcugcgacaucuucaccaacagcagaggcaagagagccagcaagggcagcaagaccugcggcuucguggacgagagaggccuguacaagagccugaagggcgccugcaagcugaagcugugcggcgugcugggccugagacugauggacggcaccuggguggccauccagaccagcgacgagaccaaguggugcccccccgaccagcuggugaaccugcacgacuuccacagcgacgagaucgagcaccuggugguggaggagcuggugaagaagagagaggagugccuggacgcccuggagagcaucaugaccaccaagagcgugagcuucagaagacugagccaccugagaaagcuggugcccggcuucggcaaggccuacaccaucuucaacaagacccugauggaggccgacgcccacuacaagagcgugagaaccuggaacgagaucauccccagcaagggcugccugagagugggcggcagaugccacccccacgugaacggcguguucuucaacggcaucauccugggccccgacggccacgugcugauccccgagaugcagagcagccugcugcagcagcacauggagcugcuggagagcagcgugaucccccugaugcacccccuggccgaccccagcaccguguucaaggacggcgacgaggccgaggacuucguggaggugcaccugcccgacgugcacaagcaggugagcggcguggaccugggccugcccagcuggggcaaguacgugcugaugagcgccggcauccugaccgcccugaugcugaccaucuuccugaugaccugcugcagaagaaccaacagagccaagagcauccagcacagccugggcgagaccggcagaaaggugagcgugaccagccagagcggcagagugaucagcagcugggagagcuacaagagcggcggcgagaccaagcuguga

SEQ ID NO: 191151 - RNA, 1575 nt, Artificial Sequence
  derived and/or modified CDS sequence (opt4) from glycoprotein__RABV__GU186401.1
auggugccccaggcccugcuguucgugccccugcuggccgugccccugugcuucggcaaguuccccaucuacaccauccccgacaagcugggccccuggagccccaucgacauccaccaccugagcugccccaacaaccuggugguggaggacgagggcugcaccaaccugagcggcuucagcuacauggagcugaaggugggcuacaccagcgccaucaaggugaacggcuucaccugcaccggcguggugaccgaggccgagaccuacaccaacuucgugggcuacgugaccaccaccuucaagagaaagcacuucagacccaccagcgacgccugcagaagcgccuacaacuggaagauggccggcgaccccagauacgaggagagccugcacaaccccuaccccgacuaccacuggcugagaaccgugaagaccaccaaggagagcuucgugaucaucagccccagcguggccgaccuggaccccuacgacaagagccugcacagcagaguguuccccagaggcaagugcagcggcaucaccgugagcagcaccuacugcagcaccaaccacgacuacaccaucuggaugcccgagaaccccagacugggcaccagcugcgacaucuucaccaacagcagaggcaagagagccagcaagggcagcaagaccugcggcuucguggacgagagaggccuguacaagagccugaagggcgccugcaagcugaagcugugcggcgugcugggccugagacugauggacggcaccuggguggccauccagaccagcgacgagaccaaguggugcccccccgaccagcuggugaaccugcacgacuuccacagcgacgagaucgagcaccuggugguggaggagcuggugaagaagagagaggagugccuggacgcccuggagagcaucaugaccaccaagagcgugagcuucagaagacugagccaccugagaaagcuggugcccggcuucggcaaggccuacaccaucuucaacaagacccugauggaggccgacgcccacuacaagagcgugagaaccuggaacgagaucauccccagcaagggcugccugagagugggcggcagaugccacccccacgugaacggcguguucuucaacggcaucauccugggccccgacggccacgugcugauccccgagaugcagagcagccugcugcagcagcacauggagcugcuggagagcagcgugaucccccugaugcacccccuggccgaccccagcaccguguucaaggacggcgacgaggccgaggacuucguggaggugcaccugcccgacgugcacaagcaggugagcggcguggaccugggccugcccagcuggggcaaguacgugcugaugagcgccggcauccugaccgcccugaugcugaccaucuuccugaugaccugcugcagaagaaccaacagagccaagagcauccagcacagccugggcgagaccggcagaaaggugagcgugaccagccagagcggcagagugaucagcagcugggagagcuacaagagcggcggcgagaccaagcuguga

SEQ ID NO: 191152 - RNA, 1575 nt, Artificial Sequence
  derived and/or modified CDS sequence (opt4) from glycoprotein__RABV__GU186402.1
auggccccccaggcccugcuguucgugccccugcuggccgugccccugugccugggcaaguuccccaucuacaccauccccgacaagcugggccccuggagccccaucgacauccaccaccugagcugccccaacaaccuggugguggaggacgagggcugcaccaaccugagcggcuucagcuacauggagcugaaggugggcuacaucagcgccaucaaggugaacggcuucaccugcaccggcguggugaccgaggccgagaccuacaccaacuucgugggcuacgugaccaccaccuucaagagaaagcacuucagacccacccccgacgccugcagaagcgccuacaacuggaagauggccggcgaccccagauacgaggagagccugcacaaccccuaccccgacuaccacuggcugagaaccgugaagaccaccaaggagagcuucgugaucaucagccccagcguggccgaccuggaccccuacgacaagagccugcacagcagaguguuccccagaggcaagugcagcggcaucaccgugagcagcaccuacugcagcaccaaccacgacuacaccaucuggaugcccgagaaccccagacugggcaccagcugcgacaucuucaccaacagcagaggcaagagagccagcaagggcagcaagaccugcggcuucguggacgagagaggccuguacaagagccugaagggcgccugcaagcugaagcugugcggcgugcugggccugagacugauggacggcaccuggguggccauccagaccagcgacgagaccaaguggugcccccccgaccagcuggugaaccugcacgacuuccacagcgacgagaucgagcaccuggugguggaggagcuggugaagaagagagaggagugccuggacgcccuggagagcaucaugaccaccaagagcgugagcuucagaagacugagccaccugagaaagcuggugcccggcuucggcaaggccuacaccaucuucaacaagacccugauggaggccgacgcccacuacaagagcgugagaaccuggaacgagaucauccccagcaagggcugccugagagugggcggcagaugccacccccacgugaacggcguguucuucaacggcaucauccugggccccgacggccacgugcugauccccgagaugcagagcagccugcugcagcagcacauggagcugcuggagagcagcgugaucccccugaugcacccccuggccgaccccagcaccguguucaaggacggcgacgaggccgaggacuucguggaggugcaccugcccgacgugcacaagcacgugagcggcguggaccugggccugcccagcuggggcaaguacgugcuggugagcgccggcauccugaccgcccugaugcugaccaucuuccugaugaccugcugcagaagaaccaacagagccgagagcauccagcacagccugggcgagaccggcagaaaggugagcgugaccagccagagcggcagagugaucagcagcugggagagcuacaagagcggcggcgagaccaagcuguga

SEQ ID NO: 191153 - RNA, 1575 nt, Artificial Sequence
  derived and/or modified CDS sequence (opt4) from glycoprotein__RABV__GU186403.1
augaucccccaggugcugcuguucgugccccugcugguguucagcagcugcuucggcaaguuccccaucuacaccauccccgacaagcugggccccuggagccccaucgacauccaccaccugagcugccccaacaaccuggugguggaggacgagggcugcaccaaccugagcggcuucagcuacauggagcugaaggugggcuacaucagcgccaucaaggugaacggcuucaccugcaccggcguggugaccgaggccgagaccuacaccaacuucgugggcuacgugaccaccaccuucaagagaaagcacuucagacccaugcccgacgccugcagagccgccuacaacuggaagauggccggcgaccccagauacgaggagagccugcacaaccccuaccccgacuaccacuggcugagaaccgugaagaccaccaaggagagccugguggugaucagccccagcguggccgaccuggaccccuacgacaagagccugcacagcagaguguuccccggcggcaagugcagcggcaucaccgugagcagcaccugcugcagcaccaaccacgacuacaccaucuggaugcccgagaaccccagacugggcaccagcugcgacaucuucaccaacagcagaggcaagagagccagcaagggcggcaagaccugcggcuucguggacgagagaggccuguacaagagccugaagggcgccugcaagcugaagcugugcggcgugcugggccugagacugauggacggcaccuggguggccauccagaccagcgacgagaucaaguggugcagccccgaccagcuggugaaccugcacgacuuccacagcgacgagaucgagcaccuggugguggaggagcuggugaagaagagagaggagugccuggacgcccuggagaccaucaugaccaccaagagcgugagcuucagaagacugagccaccugagaaagcuggugcccggcuucggcaaggccuacaccaucuucaacaagacccugauggaggccgacgcccacuacaagagcaucagaaccuggaacgagaucauccccagcaagggcugccugagagugggcggcagaugccacccccacgugaacggcguguucuucaacggcaucauccugggccccgacggccacgugcugauccccgagaugcagagcagccugcugcaccagcacauggagcugcuggagagcagcgugaucccccugaugcacccccuggccgaccccagcaccguguucaaggacggcgacgaggccgaggacuucguggaggugcaccugcccgacgugcacaagcagaucagcggcguggaccugggccugcccaacuggggcaaguacgugcugaucagcgccggcgcccugaccgcccugaugcugaccaucuuccugaugaccugcugcagaaagaccaacagagccggcagcauccagcacagccccggcgagaccggcagaaaggugagcgugaccagccacaacggcagagugaucagcagcugggagagcuacaagagcggcagcgagaccaagcuguga

SEQ ID NO: 191154 - RNA, 1575 nt, Artificial Sequence; identical to SEQ ID NO: 190905
  derived and/or modified CDS sequence (opt4) from glycoprotein__RABV__GU186404.1

SEQ ID NO: 191155 - RNA, 1575 nt, Artificial Sequence
  derived and/or modified CDS sequence (opt4) from glycoprotein__RABV__GU186406.1
augaucccccaggugcugcuguucgugcccccccugguguucagcagcugcuucggcaaguuccccaucuacaccauccccgacaagcugggccccuggagccccaucgacauccaccaccugagcugccccaacaaccuggugguggaggacgagggcugcaccaaccugagcggcuucagcuacauggagcugaaggugggcuacaucagcgccaucaaggugaacggcuucaccugcaccggcguggugaccgaggccgagaccuacaccaacuucgugggcuacgugaccaccaccuucaagagaaagcacuucagacccaugcccgacgccugcagagccgccuacaacuggaagauggccggcgaccccagauacgaggagagccugcacaaccccuaccccgacuaccacuggcugagaaccgugaagaccaccaaggagagccuggugaucaucagccccagcguggccgaccuggaccccuacgacaagagccugcacagcagaguguuccccggcggcaagugcagcggcaucaccgugagcagcaccugcugcagcaccaaccacgacuacaccaucuggaugcccgagaaccccagacugggcaccagcugcgacaucuucaccaacagcagaggcaagagagccagcaagggcggcaagaccugcggcuucguggacgagagaggccuguacaagagccugaagggcgccugcaagcugaagcugugcggcgugcugggccugagacugauggacggcaccuggguggccauccagaccagcgacgagaucaaguggugcagccccgaccagcuggugaaccugcacgacuuccacagcgacgagaucgagcaccuggugguggaggagcuggugaagaagagagaggagugccuggacgcccuggagaccaucaugaccaccaagagcgugagcuucagaagacugagccaccugagaaagcuggugcccggcuucggcaaggccuacaccaucuucaacaagacccugauggaggccgacgcccacuacaagagcaucagaaccuggaacgagaucauccccagcaagggcugccugagagugggcggcagaugccacccccacgugaacggcguguucuucaacggcaucauccugggccccgacggccacgugcugauccccgagaugcagagcagccugcugcaccagcacauggagcugcuggagagcagcgugaucccccugaugcacccccuggccgaccccagcaccguguucaaggacggcgacgaggccgaggacuucguggaggugcaccugcccgacgugcacaagcagaucagcggcguggaccugggccugcccaacuggggcaaguacgugcugaucagcgccggcgcccugaccgcccugaugcugaugaccuuccugaugaccugcugcagaaagaccaacagagccgagagcauccagcacagccccggcgagaccggcagaaaggugagcgugaccagccacaacggcagagugaucagcagcugggagagcuacaagagcggcggcgagaccaagcuguga

SEQ ID NO: 191156 - RNA, 1575 nt, Artificial Sequence
  derived and/or modified CDS sequence (opt4) from glycoprotein__RABV__GU186407.1
augaucccccaggugcugcuguucgugccccugcugguguucagcagcugcuucggcaaguuccccaucuacaccauccccgacaagcugggccccuggagccccaucgacauccaccaccugagcugccccaacaaccuggugguggaggacgagggcugcaccaaccugagcggcuucagcuacauggagcugaaggugggcuacaucagcgccaucaaggugaacggcuucaccugcaccggcguggugaccgaggccgagaccuacaccaacuucgugggcuacgugaccaccaccuucaagagaaagcacuucagacccaugcccgacgccugcagagccgccuacaacuggaagauggccggcgaccccagauacgaggagagccugcacaaccccuaccccgacuaccacuggcugagaaccgugaagaccaccaaggagagccuggugaucaucagccccagcguggccgaccuggaccccuacgacaagagccugcacagcagaguguuccccggcggcaagugcagcggcaucaccgugagcagcaccugcugcagcaccaaccacgacuacaccaucuggaugcccgagaaccccagacugggcaccagcugcgacaucuucaccaacagcagaggcaagagagccagcaagggcggcaagaccugcggcuucguggacgagagaggccuguacaagagccugaagggcgccugcaagcugaagcugugcggcgugcugggccugagacugauggacggcaccuggguggccauccagaccagcgacgagaucaaguggugcagccccgaccagcuggugaaccugcacgacuuccacagcgacgagaucgagcaccuggugguggaggagcuggugaagaagagagaggagugccuggacgcccuggagaccaucaugaccaccaagagcgugagcuucagaagacugagccaccugagaaagcuggugcccggcuucggcaaggccuacaccaucuucaacaagacccugauggaggccgacgcccacuacaagagcaucagaaccuggaacgagaucauccccagcaagggcugccugagagugggcggcagaugccacccccacgugaacggcguguucuucaacggcaucauccugggccccgacggccacgugcugauccccgagaugcagagcagccugcugcaccagcacauggagcugcuggagagcagcgugaucccccugaugcacccccuggccgaccccagcaccguguucaaggacggcgacgaggccgaggacuucguggaggugcaccugcccgacgugcacaagcagaucagcggcguggaccugggccugcccaacuggggcaaguacgugcugaucagcgccggcgcccugaccgcccugaugcugaugaccuuccugaugaccugcugcagaaagaccaacagagccgagagcauccagcacagccccggcgagaccggcagaaaggugagcgugaccagccacaacggcagagugaucagcagcugggagagcuacaagagcggcggcgagaccaagcuguga

SEQ ID NO: 191157 - RNA, 1575 nt, Artificial Sequence; identical to SEQ ID NO: 191156
  derived and/or modified CDS sequence (opt4) from glycoprotein__RABV__GU186408.1

SEQ ID NO: 191158 - RNA, 1575 nt, Artificial Sequence
  derived and/or modified CDS sequence (opt4) from glycoprotein__RABV__GU186409.1
augaucccccaggugcugcuguucgugccccugcugguguucagcagcugcuucggcaaguuccccaucuacaccauccccgacaagcugggccccuggagccccaucgacauccaccaccugagcugccccaacaaccuggugguggaggacgagggcugcaccaaccugagcggcuucagcuacauggagcugaaggugggcuacaucagcgccaucaaggugaacggcuucaccugcaccggcgccgugaccgaggccgagaccuacaccaacuucgugggcuacgugaccaccaccuucaagagaaagcacuucagacccaugcccgacgccugcagagccgccuacaacuggaagauggccggcgaccccagauacgaggagagccugcacaaccccuaccccgacuaccacuggcugagaaccgugaagaccaccaaggagagccuggugaucaucagccccagcguggccgaccuggaccccuacgacaagagccugcacagcagaguguuccccggcggcaagugcagcggcaucaccgugagcagcaccugcugcagcaccaaccacgacuacaccaucuggaugcccgagaaccccagacugggcaccagcugcgacaucuucaccaacagcagaggcaagagagccagcaagggcggcaagaccugcggcuucguggacgagagaggccuguacaagagccugaagggcgccugcaagcugaagcugugcggcgugcugggccugagacugauggacggcaccuggguggccauccagaccagcgacgagaucaaguggugcccccccgaccagcuggugaaccugcacgacuuccacagcgacgagaucgagcaccuggugguggaggagcuggugaagaagagagaggagugccuggacgcccuggagaccaucaugaccaccaagagcgugagcuucagaagacugagccaccugagaaagcuggugcccggcuucggcaaggccuacaccaucuucaacaagacccugauggaggccgacgcccacuacaagagcaucagaaccuggaacgagaucauccccagcaagggcugccugagagugggcggcagaugccacccccacgugaacggcguguucuucaacggcaucauccugggccccgacggccacgugcugauccccgagaugcagagcagccugcugcaccagcacauggagcugcuggagagcagcgugaucccccugaugcacccccuggccgaccccagcaccguguucaaggacggcgacgaggccgaggacuucguggaggugcaccugcccgacgugcacaagcagaucagcggcguggaccugggccugcccaacuggggcaaguacgugcugaucagcgccggcgcccugaccgcccugaugcugaccaucuuccugaugaccugcugcagaaagaccaacagagccggcagcauccagcacagccccggcgagaccggcagaaaggugagcgugaccagccacaacggcagagugaucagcagcugggagagcuacaagagcggcagcgagaccaagcuguga

SEQ ID NO: 191159 - RNA, 1575 nt, Artificial Sequence
  derived and/or modified CDS sequence (opt4) from glycoprotein__RABV__GU186410.1
augaucccccaggugcugcuguucgugccccugcugguguucagcagcggcuucggcaaguuccccaucuacaccauccccgacaagcugggccccuggagccccaucgacauccaccaccugagcugccccaacaaccuggugguggaggacgagggcugcaccaaccugagcggcuucagcuacauggagcugaaggugggcuacaucagcgccaucaaggugaacggcuucaccugcaccggcguggugaccgaggccgagaccuacaccaacuucgugggcuacgugaccaccaccuucaagagaaagcacuucagacccaugcccgacgccugcagagccgccuacaacuggaagauggccggcgaccccagauacgaggagagccugcacaaccccuaccccgacuaccacuggcugagaaccgugaagaccaccaaggagagccuggugaucaucagccccagcguggccgaccuggaccccuacgacaagagccugcacagcagaguguuccccggcggcaagugcagcggcaucaccgugagcagcaccugcugcagcaccaaccacgacuacaccaucuggaugcccgagaaccccagacugggcaccagcugcgacaucuucaccaacagcagaggcaagagagccagcaagggcggcaagaccugcggcuucguggacgagagaggccuguacaagagccugaagggcgccugcaagcugaagcugugcggcgugcugggccugagacugauggacggcaccuggguggccauccagaccagcgacgagaucaaguggugcagccccgaccagcuggugaaccugcacgacuuccacagcgacgagaucgagcaccuggugguggaggagcuggugaagaagagagaggagugccuggacgcccuggagaccaucaugaccaccaagagcgugagcuucagaagacugagccaccugagaaagcuggugcccggcuucggcaaggccuacaccaucuucaacaagacccugauggaggccgacgcccacuacaagagcaucagaaccuggaacgagaucauccccagcaagggcugccugagagugggcggcagaugccacccccacgugaacggcguguucuucaacggcaucauccugggccccgacggccacgugcugauccccgagaugcagagcagccugcugcaccagcacauggagcugcuggagagcagcgugaucccccugaugcacccccuggccgaccccagcaccguguucaaggacggcgacgaggccgaggacuucguggaggugcaccugcccgacgugcacaagcagaucagcggcguggaccugggccugcccaacuggggcaaguacgugcugaucagcgccggcgcccugaccgcccugaugcugaccaucuuccugaugaccugcugcagaaagaccaacagagccggcagcauccagcacagccccggcgagaccggcagaaaggugagcgugaccagccacaacggcagagugaucagcagcugggagagcuacaagagcggcagcgagaccaagcuguga

SEQ ID NO: 191160 - RNA, 1575 nt, Artificial Sequence; identical to SEQ ID NO: 190912
  derived and/or modified CDS sequence (opt4) from glycoprotein__RABV__GU345746.1

SEQ ID NO: 191161 - RNA, 1575 nt, Artificial Sequence
  derived and/or modified CDS sequence (opt4) from glycoprotein__RABV__GU345747.1
augaucccccaggcccugcuguucgugccccugcugguguucagccugugcuucggcaaguuccccaucuacaccauccccgacaagcugggccccuggagccccaucgacauccaccaccugagcugccccaacaaccuggugguggaggacgagggcugcaccaaccugagcggcuucagcuacauggagcugaaggugggcuacaucagcgccaucaaggugaacggcuucaccugcaccggcguggugaccgaggccgagaccuacaccaacuucgugggcuacgugaccaccaccuucaagagaaagcacuucagacccacccccgacgccugcagagccgccuacaacuggaagauggccggcgaccccagauacgaggagagccugcacaaccccuaccccgacuaccacuggcugagaaccgugaagaccaccaaggagagccuggugaucaucagccccagcguggccgaccuggaccccuacgacaagagccugcacagcagaguguuccccagcggcaagugcagcggcaucaccgugagcagcaccuacugcagcaccaaccacgacuacaccaucuggaugcccgagaaccccagacugggcaccagcugcgacaucuucgugaacagcagaggcaagagagccagcaagggcagcaagaccugcggcuucguggacgagagaggccuguacaagagccugaagggcgccugcaagcugaagcugugcggcgugcugggccugagacugauggacggcaccuggguggccauccagaccagcgacgagaccaaguggugcccccccgaccagcuggugaaccugcacgacuucagaagcgacgagaucgagcaccuggugguggaggagcuggugaagaagagagaggagugccuggacgcccuggagagcaucaugaccaccaagagcgugagcuucagaagacugagccaccugagaaagcuggugcccggcuucggcaaggccuacaccaucuucaacaagacccugauggaggccgacgcccacuacaagagcgugagaaccuggaacgagaucauccccagcaagggcugccugagagugggcggcagaugccacccccacgugaacggcguguucuucaacggcaucauccugggccccgacggccacgugcugauccccgagaugcagagcagccugcugcagcagcacauggagcugcuggagagcagcgugaucccccugaugcacccccuggccgaccccagcaccaucuucaaggacggcgacgaggccgaggacuucguggaggugcaccugcccgacgugcacaagcaggugagcggcguggaccugggccugcccaacuggggcaaguacgugcugaugagcgccggcgcccugaucgcccugaugcugaugaucuuccugaugaccugcugcagaaagaccgacagaaccggcagcacccaccacagccccggcgagaccggcagaaaggugagcgugaccagccagaacggcagagugaucgccagcugggagagcuacaagagcggcggcgagaccagacuguga

SEQ ID NO: 191162 - RNA, 1575 nt, Artificial Sequence
  derived and/or modified CDS sequence (opt4) from glycoprotein__RABV__GU565703.1
auggugccccaggugcugcuguucgugccccugcugggcuucagccugugcuucggcaaguuccccaucuacaccauccccgacaagcugggccccuggagccccaucgacauccaccaccugagcugccccaacaaccuggugguggaggacgagggcugcaccaaccugagcgaguucagcuacauggagcugaaggugggcuacaucagcgccaucaaggugaacggcuucaccugcaccggcguggugaccgaggccgagaccuacaccaacuucgugggcuacgugaccaccaccuucaagagaaagcacuucagacccacccccgacgccugcagagccgccuacaacuggaagauggccggcgaccccagauacgaggagagccugcacaaccccuaccccgacuaccacuggcugagaaccgugaagaccaccaaggagagccuggugaucaucagccccagcgugaccgaccuggaccccuacgacaagagccugcacagcagaguguuccccggcggcaacugcagcggcaucaccgugagcagcaccuacugcagcaccaaccacgacuacaccaucuggaugcccgagaaccugagacugggcaccagcugcgacaucuucaccaacagcagaggcaagagagccagcaagggcggcaagaccugcggcuucguggacgagagaggccuguacaagagccugaagggcgccugcaagcugaagcugugcggcgugcugggccugagacugauggacggcaccuggguggccaugcagaccagcgacgagaccaaguggugcccccccggccagcuggugaaccugcacgacuucagaagcgacgagaucgagcaccuggugguggaggagcuggugaagaagagagaggagugccuggacgcccuggagagcaucaugaccaccaagagcgugagcuucagaagacugagccaccugagaaagcuggugcccggcuucggcaaggccuacaccaucuucaacaagacccugauggaggccgacgcccacuacaagagcgugagaaccuggaacgagaucauccccagcaagggcugccugagagugggcggcagaugccacccccacgugaacggcguguucuucaacggcaucauccugggcagcgacggccacgugcugauccccgagaugcagagcagccugcugcagcagcacauggagcugcuggagagcagcgugaucccccugaugcacccccuggccgaccccagcaccguguucaaggacggcgacgagguggaggacuucguggaggugcaccugcccgacgugcacgagcaggugagcggcguggagcugggccugcccaacuggggcaaguacgugcugaugaucgccggcgcccugaucgcccugaugcugaucaucuuccugaugaccugcugcagaagagugaacagacccgagagcacccagagcagccugggcgagaccggcagaaacgugagcgugaccagccagagcggcaaggugaucagcagcugggagagcuacaagagcggcggcgagaccagacuguga

SEQ ID NO: 191163 - RNA, 1575 nt, Artificial Sequence
  derived and/or modified CDS sequence (opt4) from glycoprotein__RABV__GU565704.1
auggugccccaggugcugcuguucgccccccugcugguguucagccugugcuucggcaaguuccccaucuacaccauccccgacaagcugggccccuggagccccaucgaccugcaccaccugagcugccccaacaaccuggugguggaggacgagggcugcaccaaccugagcggcuucagcuacauggagcugaaggugggcuacaucagcgccaucaaggugaacggcuucaccugcaccggcguggugaccgaggccgagaccuacaccaacuucgugggcuacgugaccaccaccuucaagagaaagcacuucagacccacccccgacgccugcagagccgccuacaacuggaagauggccggcgaccccagauacgaggagagccugcacaaccccuaccccgacuaccacuggcugagaaccgugaagaccaccaaggagagccuggugaucaucagccccagcgugaccgaccuggaccccuacgacaagagccugcacagcagaguguuccccggcggcaacugcagcggcaucaccgugagcagcaccuacugcagcaccaaccacgacuacaccaucuggaugcccgagaaccugagacugggcaccagcugcgacaucuucacccacagcagaggcaagagagccagcaagggcgacaagaccugcggcuucguggacgagagaggccuguacaagagccugaagggcgccugcaagcugaagcugugcggcgugcugggccugagacugauggacggcaccuggguggccaugcagaccagcgacgagaccaaguggugcccccccggccagcuggugaaccugcacgacuucagaagcgacgagaucgagcaccuggugguggaggagcuggugaagaagagagaggagugccuggacgcccuggagagcaucaugaccaccaagagcgugagcuucagaagacugagccaccugagaaagcuggugcccggcuucggcaaggccuacaccaucuucaacaagacccugauggaggccgacgcccacuacaagagcgugcagaccuggaacgagaucauccccagcaagggcugccugagagugggcgagagaugccacccccacgugaacggcguguucuucaacggcaucauccugggcagcgacggccacgugcugauccccgagaugcagagcagccugcugcagcagcacauggagcugcuggagagcagcgugaucccccugaugcacccccuggccgaccccagcaccguguucaaggacggcgacgagguggaggacuucguggaggugcaccugcccgacgugcacaagcaggugagcggcguggaccugggccugcccaaguggggcaaguacgugcugaugaucgccggcgcccugaucgcccugaugcugaucaucuuccugaugaccugcugcagaagagugaacagacccgagagcacccagagcaaccugggcggcaccggcagaaacgugagcgugaccagccagagcggcaaggugaucagcagcugggagagcuacaagagcggcggcgagaccagacuguga

SEQ ID NO: 191164 - RNA, 1575 nt, Artificial Sequence; identical to SEQ ID NO: 191144
  derived and/or modified CDS sequence (opt4) from glycoprotein__RABV__GU591789.1

SEQ ID NO: 191165 - RNA, 1575 nt, Artificial Sequence; identical to SEQ ID NO: 191144
  derived and/or modified CDS sequence (opt4) from glycoprotein__RABV__GU591791.1

SEQ ID NO: 191166 - RNA, 1575 nt, Artificial Sequence
  derived and/or modified CDS sequence (opt4) from glycoprotein__RABV__GU647092.1
augaucccccaggcccugcuguucgugccccugcugguggugccccugugcuucggcaaguuccccaucuacaccauccccgacaagcugggccccuggagccccaucgacauccaccaccugagcugccccaacaaccuggugauggaggacgagggcugcaccaaccugagcggcuucagcuacauggagcugaaggugggcuacaucagcgccaucaaggugaacggcuucaccugcaccggcguggugaccgaggccgagaccuacaccaacuucgugggcuacgugaccaccaccuucaagagaaagcacuucagacccacccccgacgccugcagaagcgccuacaacuggaagauggccggcgaccccagauacgaggagagccugcacaaccccuaccccgacuaccacuggcugagaaccgugaagaccaccaaggagcccuucgugaucaucagccccagcguggccgaccuggaccccuacgacaagagccugcacagcagaguguuccccagaggcaagugcagcggcaucaccgugagcagcaccuacugccccaccaaccacgacuacaccaucuggaugcccgagaaccccagaagcggcaccagcugcgacaucuucaccaacagcagaggcaagagagccuucaagggcagcaagaccugcggcuucguggacgagagaggccuguacaagagccugaagggcgccugcaagcugaagcugugcggcgugcugggccugagacugauggacggcaccuggguggccauccagaccagcgacgagaccaaguggugcccccccgaccagcuggugaaccugcacgacuuccacagcgacgagaucgagcaccuggugguggaggagcuggugaagaagagagaggagugccuggacgcccuggagagcaucaugaccaccaagagcgugagcuucagaagacugagccaccugagaaagcuggugcccggcuucggcaaggccuacaccaucuucaacaagacccugauggaggccgacgcccacuacaagagcgugagaaccuggaacgagaucauccccagcaagggcugccugagagugggcggcagaugccacccccacgugaacggcguguucuucaacggcaucauccugggccccgacggccacgugcugauccccgagaugcagagcagccugcugcagcagcacauggagcugcuggagagcagcgugaucccccugaugcacccccuggccgaccccagcaccguguucaagaacggcgacgaggccgaggacuucguggaggugcaccugcccgacgugcacaagcaggugagcggcguggaccugggccugcccagcuggggcaaguacgugcugaugagcgccggcauccugaccgcccugaugcugaugaucuuccugaugaccugcugcagaagaaccaacagacccgagagcauccagcacagccugggcgagaccggcagaaaggugagcgugaccagccagagcggcagagugaucagcagcugggagagcuacaagagcggcggcgagaccaagcuguga

SEQ ID NO: 191167 - RNA, 1575 nt, Artificial Sequence
  derived and/or modified CDS sequence (opt4) from glycoprotein__RABV__GU937024.1
auggugccccaggcccugcuguucgugccccugcugguguucagcaugugcuucggcaaguuccccaucuacaccauccccgacaagcugggccccuggagccccaucgacauccaccaccugagcugccccaacaaccuggugguggaggacgagggcugcaccaaccugagcggcuucagcuacauggagcugaaggugggcuacaucagcgccaucaaggugaacggcuucaccugcaccggcguggugaccgaggccgagaccuacaccaacuucgugggcuacgugaccaccaccuucaagagaaagcacuucagacccacccccgacgccugcagagccgccuacaacuggaagauggccggcgaccccagauacgaggagagccugcacaaccccuaccccgacuaccacuggcugagaaccgugaagaccaccaaggagagccuggugaucaucagccccagcguggccgaccuggaccccuacgacaagagccugcacagcagaguguuccccaacggcaagugcagcggcaucaccaucagcagcaccuacugccccaccaaccacgacuacaccaucuggcugcccgagaaccccagacugggcaccagcugcgacaucuucaccaacagcagaggcaagagagccagcaagggcagcaagaccugcggcuucguggacgagagaggccuguacaagagccugaagggcgccugcaagcugaagcugugcggcgugcugggccugagacugauggacggcaccuggguggccaugcaggccagcgacgagaccaaguggugcccccccgaccagcuggugaaccugcacgacuucagaagcgacgagaucgagcaccuggugguggaggagcuggugaagaagagagaggagugccuggacgcccuggagagcaucaugaccaccaagagcgugagcuucagaagacugagccaccugagaaagcuggugcccggcuucggcaaggccuacaccaucuucaacaagacccugauggaggccgacgcccacuacaagagcgugagaaccuggaacgagaucauccccagcaagggcugccugagagugggcggcagaugccacccccacgugaacggcguguucuucaacggcaucauccugggccccgacggccacgugcugauccccgagaugcagagcagccugcugcagcagcacauggagcugcuggagagcagcgugaucccccugaugcacccccuggccgaccccagcaccguguucaaggacggcgacgaggccgagaacuucguggaggugcaccugcccgacgugcacaagcagaucagcggcguggaccugggccugcccaacuggggcaaguacgugcuggugagcgccggcgugcugaucgcccugaugcugaucaucuuccugaugaccugcugcggcagagugaacagacccaagagcacccagcacaaccugggcggcaccggcagagaggugagcgugaccccccagagcggcaaggugaucagcagcugggagagcuacaagagcggcggcgagaccagacuguga

SEQ ID NO: 191168 - RNA, 1575 nt, Artificial Sequence
  derived and/or modified CDS sequence (opt4) from glycoprotein__RABV__GU937025.1
auggugccccaggcccugcuguucgugccccugcugguguucagcaugugcuucggcaaguuccccaucuacaccauccccgacaagcugggccccuggagccccaucgacauccaccaccugagcugccccaacaaccuggugguggaggacgagggcugcaccaaccugagcggcuucagcuacauggagcugaaggugggcuacaucagcgccaucaaggugaacggcuucaccugcaccggcguggugaccgaggccgagaccuacaccaacuucgugggcuacgugaccaccaccuucaagagaaagcacuucagacccacccccgacgccugcagagccgccuacaacuggaagauggccggcgaccccagauacgaggagagccugcacaaccccuaccccgacuaccacuggcugagaaccgugaagaccaccaaggagagccuggugaucaucagccccagcguggccgaccuggaccccuacgacaagagccugcacagcagaguguuccccaacggcaagugcagcggcaucaccaucagcagcaccuacugccccaccaaccacuacuacaccaucuggcugcccgagaaccccagacaggagaccagcugcgacaucuucaccaacagcagaggcaagagagccagcaagggcagcaagaccugcggcuucguggacgagagaggccuguacaagagccugaagggcgccugcaagcugaagcugugcggcgugcugggccugagacugauggacggcaccuggguggccaugcaggccagcgacgagaccaaguggugcccccccgaccagcuggugaaccugcacgacuucagaagcgacgagaucgagcaccuggugguggaggagcuggugaagaagagagaggagugccuggacgcccuggagagcaucaugaccaccaagagcgugggcuucagaagacugagccaccugagaaagcuggugcccggcuucagaaaggccuacaccaucuucaacaagacccugauggaggccgacgcccacuacaagagcgugagaaccuggaacgagaucauccccagcaagggcugccugagagugggcggcagaugccacccccacgugaacggcguguucuucaacggcaucauccugggccccgacggccacgugcugauccccgagaugcagagcagccugcugcagcagcacaugggccugcuggagagcagcgugaucccccugaugcacccccuggccgaccccagcaccguguucaaggacggcgacgaggccgagaacuucguggaggugcaccugcccgacgugcacaagcagaucagcggcguggaccugggccugcccaacuggggcaaguacgugcuggugagcgccggcgugcugaucgcccugaugcugaucaucuuccugaugaccugcugcggcagagugaacagacccaagagcacccagcacaaccugggcggcaccggcagagaggugagcgugaccccccagagcggcaaggugaucagcagcugggagagcuacaagagcggcggcgagaccagacuguga

SEQ ID NO: 191169 - RNA, 1575 nt, Artificial Sequence
  derived and/or modified CDS sequence (opt4) from glycoprotein__RABV__GU937026.1
auggugccccaggcccugcuguucgugccccugcugguguucagcaugugcuucggcaaguuccccaucuacaccauccccgacaagcugggccccuggagccccaucgacauccaccaccugagcugccccaacaaccuggugguggaggacgagggcugcaccaaccugagcggcuucagcuacauggagcugaaggugggcuacaucagcgccaucaaggugaacggcuucaccugcaccggcguggugaccgaggccgagaccuacaccaacuucgugggcuacgugaccaccaccuucaagagaaagcacuucagacccacccccgacgccugcagagccgccuacaacuggaagauggccggcgaccccagauacgaggagagccugcacaaccccuaccccgacuaccacuggcugagaaccgugaagaccaccaaggagagccuggugaucaucagccccagcguggccgaccuggaccccuacgacaagagccugcacagcagaguguuccccaacggcaagugcagcggcaucaccaucagcagcaccuacugccccaccaaccacgacuacaccaucuggcugcccgagaaccccagacugggcaccagcugcgacaucuucaccaacagcagaggcaagagagccagcaagggcagcaagaccugcggcuucguggacgagagaggccuguacaagagccugaagggcgccugcaagcugaagcugugcggcgugcugggccugagacugauggacggcaccuggguggccaugcaggccagcgacgagaccaaguggugcccccccgaccagcuggugaaccugcacgacuucagaagcgacgagaucgagcaccuggugguggaggagcuggugaagaagagagaggagugccuggacgcccuggagagcaucaugaccaccaagagcgugagcuucagaagacugagccaccugagaaagcuggugcccggcuucggcaaggccuacaccaucuucaacaagacccugauggaggccgacgcccacuacaagagcgugagaaccuggaacgagaucauccccagcaagggcugccugagagugggcggcagaugccacccccacgugaacggcguguucuucaacggcaucauccugggccccgacggccacgugcugauccccgagaugcagagcagccugcugcagcagcacauggagcugcuggagagcagcguggugccccugaugcacccccuggccgaccccagcaccgugcugaaggacggcgacgaggccgagaacuucguggaggugcaccugcccgacgugcacaagcagaucagcggcguggaccugggccugcccaacuggggcaaguacgugcuggugagcgccggcgugcugaucgcccugaugcugaucaucuuccugaugaccugcugcggcagagugaacagacccaagagcacccagcacaaccugggcggcaccggcagaaaggugagcgugaccccccagagcggcaaggugaucagcagcugggagagcuacaagagcggcggcgagaccagacuguga

SEQ ID NO: 191170 - RNA, 1575 nt, Artificial Sequence
  derived and/or modified CDS sequence (opt4) from glycoprotein__RABV__GU937027.1
auggugccccaggcccugcuguucgugccccugcugguguucagcaugugcuucggcaaguuccccaucuacaccauccccgacaagcugggccccuggagccccaucgacauccaccaccugagcugccccaacaaccuggugguggaggacgagggcugcaccaaccugagcggcuucagcuacauggagcugaaggugggcuacaucagcgccaucaaggugaacggcuucaccugcaccggcguggugaccgaggccgagaccuacaccaacuucgugggcuacgugaccaccaccuucaagagaaagcacuucagacccacccccgacgccugcagagccgccuacaacuggaagauggccggcgaccccagauacgaggagagccugcacaaccccuaccccgacuaccacuggcugagaaccgugaagaccaccaaggagagccuggugaucaucagccccagcguggccgaccuggaccccuacgacaagagccugcacagcagaguguuccccaacggcaagugcagcggcaucaccaucagcagcaccuacugccccaccaaccacuacuacaccaucuggcugcccgagaaccccagacugggcaccagcugcgacaucuucaccaacagcagaggcaagagagccagcaagggcagcaagaccugcggcuucguggacgagagaggccuguacaagagccugaagggcgccugcaagcugaagcugugcggcgugcugggccugagacugauggacggcaccuggguggccaugcaggccagcgacgagaccaaguggugcccccccgaccagcuggugaaccugcacgacuucagaagcgacgagaucgagcaccuggugguggaggagcuggugaagaagagagaggagugccuggacgcccuggagagcaucaugaccaccaagagcgugagcuucagaagacugagccaccugagaaagcuggugcccggcuucggcaaggccuacaccaucuucaacaagacccugauggaggccgacgcccacuacaagagcgugagaaccuggaacgagaucauccccagcaagggcugccugagagugggcggcagaugccacccccacgugaacggcguguucuucaacggcaucauccugggccccgacggcagagugcugauccccgagaugcagagcagccugcugcagcagcacauggagcugcuggagagcagcgugaucccccugaugcacccccuggccgaccccagcaccguguucaaggacggcgacgaggccgagaacuucguggaggugcaccugcccgacgugcacaagcagaucagcggcguggaccugggccugcccaacuggggcaaguacgugcuggugagcgccggcgugcugaucgcccugaugcugaucaucuuccugaugaccugcugcggcagagugaacagacccaagagcacccagcacaaccugggcggcaccggcagagaggugagcgugaccccccagagcggcaaggugaucagcagcugggagagcuacaagagcggcggcgagaccagacuguga

SEQ ID NO: 191171 - RNA, 1575 nt, Artificial Sequence
  derived and/or modified CDS sequence (opt4) from glycoprotein__RABV__GU937028.1
auggugccccaggcccugcuguucgugccccugcugguguucagcaugugcuucggcaaguuccccaucuacaccauccccgacaagcugggccccuggagccccaucgacauccaccaccugagcugccccaacaaccuggugguggaggacgagggcugcaccaaccugagcggcuucagcuacauggagcugaaggugggcuacaucagcgccaucaaggugaacggcuucaccugcaccggcguggugaccgaggccgagaccuacaccaaccuggugggcuacgugaccaccaccuucaagagaaagcacuucagacccacccccgacgccugcagagccgccuacaacuggaagauggccggcgaccccagauacgaggagagccugcacaaccccuaccccgacuaccacuggcugagaaccgugaagaccaccaaggagagccuggugaucaucagccccagcguggccgaccuggaccccuacgacaagagccugcacagcagaguguuccccaacggcaagugcagcggcaucaccaucagcagcaccuacugccccaccaaccacgacuacaccaucuggcugcccgagaaccccagacugggcaccagcugcgacaucuucaccaacagcagaggcaagagagccagcaagggcagcaagaccugcggcuucguggacgagagaggccuguacaagagccugaagggcgccugcaagcugaagcugugcggcgugcugggccugagacugauggacggcaccuggguggccaugcaggccagcgacgagaccaaguggugcccccccgaccagcuggugaaccugcacgacuucagaagcgacgagaucgagcaccuggugguggaggagcuggugaagaagagagaggagugccuggacgcccuggagagcaucaugaccaccaagagcgugagcuucagaagacugagccaccugagaaagcuggugcccggcuucggcaaggccuacaccaucuucaacaagacccugauggaggccgacgcccacuacaagagcgugagaaccuggaacgagaucauccccagcaagggcugccugagagugggcggcagaugccacccccacgugaacggcguguucuucaacggcaucauccugggccccgacggccacgugcugauccccgagaugcagagcagccugcugcagcagcacauggagcugcuggagagcagcgugaucccccugaugcacccccuggccgaccccagcaccguguucaaggacggcgacgaggccgagaacuucguggaggugcaccugcccgacgugcacaagcagaucagcggcguggaccugggccugcccaacuggggcaaguacgugcuggugagcgccggcgugcugaucgcccugaugcugaucaucuuccugaugaccugcugcggcagagugaacagacccaagagcacccagcacaaccugggcggcaccggcagagaggugagcgugaccccccagagcggcaaggugaucagcagcagagagagcuacaagagcggcggcgagaccagacuguga

SEQ ID NO: 191172 - RNA, 1575 nt, Artificial Sequence
  derived and/or modified CDS sequence (opt4) from glycoprotein__RABV__GU937029.1
auggugccccaggcccugcuguucgugccccugcugguguucagcaugugcuucggcaaguuccccaucuacaccauccccgacaagcugggccccuggagccccaucgacauccaccaccugagcugccccaacaaccuggugguggaggacgagggcugcaccaaccugagcggcuucagcuacauggagcugaaggugggcuacaucagcgccaucaaggugaacggcuucaccugcaccggcguggugaccgaggccgagaccuacaccaaccuggugggcuacgugaccaccaccuucaagagaaagcacuucagacccacccccgacgccugcagagccgccuacaacuggaagauggccggcgaccccagauacgaggagagccugcacaaccccuaccccgacuaccacuggcugagaaccgugaagaccaccaaggagagccuggugaucaucagccccagcguggccgaccuggaccccuacgacaagagccugcacagcagaguguuccccaacggcaagugcagcggcaucaccaucagcagcaccuacugccccaccaaccacgacuacaccaucuggcugcccgagaaccccagacugggcaccagcugcgacaucuucaccaacagcagaggcaagagagccagcaagggcagcaagaccugcggcuucguggacgagagaggccuguacaagagccugaagggcgccugcaagcugaagcugugcggcgugcugggccugagacugauggacggcaccuggguggccaugcaggccagcgacgagaccaaguggugcccccccgaccagcuggugaaccugcacgacuucagaagcgacgagaucgagcaccuggugguggaggagcuggugaagaagagagaggagugccuggacgcccuggagagcaucaugaccaccaagagcgugagcuucagaagacugagccaccugagaaagcuggugcccggcuucggcaaggccuacaccaucuucaacaagacccugauggaggccgacgcccacuacaagagcgugagaaccugggacgagaucauccccagcaagggcugccugagagugggcggcagaugccacccccacgugaacggcguguucuucaacggcaucauccugggccccgacggccacgugcugauccccgagaugcagagcagccugcugcagcagcacauggagcugcuggagagcagcgugaucccccugaugcacccccuggccgaccccagcaccguguucaaggacggcgacgaggccgagaacuucguggaggugcaccugcccgacgugcacaagcagaucagcggcguggaccugggccugcccaacuggggcaaguacgugcuggugagcgccggcgugcugaucgcccugaugcugaucauccugcugaugaccugcugcggcagagugaacagacccaagagcacccagcacaaccugggcggcaccggcagagaggugagcgugaccccccagagcggcaaggugaucagcagcugggagagcuacaagagcggcggcgagaccagacuguga

SEQ ID NO: 191173 - RNA, 1575 nt, Artificial Sequence
  derived and/or modified CDS sequence (opt4) from glycoprotein__RABV__GU937030.1
auggugccccaggcccugcuguucgugccccugcugguguucagcaugugcuucggcaaguuccccaucuacaccauccccgacaagcugggccccuggagccccaucgacauccaccaccugagcugccccaacaaccuggugguggaggacgagggcugcaccaaccugagcggcuucagcuacauggagcugaaggugggcuacaucagcgccaucaaggugaacggcuucaccugcaccggcguggugaccgaggccgagaccuacaccaacuucgugggcuacgugaccaccaccuucaagagaaagcacuucagacccacccccgacgccugcagagccgccuacaacuggaagauggccggcgaccccagauacgaggagagccugcacaaccccuaccccgacuaccacuggcugagaaccgugaagaccaccaaggagagccuggugaucaucagccccagcguggccgaccuggaccccuacgacaagagccugcacagcagaguguuccccaacggcaagugcagcggcaucaccaucagcagcaccuacugccccaccaaccacgacuacaccaucuggcugcccgagaaccccagacugggcaccagcugcgacaucuucaccaacagcagaggcaagagagccagcaagggcagcaagaccugcggcuucguggacgagagaggccuguacaagagccugaagggcgccugcaagcugaagcugugcggcgugcugggccugagacugauggacggcaccuggguggccaugcaggccagcgacgagaccaaguggugcccccccgaccagcuggugaaccugcacgacuucagaagcgacgagaucgagcaccuggugguggaggagcuggugaagaagagagaggagugccuggacgcccuggagagcaucaugaccaccaagagcgugagcuucagaagacugagccaccugagaaagcccgugcccggcuucggcaaggccuacaccaucuucaacaagacccugauggaggccgacgcccacuacaagagcgugagaaccuggaacgagaucauccccagcaagggcugccugagagugggcggcagaugccacccccacgugaacggcguguucuucaacggcaucauccugggccccgacggccacgugcugauccccgagaugcagagcagccugcugcagcagcacauggagcugcuggagagcagcgugaucccccugaugcacccccuggccgaccccagcaccguguucaaggacggcgacgaggccgagaacuucguggaggugcaccugcccgacgugcacaagcagaucagcggcguggaccugggccugcccaacuggggcgaguacgugcuggugagcgccggcgugcugaucgcccugaugcugaucaucuuccugaugaccugcugcggcagagugaacagacccaagagcacccagcacaaccugggcggcaccggcagagaggugagcgugaccccccagagcggcaaggugaucagcagcugggagagcuacaagagcggcggcgagaccagacuguga

SEQ ID NO: 191174 - RNA, 1575 nt, Artificial Sequence
  derived and/or modified CDS sequence (opt4) from glycoprotein__RABV__GU937031.1
auggugccccaggcccugcuguucgugccccugcugguguucagcaugugcuucggcaaguuccccaucuacaccauccccgacaagcugggccccuggagccccaucgacauccaccaccugagcugccccaacaaccuggugguggaggacgagggcugcaccaaccugagcggcuucagcuacauggagcugaaggugggcuacaucagcgccaucaaggugaacggcuucaccugcaccggcguggugaccgaggccgagaccuacaccaacuucgugggcuacgugaccaccaccuucaagagaaagcacuucagacccacccccgacgccugcagagccgccuacaacuggaagauggccggcgaccccagauacgaggagagccugcacaaccccuaccccgacuaccacuggcugagaaccgugaagaccaccaaggagagccuggugaucaucagccccagcguggccgaccuggaccccuacgacaagagccugcacagcagaguguuccccaacggcagaugcagcggcaucaccaucagcagcaccuacugccccaccaaccacgacuacaccaucuggcugcccgagaaccccagacugggcaccagcugcgacaucuucaccaacagcagaggcaagagagccagcaagggcagcaagaccugcggcuucguggacgagagaggccuguacaagagccugaagggcgccugcaagcugaagcugugcggcgugcugggccugagacugauggacggcaccuggguggccaugcaggccagcgacgagaccaaguggugcccccccgaccagcuggugaaccugcacgacuucagaagcgacgagaucgagcaccuggugguggaggagcuggugaagaagagagaggagugccuggacgcccuggagagcaucaugaccaccaagagcgugagcuucagaagacugagccaccugagaaagcuggugcccggcuucggcaaggccuacaccaucuucaacaagacccugauggaggccgacgcccacuacaagagcgugagaaccuggaacgagaucauccccagcaagggcugccugagagugggcggcagaugccacccccacgugaacggcguguucuucaacggcaucauccugggccccgacggccacgugcugauccccgagaugcagagcagccugcugcagcagcacauggagcugcuggagagcagcgugaucccccugaugcacccccuggccgaccccagcaccguguucaaggacggcgacgaggccgagaacuucguggaggugcaccugcccgacgugcacaagcagaucagcggcguggaccugggccugcccaacuggggcaaguacgugcuggugagcgccggcgugcugaucgcccugaugcugaucaucuuccugaugaccugcugcggcagagugaacagacccaagagcacccagcacaaccugggcggcaccggcagagaggugagcgugaccccccagagcggcaaggugaucagcagcugggagagcuacaagagcggcggcgagaccagacuguga

SEQ ID NO: 191175 - RNA, 1575 nt, Artificial Sequence
  derived and/or modified CDS sequence (opt4) from glycoprotein__RABV__GU937032.1
auggugccccaggcccugcuguucgugccccugcuggccuucagcaugugcuucggcaaguuccccaucuacaccauccccgacaagcugggccccuggagccccaucgacauccaccaccugagcugccccaacaaccuggugguggaggacgagggcugcaccaaccugagcggcuucagcuacauggagcugaaggugggcuacaucagcgccaucaaggugaacggcuucaccugcaccggcguggugaccgaggccgagaccuacaccaacuucgugggcuacgugaccaccaccuucaagagaaagcacuucagacccacccccgacgccugcagagccgccuacaacuggaagauggccggcgaccccagauacgaggagagccugcacaaccccuaccccgacuaccacuggcugagaaccgugaagaccaccaaggagagccuggugaucaucagccccagcguggccgaccuggaccccuacgacaagagccugcacagcagaguguuccccaacggcaagugcagcggcaucaccaucagcagcaccuacugccccaccaaccacgacuacaccaucuggcugcccgagaaccccagacugggcaccagcugcgacaucuucaccaacagcagaggcaagagagccagcaagggcagcaagaccugcggcuucguggacgagagaggccuguacaagagccugaagggcgccugcaagcugaagcugugcggcgugcugggccugagacugauggacgagaccuggguggccaugcaggccagcgacgagaccaaguggugcccccccgaccagcuggugaaccugcacgacuucagaagcgacgagaucgagcaccuggugguggaggagcuggugaagaagagagaggagugccuggacgcccuggagagcaucaugaccaccaagagcgugagcuucagaagacugagccaccugagaaagcuggugcccggcuucggcaaggccuacaccaucuucaacaagacccugauggaggccgacgcccacuacaagagcgugagaaccuggaacgagaucauccccagcaagggcugccugagagugggcggcagaugccacccccacgugaacggcguguucuucaacggcaucauccugggccccgacggccacgugcugauccccgagaugcagagcagccugcugcagcagcacauggagcugcuggagagcagcgugaucccccugaugcacccccuggccgaccccagcaccguguucaaggacggcgacgaggccgagaacuucguggaggugcaccugcccgacgugcacaagcagaucagcggcguggaccugggccugcccaacuggggcaaguacgugcuggugagcgccggcgugcugaucgcccugaugcugaucaucuuccugaugaccugcugcggcagagugaacagacccaagagcacccagcacaaccugggcggcaccggcagagaggugagcgugaccccccagagcggcaaggugaucagcagcugggagagcuacaagagcggcggcgagaccagacuguga

SEQ ID NO: 191176 - RNA, 1575 nt, Artificial Sequence
  derived and/or modified CDS sequence (opt4) from glycoprotein__RABV__GU937033.1
auggugccccaggcccugcuguucgugccccugcugguguucagcaugugcuucggcaaguuccccaucuacaccauccccgacaagcugggccccuggagccccaucgacauccaccaccugagcugccccaacaaccuggugguggaggacgagggcugcaccaaccugagcggcuucagcuacauggagcugaaggugggcuacaucagcgccaucaaggugaacggcuucaccugcaccggcguggugaccgaggccgagaccuacaccaacuucgugggcuacgugaccaccaccuucaagagaaagcacuucagacccacccccgacgccugcagagccgccuacaacuggaagauggccggcgaccccagauacgaggagagccugcacaaccccuaccccgacuaccacuggcugagaaccgugaagaccaccaaggagagccuggugaucaucagccccagcguggccgaccuggaccccuacgacaagagccugcacagcagaguguuccccaacggcaagugcagcggcaucaccaucagcagcaccuacugccccaccaaccacgacuacaccaucuggcugcccgagaaccccagacugggcaccagcugcgacaucuucaccaacagcagaggcaagagagccagcaagggcagcaagaccugcggcuucguggacgagagaggccuguacaagagccugaagggcgccugcaagcugaagcugugcggcgugcugggccugagacugauggacggcaccuggguggccaugcaggccagcgacgagaccaaguggugcccccccgaccagcuggugaaccugcacgacuucagaagcgacgagaucgagcaccuggugguggaggagcuggugaagaagagagaggagugccuggacgcccuggagagcaucaugaccaccaagagcgugagcuucagaagacugagccaccugagaaagcuggugcccggcuucggcaaggccuacaccaucuucaacaagacccugauggaggccgacgcccaccacaagagcgugagaaccuggaacgagaucauccccagcaagggcugccugagagugggcggcagaugccacccccacgugaacggcguguucuucaacggcaucauccugggccccgacggccacgugcugauccccgagaugcagagcagccugcugcagcagcacauggagcugcuggagagcagcguggugccccugaugcacccccuggccgaccccagcaccgugcugaaggacggcgacgaggccgagaacuucguggaggugcaccugcccgacgugcacaagcagaucagcggcguggaccugggccugcccaacuggggcaaguacgugcuggugagcgccggcgugcugaucgcccugaugcugaucaucuuccugaugaccugcugcggcagagugaacagacccaagagcacccagcacaaccugggcggcaccggcagaaaggugagcgugaccccccagagcggcaaggugaucagcagcugggagagcuacaagagcggcggcgagaccagacuguga

SEQ ID NO: 191177 - RNA, 1575 nt, Artificial Sequence
  derived and/or modified CDS sequence (opt4) from glycoprotein__RABV__GU937034.1
auggugccccaggcccugcuguucgugccccugcugguguucagcaugugcuucggcaaguuccccaucuacaccauccccgacaagcugggccccuggagccccaucgacauccaccaccugagcugccccaacaaccuggugguggaggacgagggcugcaccaaccugagcggcuucagcuacauggagcugaaggugggcuacaucagcgccaucaaggugaacggcuucaccugcaccggcguggugaccgaggccgagaccuacaccaacuucgugggcuacgugaccaccaccuucaagagaaagcacuucagacccacccccgacgugugcagagccgccuacaacuggaagauggccggcgaccccagauacgaggagagccugcacaaccccuaccccgacuaccacuggcugagaaccgugaagaccaccaaggagagccuggugaucaucagccccagcguggccgaccuggaccccuacgacaagagccugcacagcagaguguuccccaacggcaagugcagcggcaucaccaucagcagcaccuacugccccaccaaccacgacuacaccaucuggcugcccgagaaccccagacugggcacccccugcgacaucuucaccaacagcagaggcaagagagccagcaagggcagcaagaccugcggcuucguggacgagagaggccuguacaagagccugaagggcgccugcaagcugaagcugugcggcgugcugggccugagacugauggacggcaccuggguggccaugcaggccagcgacgagaccaaguggugcccccccgaccagcuggugaaccugcacgacuucagaagcgacgagaucgagcaccuggugguggaggagcuggugaagaagagagaggagugccuggacgcccuggagagcaucaugaccaccaagagcgugagcuucagaagacugagccaccugagaaagcuggugcccggcuucggcaaggccuacaccaucuucaacaagacccugauggaggccgacgcccacuacaagagcgugagaaccuggaacgagaucauccccagcaagggcugccugagagugggcggcagaugccacccccacgugaacggcguguucuucaacggcaucauccugggccccgacggccacgugcugauccccgagaugcagagcagccugcugcagcagcacauggagcugcuggagagcagcgugaucccccugaugcacccccuggccgaccccagcaccguguucaaggacggcgacgaggccgagaacuucguggaggugcaccugcccgacgugcacaagcagaucagcggcguggaccugggccugcccaacuggggcaaguacgugcuggugagcgccggcgugcugaucgcccugaugcugaucaucuuccugaugaccugcugcggcagagugaaccagcccaagagcacccagcacaaccugggcggcaccggcagagaggugagcgugaccccccagagcggcaaggugaucagcagcugggagagcuacaagagcggcggcgagaccagacuguga

SEQ ID NO: 191178 - RNA, 1575 nt, Artificial Sequence
  derived and/or modified CDS sequence (opt4) from glycoprotein__RABV__HE801606.1
auggugccccaggugcugcuguucgugccccugcugguguucagcaugugcuucggcaaguuccccaucuacaccauccccgacaagcugggccccuggagccccaucgacauccaccaccugagcugccccaacaaccuggugguggaggacgagggcugcaccaaccugagcggcuucagcuacauggagcugaaggugggcuacaucagcgccaucaaggugaacggcuucaccugcaccggcguggugaccgaggccgagaccuacaccaacuucgugggcuacgugaccaccaccuucaagagaaagcacuucagacccacccccgacgccugcagagccgccuacaacuggaagcuggccggcgaccccagauacgaggagagccugcacaaccccuaccccgacuaccacuggcugagaaccgugaagaccaccaaggagagccuggugaucaucagccccagcguggccgaccuggaccccuacgacaagagccugcacagcagaguguuccccagcggcaagugccugggcaucaccaucagcagcaccuacugcagcaccaaccacgacuacaccaucuggaugcccgagaaccccagacugggcaccagcugcgacaucuucaccaacagcagaggcaagagagccagcaagggcagcaagaccugcggcuucguggacgagagaggccuguacaagagccugaagggcgccugcaagcugaagcugugcggcgugcugggccugagacugauggacggcaccuggguggccaugcagaccagcgacgagaccaaguggugcccccccgaccagcuggugaaccugcacgacuucagaagcgacgagaucgagcaccuggugguggaggagcuggugaagaagagagaggagugccuggacgcccuggagagcaucaugaccaccaagagcgugagcuucagaagauucagccaccugagaaagcuggugcccggcuucggcaaggccuaccccaucuucaacaagacccugauggaggccgacgcccacuacaagagcgugagaaccuggaacgagaucauccccagcaagggcugccugagagugggcggcagaugccacccccacgugaacggcguguucuucaacggcaucauccugggccccgacggccacgugcugauccccgagaugcagagcagccugcugcagcagcacauggagcugcuggagagcagcgugaucccccugaugcacccccuggccgaccccagcaccguguucaaggacggcgacgaggccgaggacuucguggaggugcaccugcccgacgugcacaagcagaucagcggcguggaccugggccugcccagcuggggcaaguacgugcuggugagcgccggcgugcugguggugcugaugcugaccaucuucaccaugaccugcugcggcagagugcacagacccaagagcacccagcacagccugggcggcaccggcagaaaggugagcgugaccagccagagcggcaaggugaucagcagcugggagagcuacaagagcggcggcgagaccagacuguga

SEQ ID NO: 191179 - RNA, 1575 nt, Artificial Sequence
  derived and/or modified CDS sequence (opt4) from glycoprotein__RABV__HE801607.1
auggugccccaggugcacauguucgugccccugcugguguacgccaugugcuucggcaaguuccccaucuacaccauccccgacaagcugggccccuggagccccaucgacauccaccaccugagcugccccaacaaccuggugguggaggacgagggcugcaccaaccugagcggcuucagcuacauggagcugaaggugggcuacaucagcgccaucaaggugagcggcuucaccugcaccggcguggugaccgaggccgagaccuacaccaacuucgugggcuacgugaccaccaccuucaagagaaagcacuucagacccacccccgacgccugcagagccgccuacaacuggaagcuggccggcgaccccagauacgaggagagccugcacaaccccuaccccgacuaccacuggcugagaaccgugaagaccaccaaggagagccuggugaucaucagccccagcguggccgaccuggaccccuacgacaagagccugcacagcagaguguuccccagcggcaagugccugggcaucaccaucagcagcaccuacugcagcaccaaccacgacuacaccaucuggaugcccgagaaccccagacugggcaccagcugcgacaucuucaccaacagcagaggcaagagagccagcaagggcagcaagaccugcggcuucguggacgagagaggccuguacaagagccugaagggcgccugcaagcugaagcugugcggcgugcugggccugagacugauggacggcaccuggguggccaugcagaccagcgacgagaccaaguggugcccccccgaccagcuggugaaccugcacgacuucagaagcgacgagaucgagcaccuggugguggaggagcuggugaagaagagagaggagugccuggacgcccuggagagcaucaugaccaccaagagcgugagcuucagaagacugagccaccugagaaagcuggugcccggcuucggcaaggccuacaccaucuucaacaagacccugauggaggccgacgcccacuacaagagcgugagaaccuggaacgagaucauccccagcaagggcugccugagagugggcggcagaugccacccccacgugaacggcguguucuucaacggcaucauccugggccccgacggccacgugcugauccccgagaugcagagcagccugcugcagcagcacauggagcugcuggagagcagcgugaucccccugaugcacccccuggccgaccccagcaccguguucaaggacggcgacgaggccgaggacuucguggaggugcaccugcccgacgugcacaagcagaucagcggcguggaccugggccugcccagcuggggcaaguacgugcuggugagcgccggcgugcugguggugcugaugcuggccaucuucaucaugaccugcugcggcagagugcacagacccaagagcacccagcacagccugggcggcaccggcagaaaggccagcgugaccagccagagcggcaaggugaucagcagcugggagagcuacaagagcggcggcgagaccagacuguga

SEQ ID NO: 191180 - RNA, 1575 nt, Artificial Sequence
  derived and/or modified CDS sequence (opt4) from glycoprotein__RABV__HE801608.1
auggugccccaggugcugcuguucgugccccugcugguguucagcaugugcuucggcaaguuccccaucuacaccauccccgacaagcugggccccuggagccccaucgacauccaccaccugagcugccccaacaaccuggugguggaggacgagggcugcaccaaccugagcggcuucagcuacauggagcugaaggugggcuacaucagcgccaucaaggugaacggcuucaccugcaccggcguggugaccgaggccgagaccuacaccaacuucgugggcuacgugaccaccaccuucaagagaaagcacuucagacccacccccgacgccugcagaaccgccuacaacuggaagcuggccggcgaccccagauacgaggagagccugcacaaccccuaccccgacuaccacuggcugagaaccgugaagaccaccaaggagagccuggugaucaucagccccagcguggccgaccuggaccccuacgacaagagccugcacagcagaguguuccccagcggcaagugccugggcaucaccaucagcagcaccuacugcagcaccaaccacgacuacaccaucuggaugcccgagaaccccagacugggcaccagcugcgacaucuucaccaacagcagaggcaagagagccagcaagggcagcaagaccugcggcuucguggacgagagaggccuguacaagagccugaagggcgccugcaagcugaagcugugcggcgugcugggccugagacugauggacggcaccuggguggccaugcagaccagcgacgagaccaaguggugcccccccgaccagcuggugaaccugcacgacuucagaagcgacgagaucgagcaccuggugguggaggagcuggugaagaagagagaggagugccuggacgcccuggagagcaucaugaccaccaagagcgugagcuucagaagacugagccaccugagaaagcuggugcccggcuucggcaaggccuacaccaucuucaacaagacccugauggaggccgacgcccacuacaagagcgugagaaccuggaacgagaucauccccagcaagggcugccugagagugggcggcagaugccacccccacgugaacggcguguucuucaacggcaucauccugggccccgacggccacgugcugauccccgagaugcagagcagccugcugcagcagcacauggagcugcuggagagcagcgugaucccccugaugcacccccuggccgaccccagcaccguguucaaggacggcgacgaggccgaggacuucguggaggugcaccugcccgacgugcacaagcagaucagcggcguggaccugggccugcccagcuggggcaaguacgugcuggugagcgccggcgugcugguggugcugaugcugaccaucuucaucaugaccugcugcggcagagugcacagacccaagagcacccagcacagccugggcggcaccggcagaaaggugagcgugaccagccagagcggcaaggugaucagcagcugggagagcuacaagagcggcggcgagaccagacuguga

SEQ ID NO: 191181 - RNA, 1575 nt, Artificial Sequence
  derived and/or modified CDS sequence (opt4) from glycoprotein__RABV__HE801609.1
auggugccccaggugcugcuguucgugccccugcugguguucagcaugugcuucggcaaguuccccaucuacaccauccccgacaagcugggccccuggagccccaucgacauccaccaccugagcugccccaacaaccuggugguggaggacgagggcugcaccaaccugagcggcuucagcuacauggagcugaaggugggcuacaucagcgccaucaaggugaacggccugaccugcaccggcguggugaccgaggccgagaccuacaccaacuucgugggcuacgugaccaccaccuucaagagaaagcacuucagacccacccccgacgccugcagagccgccuacaacuggaagcuggccggcgaccccagauacgaggagagccugcacaaccccuaccccgacuaccacuggcugagaaccgugaagaccaccaaggagagccuggugaucaucagccccagcguggccgaccuggaccccuacgacaagagccugcacagcagaguguuccccagcggcaagugccugggcaucaccaucagcagcaccuacugcagcaccaaccacgacuacaccaucuggaugcccgagaaccccagacugggcaccagcugcgacaucuucaccaacagcagaggcaagagagccagcaagggcagcaagaccugcggcuucguggacgagagaggccuguacaagagccugaagggcgccugcaagcugaagcugugcggcgugcugggccccagacugauggacggcaccuggguggccaugcagaccagcgacgagaccaaguggugcccccccgaccagcuggugaaccugcacgacuucagaagcgacgagaucgagcaccuggugguggaggagcuggugaagaagagagaggagugccuggacgcccuggagagcaucaugaccaccaagagccugagcuucagaagacugagccaccugagaaagcuggugcccggcuucggcaaggccuacaccaucuucaacaagacccugauggaggccgacgcccacuacaagagcgugagaaccuggaacgagaucauccccagcaagggcugccugagagugggcggcagaugccacccccacgugaacggcguguucuucaacggcaucauccugggccccgacggccacgugcugauccccgagaugcagagcagccugcugcagcagcacauggagcugcuggagagcagcgugaucccccugaugcacccccuggccgaccccagcaccguguucaaggacggcgacgaggccgaggacuucguggaggugcaccugcccgacgugcacaagcagaucagcggcguggaccugggccugcccagcuggggcaaguacgugcuggugagcgccggcgugcugguggugcugaugcugaccaucuucaucaugaccugcugcggcagagugcacagacccaagagcacccagcacagccugggcggcaucggcagaaaggugagcgugaccagccagagcggcaaggugaucagcagcugggagagcuacaagagcggcggcgagaccagacuguga

SEQ ID NO: 191182 - RNA, 1575 nt, Artificial Sequence
  derived and/or modified CDS sequence (opt4) from glycoprotein__RABV__HE801610.1
auggugccccaggugcugcuguucgugccccugcugguguucagcaugugcuucggcaaguuccccaucuacaccauccccgacaagcugggccccuggagccccaucgacauccaccaccugagcugccccaacaaccuggugguggaggacgagggcugcaccaaccugagcggcuucagcuacauggagcugaaggugggcuacaucagcgccaucaaggugaacggcuucaccugcaccggcguggugaccgaggccgagaccuacaccaacuucgugggcuacgugaccaccaccuucaagagaaagcacuucagacccacccccgacgccugcagagccgccuacaacuggaagcuggccggcgaccccagauacgaggagagccugcugaaccccuaccccgacuaccacuggcugagaaccgugaagaccaccaaggagagccuggugaucaucagccccagcguggccgaccuggaccccuacgacaagagccugcacagcaagguguuccccagcggcaagugccugggcaucaccaucagcagcaccuacugcagcaccaaccacgacuacaccaucuggaugcccgagaaccccagacugggcaccagcugcgacaucuucaccaacagcagaggcaagagagccagcaagggcagcaagaccugcggcuucguggacgagagaggccuguacaagagccugaagggcgccugcaagcugaagcugugcggcgugcugggccugagacugauggacggcaccuggguggccaugcagaccagcgacgagaccaaguggugcccccccgaccagcuggugaaccugcacgacuucagaagcgacgagaucgagcaccuggugguggaggagcuggugaagaagagagaggagugccuggacgcccuggagagcaucaugaccaccaagagcgugagcuucagaagacugagccaccugagaaagcuggugcccggcuucggcaaggccuacaccaucuucaacaagacccugauggaggccgacgcccacuacaagagcgugagaaccuggaacgagaucauccccagcaagggcugccugagagugggcggcagaugccacccccacgugaacggcguguucuucaacggcaucauccugggccccgacggccacgugcugauccccgagaugcagagcagccugcugcagcagcacauggagcugcuggagagcagcgugaucccccugaugcacccccuggccgaccccagcaccguguucaaggacggcgacgaggccgaggacuucguggaggugcaccugcccgacgugcacaagcagaucagcggcguggaccugggccugcccagcuggggcaaguacgugcuggugagcgccggcgugcugguggugcugaugcuggccaucuucaucaugaccugcugcggcagagugcaccagcccaagagcacccagcacagccugggcggcaccggcagaaaggugagcgugaccagccagagcggcaaggugaucagcagcugggagagcuacaagagcggcggcgagaccagacuguga

SEQ ID NO: 191183 - RNA, 1575 nt, Artificial Sequence
  derived and/or modified CDS sequence (opt4) from glycoprotein__RABV__HE801611.1
auggugccccaggugcugcuguucgugccccugcugguguucagcaugugcuucggcaaguuccccaucuacaccauccccgacaagcugggccccuggagccccaucgacauccaccaccugagcugccccaacaaccuggugguggaggacgagggcugcaccaaccugagcggcuucagcuacauggagcugaaggugggcuacaucagcgccaucaaggugaacggcuucaccugcaccggcguggugaccgaggccgagaccuacaccaacuucgugggcuacgugaccaccaccuucaagagaaagcacuucagacccacccccgacgccugcagagccgccuacaacuggaagcuggccggcgaccccagauacgaggagagccugcacaaccccuaccccgacuaccacuggcugagaaccgugaagaccaccaaggagagccuggugaucaucagccccagcguggccgaccuggaccccuacgacaagagccugcacagcagaguguuccccagcggcaagugccugggcaucaccaucagcagcaccuacugcagcaccaaccacgacuacaccaucuggaugcccgagaaccccagacugggcaccagcugcgacaucuucaccaacagcagaggcaagagagccagcaagggcagcaagaccugcggcuucguggacgagagaggccuguacaagagccugaagggcgccugcaagcugaagcugugcggcgugcugggccugagacugauggacggcaccuggguggccaugcagaccagcgacgagaccaaguggugcccccccgaccagcuggugaaccugcacgacuucagaagcgacgagaucgagcaccuggugguggaggagcuggugaagaagagagaggagugccuggacgcccuggagagcaucaugaccaccaagagcgugagcuucagaagacugagccaccugagaaagcuggugcccggcuucggcaaggccuacaccaucuucaacaagacccugauggaggccgacgcccacuacaagagcaucagaaccuggaacgagaucauccccagcaagggcugccugagagugggcggcagaugccacccccacgugaacggcguguucuucaacggcaucauccugggccccgacggccacgugcugauccccgagaugcagagcagccugcugcagcagcacauggagcugcuggagagcagcgugaucccccugaugcacccccuggccgaccccagcaccguguucaaggacggcgacgaggccgaggacuucguggaggugcaccugcccgacgugcacaagcagaucagcggcguggaccugggccugcccagcuggggcaaguacgugcuggugagcgccggcgugcugguggugcugaugcugaccaucuucaucaugaccugcugcggcagagugcacagacccaagagcaugcagcacagccugggcggcaccggcagaaaggugagcgugaccagccagagcggcaaggugaucagcagcugggagagcuacaagagcggcggcgagaccagacuguga

SEQ ID NO: 191184 - RNA, 1575 nt, Artificial Sequence
  derived and/or modified CDS sequence (opt4) from glycoprotein__RABV__HE801612.1
auggugccccaggugcugcuguucgugccccugcugguguucagcaugugcuucggcaaguuccccaucuacaccauccccgacaagcugggccccuggagccccaucgacauccaccaccugagcugccccaacaaccuggugguggaggacgagggcugcaccaaccugagcggcuucagcuacauggagcugaaggugggcuacaucagcgccaucaaggugaacggcuucaccugcaccggcguggugaccgaggccgagaccuacaccaacuucgugggcuacgugaccaccaccuucaagagaaagcacuucagacccacccccgacgccugcagagccgccuacaacuggaagcuggccggcgaccccagauacgaggagagccugcacaaccccuaccccgacuaccacuggcugagaaccgugaagaccaccaaggagagccuggugaucaucagccccagcguggccgaccuggaccccuacgacaagagccugcacagcagaguguuccccagcggcaagugccugggcaucaccaucagcagcaccuacugcagcaccaaccacgacuacaccaucuggaugcccgagaaccccagacugggcaccagcugcgacaucuucaccaacagcagaggcaagagagccagcaagggcagcaagaccugcggcuucguggacgagagaggccuguacaagagccugaagggcgccugcaagcugaagcugugcggcgugcugggccugagacugauggacggcaccuggguggccaugcagaccagcgacgagaccaaguggugcccccccgaccagcuggugaaccugcacgacuucagaagcgacgagaucgagcaccuggugguggaggagcuggugaagaagagagaggagugccuggacgcccuggagagcaucaugaccaccaagagcgugagcuucagaagacugagccaccugagaaagcuggugcccggcuucggcaaggccuacaccaucuucaacaagacccugauggaggccgacgcccacuacaagagcgugagaaccuggaacgagaucauccccagcaagggcugccugagagugggcggcagaugccacccccacgugaacggcguguucuucaacggcaucauccugggccccgacggccacgugcugauccccgagaugcagagcagccugcugcagcagcacauggagcugcuggagagcagcgugaucccccugaugcacccccuggccgaccccagcaccguguucaaggacggcgacgaggccgaggacuucguggaggugcaccugcccgacgugcacaagcagaucagcggcguggaccugggccugcccagcuggggcaaguacgugcuggugagcgccggcgugcugguggugcugaugcugaccaucuucaucaugaccugcugcggcagagugcacagacccaagagcacccagcacagccugggcggcaccggcagaaaggugagcgugaccagccagagcggcaaggugaucagcagcugggagagcuacaagagcggcggcgagaccagacuguga

SEQ ID NO: 191185 - RNA, 1575 nt, Artificial Sequence
  derived and/or modified CDS sequence (opt4) from glycoprotein__RABV__HE801613.1
auggugccccaggugcugcuguucgugccccugcugguguucagcaugugcuucggcaaguuccccaucuacaccauccccgacaagcugggccccuggagccccaucgacauccaccaccugagcugccccaacaaccuggugguggaggacgagggcugcaccaaccugagcggcuucagcuacauggagcugaaggugggcuacaucagcgccaucaaggugaacggcuucaccugcaccggcguggugaccgaggccgagaccuacaccaacuucgugggcuacgugaccaccaccuucaagagaaagcacuucagacccacccccgacgccugcagagccgccuacaacuggaagcuggccggcgaccccagauacgaggagagccugcacaaccccuaccccgacuaccacuggcugagaaccgugaagaccaccaaggagagccuggugaucaucagccccagcguggccgaccuggaccccuacgacaagagccugcacagcaagguguuccccagcggcaagugccugggcaucaccaucagcagcaccuacugcagcaccaaccacgacuacaccaucuggaugcccgagaaccccagacugggcaccagcugcgacaucuucaccaacagcagaggcaagagagccagcaagggcagcaagaccugcggcuucguggacgagagaggccuguacaagagccugaagggcgccugcaagcugaagcugugcggcgugcugggccugagacugauggacggcaccuggguggccaugcagaccagcgacgagaccaaguggugcccccccgaccagcuggugaaccugcacgacuucagaagcgacgagaucgagcaccuggugguggaggagcuggugaagaagagagaggagugccuggacgcccuggagagcaucaugaccaccaagagcgugagcuucagaagacugagccaccugagaaagcuggugcccggcuucggcaaggccuacaccaucuucaacaagacccugauggaggccgacgcccacuacaagagcgugagaaccuggaacgagaucauccccagcaagggcugccugagagugggcggcagaugccacccccacgugaacggcguguucuucaacggcaucauccugggccccgacggccacgugcugauccccgagaugcagagcagccugcugcagcagcacauggagcugcuggagagcagcgugaucccccugaugcacccccuggccgaccccagcaccguguucaaggacggcgacgaggccgaggacuucguggaggugcaccugcccgacgugcacaagcagaucagcggcguggaccugggccugcccagcuggggcaaguacgugcuggugagcgccggcgugcugguggugcugaugcuggccaucuucaucaugaccugcugcggcagagugcaccagcccaagagcacccagcacagccugggcggcaccggcagaaaggugagcgugaccagccagagcggcaaggugaucagcagcugggagagcuacaagagcggcggcgagaccagacuguga

SEQ ID NO: 191186 - RNA, 1575 nt, Artificial Sequence
  derived and/or modified CDS sequence (opt4) from glycoprotein__RABV__HE801614.1
auggugccccaggugcugcuguucgugccccugcugguguucagcaugugcuucggcaaguuccccaucuacaccauccccgacaagcugggccccuggagccccaucgacauccaccaccugagcugccccaacaaccuggugguggaggacgagggcugcaccaaccugagcggcuucagcuacauggagcugaaggugggcuacaucagcgccaucaaggugaacggcuucaccugcaccggcguggugaccgaggccgagaccuacaccaacuucgugggcuacgugaccaccaccuucaagagaaagcacuucagacccacccccgacgccugcagagccgccuacaacuggaagauggccggcgaccccagauacgaggagagccugcacaaccccuaccccgacuaccacuggcugagaaccgugaagaccaccaaggagagccuggugaucaucagccccagcguggccgaccuggaccccuacgacaagagccugcacagcagaguguuccccagcggcaagugccugggcaucaccaucagcagcaccuacugcagcaccaaccacgacuacaccaucuggaugcccgagaaccccagacugggcaccagcugcgacaucuucaccaacagcagaggcaagagagccagcaagggcagcaagaccugcggcuucguggacgagagaggccuguacaagagccugaagggcgccugcaagcugaagcugugcggcgugcugggccugagacugauggacggcaccuggguggccaugcagaccagcgacgagaccaaguggugcccccccgaccagcuggugaaccugcacgacuucagaagcgacgagaucgagcaccuggugguggaggagcuggugaagaagagagaggagugccuggacgcccuggagagcaucaugaccaccaagagcgugagcuucagaagacugagccaccugagaaagcuggugcccggcuucggcaaggccuacaccaucuucaacaagacccugauggaggccgacgcccacuacaagagcgugagaaccuggaacgagaucauccccagcaagggcugccugagagugggcggcagaugccacccccacgugaacggcguguucuucaacggcaucauccugggccccgacggccacgugcugauccccgagaugcagagcagccugcugcagcagcacauggagcugcuggagagcagcgugaucccccugaugcacccccuggccgaccccagcaccguguucaaggacggcgacgaggccgaggacuucguggaggugcaccugcccgacgugcacaagcagaucagcggcguggaccugggccugcccagcuggggcaaguacgugcuggugagcgccggcgugcugguggugcugaugcugaccaucuucaucaugaccugcugcggcagagugagaagacccaagagcacccagcacagccugggcggcaccggcagaaaggugagcgugaccagccagagcggcaaggugaucagcagcugggagagcuacaagagcggcggcgagaccagacuguga

SEQ ID NO: 191187 - RNA, 1575 nt, Artificial Sequence
  derived and/or modified CDS sequence (opt4) from glycoprotein__RABV__HE801615.1
auggugccccaggugcugcuguucgugccccugcugguguucagcaugugcuucggcaaguuccccaucuacaccauccccgacaagcugggccccuggagccccaucgacauccaccaccugagcugccccaacaaccuggugguggaggacgagggcugcaccaaccugagcggcuucagcuacauggagcugaaggugggcuacaucagcgccaucaaggugaacggcuucaccugcaccggcguggugaccgaggccgagaccuacaccaacuucgugggcuacgugaccaccaccuucaagagaaagcacuucagacccacccccgacgccugcagaaccgccuacaacuggaagcuggccggcgaccccagauacgaggagagccugcacaaccccuaccccgacuaccacuggcugagaaccgugaagaccaccaaggagagccuggugaucaucagccccagcguggccgaccuggaccccuacgacaagagccugcacagcagaguguuccccagcggcaagugccugggcaucaccaucagcagcaccuacugcagcaccaaccacgacuacaccaucuggaugcccgagaaccccagacugggcaccagcugcgacaucuucaccaacagcagaggcaagagagccagcaagggcagcaagaccugcggcuucguggacgagagaggccuguacaagagccugaagggcgccugcaagcugaagcugugcggcgugcugggccugagacugauggacggcaccuggguggccaugcagaccagcgacgagaccaaguggugcccccccgaccagcuggugaaccugcacgacuucagaagcgacgagaucgagcaccuggugguggaggagcuggugaagaagagagaggagugccuggacgcccuggagagcaucaugaccaccaagagcgugagcuucagaagacugagccaccugagaaagcuggugcccggcuucggcaaggccuacaccaucuucaacaagacccugauggaggccgacgcccacuacaagagcgugagaaccuggaacgagaucauccccagcaagggcugccugagagugggcggcagaugccaccaccacgugaacggcguguucuucaacggcaucauccugggccccgacggccacgugcugauccccgagaugcagagcagccugcugcagcagcacauggagcugcuggagagcagcgugaucccccugaugcacccccuggccgaccccagcaccguguucaaggacggcgacgaggccgaggacuucguggaggugcaccugcccgacgugcacaagcagaucagcggcguggaccugggccugcccagcuggggcaaguacgugcuggugagcgccggcgugcugguggugcugaugcugaccaucuucaucaugaccugcugcggcagagugcacagacccaagagcacccagcacagccugggcggcaccggcagaaaggugagcgugaccagccagagcggcaaggugaucagcagcugggagagcuacaagagcggcggcgagaccagacuguga

SEQ ID NO: 191188 - RNA, 1575 nt, Artificial Sequence
  derived and/or modified CDS sequence (opt4) from glycoprotein__RABV__HE801616.1
auggugccccaggugcugcuguucgugccccugcugguguucagcaugugcuucggcaaguuccccaucuacaccauccccgacaagcugggccccuggagccccaucgacauccaccaccugagcugccccaacaaccuggugguggaggacgagggcugcaccaaccugagcggcuucagcuacauggagcugaaggugggcuacaucagcgccaucaaggugaacggcuucaccugcaccggcguggugaccgaggccgagaccuacaccaacuucgugggcuacgugaccaccaccuucaagagaaagcacuucagacccacccccgacgccugcagagccgccuacaacuggaagauggccggcgaccccagauacgaggagagccugcacaaccccuaccccgacuaccacuggcugagaaccgugaagaccaccaaggagagccuggugaucaucagccccagcguggccgaccuggaccccuacgacaagagccugcacagcagaguguuccccagcggcaagugccugggcaucaccaucagcagcaccuacugcagcaccaaccacgacuacaccaucuggaugcccgagaaccccagacugggcaccagcugcgacaucuucaccaacagcagaggcaagagagccagcaagggcagcaagaccugcggcuucguggacgagagaggccuguacaagagccugaagggcgccugcaagcugaagcugugcggcgugcugggccugagacugauggacggcaccuggguggccaugcagaccagcgacgagaccaaguggugcccccccgaccagcuggugaaccugcacgacuucagaagcgacgagaucgagcaccuggugguggaggagcuggugaagaagagagaggagugccuggacgcccuggagcccaucaugaccaccaagagcgugagcuucagaagacugagccaccugagaaagcuggugcccggcuucggcaaggccuacaccaucuucaacaagacccugauggaggccgacgcccacuacaagagcgugagaaccuggaacgagaucauccccagcaagggcugccugagagugggcggcagaugccacccccacgugaacggcguguucuucaacggcaucauccugggccccgacggccacgugcugauccccgagaugcagagcagccugcugcagcagcacauggagcugcuggagagcagcgugaucccccugaugcacccccuggccgaccccagcaccguguucaaggacggcgacgaggccgaggacuucguggaggugcaccugcccgacgugcacaagcagaucagcggcguggaccugggccugcccagcuggggcaaguacgugcuggugagcgccggcgugcugguggugcugaugcugaccaucuucaucaugaccugcugcggcagagugagaagacccaagagcacccagcacagccugggcggcaccggcagaaaggugagcgugaccagccagagcggcaaggugaucagcagcugggagagcuacaagagcggcggcgagaccagacuguga

SEQ ID NO: 191189 - RNA, 1575 nt, Artificial Sequence
  derived and/or modified CDS sequence (opt4) from glycoprotein__RABV__HE801617.1
auggugccccaggugcugcuguucgugccccugcugguguucagcaugugcuucggcaaguuccccaucuacaccauccccgacaagcugggccccuggagccccaucgacauccaccaccugagcugccccaacaaccuggugguggaggacgagggcugcaccaaccugagcggcuucagcuacauggagcugaaggugggcuacaucagcgccaucaaggugaacggcuucaccugcaccggcguggugaccgaggccgagaccuacaccaacuucgugggcuacgugaccaccaccuucaagagaaagcacuucagacccacccccgacgccugcagagccgccuacaacuggaagauggccggcgaccccagauacgaggagagccugcacaaccccuaccccgacuaccacuggcugagaaccgugaagaccaccaaggagagccuggugaucaucagccccagcguggccgaccuggaccccuacgacaagagccugcacagcagaguguuccccagcggcaagugccugggcaucaccaucagcagcaccuacugcagcaccaaccacgacuacaccaucuggaugcccgagaaccccagacugggcaccagcugcgacaucuucgccaacagcagaggcaagagagccagcaagggcagcaagaccugcggcuucguggacgagagaggccuguacaagagccugaagggcgccugcaagcugaagcugugcggcgugcugggccugagacugauggacggcaccuggguggccaugcagaccagcgacgagaccaaguggugcccccccgaccagcuggugaaccugcacgacuucagaagcgacgagaucgagcaccuggugguggaggagcuggugaagaagagagaggagugccuggacgcccuggagagcaucaugaccaccaagagcgugagcuucagaagacugagccaccugagaaagcuggugcccggcuucggcaaggccuacaccaucuucaacaagacccugauggaggccgacgcccacuacaagagcgugagaaccuggaacgagaucauccccagcaagggcugccugagagugggcggcagaugccacccccacgugaacggcguguucuucaacggcaucauccugggccccgacggccacgugcugauccccgagaugcagagcagccugcugcagcagcacauggagcugcuggagagcagcgugaucccccugaugcacccccuggccgaccccagcaccguguucaaggacggcgacgaggccgaggacuucguggaggugcaccugcccgacgugcacaagcagaucagcggcguggaccugggccugcccagcuggggcaaguacgugcuggugagcgccggcgugcugguggugcugaugcugaccaucuucaucaucaccugcugcggcagagugcacagacccaagagcauccagcacagccugggcggcaccggcagaaaggugagcgugaccagccagagcggcaaggugaucagcagcugggagagcuacaagagcggcggcgagaccagacuguga

SEQ ID NO: 191190 - RNA, 1575 nt, Artificial Sequence
  derived and/or modified CDS sequence (opt4) from glycoprotein__RABV__HE802675.1
auggugccccaggugcugcuguucgugccccugcugguguucagcaugugcuucggcaaguuccccaucuacaccauccccgacaagcugggccccuggagccccaucgacauccaccaccugagcugccccaacaaccuggugguggaggacgagggcugcaccaaccugagcggcuucagcuacauggagcugaaggugggcuacaucagcgccaucaaggugaacggcuucaccugcaccggcguggugaccgaggccgagaccuacaccaacuucgugggcuacgugaccaccaccuucaagagaaagcacuucagacccacccccgacgccugcagagccgccuacaacuggaagauggccggcgaccccagauacgaggagagccugcacaaccccuaccccgacuaccacuggcugagaaccgugaagaccaccaaggagagccuggugaucaucagccccagcguggccgaccuggaccccuacgacaagagccugcacagcagaguguuccccagcggcaagugcagcggcaucaccaucagcagcaccuacugcagcaccaaccacgacuacaccaucuggaugcccgagaaccccagacugggcaccagcugcgacaucuucaccaacagcagaggcaagagagccagcaagggcggcaagaccugcggcuucguggacgagagaggccuguacaagagccugaagggcgccugcaagcugaagcugugcggcgugcugggccugagacugauggacggcaccuggguggccaugcagaccagcgacgagaccaaguggugcccccccgaccagcuggugaaccugcacgacuucagaagcgacgagaucgagcaccuggugguggaggagcuggugaagaagagagaggagugccuggacgcccuggagagcaucaugaccaccaagagcgugagcuucagaagacugagccaccugagaaagcuggugcccggcuucggcaaggccuacaccaucuucaacaagacccugauggaggccgacgcccacuacaagagcgugagaaccuggaacgagaucauccccagcaagggcugccugagagugggcggcagaugccacccccacgugaagggcguguucuucaacggcaucauccugggccccgacggccacgugcugauccccgagaugcagagcagccugcugcagcagcacauggagcugcuggagagcagcgugaucccccugaugcacccccuggccgaccccagcaccguguucaaggacggcgacgaggccgaggacuucguggaggugcaccugcccgacgugcacaagcagaucagcggcguggaccugggccugcccagcuggggcaaguacgugcuggugagcgccggcgugcugguggugcugaugcugaccaucuucaucaucaccugcugcggcagaauccacagacccaagagcacccagcacggccugggcggcaccggcagaaaggugagcgugaccagccagagcggcaaggugaucagcagcugggagagcuacaagagcggcggcgagaccagacuguga

SEQ ID NO: 191191 - RNA, 1575 nt, Artificial Sequence
  derived and/or modified CDS sequence (opt4) from glycoprotein__RABV__HM535790.1
auggugccccaggugcugcuguucgugcugcugcugggcuucagccugugcuucggcaaguuccccaucuacaccauccccgacgagcugggccccuggagccccaucgacauccaccaccugagcugccccaacaaccuggugguggaggacgagggcugcaccaaccugagcgaguucagcuacauggagcugaaggugggcuacaucagcgccaucaaggugaacggcuucaccugcaccggcguggugaccgaggccgagaccuacaccaacuucgugggcuacgugaccaccaccuucaagagaaagcacuucagacccacccccgacgccugcagagccgccuacaacuggaagauggccggcgaccccagauacgaggagagccugcacaaccccuaccccgacuaccacuggcugagaaccgugagaaccaccaaggagagccugaucaucaucagccccagcgugaccgaccuggaccccuacgacaagagccugcacagcagaguguuccccggcggcaagugcagcggcaucaccgugagcagcaccuacugcagcaccaaccacgacuacaccaucuggaugcccgagaaccccagacccagaacccccugcgacaucuucaccaacagcagaggcaagagagccagcaacggcaacaagaccugcggcuucguggacgagagaggccuguacaagagccugaagggcgccugcagacugaagcugugcggcgugcugggccugagacugauggacggcaccuggguggccaugcagaccagcgacgagaccaaguggugcccccccgaccagcuggugaaccugcacgacuucagaagcgacgagaucgagcaccuggugguggaggagcuggugaagaagagagaggagugccuggacgcccuggagagcaucaugaccaccaagagcgugagcuucagaagacugagccaccugagaaagcuggugcccggcuucggcaaggccuacaccaucuucaacaagacccugauggaggccgacgcccacuacaagagcgugagaaccuggaacgagaucauccccagcaagggcugccugaaggugggcggcagaugccacccccacgugaacggcguguucuucaacggcaucauccugggccccgacgaccacgugcugauccccgagaugcagagcagccugcugcagcagcacauggagcugcuggagagcagcgugaucccccugaugcacccccuggccgaccccagcaccguguucaaggagggcgacgaggccgaggacuucguggaggugcaccugcccgacguguacaagcagaucagcggcguggaccugggccugcccaacuggggcaaguacgugcugaugaccgccggcgccaugaucggccuggugcugaucuucagccugaugaccuggugcagaagagccaacagacccgagagcaagcagagaagcuucggcggcaccggcggcaacgugagcgugaccagccagagcggcaaggugauccccagcugggagagcuacaagagcggcggcgagaucagacuguga

SEQ ID NO: 191192 - RNA, 1575 nt, Artificial Sequence; identical to SEQ ID NO: 191088
  derived and/or modified CDS sequence (opt4) from glycoprotein__RABV__HQ166186.1

SEQ ID NO: 191193 - RNA, 1575 nt, Artificial Sequence
  derived and/or modified CDS sequence (opt4) from glycoprotein__RABV__HQ232301.1
augaucccccaggcccugcuguucgugcccuuccugguguucccccugugcuucggcaaguuccccaucuacaccauccccgacaagcugggccccuggagccccaucgacauccaccaccugagcugccccaacaaccuggugguggaggacgagggcugcaccaaccugagcggcuucagcuacauggagcugaaggugggcuacaucagcgccaucaaggugaacggcuucaccugcaccggcguggugaccgaggccgagaccuacaccaacuucgugggcuacgugaccaccaccuucaagagaaagcacuucagacccacccccgacgccugcagagccgccuacaacuggaagauggccggcgaccccagauacgaggagagccugcacaaccccuaccccgacuaccacuggcugagaaccgugaagaccaccaaggagagccuggugaucaucagccccagcgugagcgaccuggaccccuacgacaagagccugcacagcagaguguuccccagcggcaagugcagcggcaucaccgugagcagcaccuacugccccaccagccacgacuacaccaucuggaugcccgagaaccccagacugggcaccagcugcgacaucuucaucaacagcagaggcaagagagccagcaagggcagcaagaccugcggcuucguggacgagagaggccuguacaagagccugaagggcgccugcaagcugaagcugugcggcgugcugggccugagacugauggacggcaccugggccgccauccagaccagcgacgaggccaaguggugcccccccgaccagcuggugaacauccacgacuuccacagcgacgagaucgagcaccuggugguggaggagcuggugaagaagagagaggagugccuggacgcccuggagagcaucaugaccaccaagagcgugagcuucagaagacugagccaccugagaaagcuggugcccggcuucggcaaggccuacaccaucuucaacaagacccugauggaggccgacgcccacuacaagagcgugagaaccuggaacgagaucauccccagcaagggcugccugagagugggcggcagaugccacccccacgugaacggcguguucuucaacggcaucauccugggccccgacggccacgugcugauccccgagaugcagagcagccugcugcagcagcacauggagcugcuggagagcagcgugaucccccugaugcacccccuggccgaccccagcaccguguucaaggacggcgacgaggccgaggacuucguggaggugcaccugcccgacgugcacaagcaggugagcggcguggaccugggccugcccagcuggggcaaguacgugcugaugagcgugggcgcccugaucgcccugaugcugaugaucuuccugaugaccugcugcagaaaggccaacggcguggagagcaugcagcacagacugggcgagaccggcagaaaggugagcgugaccagccagagcggcagagugaucagcagcugggagagcuacaagagcggcggcgagaccaagcuguga

SEQ ID NO: 191194 - RNA, 1575 nt, Artificial Sequence
  derived and/or modified CDS sequence (opt4) from glycoprotein__RABV__HQ266618.1
auggugccccaggcccugcuguucgugccccugcugguguucagccugugcuucggcaaguuccccaucuacaccauccccgacaagcugggccccuggagccccaucgacauccaccaccugagcugccccaacaaccuggugguggaggacgagggcugcaccaaccugagcggcuucagcuacauggagcugaaggugggcuacaucagcgccaucaaggugaacggcuucaccugcaccggcguggugaccgaggccgagaccuacaccaacuucgugggcuacgugaccaccaccuucaagagaaagcacuucagaccccugcccgacgccugcagagccgccuacaacuggaagauggccggcgaccccagauacgaggagagccugcacaaccccuaccccgacuaccacuggcugagaaccgugaagaccaccaaggagagccuggugaucaucagccccagcguggccgaccuggaccccuacgacaagagccugcacagcagaguguuccccagcggcaagugcagcggcaucaccgugagcagcaccuucugcagcaccaaccacgacuacaccaucuggaugcccgagaaccccagacugggcaccagcugcgacaucuucgccaacagcagaggcaagagagccagcaagggcggcaagaccugcggcuucguggacgagagaggccuguacaagagccugaagggcgccugcaagcugaagcugugcggcgugcugggccugagacugauggacggcaccuggguggccaugcagaccagcgacgagaccaaguggugcccccccgaccagcuggugaacaugcacgacuucagaagcgacgagaucgagcaccuggugguggaggagcuggugaagaagagagaggagugccuggacgcccuggagagcaucaugaccaccaagagcgugagcuucagaagacugagccaccugagaaagcuggugcccggcuucggcaaggccuacaccaucuucaacaagacccugauggaggccgacgcccacuacaagagcgugagaaccuggaacgagaucauccccagcaagggcugccugagagugggcggcagaugccacccccacgugaacggcguguucuucaacggcaucauccugggccccgacggccacgugcugauccccgagaugcagagcagccugcugcagcagcacauggagcugcuggagagcagcgugaucccccugaugcacccccuggccgaccccagcaccguguucaaggacggcgacgaggccgaggacuucguggaggugcaccugcccgacgugcacaagcaggugagcggcguggaccugggccugcccaacuggggcaaguacgugcugcugagcgccggcacccugaucgcccugaugcugaucaucuuccugaugaccugcugcaagagagugaaccagcccgagagcaccaagagaagccugggcggcaccggcagaaaggugagcgugaccagccagagcggcaaggugaucagcagcugggagagcuacaagagcggcggcgagaccagacuguga

SEQ ID NO: 191195 - RNA, 1575 nt, Artificial Sequence
  derived and/or modified CDS sequence (opt4) from glycoprotein__RABV__HQ266620.1
auggugccccaggcccugcuguuccugccccugcugguguucccccugugcuucggcagauuccccaucuacaccauccccgacaagcugggccccuggagccccaucgacauccaccaccugagcugccccaacaaccuggugguggaggacgagggcugcaccaaccugagcggcuucagcuacauggagcugaaggugggcuacaucagcgccaucaaggugaacggcuucaccugcaccggcguggugaccgaggccgagaccuacaccaacuucgugggcuacgugaccaccaccuucaagagaaagcacuucagacccauccccgacgccugcagagccgccuacaacuggaagauggccggcgaccccagauacgaggagagccugcacaaccccuaccccgacuaccacuggcugagaaccgugaagaccaccaaggagagccuggugaucaucagccccagcguggccgaccuggaccccuacgacaagagccugcacagcagaguguuccccagcggcaagugcagcggcaucaccgugagcagcaccuucugcagcaccaaccacgacuacaccaucuggaugcccgagaaccccagacugggcaccagcugcgacaucuucgccaacagcagaggcaagagagccagcaagggcggcaagaccugcggcuucguggacgagagaggccuguacaagagccugaagggcgccugcaagcugaagcugugcggcgugcugggccugagacugauggacggcaccuggguggccaugcagaccagcgacgagaccaaguggugcccccccgaccagcuggugaacauccacgacuucagaagcgacgagaucgagcaccuggugguggaggagcuggugaagaagagagaggagugccuggacgcccuggagagcaucaugaccaccaagagcgugagcuucagaagacugagccaccugagaaagcuggugcccggcuucggcaaggccuacaccaucuucaacaagacccugauggaggccgacgcccacuacaagagcgugagaaccuggaacgagaucauccccagcaagggcugccugagagugggcggcagaugccacccccacgugaacggcguguucuucaacggcaucauccugggccccgacggccacgugcugauccccgagaugcagagcagccugcugcagcagcacauggagcugcuggagagcagcgugaucccccugaugcacccccuggccgaccccagcaccguguucaaggacggcgacgaggccgaggacuucguggaggugcaccugcccgacgugcacaagcaggugagcggcguggaccugggccugcccaacuggggcaaguacauccugcugagcgccggcacccugaucgcccugaugcugaucaucuuccugaugaccugcugcagaagagugaacagacccgagagcaccgagagaagccugggcggcaccggcagaaaggugagcgugaccagccagagcggcaaggugaucagcagcugggagagcuacaagagcggcggcgagaccagacuguga

SEQ ID NO: 191196 - RNA, 1575 nt, Artificial Sequence
  derived and/or modified CDS sequence (opt4) from glycoprotein__RABV__HQ266621.1
auggugccccaggcccugcuguucgugccccugcugggcuucagccugugcuucggcaaguuccccaucuacaccauccccgacaagcugggccccuggagccccaucgacauccaccaccugagcugccccaacaaccuggugguggaggacgagggcugcaccaaccugagcggcuucagcuacauggagcugaaggugggcuacaucagcgccaucaaggugaacggcuucaccugcaccggcguggugaccgaggccgagaccuacaccaacuucgugggcuacgugaccaccaccuucaagagaaagcacuucagacccauccccgacgccugcagagccgccuacaacuggaagguggccggcgaccccagauacgaggagagccugcacaaccccuaccccgacuaccacuggcugagaaccgugaagaccaccaaggagagccuggugaucaucagccccagcguggccgaccuggaccccuacgacaagagccugcacagcagaguguuccccagcggcaagugcagcggcaucaccgugagcagcaccuacugcagcaccaaccacgacuacaccaucuggaugcccgagaaccccagacugggcaccagcugcgacaucuucgccaacagcagaggcaagagagccagcaagggcggcaagaccugcggcuucguggacgagagaggccuguacaagagccugaagggcgccugcaagcugaagcugugcggcgugcugggccugagacugauggacggcaccuggguggccaugcagaccagcgacgagaccaaguggugcccccccgaccagcuggugaacaugcacgacuucagaagcgacgagaucgagcaccuggugguggaggagcuggugaagaagagagaggagugccuggacgcccuggagagcaucaugaccaccaagagcgugagcuucagaagacugagccaccugagaaagcuggugcccggcuucggcaaggccuacaccaucuucaacaagacccugauggaggccgacgcccacuacaagagcgugagaaccuggaacgagaucauccccagcaagggcugccugagagugggcggcagaugccacccccacgugaacggcguguucuucaacggcaucauccugggccccgacggccacgugcugauccccgagaugcagagcagccugcugcagcagcacauggagcugcuggagagcagcgugaucccccugaugcacccccuggccgaccccagcaccguguucaaggacggcgacgaggccgaggacuucguggaggugcaccugcccgacgugcacaagcaggugagcggcguggaccugggccugcccaacuggggcaaguacgugcugcugagcgccggcacccugaucgcccugaugcugaucaucuuccugaugaccugcugcagaagagugaacagacccgagagcacccagagaagccugggcggcaccggcagaaaggugagcgugaccagccagagcggcaaggugaucagcagcugggagagcuacaagagcggcggcgagaccagacuguga

SEQ ID NO: 191197 - RNA, 1575 nt, Artificial Sequence
  derived and/or modified CDS sequence (opt4) from glycoprotein__RABV__HQ266622.1
auggugccccaggcccugcuguucaucccccugcugggcuucagccugugcuucggcaaguuccccaucuacaccauccccgacaagcugggccccuggagccccaucgacauccaccaccugagcugccccaacaaccuggugguggaggacgagggcugcaccaaccugagcggcuucagcuacauggagcugaaggugggcuacaucagcgccaucagagugaccggcuucaccugcaccggcguggugaccgaggccgagaccuacaccaacuucgugggcuacgugaccaccaccuucaagagaaagcacuucagacccacccccgacgccugcagagccgccuacaacuggaagauggccggcgaccccagauacgaggagagccugcacaaccccuaccccgacuaccacuggcugagaaccgugaagaccaccaaggagagccuggugaucaucagccccagcguggccgaccuggaccccuacgacaagagccugcacagcagaguguuccccagcggcaagugcagcggcaucaccgugagcagcaccuacugcagcaccaaccacgacuacaccaucuggaugcccgagaaccccagacugggcaccagcugcgacaucuucgccaacagcagaggcaagagagccagcaagggcggcaagaccugcggcuucguggacgagagaggccuguacaagagccugaagggcgccugcaagcugaagcugugcggcgugcugggccugagacugauggacggcaccuggguggccaugcagaccagcgacgagaccaaguggugcccccccgaccagcuggugaacaugcacgacuucagaagcgacgagaucgagcaccuggugguggaggagcuggugaagaagagagaggagugccuggacgcccuggagagcaucaugaccaccaagagcgugagcuucagaagacugagccaccugagaaagcuggugcccggcuucggcaaggccuacaccaucuucaacaagacccugauggaggccgacgcccacuacaagagcgugagaaccuggaacgagaucauccccagcaagggcugccugagagugggcggcagaugccacccccacgugaacggcguguucuucaacggcaucauccugggccccgacggccacgugcugauccccgagaugcagagcagccugcugcagcagcacauggagcugcuggagagcagcgugaucccccugaugcacccccuggccgaccccagcgccguguucaaggacggcgacgaggccgaggacuucguggaggugcaccugcccgacgugcacaagcaggugagcggcguggaccugggccugcccaacuggggcaaguacgugcugcugagcgccggcacccugguggcccugaugcugaucaucuuccugaugaccugcugcagaagagugaacagacccgagagcacccagugcagccugggcggcaccggcagaaagggcagcgugaccagccagagcggcaaggugaucagcagcugggagagcuacaagagcggcggcgagaccagacuguga

SEQ ID NO: 191198 - RNA, 1575 nt, Artificial Sequence; identical to SEQ ID NO: 191086
  derived and/or modified CDS sequence (opt4) from glycoprotein__RABV__HQ317918.1

SEQ ID NO: 191199 - RNA, 1575 nt, Artificial Sequence
  derived and/or modified CDS sequence (opt4) from glycoprotein__RABV__JN234411.1
auggugccccaggcccugcugcuggugccccugcugggcuucagccugugcuucggcaaguuccccaucuacaccauccccgacacccugggccccuggagccccaucgacauccaccaccugagcugccccaacaaccuggugguggaggacgagggcugcaccaaccugagcggcuucagcuacauggagcugaaggugggccacaucagcgccaucaaggugaacggcuucaccugcaccggcguggugaccgaggccgagaccuacaccaacuucgugggcuacgugaccaccaccuucaagagaaagcacuucagacccacccccgacgccugcagagccgccuacaacuggaagauggccggcgaccccagauacgaggagagccugcacagccccuaccccgacuaccacuggcugagaaccgugaagaccaccaaggagagccuggugaucaucagccccagcguggccaaccuggaccccuacgacaacagccugcacagcagaguguuccccagcggcaagugcagcggcaucaccgugcccagcguguacugcagcaccaaccacgacuacaccguguggaugcccgagauccugagacugggcaccagcugcgacaucuucaccaacagcagaggcaagagagccagcaagggcagcaagaccugcggcuucguggacgagagaggccuguacaagagccugaagggcgccugcaagcugaagcugugcggcgugcccggccugagacugauggacggcaccuggguggccaugcagaccagcaacgagaccaaguggugcccccccggccagcuggugaaccugcacgaccugcacagcgacgagaucgagcaccuggugguggaggagcuggugaagaagagagaggagugccuggacgcccuggagagcgugaucaccaccaagagcgugagcuucagaagacugagccaccugagaaagcuggugcccggcuucggcaaggccuacaccaucuucaacaagacccugauggaggccgaggcccacuacaagagcgugagaaccuggaacgagaucauccccagcaagggcugccugagagugggcggcagaugcuacccccacgugaacggcguguucuucaacggcaucauccugggccccgacggccacgugcugauccccgagaugcagagcagccugcugcagcagcacaucgagcugcuggagagcagcgugaucccccugaugcacccccuggccgaccccuucaccguguucaaggacggcgacgagaucgaggacuucguggaggugcaccugcccgacgugcacgagcaggugagcggcguggaccugggccugcccaacuggggcgaguacgugcugcugagcgccggcacccugaucgcccugaugcugaucaucuuccugaucaccugcugcaagagaguggacagacccgagagcacccagagaagccugagaggcaccggcagaaacgugagcgugaccagccagagcggcaaguucauccccagcugggagagcuacaagagcggcggcgagaccggccuguga

SEQ ID NO: 191200 - RNA, 1575 nt, Artificial Sequence
  derived and/or modified CDS sequence (opt4) from glycoprotein__RABV__JN234412.1
auggugccccaggcccugcugcuggugccccugcugggcuucagccugugcuucggcaaguuccccaucuacaccauccccgacacccugggccccuggagccccaucgacauccaccaccugagcugccccaacaaccuggugguggaggacgagggcugcaccaaccugagcggcuucagcuacauggagcugaaggugggccacaucagcgccaucaaggugaacggcuucaccugcaccggcguggugaccgaggccgagaccuacaccaacuucgugggcuacgugaccaccaccuucaagagaaagcacuucagacccacccccgacgccugcagagccgccuacaacuggaagauggccggcgaccccagauacgaggagagccugcacagccccuaccccgacuaccacuggcugagaaccgugaagaccaccaaggagagccuggugaucaucagccccagcguggccaaccuggaccccuacgacaacagccugcacagcagaguguuccccagcggcaagugcagcggcaucaccgugcccagcguguacugcagcaccaaccacgacuacaccguguggaugcccgagauccugagacugggcaccagcugcgacaucuucaccaacagcagaggcaagagagccagcaagggcagcaagaccugcggcuucguggacgagagaggccuguacaagagccugaagggcgccugcaagcugaagcugugcggcgugcccggccugagacugauggacggcaccuggguggccaugcagaccagcaacgagaccaaguggugcccccccggccagcuggugaaccugcacgaccugcacagcgacgagaucgagcaccuggugguggaggagcuggugaagaagagagaggagugccuggacgcccuggagagcaucaucaccaccaagagcgugagcuucagaagacugagccaccugagaaagcuggugcccggcuucggcaaggccuacaccaucuucaacaagacccugauggaggccgaggcccacuacaagagcgugagaaccuggaacgagaucauccccagcaagggcugccugagagugggcggcagaugcuacccccacgugaacggcguguucuucaacggcaucauccugggccccgacggccacgugcugauccccgagaugcagagcagccugcugcagcagcacaucgagcugcuggagagcagcgugaucccccugaugcacccccuggccgaccccuucaccguguucaaggacggcgacgagaucgaggacuucguggaggugcaccugcccgacgugcacgagcaggugagcggcguggaccugggccugcccaacuggggcgaguacgugcugcugagcgccggcacccugaucgcccugaugcugaucaucuuccugaucaccugcugcaagagaguggacagacccgagagcacccagagaagccugagaggcaccggcagaaacgugagcgugaccagccagagcggcaaguucauccccagcugggagagcuacaagagcggcggcgagaccggccuguga

SEQ ID NO: 191201 - RNA, 1575 nt, Artificial Sequence; identical to SEQ ID NO: 191090
  derived and/or modified CDS sequence (opt4) from glycoprotein__RABV__JN234413.1

SEQ ID NO: 191202 - RNA, 1575 nt, Artificial Sequence
  derived and/or modified CDS sequence (opt4) from glycoprotein__RABV__JN234420.1
augaucccccaggcccugcuguucgugccccugcugguguucccccugugcuucggcaaguuccccaucuacaccauccccgacaagcugggccccuggagccccaucgacauccaccaccugagcugccccaacaaccuggugguggaggacgagggcugcaccaaccugagcggcuucagcuacauggagcugaaggugggcuacaucagcgccaucaaggugaacggcuucaccugcaccggcguggugaccgaggccgagaccuacaccaacuucgugggcuacgugaccaccaccuucaagagaaagcacuucagacccacccccgacgccugcagaagcgccuacaacuggaagauggccggcgaccccagauacgaggagagccugcacaaccccuaccccgacuaccacuggcugagaaccgugaagaccaccaaggagagcguggugaucaucagccccagcguggccgaccuggaccccuacgacaagagccugcacagcagaguguuccccagaggcaagugcagcggcaucaccgugagcagcgccuacugcagcaccaaccacgacuacaccaucuggaugcccgagaaccccagacugggcaccagcugcgacaucuucaccaacagcagaggcaagagagccagcaagggcagcaagaccugcggcuucguggacgagagaggccuguacaagagccugaagggcgccugcaagcugaagcugugcggcgugcugggccugagacugauggacggcaccuggguggccauccagaccagcaacgagaccaaguggugcccccccgaccagcuggugaaccugcacgacuuccacagcgacgagaucgagcaccuggugguggaggagcuggugaagaagagagaggagugccuggacgcccuggagagcaucaugaccaccaagagcgugagcuucagaagacugagccaccugagaaagcuggugcccggcuucggcaaggccuacaccaucuucaacaagacccugauggaggccgacgcccacuacaagagcgugagaaccuggaacgagaucauccccagcaagggcugccugagagugggcggcagaugccacccccacgugaacggcguguucuucaacggcaucauccugggccccgacggccacgugcugauccccgagaugcagagcagccugcugcagcagcacauggagcugcugaagagcagcgugaucccccugaugcacccccuggccgaccccagcaccguguucaaggacggcgacgagguggaggacuucguggaggugcaccugcccgacgugcacaagcaggugagcggcguggaccugggccugcccaacuggggcaaggacgugcugaugggcgccggcgugcugaccgcccugaugcugaugaucuuccugaugaccugcugcagaagaaccaacagagccgagagcauccagcacagccugggcgagaccggcagaaaggugagcgugaccagccagagcggcagagugaucagcagcugggagagcuacaagagcggcggcgagaccaagcuguga

SEQ ID NO: 191203 - RNA, 1575 nt, Artificial Sequence; identical to SEQ ID NO: 191202
  derived and/or modified CDS sequence (opt4) from glycoprotein__RABV__JN234423.1

SEQ ID NO: 191204 - RNA, 1575 nt, Artificial Sequence
  derived and/or modified CDS sequence (opt4) from glycoprotein__RABV__JN234424.1
auggugccccaggcccugcuguucgugccccugcugguguucccccugugcuucggcaaguuccccaucuacaccauccccgacaagcugggccccuggagccccaucgacauccaccaccugagcugccccaacaaccuggugguggaggacgagggcugcaccaaccugagcggcuucagcuacauggagcugaaggugggcuacaucagcgccaucaagaccaacggcuucaccugcaccggcguggugaccgaggccgagaccuacaccaacuucgugggcuacgugaccaccaccuucaagagaaagcacuucagacccacccccgacgccugcagagccgccuacaacuggaagauggccggcgaccccagauacgaggagagccugcacaaccccuaccccgacuaccacuggcugagaaccgugaagaccaccaaggagagccuggugaucaucagccccagcguggccgaccuggaccccuacgacagaagccugcacagcagaguguuccccggcggcaacugcagcggcguggccgugagcagcaccuacugcagcaccaaccacgacuacaccaucuggaugcccgagaaccccagacugggcaugagcugcgacaucuucaccaacagcagaggcaagagagccagcaagggcagcgagaccugcggcuucguggacgagagaggccuguacaagagccugaagggcgccugcaagcugaagcugugcggcgugcugggccugagacugauggacggcaccuggguggccaugcagaccagcaacgagaccaaguggugcccccccggccagcuggugaaccugcacgacuucagaagcgacgagaucgagcaccuggugguggaggagcuggugaagaagagagaggagugccuggacgcccuggagagcaucaugaccaccaagagcgugagcuucagaagacugagccaccugagaaagcuggugcccggcuucggcaaggccuacaccaucuucaacaagacccugauggaggccgacgcccacuacaagagcgugagaaccuggaacgagaucauccccagcaagggcugccugagagugggcggcagaugccacccccacgugaacggcguguucuucaacggcaucauccugggccccgacggcaacgugcugauccccgagaugcagagcagccugcugcagcagcacauggagcugcuggugagcagcgugaucccccugaugcaccccauggccgaccccagcaccguguucaagaacggcgacgaggccgaggacuucguggaggugcaccugcccgacgugcacgagagaaucagcggcguggaccugggccugcccaacuggggcaaguacgugcugcugagcgccggcgcccugaccgcccugaugcugaucaucuuccugaugaccugcuggagaagagugaacagaagcgagcccacccagcacaaccugagaggcaccggcagagaggugagcgugaccccccagagcggcaagaucaucagcagcugggagagcuacaagagcggcggcgagaccggccuguga

SEQ ID NO: 191205 - RNA, 1575 nt, Artificial Sequence; identical to SEQ ID NO: 191088
  derived and/or modified CDS sequence (opt4) from glycoprotein__RABV__JN786877.1

SEQ ID NO: 191206 - RNA, 1575 nt, Artificial Sequence
  derived and/or modified CDS sequence (opt4) from glycoprotein__RABV__JN786878.1
augaucccccaggcccugcuguucgugccccugcugguguucagcagcugcuucggcaaguuccccaucuacaccauccccgacaagcugggccccuggagccccaucgacauccaccaccugagaugccccaacaaccuggugguggaggacgagggcugcaccaaccugagcggcuucagcuacauggagcugaaggugggcuacaucagcgccaucaaggugaacggcuucaccugcaccggcguggugaccgaggccgagaccuacaccaacuucgugggcuacgugaccaccaccuucaagagaaagcacuucagacccacccccgacgccugcagagccgccuacaacuggaagauggccggcgaccccagauacgaggagagccugcacaaccccuaccccgacuaccacuggcugagaaccgugaagaccaccaaggagagccuggugaucaucagccccagcgugagcgaccuggaccccuacgacaagagccugcacagcagaguguuccccagcggcaagugcagcggcaucaccgugagcagcaccuacugccccaccaaccacgacuacaccaucuggaugcccgagaaccccagacugggcaccagcugcgacaucuucaccaacagcagaggcaagagagccagcaagggcggcaagaccugcggcuucguggacgagagaggccuguacaagagccugaagggcgccugcaagcugaagcugugcggcgugcugggccugagacugauggacggcaccuggguggccauccagaccagcgacgaggccaaguggugcccccccgaccagcuggugaacauccacgacuucagaagcgacgagaucgagcaccuggugguggaggagcuggugaagaagagagaggagugccuggacgcccuggagagcaucaugaccaccaagagcgugagcuucagaagacugagccaccugagaaagcuggugcccggcuucggcaaggccuacaccaucuucaacaagacccugauggaggccgacgcccacuacaagagcgugagaaccuggaacgagaucauccccagcaagggcugccugagagugggcggcagaugccacccccacgugaacggcguguucuucaacggcaucauccugggccccgacggccacgugcugauccccgagaugcagagcagccugcugcagcagcacauggagcugcuggagagcagcgugaucccccugaugcacccccuggccgaccccagcaccguguucaaggacggcgacgaggccgaggacuucguggaggugcaccugcccgacgugcccaagcaggugagcggcguggaccugggccugcccagcuggggcaaguacgugcugaugagcgugggcgccaugaucgcccugaugcugaugaucuuccugaugaccugcugcagaaaggccaacggcgccgagaccauccagcacagacugggcgagaccggcagaaaggugagcgugaccagccagagcggcagagugaucagcagcugggagagcuacaagagcggcggcgagaccaagcuguga

SEQ ID NO: 191207 - RNA, 1575 nt, Artificial Sequence; identical to SEQ ID NO: 190905
  derived and/or modified CDS sequence (opt4) from glycoprotein__RABV__JN936687.1

SEQ ID NO: 191208 - RNA, 1575 nt, Artificial Sequence
  derived and/or modified CDS sequence (opt4) from glycoprotein__RABV__JN936688.1
auggugccccaggugcugcuguucgugccccugcuggccgugccccugugcuucggcaaguuccccaucuacaccauccccgacaagcugggccccuggagccccaucgacauccaccaccugagcugccccaacaaccuggugguggaggacgagggcugcaccaaccugagcggcuucagcuacauggagcugaaggugggcuacaucagcgccaucaaggugaacggcuucaccugcaccggcguggugaccgaggccgagaccuacaccaacuucgugggcuacgugaccaccaccuucaagagaaagcacuucagacccacccccgacgccugcagaagcgccuacaacuggaagauggccggcgaccccagauacgaggagagccugcacaaccccuaccccgacuaccacuggcugagaaccgugaagaccaccaaggagagcuucgugaucaucagccccagcguggccgaccuggaccccuacgacaagagccugcacagcagaguguuccccagaggcaagugcagcggcaucaccgugagcagcaccuacugcagcaccaaccacgacuacaccaucuggaugcccgagaaccccagacugggcaccagcugcgacaucuucaccaacagcagaggcaagagagccagcaagggcagcaagaccugcggcuucguggacgagagaggccuguacaagagccugaagggcgccugcaagcugaagcugugcggcgugcugggccugagacugauggacggcaccuggguggccauccagaccagcgacgagaccaaguggugcccccccgaccagcuggugaaccugcacgacuuccacagcgacgagaucgagcaccuggugguggaggagcuggugaagaagagagaggagugccuggacgcccuggagagcaucaugaccaccaagagcgugagcuucagaagacugagccaccugagaaagcuggugcccggcuucggcaaggccuacaccaucuucaacaagacccugauggaggccgacgcccacuacaagagcgugagaaccuggaacgagaucauccccagcaagggcugccugagagugggcggcagaugccacccccacgugaacggcguguucuucaacggcaucauccugggccccgacggccacgugcugauccccgagaugcagagcagccugcugcagcagcacauggagcugcuggagagcagcgugaucccccugaugcacccccuggccgaccccagcaccguguucaaggacggcgacgaggccgaggacuucguggaggugcaccugcccgacgugcacaagcaggugagcggcguggaccugggccugcccagcuggggcaaguacgugcugaugagcgccggcauccugaccgcccugaugcugaugaucuuccugaugaccugcugcagaagaaccaacagagccgagagcauccagcacagccugggcgagaccggcagaaaggugagcgugaccagccagaacggcagagugaucagcagcugggagagcuacaagagcggcggcgagaccaagcuguga

SEQ ID NO: 191209 - RNA, 1575 nt, Artificial Sequence
  derived and/or modified CDS sequence (opt4) from glycoprotein__RABV__JN936689.1
auggugccccaggugcugcuguucgugccccugcuggccgugccccugugcuucggcaaguuccccaucuacaccauccccgacaagcugggccccuggagccccaucgacauccaccaccugagcugccccaacaaccuggugguggaggacgagggcugcaccaaccugagcggcuucagcuacauggagcugaaggugggcuacaucagcgccaucaaggugaacggcuucaccugcaccggcguggugaccgaggccgagaccuacaccaacuucgugggcuacgugaccaccaccuucaagagaaagcacuucagacccacccccgacgccugcagaagcgccuacaacuggaagauggccggcgaccccagauacgaggagagccugcacaaccccuaccccgacuaccacuggcugagaaccgugaagaccaccaaggagagcuucgugaucaucagccccagcguggccgaccuggaccccuacgacaagagccugcacagcagaguguuccccagaggcaagugcagcggcaucaccgugagcagcaccuacugcagcaccaaccacgacuacaccaucuggaugcccgagaaccccagacugggcaccagcugcgacaucuucaccaacagcagaggcaagagagccagcaagggcagcaagaccugcggcuucguggacgagagaggccuguacaagagccugaagggcgccugcaagcugaagcugugcggcgugcugggccugagacugauggacggcaccuggguggccauccagaccagcgacgagaccaaguggugcccccccgaccagcuggugaaccugcacgacuuccacagcgacgagaucgagcaccuggugguggaggagcuggugaagaagagagaggagugccuggacgcccuggagagcaucaugaccaccaagagcgugagcuucagaagacugagccaccugagaaagcuggugcccggcuucggcaaggccuacaccaucuucaacaagacccugauggaggccgacgcccacuacaagagcgugagaaccuggaacgagaucauccccagcaagggcugccugagagugggcggcagaugccacccccacgugaacggcguguucuucaacggcaucauccugggccccgacggccacgugcugauccccgagaugcagagcagccugcugcagcagcacauggagcugcuggagagcagcgugaucccccugaugcacccccuggccgaccccagcaccguguucaaggacggcgacgaggccgaggacuucguggaggugcaccugcccgacgugcacaagcaggugagcggcguggaccugggccugcccagcuggggcaaguacgugcugaugagcgccggcauccugaccgcccugaugcugaccaucuuccugaugaccugcugcagaagaaccaacagagccgagagcauccagcacagccugggcgagaccggcagaaaggugagcgugaccagccagagcggcagagugaucagcagcugggagagcuacaagagcggcggcgagaccaagcuguga

SEQ ID NO: 191210 - RNA, 1575 nt, Artificial Sequence
  derived and/or modified CDS sequence (opt4) from glycoprotein__RABV__JN936690.1
auggugccccaggccgugcuguucgugccccugcuggccgugccccugugcuucggcaaguuccccaucuacaccauccccgacaagcugggccccuggagccccaucgacauccaccaccugagcugccccaacaaccuggugguggaggacgagggcugcaccaaccugagcggcuucagcuacauggagcugaaggugggcuacaucagcgccaucaaggugaacggcuucaccugcaccggcguggugaccgaggccgagaccuacaccaacuucgugggcuacgugaccaccaccuucaagagaaagcacuucagacccacccccgacgccugcagaagcgccuacaacuggaagauggccggcgaccccagauacgaggagagccugcacaaccccuaccccgacuaccacuggcugagaaccgugaagaccaccaaggagagcuucgugaucaucagccccagcguggccgaccuggaccccuacgacaagagccugcacagcagaguguuccccagaggcaagugcagcggcaucaccgugagcagcaccuacugcagcaccaaccacgacuacaccaucuggaugcccgagaaccccagacugggcaccagcugcgacaucuucaccaacagcagaggcaagagagccagcaagggcagcaagaccugcggcuucguggacgagagaggccuguacaagagccugaagggcgccugcaagcugaagcugugcggcgugcugggccugagacugauggacggcaccuggguggccauccagaccagcgacgagaccaaguggugcccccccgaccagcuggugaaccugcacgacuuccacagcgacgagaucgagcaccuggugguggaggagcuggugaagaagagagaggagugccuggacgcccuggagagcaucaugaccaccaagagcgugagcuucagaagacugagccaccugagaaagcuggugcccggcuucggcaaggccuacaccaucuucaacaagacccugauggaggccgacgcccacuacaagagcgugagaaccuggaacgagaucauccccagcaagggcugccugagagugggcggcagaugccacccccacgugaacggcguguucuucaacggcaucauccugggccccgacggccacgugcugauccccgagaugcagagcagccugcugcagcagcacauggagcugcuggagagcagcgugaucccccugaugcacccccuggccgaccccagcaccguguucaaggacggcgacgaggccgaggacuucguggaggugcaccugcccgacgugcacaagcaggugagcggcguggaccugggccugcccagcuggggcaaguacgugcugaugagcgccggcauccugaccgcccugaugcugaugaucuuccugaugaccugcugcagaagaaccaacagagccgagagcauccagcacagccugggcgagaccggcagaaaggugagcgugaccagccagaacggcagagugaucagcagcugggagagcuacaagagcggcggcgagaccaagcuguga

SEQ ID NO: 191211 - RNA, 1575 nt, Artificial Sequence
  derived and/or modified CDS sequence (opt4) from glycoprotein__RABV__JN936691.1
augaucccccaggugcugcuguucgugccccugcugguguucagcagcugcuucggcaaguuccccaucuacaccauccccgacaagcugggccccuggagccccaucgacauccaccaccugagcugccccaacaacauggugguggaggacgagggcugcaccaaccugagcggcuucagcuacauggagcugaaggugggcuacaucagcgccaucaaggugaacggcuucaccugcaccggcguggugaccgaggccgagaccuacaccaacuucgugggcuacgugaccaccaccuucaagagaaagcacuucagacccaugcccgacgccugcagagccgccuacaacuggaagauggccggcgaccccagauacgaggagagccugcacaaccccuaccccgacuaccacuggcugagaaccgugaagaccaccaaggagagccuggugaucaucagccccagcguggccgaccuggaccccuacgacaagagccugcacagcagaguguuccccggcggcaagugcagcggcaucaccgugagcagcaccugcugcagcaccaaccacgacuacaccaucuggaugcccgagaaccccagacugggcaccagcugcgacaucuucaccaacagcagaggcaagagagccagcaagggcggcaagaccugcggcuucguggacgagagaggccuguacaagagccugaagggcgccugcaagcugaagcugugcggcgugcugggccugagacugauggacggcaccuggguggccauccagaccagcgacgagaucaaguggugcagccccgaccagcuggugaaccugcacgacuuccacagcgacgagaucgagcaccuggugguggaggagcuggugaagaagagagaggagugccuggacgcccuggagaccaucaugaccaccaagagcgugagcuucagaagacugagccaccugagaaagcuggugcccggcuucggcaaggccuacaccaucuucaacaagacccugauggaggccgacgcccacuacaagagcaucagaaccuggaacgagaucauccccagcaagggcugccugagagugggcggcagaugccacccccacgugaacggcguguucuucaacggcaucauccugggccccgacggccacgugcugauccccgagaugcagagcagccugcugcaccagcacauggagcugcuggagagcagcgugaucccccugaugcacccccuggccgaccccagcaccguguucaaggacggcgacgaggccgaggacuucguggaggugcaccugcccgacgugcacaagcagaucagcggcguggaccugggccugcccaacuggggcaaguacgugcugaucagcgccggcgcccugaccgcccugaugcugaccaucuuccugaugaccugcugcagaaagaccaacagagccgagagcauccagcacagccccggcgagaccggcagaaaggugagcgugaccagccacaacggcagagugaucagcagcugggagagcuacaagagcggcggcgagaccaagcuguga

SEQ ID NO: 191212 - RNA, 1575 nt, Artificial Sequence; identical to SEQ ID NO: 190905
  derived and/or modified CDS sequence (opt4) from glycoprotein__RABV__JN936692.1

SEQ ID NO: 191213 - RNA, 1575 nt, Artificial Sequence
  derived and/or modified CDS sequence (opt4) from glycoprotein__RABV__JN936693.1
auggugccccaggccuuccuguucgugccccugcuggccaucccccugugcuucggcaaguuccccaucuacaccauccccgacaagcugggccccuggagccccaucgacauccaccaccugagcugccccaacaaccuggugguggaggacgagggcugcaccaaccugagcggcuucagcuacauggagcugaaggugggcuacaucagcgccaucaaggugaacggcuucaccugcaccggcguggugaccgaggccgagaccuacaccaacuucgugggcuacgugaccaccaccuucaagagaaagcacuucagacccacccccgacgccugcagaagcgccuacaacuggaagauggccggcgaccccagauacgaggagagccugcacaaccccuaccccgacuaccacuggcugagaaccgugaagaccaccaaggagagcuucgugaucaucagccccagcguggccgaccuggaccccuacgacaagagccugcacagcagaguguuccccagaggcaagugcagcggcaucaccgugagcagcaccuacugcagcaccaaccacgacuacaccaucuggaugcccgagaaccccagacugggcaccagcugcgacaucuucaccaacagcagaggcaagagagccagcaagggcagcaagaccugcggcuucguggacgagagaggccuguacaagagccugaagggcgccugcaagcugaagcugugcggcgugcugggccugagacugauggacggcaccuggguggccauccagaccagcgacgagaccaaguggugcccccccgaccagcuggugaaccugcacgacuuccacagcgacgagaucgagcaccuggugguggaggagcuggugaagaagagagaggagugccuggacacccuggagagcaucaugaccaccaagagcgugagcuucagaagacugagccaccugagaaagcuggugcccggcuucggcaaggccuacaccaucuucaacaagacccugauggaggccgacgcccacuacaagagcgugagaaccuggaacgagaucauccccagcaagggcugccugagagugggcggcagaugccacccccacgugaacggcguguucuucaacggcaucauccugggccccgacggccacgugcugauccccgagaugcagagcagccugcugcagcagcacauggagcugcuggagagcagcgugaucccccugaugcacccccuggccgaccccagcaccguguucaaggacggcgacgaggccgaggacuucguggaggugcaccugcccgacgugcacaagcaggugagcggcguggaccugggccugcccagcuggggcaaguacgugcugaugagcgccggcauccugaccgcccugaugcugaugaucuuccugaugaccugcugcagaagaaccaacagagccgagagcauccagcacagccugggcgagaccggcagaaaggugagcgugaccagccagagcggcagagugaucagcagcugggagagcuacaagagcggcggcgagaccaagcuguga

SEQ ID NO: 191214 - RNA, 1575 nt, Artificial Sequence
  derived and/or modified CDS sequence (opt4) from glycoprotein__RABV__JN936694.1
auggugccccaggcccugcuguucgugccccugcugguguucagcagcugcuucggcaaguuccccaucuacaccauccccgacaagcugggccccuggagccccaucgacauccaccaccugagcugccccaacaacuucgugguggaggacgagggcugcaccaaccugagcggcuucagcuacauggagcugaaggugggcuacaucagcgccaucaaggugaacggcuucaccugcaccggcguggugaccgaggccgagaccuacaccaacuucgugggcuacgugaccaccaccuucaagagaaagcacuucagacccaugcccgacgccugcagagccgccuacaacuggaagauggccggcgaccccagauacgaggagagccugcacaaccccuaccccgacuaccacuggcugagaaccgugaagaccaccaaggagagccuggugaucaucagccccagcguggccgaccuggaccccuacgacaagagccugcacagcagaguguuccccggcggcaagugcagcggcaucaccgugagcagcaccugcugcagcaccaaccacgacuacaccaucuggaugcccgagaaccccagacugggcaccagcugcgacaucuucaccaacagcagaggcaagagagccagcaagggcggcaagaccugcggcuucguggacgagagaggccuguacaagagccugaagggcgccugcaagcugaagcugugcggcgugcugggccugagacugauggacggcaccuggguggccauccagaccagcgacgagaucaaguggugcagccccgaccagcuggugaaccugcacgacuuccacagcgacgagaucgagcacuucgugguggaggagcuggugaagaagagagaggagugccuggacgcccuggagaccaucaugaccaccaagagcgugagcuucagaagacugagccaccugagaaagcuggugcccggcuucggcaaggccuacaccaucuucaacaagacccugauggaggccgacgcccacuacaagagcaucagaaccuggaacgagaucauccccagcaagggcugccugagagugggcggcagaugccacccccacgugaacggcguguucuucaacggcaucauccugggccccgacggccacgugcugauccccgagaugcagagcagccugcugcaccagcacauggagcugcuggagagcagcgugaucccccugaugcacccccuggccgaccccagcaccguguucaaggacggcgacgaggccgaggacuucguggaggugcaccugcccgacgugcacaagcagaucagcggcguggaccugggccugcccaacuggggcaaguacgugcugaucagcgccggcgcccugaccgcccugaugcugaugaucuuccugaugaccugcugcagaaaggccaacagagccgagagcauccagcacaaccccggcgagaccggcagaaaggugagcgugaccagccacaacggcagagugaucagcagcugggagagcuacaagagcggcggcgagaccaagcuguga

SEQ ID NO: 191215 - RNA, 1575 nt, Artificial Sequence
  derived and/or modified CDS sequence (opt4) from glycoprotein__RABV__JN936695.1
auggugccccaggccuuccuguucgugccccugcuggccaucccccugugcuucggcaaguuccccaucuacaccauccccgacaagcugggccccuggagccccaucgacauccaccaccugagcugccccaacaaccuggugguggaggacgagggcugcaccaaccugagcggcuucagcuacauggagcugaaggugggcuacaucagcgccaucaaggugaacggcuucaccugcaccggcguggugaccgaggccgagaccuacaccaacuucgugggcuacgugaccaccaccuucaagagaaagcacuucagacccacccccgacgccugcagaagcgccuacaacuggaagauggccggcgaccccagauacgaggagagccugcacaaccccuaccccgacuaccacuggcugagaaccgugaagaccaccaaggagagcuucgugaucaucagccccagcguggccgaccuggaccccuacgacaagagccugcacagcagaguguuccccagaggcaagugcagcggcaucaccgugagcagcaccuacugcagcaccaaccacgacuacaccaucuggaugcccgagaaccccagacugggcaccagcugcgacaucuucaccaacagcagaggcaagagagccagcaagggcagcaagaccugcggcuucguggacgagagaggccuguacaagagccugaagggcgccugcaagcugaagcugugcggcgugcugggccugagacugauggacggcaccuggguggccauccagaccagcgacgagaccaaguggugcccccccgaccagcuggugaaccugcacgacuuccacagcgacgagaucgagcaccuggugguggaggagcuggugaagaagagagaggagugccuggacgcccuggagagcaucaugaccaccaagagcgugagcuucagaagacugagccaccugagaaagcuggugcccggcuucggcaaggccuacaccaucuucaacaagacccugauggaggccgacgcccacuacaagagcgugagaaccuggaacgagaucauccccagcaagggcugccugagagugggcggcagaugccacccccacgugaacggcguguucuucaacggcaucauccugggccccgacggccacgugcugauccccgagaugcagagcagccugcugcagcagcacauggagcugcuggagagcagcgugaucccccugaugcacccccuggccgaccccagcaccguguucaaggacggcgacgaggccgaggacuucguggaggugcaccugcccgacgugcacaagcaggugagcggcguggaccugggccugcccagcuggggcaaguacgugcugaugagcgccggcauccugaccgcccugaugcugaugaucuuccugaugaccugcugcagaagagccaacagagccgagagcauccagcacagccugggcgagaccggcagaaaggugagcgugaccagccagagcggcagagugaucagcagcugggagagcuacaagagcggcggcgagaccaagcuguga

SEQ ID NO: 191216 - RNA, 1575 nt, Artificial Sequence
  derived and/or modified CDS sequence (opt4) from glycoprotein__RABV__JN936696.1
augauccugcaggugcugcuguucgugcccuuccugguguucagcagcugcuucggcaaguuccccaucuacaccauccccgacaagcugggccccuggagccccaucgacauccaccaccugagcugccccaacaaccuggugguggaggacgagggcugcaccaaccugagcggcuucagcuacauggagcugaaggugggcuacaucagcgccaucaaggugaacggcuucaccugcaccggcguggugaccgaggccgagaccuacaccaacuucgugggcuacgugaccaccaccuucaagagaaagcacuucagacccaugcccgacgccugcagagccgccuacaacuggaagauggccggcgaccccagauacgaggagagccugcacaaccccuaccccgacuaccacuggcugagaaccgugaagaccaccaaggagagccuggugaucaucagccccagcguggccgaccuggaccccuacgacaagagccugcacagcagaguguuccccggcggcaagugcagcggcaucaccgugagcagcaccugcugcagcaccaaccacgacuacaccaucuggaugcccgagaaccccagacugggcaccagcugcgacaucuucaccaacagcagaggcaagagagccagcaagggcggcaagaccugcggcuucguggacgagagaggccuguacaagagccugaagggcgccugcaagcugaagcugugcggcgugcugggccugagacugauggacggcaccuggguggccauccagaccagcgacgagaucaaguggugcccccccgaccagcuggugaaccugcacgacuuccacagcgacgagaucgagcaccuggugguggaggagcuggugaagaagagagaggagugccuggacgcccuggagaccaucaugaccaccaagagcgugagcuucagaagacugagccaccugagaaagcuggugcccggcuucggcaaggccuacaccaucuucaacaagacccugauggaggccgacgcccacuacaagagcaucagaaccuggaacgagaucauccccagcaagggcugccugagagugggcggcagaugccacccccacgugaacggcguguucuucaacggcaucauccugggccccgacggccacgugcugauccccgagaugcagagcagccugcugcaccagcacauggagcugcuggagagcagcgugaucccccugaugcacccccuggccgaccccagcaccguguucaaggacggcgacgaggccgaggacuucguggaggugcaccugcccgacgugcacaagcagaucagcggcguggaccugggccugcccaacuggggcaaguacgugcugaucagcgccggcgcccugaccgcccugaugcugaugaucuuccugaugaccugcugcagaaagaacaacagagccgagagcauccagcacagccccggcgagaccggcagaaaggugagcgugaccagccacaacggcagagugaucagcagcugggagagcuacaagagcggcggcgagaccaagcuguga

SEQ ID NO: 191217 - RNA, 1575 nt, Artificial Sequence
  derived and/or modified CDS sequence (opt4) from glycoprotein__RABV__JN936697.1
auggugccccaggccuuccuguucgugccccugcuggccaucccccugugcuucggcaaguuccccaucuacaccauccccgacaagcugggccccuggagccccaucgacauccaccaccugagcugccccaacaaccuggugguggaggacgagggcugcaccaaccugagcggcuucagcuacauggagcugaaggugggcuacaucagcgccaucaaggugaacggcuucaccugcaccggcguggugaccgaggccgagaccuacaccaacuucgugggcuacgugaccaccaccuucaagagaaagcacuucagacccacccccgacgccugcagaagcgccuacaacuggaagauggccggcgaccccagauacgaggagagccugcacaaccccuaccccgacuaccacuggcugagaaccgugaagaccaccaaggagagcuucgugaucaucagccccagcguggccgaccuggaccccuacgacaagagccugcacagcagaguguuccccagaggcaagugcagcggcaucaccgugagcagcaccuacugcagcaccaaccacgacuacaccaucuggaugcccgagaaccccagacugggcaccagcugcgacaucuucaccaacagcagaggcaagagagccagcaagggcagcaagaccugcggcuucguggacgagagaggccuguacaagagccugaagggcgccugcaagcugaagcugugcggcgugcugggccugagacugauggacggcaccuggguggccauccagaccagcgacgagaccaaguggugcccccccgaccagcuggugaaccugcacgacuuccacagcgacgagaucgagcaccuggugguggaggagcuggugaagaagagagaggagugccuggacgcccuggagagcaucaugaccaccaagagcgugagcuucagaagacugagccaccugagaaagcuggugcccggcuucggcaaggccuacaccaucuucaacaagacccugauggaggccgacgcccacuacaagagcgugagaaccuggaacgagaucauccccagcaagggcugccugagagugggcggcagaugccacccccacgugaacggcguguucuucaacggcaucauccugggccccgacggccacgugcugauccccgagaugcagagcagccugcugcagcagcacauggagcugcuggagagcagcgugaucccccugaugcacccccuggccgaccccagcaccguguucaaggacggcgacgaggccgaggacuucguggaggugcaccugcccgacgugcacaagcaggugagcggcguggaccugggccugcccagcuggggcaaguacgugcugaugagcgccggcauccugaccgcccugaugcugaugaucuuccugaugaccugcugcagaagaaccaacagagccgagagcauccagcacagccugggcgagaccggcagaaaggugagcgugaccagccagagcggcagagugaucagcagcugggagagcuacaagagcggcggcgagaccaagcuguga

SEQ ID NO: 191218 - RNA, 1575 nt, Artificial Sequence; identical to SEQ ID NO: 190887
  derived and/or modified CDS sequence (opt4) from glycoprotein__RABV__JN936698.1

SEQ ID NO: 191219 - RNA, 1575 nt, Artificial Sequence
  derived and/or modified CDS sequence (opt4) from glycoprotein__RABV__JN936699.1
auggugccccaggugcugcuguucgugcccuuccugguguucagcagcugcuucggcaaguuccccaucuacaccauccccgacaagcugggccccuggagccccaucgacauccaccaccugagcugccccaacaaccuggugguggaggacgagggcugcaccaaccugagcggcuucagcuacauggagcugaaggugggcuacaucagcgccaucaaggugaacggcuucaccugcaccggcguggugaccgaggccgagaccuacaccaacuucgugggcuacgugaccaccaccuucaagagaaagcacuucagacccaugcccgacgccugcagagccgccuacaacuggaagauggccggcgaccccagauacgaggagagccugcacaaccccuaccccgacuaccacuggcugagaaccgugaagaccaccaaggagagccuggugaucaucagccccagcguggccgaccuggaccccuacgacaagagccugcacagcagaguguuccccggcggcaagugcagcggcaucaccgugagcagcaccugcugcagcaccaaccacgacuacaccaucuggaugcccgagaaccccagacugggcaccagcugcgacaucuucaccaacagcagaggcaagagagccagcaagggcggcaagaccugcggcuucguggacgagagaggccuguacaagagccugaagggcgccugcaagcugaagcugugcggcgugcugggccugagacugauggacggcaccuggguggccauccagaccagcgacgagaucaaguggugcagccccgaccagcuggugaaccugcacgacuuccacagcgacgagaucgagcaccuggugguggaggagcuggugaagaagagagaggagugccuggacgcccuggagaccaucaugaccaccaagagcgugagcuucagaagacugagccaccugagaaagcuggugcccggcuucggcaaggccuacaccaucuucaacaagacccugauggaggccgacgcccacuacaagagcaucagaaccuggaacgagaucauccccagcaagggcugccugagagugggcggcagaugccacccccacgugaacggcguguucuucaacggcaucauccugggccccgacggccacgugcugauccccgagaugcagagcagccugcugcaccagcacauggagcugcuggagagcagcgugaucccccugaugcacccccuggccgaccccagcaccguguucaaggacggcgacgaggccgaggacuucguggaggugcaccugcccgacgugcacaagcagaucagcggcguggaccugggccugcccaacuggggcaaguacgugcugaucagcgccggcgcccugaccgcccugaugcugaugaucuuccugaugaccugcugcagaaaggccaacagagccgagagcauccagcacaaccccggcgagaccggcagaaaggugagcgugaccagccacaacggcagagugaucagcagcugggagagcuacaagagcggcggcgagaccaagcuguga

SEQ ID NO: 191220 - RNA, 1575 nt, Artificial Sequence; identical to SEQ ID NO: 190586
  derived and/or modified CDS sequence (opt4) from glycoprotein__RABV__JN936700.1

SEQ ID NO: 191221 - RNA, 1575 nt, Artificial Sequence; identical to SEQ ID NO: 191219
  derived and/or modified CDS sequence (opt4) from glycoprotein__RABV__JN936701.1

SEQ ID NO: 191222 - RNA, 1575 nt, Artificial Sequence; identical to SEQ ID NO: 190586
  derived and/or modified CDS sequence (opt4) from glycoprotein__RABV__JN936702.1

SEQ ID NO: 191223 - RNA, 1575 nt, Artificial Sequence; identical to SEQ ID NO: 190586
  derived and/or modified CDS sequence (opt4) from glycoprotein__RABV__JN936703.1

SEQ ID NO: 191224 - RNA, 1575 nt, Artificial Sequence
  derived and/or modified CDS sequence (opt4) from glycoprotein__RABV__JN936704.1
auggugccccaggugcugcuguucgugccccugcuggccuucagcagcugcuucggcaaguuccccaucuacaccauccccgacaagcugggccccuggagccccaucgacauccaccaccugagcugccccaacaaccuggugguggaggacgagggcugcaccaaccugagcggcuucagcuacauggagcugaaggugggcuacaucagcgccaucaaggugaacggcuucaccugcaccggcguggugaccgaggccgagaccuacaccaacuucgugggcuacgugaccaccaccuucaagagaaagcacuucagacccaugcccgacgccugcagagccgccuacaacuggaagauggccggcgaccccagauacgaggagagccugcacaaccccuaccccgacuaccacuggcugagaaccgugaagaccaccaaggagagccuggugaucaucagccccagcguggccgaccuggaccccuacgacaagagccugcacagcagaguguuccccggcggcaagugcagcggcaucaccgugagcagcaccugcugcagcaccaaccacgacuacaccaucuggaugcccgagaaccccagacugggcaccagcugcgacaucuucaccaacagcagaggcaagagagccagcaagggcggcaagaccugcggcuucguggacgagagaggccuguacaagagccugaagggcgccugcaagcugaagcugugcggcgugcugggccugagacugauggacggcaccuggguggccauccagaccagcgacgagaucaaguggugcagccccgaccagcuggugaaccugcacgacuuccacagcgacgagaucgagcaccuggugguggaggagcuggugaagaagagagaggagugccuggacgcccuggagaccaucaugaccaccaagagcgugagcuucagaagacugagccaccugagaaagcuggugcccggcuucggcaaggccuacaccaucuucaacaagacccugauggaggccgacgcccacuacaagagcaucagaaccuggaacgagaucauccccagcaagggcugccugagagugggcggcagaugccacccccacgugaacggcguguucuucaacggcaucauccugggccccgacggccacgugcugauccccgagaugcagagcagccugcugcaccagcacauggagcugcuggagagcagcgugaucccccugaugcacccccuggccgaccccagcaccguguucaaggacggcgacgaggccgaggacuucguggaggugcaccugcccgacgugcacaagcagaucagcggcguggaccugggccugcccaacuggggcagauacgugcugaucagcgccggcgcccugaccgcccugaugcugaugaucuuccugaugaccugcugcagaaaggccaacagagccgagcugauccagcacaaccccggcgagaccggcagaaaggugagcgugaccagccacaacggcagagugaucagcagcugggagagcuacaagagcggcggcgagaccaagcuguga

SEQ ID NO: 191225 - RNA, 1575 nt, Artificial Sequence
  derived and/or modified CDS sequence (opt4) from glycoprotein__RABV__JN936705.1
augaucccccaggugcugcuguucgugccccugcugguguucagcagcugcuucggcaaguuccccaucuacaccauccccgacaagcugggccccuggagccccaucgacauccaccaccugagcugccccaacaacauggugguggaggacgagggcugcaccaaccugagcggcuucagcuacauggagcugaaggugggcuacaucagcgccaucaaggugaacggcuucaccugcaccggcguggugaccgaggccgagaccuacaccaacuucgugggcuacgugaccaccaccuucaagagaaagcacuucagacccaugcccgacgccugcagagccgccuacaacuggaagauggccggcgaccccagauacgaggagagccugcacaaccccuaccccgacuaccacuggcugagaaccgugaagaccaccaaggagagccuggugaucaucagccccagcguggccgaccuggaccccuacgacaagagccugcacagcagaguguuccccggcggcaagugcagcggcaucaccgugagcagcaccugcugcagcaccaaccacgacuacaccaucuggaugcccgagaaccccagacugggcaccagcugcgacaucuucaccaacagcagaggcaagagagccagcaagggcggcaagaccugcggcuucguggacgagagaggccuguacaagagccugaagggcgccugcaagcugaagcugugcggcgugcugggccugagacugauggacggcaccuggguggccauccagaccagcgacgagaucaaguggugcagccccgaccagcuggugaaccugcacgacuuccacagcgacgagaucgagcaccuggugguggaggagcuggugaagaagagagaggagugccuggacgcccuggagaccaucaugaccaccaagagcgugagcuucagaagacugagccaccugagaaagcuggugcccggcuucggcaaggccuacaccaucuucaacaagacccugauggaggccgacgcccacuacaagagcaucagaaccuggaacgagaucauccccagcaagggcugccugagagugggcggcagaugccacccccacgugaacggcguguucuucaacggcaucauccugggccccgacggccacgugcugauccccgagaugcagagcagccugcugcaccagcacauggagcugcuggagagcagcgugaucccccugaugcacccccuggccgaccccagcaccguguucaaggacggcgacgaggccgaggacuucguggaggugcaccugcccgacgugcacaagcagaucagcggcguggaccugggccugcccaacuggggcaaguacgugcugaucagcgccugcgcccugaccgcccugaugcugaccaucuuccugaugaccugcugcagaaagaccagcagagccgagagcauccagcacagccccggcgagaccggcagaaaggugagcgugaccagccacaacggcagagugaucagcagcugggagagcuacaagagcggcggcgagaccaagcuguga

SEQ ID NO: 191226 - RNA, 1575 nt, Artificial Sequence
  derived and/or modified CDS sequence (opt4) from glycoprotein__RABV__JN936706.1
augaucccccaggugcugcuguucgugcccuuccugguguucagcagcugcuucggcaaguuccccaucuacaccauccccgacaagcugggccccuggagccccaucgacauccaccaccugagcugccccaacaaccuggugguggaggacgagggcugcaccaaccugagcggcuucagcuacauggagcugaaggugggcuacaucagcgccaucaaggugaacggcuucaccugcaccggcguggugaccgaggccgagaccuacaccaacuucgugggcuacgugaccaccaccuucaagagaaagcacuucagacccaugcccgacgccugcagagccgccuacaacuggaagauggccggcgaccccagauacgaggagagccugcacaaccccuaccccgacuaccacuggcugagaaccgugaagaccaccaaggagagccuggugaucaucagccccagcguggccgaccuggaccccuacgacaagagccugcacagcagaguguuccccggcggcaagugcagcggcaucaccgugagcagcaccugcugcagcaccaaccacgacuacaccaucuggaugcccgagaaccccagacugggcaccagcugcgacaucuucaccaacagcagaggcaagagagccagcaagggcggcaagaccugcggcuucguggacgagagaggccuguacaagagccugaagggcgccugcaagcugaagcugugcggcgugcugggccugagacugauggacggcaccuggguggccauccagaccagcgacgagaucaaguggugcagccccgaccagcuggugaaccugcacgacuuccacagcgacgagaucgagcaccuggugguggaggagcuggugaagaagagagaggagugccuggacgcccuggagaccaucaugaccaccaagagcgugagcuucagaagacugagccaccugagaaagcuggugcccggcuucggcaaggccuacaccaucuucaacaagacccugauggaggccgacgcccacuacaagagcaucagaaccuggaacgagaucauccccagcaagggcugccugagagugggcggcagaugccacccccacgugaacggcguguucuucaacggcaucauccugggccccgacggccacgugcugauccccgagaugcagagcagccugcugcaccagcacauggagcugcuggagagcagcgugaucccccugaugcacccccuggccgaccccagcaccguguucaaggacggcgacgaggccgaggacuucguggaggugcaccugcccgacgugcacaagcagaucagcggcguggaccugggccugcccaacuggggcaaguacgugcugaucagcgccggcgcccugaccgcccugaugcugaugaccuuccugaugaccugcugcagaaagaccaacagagccgagagcauccagcacagccccggcgagaccggcagaaaggugagcgugaccagccacaacggcagagugaucagcagcugggagagcuacaagagcggcggcgagaccaagcuguga

SEQ ID NO: 191227 - RNA, 1575 nt, Artificial Sequence
  derived and/or modified CDS sequence (opt4) from glycoprotein__RABV__JN936707.1
auggugccccaggccuuccuguucgugccccugcuggccgugccccugugcuucggcaaguuccccaucuacaccauccccgacaagcugggccccuggagccccaucgacauccaccaccugagcugccccaacaaccuggugguggaggacgagggcugcaccaaccugagcggcuucagcuacauggagcugaaggugggcuacaucagcgccaucaaggugaacggcuucaccugcaccggcguggugaccgaggccgagaccuacaccaacuucgugggcuacgugaccaccaccuucaagagaaagcacuucagacccacccccgacgccugcagaagcgccuacaacuggaagauggccggcgaccccagauacgaggagagccugcacaaccccuaccccgacuaccacuggcugagaaccgugaagaccaccaaggagagcuucgugaucaucagccccagcguggccgaccuggaccccuacgacaagagccugcacagcagaguguuccccagaggcaagugcagcggcaucaccgugagcagcaccuacugcagcaccaaccacgacuacaccaucuggaugcccgagaaccccagacugggcaccagcugcgacaucuucaccaacagcagaggcaagagagccagcaagggcagcaagaccugcggcuucguggacgagagaggccuguacaagagccugaagggcgccugcaagcugaagcugugcggcgugcugggccugagacugauggacggcaccuggguggccauccagaccagcgacgagaccaaguggugcccccccgaccagcuggugaaccugcacgacuuccacagcgacgagaucgagcaccuggugguggaggagcuggugaagaagagagaggagugccuggacgcccuggagagcaucaugaccaccaagagcgugagcuucagaagacugagccaccugagaaagcuggugcccggcuucggcaaggccuacaccaucuucaacaagacccugauggaggccgacgcccacuacaagagcgugagaaccuggaacgagaucauccccagcaagggcugccugagagugggcggcagaugccacccccacgugaacggcguguucuucaacggcaucauccugggccccgacggccacgugcugauccccgagaugcagagcagccugcugcagcagcacauggagcugcuggagagcagcgugaucccccugaugcacccccuggccgaccccagcaccguguucaaggacggcgacgaggccgaggacuucguggaggugcaccugcccgacgugcacaagcaggugagcggcguggaccugggccugcccagcuggggcaaguacgugcugaugagcgccggcauccugaccgcccugaugcugaccaucuuccugaugaccugcugcagaagaaccaacagagccgagagcauccagcacagccugggcgagaccggcagaaaggugagcgugaccagccagagcggcagagugaucagcagcugggagagcuacaagagcggcggcgagaccaagcuguga

SEQ ID NO: 191228 - RNA, 1575 nt, Artificial Sequence; identical to SEQ ID NO: 190887
  derived and/or modified CDS sequence (opt4) from glycoprotein__RABV__JN936708.1

SEQ ID NO: 191229 - RNA, 1575 nt, Artificial Sequence
  derived and/or modified CDS sequence (opt4) from glycoprotein__RABV__JN936709.1
augaucccccaggugcugcuguucgugcccuuccugguguucagccugugcuucggcaaguuccccaucuacaccauccccgacaagcugggccccuggagccccaucgacauccaccaccugagcugccccaacaaccuggugguggaggacgagggcugcaccaaccugagcggcuucagcuacauggagcugaaggugggcuacaucagcgccaucaaggugaacggcuucaccugcaccggcguggugaccgaggccgagaccuacaccaacuucgugggcuacgugaccaccaccuucaagagaaagcacuucagacccaugcccgacgccugcagagccgccuacaacuggaagauggccggcgaccccagauacgaggagagccugcacaaccccuaccccgacuaccacuggcugagaaccgugaagaccaccaaggagagccuggugaucaucagccccagcguggccgaccuggaccccuacgacaagagccugcacagcagaguguuccccggcggcaagugcagcggcaucaccgugagcagcaccugcugcagcaccaaccacgacuacaccaucuggaugcccgagaaccccagacugggcaccagcugcgacaucuucaccaacagcagaggcaagagagccagcaagggcggcaagaccugcggcuucguggacgagagaggccuguacaagagccugaagggcgccugcaagcugaagcugugcggcgugcugggccugagacugauggacggcaccuggguggccauccagaccagcgacgagaucaaguggugcagccccgaccagcuggugaaccugcacgacuuccacagcgacgagaucgagcaccuggugguggaggagcuggugaagaagagagaggagugccuggacgcccuggagaccaucaugaccaccaagagcgugagcuucagaagacugagccaccugagaaagcuggugcccggcuucggcaaggccuacaccaucuucaacaagacccugauggaggccgacgcccacuacaagagcaucagaaccuggaacgagaucauccccagcaagggcugccugagagugggcggcagaugccacccccacgugaacggcguguucuucaacggcaucauccugggccccgacggccacgugcugauccccgagaugcagagcagccugcugcaccagcacauggagcugcuggagagcagcgugaucccccugaugcacccccuggccgaccccagcaccguguucaaggacggcgacgaggccgaggacuucguggaggugcaccugcccgacgugcacaagcagaucagcggcguggaccugggccugcccaacuggggcaaguacgugcugaucagcgccggcgcccugaccgcccugaugcugaugaucuuccugaugaccugcugcagaaagaccaacagagccgagagcauccagcacagccccggcgagaccggcagaaaggugagcgugaccagccacaacggcagagugaucagcagcugggagagcuacaagagcggcggcgagaccaagcuguga

SEQ ID NO: 191230 - RNA, 1575 nt, Artificial Sequence; identical to SEQ ID NO: 190887
  derived and/or modified CDS sequence (opt4) from glycoprotein__RABV__JN936710.1

SEQ ID NO: 191231 - RNA, 1575 nt, Artificial Sequence; identical to SEQ ID NO: 191210
  derived and/or modified CDS sequence (opt4) from glycoprotein__RABV__JN936711.1

SEQ ID NO: 191232 - RNA, 1575 nt, Artificial Sequence
  derived and/or modified CDS sequence (opt4) from glycoprotein__RABV__JN936712.1
augaucccccaggugcugcuguucgugccccugcugguguucagccugugcuucggcaaguuccccaucuacaccauccccgacaagcugggccccuggagccccaucgacauccaccaccugagcugccccaacaaccuggugguggaggacgagggcugcaccaaccugagcggcuucagcuacauggagcugaaggugggcuacaucagcgccaucaaggugaacggcuucaccugcaccggcguggugaccgaggccgagaccuacaccaacuucgugggcuacgugaccaccaccuucaagagaaagcacuucagacccaugcccgacgccugcagagccgccuacaacuggaagauggccggcgaccccagauacgaggagagccugcacaaccccuaccccgacuaccacuggcugagaaccgugaagaccaccaaggagagccuggugaucaucagccccagcguggccgaccuggaccccuacgacaagagccugcacagcagaguguuccccggcggcaagugcagcggcaucaccgugagcagcaccugcugcagcaccaaccacgacuacaccaucuggaugcccgagaaccccagacugggcaccagcugcgacaucuucaccaacagcagaggcaagagagccagcaagggcggcaagaccugcggcuucguggacgagagaggccuguacaagagccugaagggcgccugcaagcugaagcugugcggcgugcugggccugagacugauggacggcaccuggguggccauccagaccagcgacgagaucaaguggugcagccccgaccagcuggugaaccugcacgacuuccacagcgacgagaucgagcaccuggugguggaggagcuggugaagaagagagaggagugccuggacgcccuggagaccaucaugaccaccaagagcgugagcuucagaagacugagccaccugagaaagcuggugcccggcuucggcaaggccuacaccaucuucaacaagacccugauggaggccgacgcccacuacaagagcaucagaaccuggaacgagaucauccccagcaagggcugccugagagugggcggcagaugccacccccacgugaacggcguguucuucaacggcaucauccugggccccgacggccacgugcugauccccgagaugcagagcagccugcugcaccagcacauggagcugcuggagagcagcgugaucccccugaugcacccccuggccgaccccagcaccguguucaaggacggcgacgaggccgaggacuucguggaggugcaccugcccgacgugcacaagcagaucagcggcguggaccugggccugcccaacuggggcaaguacgugcugaucagcgccggcgcccugaccgcccugaugcugaugaucuuccugaugaccugcugcagaaagaccaacagagccgagagcauccagcacagccccggcgagaccggcagaaaggugagcgugaccagccacaacggcagagugaucagcagcugggagagcuacaagagcggcggcgagaccaagcuguga

SEQ ID NO: 191233 - RNA, 1575 nt, Artificial Sequence
  derived and/or modified CDS sequence (opt4) from glycoprotein__RABV__JN936713.1
auggugccccaggccgugcuguucgugccccugcuggccgugccccugugcuucggcaaguuccccaucuacaccauccccgacaagcugggccccuggagccccaucgacauccaccaccugagcugccccaacaaccuggugguggaggacgagggcugcaccaaccugagcggcuucagcuacauggagcugaaggugggcuacaucagcgccaucaaggugaacggcuucaccugcaccggcguggugaccgaggccgagaccuacaccaacuucgugggcuacgugaccaccaccuucaagagaaagcacuucagacccacccccgacgccugcagaagcgccuacaacuggaagauggccggcgaccccagauacgaggagagccugcacaaccccuaccccgacuaccacuggcugagaaccgugagaaccaccaaggagagcuucgugaucaucagccccagcguggccgaccuggaccccuacgacaagagccugcacagcagaguguuccccagaggcaagugcagcggcaucaccgugagcagcaccuacugcagcaccaaccacgacuacaccaucuggaugcccgagaaccccagacugggcaccagcugcgacaucuucaccaacagcagaggcaagagagccagcaagggcagcaagaccugcggcuucguggacgagagaggccuguacaagagccugaagggcgccugcaagcugaagcugugcggcgugcugggccugagacugauggacggcaccuggguggccauccagaccagcgacgagaccaaguggugcccccccgaccagcuggugaaccugcacgacuuccacagcgacgagaucgagcaccuggugguggaggagcuggugaagaagagagaggagugccuggacgcccuggagagcaucaugaccaccaagagcgugagcuucagaagacugagccaccugagaaagcuggugcccggcuucggcaaggccuacaccaucuucaacaagacccugauggaggccgacgcccacuacaagagcgugagaaccuggaacgagaucauccccagcaagggcugccugagagugggcggcagaugccacccccacgugaacggcguguucuucaacggcaucauccugggccccgacggccacgugcugauccccgagaugcagagcagccugcugcagcagcacauggagcugcuggagagcagcgugaucccccugaugcacccccuggccgaccccagcaccguguucaaggacggcgacgaggccgaggacuucguggaggugcaccugcccgacgugcacaagcaggugagcggcguggaccugggccugcccagcuggggcaaguacgugcugaugagcgccggcauccugaccgcccugaugcugaugaucuuccugaugaccugcugcagaagaaccaacagagccgagagcauccagcacagccugggcgagaccggcagaaaggugagcgugaccagccagaacggcagagugaucagcagcugggagagcuacaagagcggcggcgagaccaagcuguga

SEQ ID NO: 191234 - RNA, 1575 nt, Artificial Sequence; identical to SEQ ID NO: 190899
  derived and/or modified CDS sequence (opt4) from glycoprotein__RABV__JN936714.1

SEQ ID NO: 191235 - RNA, 1575 nt, Artificial Sequence
  derived and/or modified CDS sequence (opt4) from glycoprotein__RABV__JN936715.1
auggugccccaggcccugcuguucgugccccugcuggccgugccccugugcuucggcaaguuccccaucuacaccauccccgacaagcugggccccuggagccccaucgacauccaccaccugagcugccccaacaaccuggugguggaggacgagggcugcaccaaccugagcggcuucagcuacauggagcugaaggugggcuacaucagcgccaucaaggugaacggcuucaccugcaccggcguggugaccgaggccgagaccuacaccaacuucgugggcuacgugaccaccaccuucaagagaaagcacuucagacccacccccgacgccugcagaagcgccuacaacuggaagauggccggcgaccccagauacgaggagagccugcacaaccccuaccccgacuaccacuggcugagaaccgugaagaccaccaaggagagcuucgugaucaucagccccagcguggccgaccuggaccccuacgacaagagccugcacagcagaguguuccccagaggcaagugcagcggcaucaccgugagcagcaccuacugcagcaccaaccacgacuacaccaucuggaugcccgagaaccccagacugggcaccagcugcgacaucuucaccaacagcagaggcaagagagccagcaagggcagcaagaccugcggcuucguggacgagagaggccuguacaagagccugaagggcgccugcaagcugaagcugugcggcgugcugggccugagacugauggacggcaccuggguggccauccagaccagcgacgagaccaaguggugcccccccgaccagcuggugaaccugcacgacuuccacagcgacgagaucgagcaccuggugguggaggagcuggugaagaagagagaggagugccuggacgcccuggagagcaucaugaccaccaagagcgugagcuucagaagacugagccaccugagaaagcuggugcccggcuucggcaaggccuacaccaucuucaacaagacccugauggaggccgacgcccacuacaagagcgugagaaccuggaacgagaucauccccagcaagggcugccugagagugggcggcagaugccacccccacgugaacggcguguucuucaacggcaucauccugggccccgacggccacgugcugauccccgagaugcagagcagccugcugcagcagcacauggagcugcuggagagcagcgugaucccccugaugcacccccuggccgaccccagcaccguguucaaggacggcgacgaggccgaggacuucguggaggugcaccugcccgacgugcacaagcaggugagcggcguggaccugggccugcccagcuggggcaaguacgugcugaugagcgccggcauccugaccgcccugaugcugaugaucuuccugaugaccugcugcagaagaaccaacagagccgagagcauccagcacagccugggcgagaccggcagaaaggugagcgugaccagccagaacggcagagugaucagcagcugggagagcuacaagagcggcggcgagaccaagcuguga

SEQ ID NO: 191236 - RNA, 1575 nt, Artificial Sequence
  derived and/or modified CDS sequence (opt4) from glycoprotein__RABV__JN936716.1
augaucccccaggugcugcugcuggugccccugcugguguucagcagcugcuucggcaaguuccccaucuacaccauccccgacaagcugggccccuggagccccaucgacauccaccaccugagcugccccaacaaccuggugguggaggacgagggcugcaccaaccugagcggcuucagcuacauggagcugaaggugggcuacaucagcgccaucaaggugaacggcuucaccugcaccggcguggugaccgaggccgagaccuacaccaacuucgugggcuacgugaccaccaccuucaagagaaagcacuucagacccaugcccgacgccugcagagccgccuacaacuggaagauggccggcgaccccagauacgaggagagccugcacaaccccuaccccgacuaccacuggcugagaaccgugaagaccaccaaggagagccuggugaucaucagccccagcguggccgaccuggaccccuacgacaagagccugcacagcagaguguuccccggcggcaagugcagcggcaucaccgugagcagcaccugcugcagcaccaaccacgacuacaccaucuggaugcccgagaaccccagacugggcaccagcugcgacaucuucaccaacagcagaggcaagagagccagcaagggcggcaagaccugcggcuucguggacgagagaggccuguacaagagccugaagggcgccugcaagcugaagcugugcggcgugcugggccugagacugauggacggcaccuggguggccauccagaccagcgacgagaucaaguggugcagccccgaccagcuggugaaccugcacgacuuccacagcgacgagaucgagcaccuggugguggaggagcuggugaagaagagagaggagugccuggacgcccuggagaccaucaugaccaccaagagcgugagcuucagaagacugagccaccugagaaagcuggugcccggcuucggcaaggccuacaccaucuucaacaagacccugauggaggccgacgcccacuacaagagcaucagaaccuggaacgagaucauccccagcaagggcugccugagagugggcggcagaugccacccccacgugaacggcguguucuucaacggcaucauccugggccccgacggccacgugcugauccccgagaugcagagcagccugcugcaccagcacauggagcugcuggagagcagcgugaucccccugaugcacccccuggccgaccccagcaccguguucaaggacggcgacgaggccgaggacuucguggaggugcaccugcccgacgugcacaagcagaucagcggcguggaccugggccugcccaacuggggcaaguacgugcugaucagcgccggcgcccugaccgcccugaugagcaugaucuuccugaugaccugcugcagaaagaccaacagagccgagagcauccagcacagccccggcgagaccggcagaaaggugagcgugaccagccacaacggcagagugaucagcagcugggagagcuacaagagcggcggcgagaccaagcuguga

SEQ ID NO: 191237 - RNA, 1575 nt, Artificial Sequence
  derived and/or modified CDS sequence (opt4) from glycoprotein__RABV__JN936717.1
augaucccccaggcccugcugcuggugccccugcugguguucagcagcugcuucggcaaguuccccaucuacaccauccccgacaagcugggccccuggagccccaucgacauccaccaccugagcugccccaacaaccuggugguggaggacgagggcugcaccaaccugagcggcuucagcuacauggagcugaaggugggcuacaucagcgccaucaaggugaacggcuucaccugcaccggcguggugaccgaggccgagaccuacaccaacuucgugggcuacgugaccaccaccuucaagagaaagcacuucagacccaugcccgacgccugcagagccgccuacaacuggaagauggccggcgaccccagauacgaggagagccugcacaaccccuaccccgacuaccacuggcugagaaccgugaagaccaccaaggagagccuggugaucaucagccccagcguggccgaccuggaccccuacgacaagagccugcacagcagaguguuccccggcggcaagugcagcggcaucaccgugagcagcaccugcugcagcaccaaccacgacuacaccaucuggaugcccgagaaccccagacugggcaccagcugcgacaucuucaccaacagcagaggcaagagagccagcaagggcggcaagaccugcggcuucguggacgagagaggccuguacaagagccugaagggcgccugcaagcugaagcugugcggcgugcugggccugagacugauggacggcaccuggguggccauccagaccagcgacgagaucaaguggugcagccccgaccagcuggugaaccugcacgacuuccacagcgacgagaucgagcaccuggugguggaggagcuggugaagaagagagaggagugccuggacgcccuggagaccaucaugaccaccaagagcgugagcuucagaagacugagccaccugagaaagcuggugcccggcuucggcaaggccuacaccaucuucaacaagacccugauggaggccgacgcccacuacaagagcaucagaaccuggaacgagaucauccccagcaagggcugccugagagugggcggcagaugccacccccacgugaacggcguguucuucaacggcaucauccugggccccgacggccacgugcugauccccgagaugcagagcagccugcugcaccagcacauggagcugcuggagagcagcgugaucccccugaugcacccccuggccgaccccagcaccguguucaaggacggcgacgaggccgaggacuucguggaggugcaccugcccgacgugcacaagcagaucagcggcguggaccugggccugcccaacuggggcaaguacgugcugaucagcgccggcgcccugaccgcccugaugagcaugaucuuccugaugaccugcugcagaaagaccaacagagccgagagcauccagcacagccccggcgagaccggcagaaaggugagcgugaccagccacaacggcagagugaucagcagcugggagagcuacaagagcggcggcgagaccaagcuguga

SEQ ID NO: 191238 - RNA, 1575 nt, Artificial Sequence
  derived and/or modified CDS sequence (opt4) from glycoprotein__RABV__JN936718.1
augaucccccaggugcugcugcuggugccccugcugguguucagcagcugcuucggcaaguuccccaucuacaccauccccgacaagcugggccccuggagccccaucgacauccaccaccugagcugccccaacaaccuggugguggaggacgagggcugcaccaaccugagcggcuucagcuacauggagcugaaggugggcuacaucagcgccaucaaggugaacggcuucaccugcaccggcguggugaccgaggccgagaccuacaccaacuucgugggcuacgugaccaccaccuucaagagaaagcacuucagacccaugcccgacgccugcagagccgccuacaacuggaagauggccggcgaccccagauacgaggagagccugcacaaccccuaccccgacuaccacuggcugagaaccgugaagaccaccaaggagagccuggugaucaucagccccagcguggccgaccuggaccccuacgacaagagccugcacagcagaguguuccccggcggcaagugcagcggcaucaccgugagcagcaccugcugcagcaccaaccacgacuacaccaucuggaugcccgagaaccccagacugggcaccagcugcgacaucuucaccaacagcagaggcaagagagccagcaagggcggccagaccugcggcuucguggacgagagaggccuguacaagagccugaagggcgccugcaagcugaagcugugcggcgugcugggccugagacugauggacggcaccuggguggccauccagaccagcgacgagaucaaguggugcagccccgaccagcuggugaaccugcacgacuuccacagcgacgagaucgagcaccuggugguggaggagcuggugaagaagagagaggagugccuggacgcccuggagaccaucaugaccaccaagagcgugagcuucagaagacugagccaccugagaaagcuggugcccggcuucggcaaggccuacaccaucuucaacaagacccugauggaggccgacgcccacuacaagagcaucagaaccuggaacgagaucauccccagcaagggcugccugagagugggcggcagaugccacccccacgugaacggcguguucuucaacggcaucauccugggccccgacggccacgugcugauccccgagaugcagagcagccugcugcaccagcacauggagcugcuggagagcagcgugaucccccugaugcacccccuggccgaccccagcaccguguucaaggacggcgacgaggccgaggacuucguggaggugcaccugcccgacgugcacaagcagaucagcggcguggaccugggccugcccaacuggggcaaguacgugcugaucagcgccggcgcccugaccgcccugaugagcaugaucuuccugaugaccugcugcagaaagaccaacagagccgagagcauccagcacagccccggcgagaccggcagaaaggugagcgugaccagccacaacggcagagugaucagcagcugggagagcuacaagagcggcggcgagaccaagcuguga

SEQ ID NO: 191239 - RNA, 1575 nt, Artificial Sequence
  derived and/or modified CDS sequence (opt4) from glycoprotein__RABV__JN936719.1
augaucccccaggcccugcuguucgugccccugcuggccgugccccugugcuucggcaaguuccccaucuacaccauccccgacaagcugggccccuggagccccaucgacauccaccaccugagcugccccaacaaccuggugguggaggacgagggcugcaccaaccugagcggcuucagcuacauggagcugaaggugggcuacaucagcgccaucaaggugaacggcuucaccugcaccggcguggugaccgaggccgagaccuacaccaacuucgugggcuacgugaccaccaccuucaagagaaagcacuucagacccacccccgacgccugcagaagcgccuacaacuggaagauggccggcgaccccagauacgaggagagccugcacaaccccuaccccgacuaccacuggcugagaaccgugaagaccaccaaggagagcuucgugaucaucagccccagcguggccgaccuggaccccuacgacaagagccugcacagcagaguguuccccagaggcaagugcagcggcaucaccgugagcagcaccuacugcagcaccaaccacgacuacaccaucuggaugcccgagaaccccagacugggcaccagcugcgacaucuucaccaacagcagaggcaagagagccagcaagggcagcaagaccugcggcuucguggacgagagaggccuguacaagagccugaagggcgccugcaagcugaagcugugcggcgugcugggccugagacugauggacggcaccuggguggccauccagaccagcgacgagaccaaguggugcccccccgaccagcuggugaaccugcacgacuuccacagcgacgagaucgagcaccuggugguggaggagcuggugaagaagagagaggagugccuggacgcccuggagagcaucaugaccaccaagagcgugagcuucagaagacugagccaccugagaaagcuggugcccggcuucggcaaggccuacaccaucuucaacaagacccugauggaggccgacgcccacuacaagagcaucagaaccuggaacgagaucauccccagcaagggcugccugagagugggcggcagaugccacccccacgugaacggcguguucuucaacggcaucauccugggccccgacggccacgugcugauccccgagaugcagagcagccugcugcaccagcacauggagcugcuggagagcagcgugaucccccugaugcacccccuggccgaccccagcaccguguucaaggacggcgacgaggccgaggacuucguggaggugcaccugcccgacgugcacaagcagaucagcggcguggaccugggccugcccagcuggggcaaguacgugcugaugagcgccggcgcccugaccgcccugaugcugaugaucuuccugaugaccugcugcagaagaaccaacagagccgagagcauccagcacagccugggcgagaccggcagaaaggugagcgugaccagccagaacggcagagugaucagcagcugggagagcuacaagagcggcggcgagaccaagcuguga

SEQ ID NO: 191240 - RNA, 1575 nt, Artificial Sequence
  derived and/or modified CDS sequence (opt4) from glycoprotein__RABV__JN936720.1
augaucccccaggcccugcuguucgugccccugcugguguucccccugugcuucggcaaguuccccaucuacaccauccccgacaagcugggccccuggagccccaucgacauccaccaccugagcugccccaacaaccuggugguggaggacgagggcugcaccaaccugagcggcuucagcuacauggagcugaaggugggcuacaucagcgccaucaaggugaacggcuucaccugcaccggcguggugaccgaggccgagaccuacaccaacuucgugggcuacgugaccaccaccuucaagagaaagcacuucagacccacccccgacgccugcagaagcgccuacaacuggaagauggccggcgaccccagauacgaggagagccugcacaaccccuaccccgacuaccacuggcugagaaccgugaagaccaccaaggagagcguggugaucaucagccccagcguggccgaccuggaccccuacgacaagagccugcacagcagaguguuccccagaggcaagugcagcggcaucaccgugagcagcgccuacugcagcaccaaccacgacuacaccaucuggaugcccgagaaccccagacugggcaccagcugcgacaucuucaccaacagcagaggcaagagagccagcaagggcagcaagaccugcggcuucguggacgagagaggccuguacaagagccugaagggcgccugcaagcugaagcugugcggcgugcugggccugagacugauggacggcaccuggguggccauccagaccagcaacgagaccaaguggugcccccccgaccagcuggugaaccugcacgacuuccacagcgacgagaucgagcaccuggugguggaggagcugguggagaagagagaggagugccuggacgcccuggagagcaucaugaccaccaagagcgugagcuucagaagacugagccaccugagaaagcuggugcccggcuucggcaaggccuacaccaucuucaacaagacccugauggaggccgacgcccacuacaagagcgugagaaccuggaacgagaucauccccagcaagggcugccugagagugggcggcagaugccacccccacgugaacggcguguucuucaacggcaucauccugggccccgacggccacgugcugauccccgagaugcagagcagccugcugcagcagcacauggagcugcuggagagcagcgugaucccccugaugcacccccuggccgaccccagcaccguguucaaggacggcgacgaggccgaggacuucguggaggugcaccugcccgacgugcacaagcaggugagcggcguggaccugggccugcccagcuggggcaaguacgugcugaugagcgccggcauccugaccgcccugaugcugaugaucuuccugaugaccugcugcagaagaaccaacagagccgagagcauccagcacagccugggcgagaccggcagaaaggugagcgugaccagccagaacggcagagugaucagcagcugggagagcuacaagagcggcggcgagaccaagcuguga

SEQ ID NO: 191241 - RNA, 1575 nt, Artificial Sequence
  derived and/or modified CDS sequence (opt4) from glycoprotein__RABV__JN936721.1
augaucccccaggcccugcuguucgugccccugcugguguucccccugugcuucggcaaguuccccaucuacaccauccccgacaagcugggccccuggagccccaucgacauccaccaccugagcugccccaacaaccuggugguggaggacgagggcugcaccaaccugagcggcuucagcuacauggagcugaaggugggcuacaucagcgccaucaaggugaacggcuucaccugcaccggcguggugaccgaggccgagaccuacaccaacuucgugggcuacgugaccaccaccuucaagagaaagcacuucagacccacccccgacgccugcagaagcgccuacaacuggaagauggccggcgaccccagauacgaggagagccugcacaaccccuaccccgacuaccacuggcugagaaccgugaagaccaccaaggagagcguggugaucaucagccccagcguggccgaccuggaccccuacgacaagagccugcacagcagaguguuccccagaggcaagugcagcggcaucaccgugagcagcgccuacugcagcaccaaccacgacuacaccaucuggaugcccgagaaccccagacugggcaccagcugcgacaucuucaccaacagcagaggcaagagagccagcaagggcagcaagaccugcggcuucguggacgagagaggccuguacaagagccugaagggcgccugcaagcugaagcugugcggcgugcugggccugagacugauggacggcaccuggguggccauccagaccagcaacgagaccaaguggugcccccccgaccagcuggugaaccugcacgacuuccacagcgacgagaucgagcaccuggugguggaggagcugguggagaagagagaggagugccuggacgcccuggagaccaucaugaccaccaagagcgugagcuucagaagacugagccaccugagaaagcuggugcccggcuucggcaaggccuacaccaucuucaacaagacccugauggaggccgacgcccacuacaagagcaucagaaccuggaacgagaucauccccagcaagggcugccugagagugggcggcagaugccacccccacgugaacggcguguucuucaacggcaucauccugggccccgacggccacgugcugauccccgagaugcagagcagccugcugcaccagcacauggagcugcuggagagcagcgugaucccccugaugcacccccuggccgaccccagcaccguguucaaggacggcgacgaggccgaggacuucguggaggugcaccugcccgacgugcacaagcagaucagcggcguggaccugggccugcccaacuggggcaaguacgugcugaucagcgccggcgcccugaccgcccugaugagcaugaucuuccugaugaccugcugcagaaagaccaacagagccgagagcauccagcacagccccggcgagaccggcagaaaggugagcgugaccagccacaacggcagagugaucagcagcugggagagcuacaagagcggcggcgagaccaagcuguga

SEQ ID NO: 191242 - RNA, 1575 nt, Artificial Sequence
  derived and/or modified CDS sequence (opt4) from glycoprotein__RABV__JN936722.1
augaucccccaggcccugcuguucgugccccugcugguguucccccugugcuucggcaaguuccccaucuacaccauccccgacaagcugggccccuggagccccaucgacauccaccaccugagcugccccaacaaccuggugguggaggacgagggcugcaccaaccugagcggcuucagcuacauggagcugaaggugggcuacaucagcgccaucaaggugaacggcuucaccugcaccggcguggugaccgaggccgagaccuacaccaacuucgugggcuacgugaccaccaccuucaagagaaagcacuucagacccacccccgacgccugcagaagcgccuacaacuggaagauggccggcgaccccagauacgaggagagccugcacaaccccuaccccgacuaccacuggcugagaaccgugaagaccaccaaggagagcguggugaucaucagccccagcguggccgaccuggaccccuacgacaagagccugcacagcagaguguuccccagaggcaagugcagcggcaucaccgugagcagcgccuacugcagcaccaaccacgacuacaccaucuggaugcccgagaaccccagacugggcaccagcugcgacaucuucaccaacagcagaggcaagagagccagcaagggcagcaagaccugcggcuucguggacgagagaggccuguacaagagccugaagggcgccugcaagcugaagcugugcggcgugcugggccugagacugauggacggcaccuggguggccauccagaccagcaacgagaccaaguggugcccccccgaccagcuggugaaccugcacgacuuccacagcgacgagaucgagcaccuggugguggaggagcugguggagaagagagaggagugccuggacgcccuggagagcaucaugaccaccaagagcgugagcuucagaagacugagccaccugagaaagcuggugcccggcuucggcaaggccuacaccaucuucaacaagacccugauggaggccgacgcccacuacaagagcaucagaaccuggaacgagaucauccccagcaagggcugccugagagugggcggcagaugccacccccacgugaacggcguguucuucaacggcaucauccugggccccgacggccacgugcugauccccgagaugcagagcagccugcugcaccagcacauggagcugcuggagagcagcgugaucccccugaugcacccccuggccgaccccagcaccguguucaaggacggcgacgaggccgaggacuucguggaggugcaccugcccgacgugcacaagcagaucagcggcguggaccugggccugcccaacuggggcaaguacgugcugaucagcgccggcgcccugaccgcccugaugagcaugaucuuccugaugaccugcugcagaaagaccaacagagccgagagcauccagcacagccccggcgagaccggcagaaaggugagcgugaccagccacaacggcagagugaucagcagcugggagagcuacaagagcggcggcgagaccaagcuguga

SEQ ID NO: 191243 - RNA, 1575 nt, Artificial Sequence
  derived and/or modified CDS sequence (opt4) from glycoprotein__RABV__JN936723.1
augaucccccaggcccugcugcuggugccccugcuggccuucccccugugcuucggcaaguuccccaucuacaccauccccgacaagcugggccccuggagccccaucgacauccaccaccugagcugccccaacaaccuggugguggaggacgagggcugcaccaaccugagcggcuucagcuacauggagcugaaggugggcuacaucagcgccaucaaggugaacggcuucaccugcaccggcguggugaccgaggccgagaccuacaccaacuucgugggcuacgugaccaccaccuucaagagaaagcacuucagacccacccccgacgccugcagaagcgccuacaacuggaagauggccggcgaccccagauacgaggagagccugcacaaccccuaccccgacuaccacuggcugagaaccgugaagaccaccaaggagagccuggugaucaucagccccagcguggccgaccuggaccccuacgacaagagccugcacagcagaguguuccccagaggcaagugcagcggcaucaccgugagcagcaccugcugcagcaccaaccacgacuacaccaucuggaugcccgagaaccccagacugggcaccagcugcgacaucuucaccaacagcagaggcaagagagccagcaagggcagcaagaccugcggcuucguggacgagagaggccuguacaagagccugaagggcgccugcaagcugaagcugugcggcgugcugggccugagacugauggacggcaccuggguggccauccagaccagcgacgagaucaaguggugcccccccgaccagcuggugaaccugcacgacuuccacagcgacgagaucgagcaccuggugguggaggagcuggugaagaagagagaggagugccuggacgcccuggagaccaucaugaccaccaagagcgugagcuucagaagacugagccaccugagaaagcuggugcccggcuucggcaaggccuacaccaucuucaacaagacccugauggaggccgacgcccacuacaagagcaucagaaccuggaacgagaucauccccagcaagggcugccugagagugggcggcagaugccacccccacgugaacggcguguucuucaacggcaucauccugggccccgacggccacgugcugauccccgagaugcagagcagccugcugcaccagcacauggagcugcuggagagcagcgugaucccccugaugcacccccuggccgaccccagcaccguguucaaggacggcgacgaggccgaggacuucguggaggugcaccugcccgacgugcacaagcagaucagcggcguggaccugggccugcccaacuggggcaaguacgugcugaucagcgccggcgcccugaccgcccugaugagcaugaucuuccugaugaccugcugcagaaagaccaacagagccgagagcauccagcacagccccggcgagaccggcagaaaggugagcgugaccagccacaacggcagagugaucagcagcugggagagcuacaagagcggcggcgagaccaagcuguga

SEQ ID NO: 191244 - RNA, 1575 nt, Artificial Sequence
  derived and/or modified CDS sequence (opt4) from glycoprotein__RABV__JN936724.1
augaucccccaggcccugcuguucgugccccugcugguguucccccugugcuucggcaaguuccccaucuacaccauccccgacaagcugggccccuggagccccaucgacauccaccaccugagcugccccaacaaccuggugguggaggacgagggcugcaccaaccugagcggcuucagcuacauggagcugaaggugggcuacaucagcgccaucaaggugaacggcuucaccugcaccggcguggugaccgaggccgagaccuacaccaacuucgugggcuacgugaccaccaccuucaagagaaagcacuucagacccacccccgacgccugcagaagcgccuacaacuggaagauggccggcgaccccagauacgaggagagccugcacaaccccuaccccgacuaccacuggcugagaaccgugaagaccaccaaggagagcguggugaucaucagccccagcguggccgaccuggaccccuacgacaagagccugcacagcagaguguuccccagaggcaagugcagcggcaucaccgugagcagcgccuacugcagcaccaaccacgacuacaccaucuggaugcccgagaaccccagacugggcaccagcugcgacaucuucaccaacagcagaggcaagagagccagcaagggcagcaagaccugcggcuucguggacgagagaggccuguacaagagccugaagggcgccugcaagcugaagcugugcggcgugcugggccugagacugauggacggcaccuggguggccauccagaccagcaacgagaccaaguggugcccccccgaccagcuggugaaccugcacgacuuccacagcgacgagaucgagcaccuggugguggaggagcugguggagaagagagaggagugccuggacgcccuggagaccaucaugaccaccaagagcgugagcuucagaagacugagccaccugagaaagcuggugcccggcuucggcaaggccuacaccaucuucaacaagacccugauggaggccgacgcccacuacaagagcaucagaaccuggaacgagaucauccccagcaagggcugccugagagugggcggcagaugccacccccacgugaacggcguguucuucaacggcaucauccugggccccgacggccacgugcugauccccgagaugcagagcagccugcugcaccagcacauggagcugcuggagagcagcgugaucccccugaugcacccccuggccgaccccagcaccguguucaaggacggcgacgaggccgaggacuucguggaggugcaccugcccgacgugcacaagcagaucagcggcguggaccugggccugcccaacuggggcaaguacgugcugaucagcgccggcgcccugaccgcccugaugcugaccaucuuccugaugaccugcugcagaaagaccagcagagccgagagcauccagcacagccccggcgagaccggcagaaaggugagcgugaccagccacaacggcagagugaucagcagcugggagagcuacaagagcggcggcgagaccaagcuguga

SEQ ID NO: 191245 - RNA, 1575 nt, Artificial Sequence; identical to SEQ ID NO: 190906
  derived and/or modified CDS sequence (opt4) from glycoprotein__RABV__JN936725.1

SEQ ID NO: 191246 - RNA, 1575 nt, Artificial Sequence; identical to SEQ ID NO: 191127
  derived and/or modified CDS sequence (opt4) from glycoprotein__RABV__JN936726.1

SEQ ID NO: 191247 - RNA, 1575 nt, Artificial Sequence; identical to SEQ ID NO: 190906
  derived and/or modified CDS sequence (opt4) from glycoprotein__RABV__JN936727.1

SEQ ID NO: 191248 - RNA, 1575 nt, Artificial Sequence; identical to SEQ ID NO: 190906
  derived and/or modified CDS sequence (opt4) from glycoprotein__RABV__JN936728.1

SEQ ID NO: 191249 - RNA, 1575 nt, Artificial Sequence; identical to SEQ ID NO: 190906
  derived and/or modified CDS sequence (opt4) from glycoprotein__RABV__JN936729.1

SEQ ID NO: 191250 - RNA, 1575 nt, Artificial Sequence; identical to SEQ ID NO: 190905
  derived and/or modified CDS sequence (opt4) from glycoprotein__RABV__JN936731.1

SEQ ID NO: 191251 - RNA, 1575 nt, Artificial Sequence; identical to SEQ ID NO: 190905
  derived and/or modified CDS sequence (opt4) from glycoprotein__RABV__JN936732.1

SEQ ID NO: 191252 - RNA, 1575 nt, Artificial Sequence
  derived and/or modified CDS sequence (opt4) from glycoprotein__RABV__JN936733.1
augaucccccaggugcugcuguucgugccccugcugguguucagcagcugcuucggcaaguuccccaucuacaccauccccgacaagcugggccccuggagccccaucgacauccaccaccugagcugccccaacaaccuggugguggaggacgagggcugcaccaaccugagcggcuucagcuacauggagcugaaggugggcuacaucagcgccaucaaggugaacggcuucaccugcaccggcguggugaccgaggccgagaccuacaccaacuucgugggcuacgugaccaccaccuucaagagaaagcacuucagacccaugcccgacgccugcagagccgccuacaacuggaagauggccggcgaccccagauacgaggagagccugcacaaccccuaccccgacuaccacuggcugagaaccgugaagaccaccaaggagagccuggugaucaucagccccagcguggccgaccuggaccccuacgacaagagccugcacagcagaguguuccccggcggcaagugcagcggcaucaccgugagcagcaccugcugcagcaccaaccacgacuacaccaucuggaugcccgagaaccccagacugggcaccagcugcgacaucuucaccaacagcagaggcaagagagccagcaagggcggcaagaccugcggcuucguggacgagagaggccuguacaagagccugaagggcgccugcaagcugaagcugugcggcgugcugggccugagacugauggacggcaccuggguggccauccagaccagcgacgagaucaaguggugcagccccgaccagcuggugaaccugcacgacuuccacagcgacgagaucgagcaccuggugguggaggagcuggugaagaagagagaggagugccuggacgcccuggagaccaucaugaccaccaagagcgugagcuucagaagacugagccaccugagaaagcuggugcccggcuucggcaaggccuacaccaucuucaacaagacccugauggaggccgacgcccacuacaagagcaucagaaccuggaacgagaucauccccagcaagggcugccugagagugggcggcagaugccacccccacgugaacggcguguucuucaacggcaucauccugggccccgacggccacgugcugauccccgagaugcagagcagccugcugcaccagcacauggagcugcuggagagcagcgugaucccccugaugcacccccuggccgaccccagcaccguguucaaggacggcgacgaggccgaggacuucguggaggugcaccugcccgacgugcacaagcagaucagcggcguggaccugggccugcccaacuggggcaaguacgugcugaucagcgccggcgcccugaccgcccugaugcugaccaucuuccugaugaccugcugcagaaagaccaacagagccgagagcauccaccacagccccggcgagaccggcagaaaggugagcgugaccagccacaacggcagagugaucagcagcugggagagcuacaagagcggcagcgagaccaagcuguga

SEQ ID NO: 191253 - RNA, 1575 nt, Artificial Sequence; identical to SEQ ID NO: 191252
  derived and/or modified CDS sequence (opt4) from glycoprotein__RABV__JN936734.1

SEQ ID NO: 191254 - RNA, 1575 nt, Artificial Sequence; identical to SEQ ID NO: 190906
  derived and/or modified CDS sequence (opt4) from glycoprotein__RABV__JN936735.1

SEQ ID NO: 191255 - RNA, 1575 nt, Artificial Sequence; identical to SEQ ID NO: 190906
  derived and/or modified CDS sequence (opt4) from glycoprotein__RABV__JN936736.1

SEQ ID NO: 191256 - RNA, 1575 nt, Artificial Sequence
  derived and/or modified CDS sequence (opt4) from glycoprotein__RABV__JN936737.1
augaucccccaggugcugcuguucgugccccugcugguguucagcagcugcuucggcaaguuccccaucuacaccauccccgacaagcugggccccuggagccccaucgacauccaccaccugagcugccccaacaaccuggugguggaggacgagggcugcaccaaccugagcggcuucagcuacauggagcugaaggugggcuacaucagcgccaucaaggugaacggcuucaccugcaccggcguggugaccgaggccgagaccuacaccaacuucgugggcuacgugaccaccaccuucaagagaaagcacuucagacccaugcccgacgccugcagagccgccuacaacuggaagauggccggcgaccccagauacgaggagagccugcacaaccccuaccccgacuaccacuggcugagaaccgugaagaccaccaaggagagccuggugaucaucagccccagcguggccgaccuggaccccuacgacaagagccugcacagcagaguguuccccggcggcaagugcagcggcaucaccgugagcagcaccugcugcagcaccaaccacgacuacaccaucuggaugcccgagaaccccagacugggcaccagcugcgacaucuucaccaacagcagaggcaagagagccagcaagggcggcaagaccugcggcuucguggacgagagaggccuguacaagagccugaagggcgccugcaagcugaagcugugcggcgugcugggccugagacugauggacggcaccuggguggcccugcagaccagcgacgagaucaaguggugcagccccgaccagcuggugaaccugcacgacuuccacagcgacgagaucgagcaccuggugguggaggagcuggugaagaagagagaggagugccuggacgcccuggagaccaucaugaccaccaagagcgugagcuucagaagacugagccaccugagaaagcuggugcccggcuucggcaaggccuacaccaucuucaacaagacccugauggaggccgacgcccacuacaagagcaucagaaccuggaacgagaucauccccagcaagggcugccugagagugggcggcagaugccacccccacgugaacggcguguucuucaacggcaucauccugggccccgacggccacgugcugauccccgagaugcagagcagccugcugcaccagcacauggagcugcuggagagcagcgugaucccccugaugcacccccuggccgaccccagcaccguguucaaggacggcgacgaggccgaggacuucguggaggugcaccugcccgacgugcacaagcagaucagcggcguggaccugggccugcccaacuggggcaaguacgugcugaucagcgccggcgcccugaccgcccugaugcugaccaucuuccugaugaccugcugcagaaagaccaacagagccggcagcauccagcacagccccggcgagaccggcagaaaggugagcgugaccagccacaacggcagagugaucagcagcugggagagcuacaagagcggcagcgagaccaagcuguga

SEQ ID NO: 191257 - RNA, 1575 nt, Artificial Sequence; identical to SEQ ID NO: 190905
  derived and/or modified CDS sequence (opt4) from glycoprotein__RABV__JN936738.1

SEQ ID NO: 191258 - RNA, 1575 nt, Artificial Sequence; identical to SEQ ID NO: 190905
  derived and/or modified CDS sequence (opt4) from glycoprotein__RABV__JN936739.1

SEQ ID NO: 191259 - RNA, 1575 nt, Artificial Sequence; identical to SEQ ID NO: 190905
  derived and/or modified CDS sequence (opt4) from glycoprotein__RABV__JN936740.1

SEQ ID NO: 191260 - RNA, 1575 nt, Artificial Sequence; identical to SEQ ID NO: 190905
  derived and/or modified CDS sequence (opt4) from glycoprotein__RABV__JN936741.1

SEQ ID NO: 191261 - RNA, 1575 nt, Artificial Sequence; identical to SEQ ID NO: 190905
  derived and/or modified CDS sequence (opt4) from glycoprotein__RABV__JN936742.1

SEQ ID NO: 191262 - RNA, 1575 nt, Artificial Sequence; identical to SEQ ID NO: 190905
  derived and/or modified CDS sequence (opt4) from glycoprotein__RABV__JN936743.1

SEQ ID NO: 191263 - RNA, 1575 nt, Artificial Sequence
  derived and/or modified CDS sequence (opt4) from glycoprotein__RABV__JN936744.1
augauccugcaggugcugcuguucgugccccugcugguguucagcagcugcuucggcaaguuccccaucuacaccauccccgacaagcugggccccuggagccccaucgacauccaccaccugagcugccccaacaaccuggugguggaggacgagggcugcaccaaccugagcggcuucagcuacauggagcugaaggugggcuacaucagcgccaucaaggugaacggcuucaccugcaccggcguggugaccgaggccgagaccuacaccaacuucgugggcuacgugaccaccaccuucaagagaaagcacuucagacccaugcccgacgccugcagagccgccuacaacuggaagauggccggcgaccccagauacgaggagagccugcacaaccccuaccccgacuaccacuggcugagaaccgugaagaccaccaaggagagccuggugaucaucagccccagcguggccgaccuggaccccuacgacaagagccugcacagcagaguguuccccggcggcaagugcagcggcaucaccgugagcagcaccugcugcagcaccaaccacgacuacaccaucuggaugcccgagaaccccagacugggcaccagcugcgacaucuucaccaacagcagaggcaagagagccagcaagggcggcaagaccugcggcuucguggacgagagaggccuguacaagagccugaagggcgccugcaagcugaagcugugcggcgugcugggccugagacugauggacggcaccuggguggccauccagaccagcgacgagaucaaguggugcccccccgaccagcuggugaaccugcacgacuuccacagcgacgagaucgagcaccuggugguggaggagcuggugaagaagagagaggagugccuggacgcccuggagaccaucaugaccaccaagagcgugagcuucagaagacugagccaccugagaaagcuggugcccggcuucggcaaggccuacaccaucuucaacaagacccugauggaggccgacgcccacuacaagagcaucagaaccuggaacgagaucauccccagcaagggcugccugagagugggcggcagaugccacccccacgugaacggcguguucuucaacggcaucauccugggccccgacggccacgugcugauccccgagaugcagagcagccugcugcaccagcacauggagcugcuggagagcagcgugaucccccugaugcacccccuggccgaccccagcaccguguucaaggacggcgacgaggccgaggacuucguggaggugcaccugcccgacgugcacaagcagaucagcggcguggaccugggccugcccaacuggggcaaguacgugcugaucagcgccggcgcccugaccgcccugaugcugaugaucuuccugaugaccugcugcagaaagaacaacagagccgagagcauccagcacagccccggcgagaccggcagaaaggugagcgugaccagccacaacggcagagugaucagcagcugggagagcuacaagagcggcggcgagaccaagcuguga

SEQ ID NO: 191264 - RNA, 1575 nt, Artificial Sequence; identical to SEQ ID NO: 191144
  derived and/or modified CDS sequence (opt4) from glycoprotein__RABV__JN936745.1

SEQ ID NO: 191265 - RNA, 1575 nt, Artificial Sequence
  derived and/or modified CDS sequence (opt4) from glycoprotein__RABV__JN936746.1
augaucccccaggugcugcuguucgugccccugcugguguucagcagcugcuucggcaaguuccccaucuacaccauccccgacaagcugggccccuggagccccaucgacauccaccaccugagcugccccaacaaccuggugguggaggacgagggcugcaccaaccugagcggcuucagcuacauggagcugaaggugggcuacaucagcgccaucaaggugaacggcuucaccugcaccggcguggugaccgaggccgagaccuacaccaacuucgugggcuacgugaccaccaccuucaagagaaagcacuucagacccaugcccgacgccugcagagccgccuacaacuggaagauggccggcgaccccagauacgaggagagccugcacaaccccuaccccgacuaccacuggcugagaaccgugaagaccaccaaggagagccuggugaucaucagccccagcguggccgaccuggaccccuacgacaagagccugcacagcagaguguuccccggcggcaagugcagcggcaucaccgugagcagcaccugcugcagcaccaaccacgacuacaccaucuggaugcccgagaaccccagacugggcaccagcugcgacaucuucaccaacagcagaggcaagagagccagcaagggcggcaagaccugcggcuucguggacgagagaggccuguacaagagccugaagggcgccugcaagcugaagcugugcggcgugcugggccugagacugauggacggcaccuggguggccauccagaccagcgacgagaucaaguggugcagccccgaccagcuggugaaccugcacgacuuccacagcgacgagaucgagcaccuggugguggaggagcuggugaagaagagagaggagugccuggacgcccuggagaccaucaugaccaccaagagcgugagcuucagaagacugagccaccugagaaagcuggugcccggcuucggcaaggccuacaccaucuucaacaagacccugauggaggccgacgcccacuacaagagcaucagaaccuggaacgagaucauccccagcaagggcugccugagagugggcggcagaugccacccccacgugaacggcguguucuucaacggcaucauccugggccccgacggccacgugcugauccccgagaugcagagcagccugcugcaccagcacauggagcugcuggagagcagcgugaucccccugaugcacccccuggccgaccccagcaccguguucaaggacggcgacgaggccgaggacuucguggaggugcaccugcccgacgugcacaagcagaucagcggcguggaccugggccugcccaacuggggcaaguacgugcugaucagcgccggcgcccugaccgcccugaugcugaugaucuuccugaugaccugcugcagaaacaccaacagagccgagagcauccagcacagccccggcgagaccggcagaaaggugagcgugaccagccacaacggcagagugaucagcagcugggagagcuacaagagcggcggcgagaccaagcuguga

SEQ ID NO: 191266 - RNA, 1575 nt, Artificial Sequence
  derived and/or modified CDS sequence (opt4) from glycoprotein__RABV__JN936747.1
augauccugcaggugcugcuguucgugccccugcugguguucagcagcugcuucggcaaguuccccaucuacaccauccccgacaagcugggccccuggagccccaucgacauccaccaccugagcugccccaacaaccuggugguggaggacgagggcugcaccaaccugagcggcuucagcuacauggagcugaaggugggcuacaucagcgccaucaaggugaacggcuucaccugcaccggcguggugaccgaggccgagaccuacaccaacuucgugggcuacgugaccaccaccuucaagagaaagcacuucagacccaugcccgacgccugcagagccgccuacaacuggaagauggccggcgaccccagauacgaggagagccugcacaaccccuaccccgacuaccacuggcugagaaccgugaagaccaccaaggagagccuggugaucaucagccccagcguggccgaccuggaccccuacgacaagagccugcacagcagaguguuccccggcggcaagugcagcggcaucaccgugagcagcaccugcugcagcaccaaccacgacuacaccaucuggaugcccgagaaccccagacugggcaccagcugcgacaucuucaccaacagcagaggcaagagagccagcaagggcggcaagaccugcggcuucguggacgagagaggccuguacaagagccugaagggcgccugcaagcugaagcugugcggcgugcugggccugagacugauggacggcaccuggguggccauccagaccagcgacgagaucaaguggugcccccccgaccagcuggugaaccugcacgacuuccacagcgacgagaucgagcaccuggugguggaggagcuggugaagaagagagaggagugccuggacgcccuggagaccaucaugaccaccaagagcgugagcuucagaagacugagccaccugagaaagcuggugcccggcuucggcaaggccuacaccaucuucaacaagacccugauggaggccgacgcccacuacaagagcaucagaaccuggaacgagaucauccccagcaagggcugccugagagugggcggcagaugccacccccacgugaacggcguguucuucaacggcaucauccugggccccgacggccacgugcugauccccgagaugcagagcagccugcugcaccagcacauggagcugcuggagagcagcgugaucccccugaugcacccccuggccgaccccagcaccguguucaaggacggcgacgaggccgaggacuucguggaggugcaccugcccgacgugcacaagcagaucagcggcguggaccugggccugcccaacuggggcaaguacgugcugaucagcgccggcgcccugaccgcccugaugcugaugaucuuccugaugaccugcugcagaaagaacaacagagccgagagcauccagcacagccccggcgagaccggcagaaaggugagcgugaccagccacaacggcagagugaccagcagcugggagagcuacaagagcggcggcgagaccaagcuguga

SEQ ID NO: 191267 - RNA, 1575 nt, Artificial Sequence; identical to SEQ ID NO: 191144
  derived and/or modified CDS sequence (opt4) from glycoprotein__RABV__JN936748.1

SEQ ID NO: 191268 - RNA, 1575 nt, Artificial Sequence; identical to SEQ ID NO: 191144
  derived and/or modified CDS sequence (opt4) from glycoprotein__RABV__JN936749.1

SEQ ID NO: 191269 - RNA, 1575 nt, Artificial Sequence; identical to SEQ ID NO: 191144
  derived and/or modified CDS sequence (opt4) from glycoprotein__RABV__JN936750.1

SEQ ID NO: 191270 - RNA, 1575 nt, Artificial Sequence; identical to SEQ ID NO: 191144
  derived and/or modified CDS sequence (opt4) from glycoprotein__RABV__JN936751.1

SEQ ID NO: 191271 - RNA, 1575 nt, Artificial Sequence
  derived and/or modified CDS sequence (opt4) from glycoprotein__RABV__JN936753.1
augaucccccaggugcugcuguucgugccccugcugguguucagcagcugcuucggcaaguuccccaucuacaccauccccgacaagcugggccccuggagccccaucgacauccaccaccugagcugccccaacaaccuggugguggaggacgagggcugcaccaaccugagcggcuucagcuacauggagcugaaggugggcuacaucagcgccaucaaggugaacggcuucaccugcaccggcguggugaccgaggccgagaccuacaccaacuucgugggcuacgugaccaccaccuucaagagaaagcacuucagacccacccccgacgccugcagagccgccuacaacuggaagauggccggcgaccccagauacgaggagagccugaacaaccccuaccccgacuaccacuggcugagaaccgugaagaccagcaaggagagccuggugaucaucagccccagcguggccgaccuggaccccuacgacaagagccugcacagcagaguguuccccggcggcaagugcagcggcaucaccgugagcagcaccugcugcagcaccaaccacgacuacaccaucuggaugcccgagaaccccagacugggcaccagcugcgacaucuucaccaacagcagaggcaagagagccagcaagggcggcaagaccugcggcuucguggacgagagaggccuguacaagagccugaagggcgccugcaagcugaagcugugcggcgugcugggccugagacugauggacggcaccuggguggccauccagaccagcgacgagaucaaguggugcagccccgaccagcuggugaaccugcacgacuuccacagcgacgagaucgagcaccuggugguggaggagcuggugaagaagagagaggagugccuggacgcccuggagaccaucaugaccaccaagagcgugagcuucagaagacugagccaccugagaaagcuggugcccggcuucggcaaggccuacaccaucuucaacaagacccugauggaggccgacgcccacuacaagagcaucagaaccuggaacgagaucauccccagcaagggcugccugagagugggcggcagaugccacccccacgugaacggcguguucuucaacggcaucauccugggccccgacggccacgugcugauccccgagaugcagagcagccugcugcaccagcacauggagcugcuggagagcagcgugaucccccugaugcacccccuggccgaccccagcaccguguucaaggacggcgacgaggccgaggacuucguggaggugcaccugcccgacgugcacaagcagaucagcggcguggaccugggccugcccaacuggggcaaguacgugcuggugagcgccggcgcccugaccgcccugaugcugaugaucuuccugaugaccugcugcagaaagaccaacagagccgagagcauccagcacagccccggcgagaccggcagaaaggugagcgugaccagccacaacggcagagugaucagcagcugggagagcuacaagagcggcggcgagaccaagcuguga

SEQ ID NO: 191272 - RNA, 1575 nt, Artificial Sequence; identical to SEQ ID NO: 190887
  derived and/or modified CDS sequence (opt4) from glycoprotein__RABV__JN936754.1

SEQ ID NO: 191273 - RNA, 1575 nt, Artificial Sequence
  derived and/or modified CDS sequence (opt4) from glycoprotein__RABV__JN936755.1
augaucccccaggugcugcuguucgugccccugcuggugagcagcagcugcuucggcaaguuccccaucuacaccauccccgacaagcugggccccuggagccccaucgacauccaccaccugagcugccccaacaaccuggugguggaggacgagggcugcaccaaccugagcggcuucagcuacauggagcugaaggugggcuacaucagcgccaucaaggugaacggcuucaccugcaccggcguggugaccgaggccgagaccuacaccaacuucgugggcuacgugaccaccaccuucaagagaaagcacuucagacccacccccgacgccugcagagccgccuacaacuggaagauggccggcgaccccagauacgaggagagccugcacaaccccuaccccgacuaccacuggcugagaaccgugaagaccagcaaggagagccuggugaucaucagccccagcguggccgaccuggaccccuacgacaagagccugcacagcagaguguuccccggcggcaagugcagcggcaucaccgugagcagcaccugcugcagcaccaaccacgacuacaccaucuggaugcccgagaaccccagacugggcaccagcugcgacaucuucaccaacagcagaggcaagagagccagcaagggcggcaagaccugcggcuucguggacgagagaggccuguacaagagccugaagggcgccugcaagcugaagcugugcggcgugcugggccugagacugauggacggcaccuggguggccauccagaccagcgacgagaucaaguggugcagccccgaccagcuggugaaccugcacgacuuccacagcgacgagaucgagcaccuggugguggaggagcuggugaagaagagagaggagugccuggacgcccuggagaccaucaugaccaccaagagcgugagcuucagaagacugagccaccugagaaagcuggugcccggcuucggcaaggccuacaccaucuucaacaagacccugauggaggccgacgcccacuacaagagcaucagaaccuggaacgagaucauccccagcaagggcugccugagagugggcggcagaugccacccccacgugaacggcguguucuucaacggcaucauccugggccccgacggccacgugcugauccccgagaugcagagcagccugcugcaccagcacauggagcugcuggagagcagcgugaucccccugaugcacccccuggccgaccccagcaccguguucaaggacggcgacgaggccgaggacuucguggaggugcaccugcccgacgugcacaagcagaucagcggcguggaccugggccugcccaacuggggcaaguacgugcuggugagcgccggcgcccugaccgcccugaugcugaugaucuuccugaugaccugcugcagaaagaccaacagagccgagagcauccagcacagccccggcgagaccggcagaaaggugagcgugaccagccacaacggcagagugaucagcagcugggagagcuacaagagcggcggcgagaccaagcuguga

SEQ ID NO: 191274 - RNA, 1575 nt, Artificial Sequence; identical to SEQ ID NO: 191144
  derived and/or modified CDS sequence (opt4) from glycoprotein__RABV__JN936756.1

SEQ ID NO: 191275 - RNA, 1575 nt, Artificial Sequence
  derived and/or modified CDS sequence (opt4) from glycoprotein__RABV__JN936757.1
augaucccccaggugcugcuguucgugccccugcugguguucagcagcugcuucggcaaguuccccaucuacaccauccccgacaagcugggccccuggagccccaucgacauccaccaccugagcugccccaacaaccuggugguggaggacgagggcugcaccaaccugagcggcuucagcuacauggagcugaaggugggcuacaucagcgccaucaaggugaacggcuucaccugcaccggcguggugaccgaggccgagaccuacaccaacuucgugggcuacgugaccaccaccuucaagagaaagcacuucagacccacccccgacgccugcagagccgccuacaacuggaagauggccggcgaccccagauacgaggagagccugcacaaccccuaccccgacuaccacuggcugagaaccgugaagaccagcaaggagagccuggugaucaucagccccagcguggccgaccuggaccccuacgacaagagccugcacagcagaguguuccccggcggcaagugcagcggcaucaccgugagcagcaccugcugcagcaccaaccacgacuacaccaucuggaugcccgagaaccccagacugggcaccagcugcgacaucuucaccaacagcagaggcaagagagccagcaagggcggcaagaccugcggcuucguggacgagagaggccuguacaagagccugaagggcgccugcaagcugaagcugugcggcgugcugggccugagacugauggacggcaccuggguggccauccagaccagcgacgagaucaaguggugcagccccgaccagcuggugaaccugcacgacuuccacagcgacgagaucgagcaccuggugguggaggagcuggugaagaagagagaggagugccuggacgcccuggagaccaucaugaccaccaagagcgugagcuucagaagacugagccaccugagaaagcuggugcccggcuucggcaaggccuacaccaucuucaacaagacccugauggaggccgacgcccacuacaagagcaucagaaccuggaacgagaucauccccagcaagggcugccugagagugggcggcagaugccacccccacgugaacggcguguucuucaacggcaucauccugggccccgacggccacgugcugauccccgagaugcagagcagccugcugcaccagcacauggagcugcuggagagcagcgugaucccccugaugcacccccuggccgaccccagcaccguguucaaggacggcgacgaggccgaggacuucguggaggugcaccugcccgacgugcacaagcagaucagcggcguggaccugggccugcccaacuggggcaaguacgugcuggugagcgccggcgcccugaccgcccugaugcugaugaucuuccugaugaccugcugcagaaagaccgacagagccgagagcauccagcacagccccggcgagaccagaagaaaggugagcgugaccagccacaacggcagagugaucagcagcugggagagcuacaagagcggcggcgagaccaagcuguga

SEQ ID NO: 191276 - RNA, 1575 nt, Artificial Sequence
  derived and/or modified CDS sequence (opt4) from glycoprotein__RABV__JN936758.1
augaucccccaggugcugcuguucgugccccugcugguguucagcagcugcuucggcaaguuccccaucuacaccauccccgacaagcugggccccuggagccccaucgacauccaccaccugagcugccccaacaaccuggugguggaggacgagggcugcaccaaccugagcggcuucagcuacauggagcugaaggugggcuacaucagcgccaucaaggugaacggcuucaccugcaccggcguggugaccgaggccgagaccuacaccaacuucgugggcuacgugaccaccaccuucaagagaaagcacuucagacccaugcccgacgccugcagagccgccuacaacuggaagauggccggcgaccccagauacgaggagagccugcacaaccccuaccccgacuaccacuggcugagaaccgugaagaccaccaaggagagccuggugaucaucagccccagcguggccgaccuggaccccuacgacaagagccugcacagcagaguguuccccggcggcaagugcagcggcaucaccgugagcagcaccugcugcagcaccaaccacgacuacaccaucuggaugcccgagaaccccagacugggcaccagcugcgacaucuucaccaacagcagaggcaagagagccagcaagggcggcaagaccugcggcuucguggacgagagaggccuguacaagagccugaagggcgccugcaagcugaagcugugcggcgugcugggccugagacugauggacggcaccuggguggccauccagaccagcgacgagaucaaguggugcagccccgaccagcuggugaaccugcacgacuuccacagcgacgagaucgagcaccuggugguggaggagcuggugaagaagagagaggagugccuggacgcccuggagaccaucaugaccaccaagagcgugagcuucagaagacugagccaccugagaaagcuggugcccggcuucggcaaggccuacaccaucuucaacaagacccugauggaggccgacgcccacuacaagagcaucagaaccuggaacgagaucauccccagcaagggcugccugagagugggcggcagaugccacccccacgugaacggcguguucuucaacggcaucauccugggccccgacggccacgugcugauccccgagaugcagagcagccugcugcaccagcacauggagcugcuggagagcagcgugaucccccugaugcacccccuggccgaccccagcaccguguucaaggacggcgacgaggccgaggacuucguggaggugcaccugcccgacgugcacaagcagaucagcggcguggaccugggccugcccaacuggggcaaguacgugcugaucggcgccggcgcccugaccgcccugaugcugaccaucuuccugaugaccugcugcagaaagaccaacagagccgagagcauccagcacagccccggcgagaccggcagaaaggugagcgugaccagccacaacggcagagugaucagcagcugggagagcuacaagagcggcagcgagaccaagcuguga

SEQ ID NO: 191277 - RNA, 1575 nt, Artificial Sequence
  derived and/or modified CDS sequence (opt4) from glycoprotein__RABV__JN936759.1
augaucccccaggugcugcuguucgugccccugcugguguucagcagcugcuucggcaaguuccccaucuacaccauccccgacaagcugggccccuggagccccaucgacauccaccaccugagcugccccaacaaccuggugguggaggacgagggcugcaccaaccugagcggcuucagcuacauggagcugaaggugggcuacaucagcgccaucaaggugaacggcuucaccugcaccggcguggugaccgaggccgagaccuacaccaacuucgugggcuacgugaccaccaccuucaagagaaagcacuucagacccaugcccgacgccugcagagccgccuacaacuggaagauggccggcgaccccagauacgaggagagccugcacaaccccuaccccgacuaccacuggcugagaaccgugaagaccaccaaggagagccuggugaucaucagccccagcguggccgaccuggaccccuacgacaagagccugcacagcagaguguuccccggcggcaagugcagcggcaucaccgugagcagcaccugcugcagcaccaaccacgacuacaccaucuggaugcccgagaaccccagacugggcaccagcugcgacaucuucaccaacagcagaggcaagagagccagcaagggcggcaagaccugcggcuucguggacgagagaggccuguacaagagccugagaggcgccugcaagcugaagcugugcggcgugcugggccugagacugauggacggcaccuggguggccauccagaccagcgacgagaucaaguggugcagccccgaccagcuggugaaccugcacgacuuccacagcgacgagaucgagcaccuggugguggaggagcuggugaagaagagagaggagugccuggacgcccuggagaccaucaugaccaccaagagcgugagcuucagaagacugagccaccugagaaagcuggugcccggcuucggcaaggccuacaccaucuucaacaagacccugauggaggccgacgcccacuacaagagcaucagaaccuggaacgagaucauccccagcaagggcugccugagagugggcggcagaugccacccccacgugaacggcguguucuucaacggcaucauccugggccccgacggccacgugcugauccccgagaugcagagcagccugcugcaccagcacaucgagcugcuggagagcagcgugaucccccugaugcacccccuggccgaccccagcaccguguucaaggacggcgacgaggccgaggacuucguggaggugcaccugcccgacgugcacaagcagaucagcggcguggaccugggccugcccaacuggggcaaguacgugcugaucagcgccggcgcccugaccgcccugaugcugaccaucuuccugaugaccugcugcagaaagaccaacagagccgagagcauccagcacagccccggcgagaccggcagaaaggugagcgugaccagccacaacggcagagugaucagcagcugggagagcuacaagagcggcagcgagaccaagcuguga

SEQ ID NO: 191278 - RNA, 1575 nt, Artificial Sequence
  derived and/or modified CDS sequence (opt4) from glycoprotein__RABV__JN936760.1
augaucccccaggugcugcuguucgugccccugcugguguucagccugugcuucggcaaguuccccaucuacaccauccccgacaagcugggccccuggagccccaucgacauccaccaccugagcugccccaacaaccuggugguggaggacgagggcugcaccaaccugagcggcuucagcuacauggagcugaaggugggcuacaucagcgccaucaaggugaacggcuucaccugcaccggcguggugaccgaggccgagaccuacaccaacuucgugggcuacgugaccaccaccuucaagagaaagcacuucagacccaugcccgacgccugcagagccgccuacaacuggaagauggccggcgaccccagauacgaggagagccugcacaaccccuaccccgacuaccacuggcugagaaccgugaagaccaccaaggagagccuggugaucaucagccccagcguggccgaccuggaccccuacgacaagagccugcacagcagaguguuccccggcggcaagugcagcggcaucaccgugagcagcaccugcugcagcaccaaccacgacuacaccguguggaugcccgagaaccccagacugggcaccagcugcgacaucuucaccaacagcagaggcaagagagccagcaagggcggcaagaccugcggcuucguggacgagagaggccuguacaagagccugaagggcgccugcaagcugaagcugugcggcgugcugggccugagacugauggacggcaccuggguggccauccagaccagcgacgagaucaaguggugcagccccgaccagcuggugaaccugcacgacuuccacagcgacgagaucgagcaccuggugguggaggagcuggugaagaagagagaggagugccuggacgcccuggagaccaucaugaccaccaagagcgugagcuucagaagacugagccaccugagaaagcuggugcccggcuucggcaaggccuacaccaucuucaacaagacccugauggaggccgacgcccacuacaagagcaucagaaccuggaacgagaucauccccagcaagggcugccugagagugggcggcagaugccacccccacgugaacggcguguucuucaacggcaucauccugggccccgacggccacgugcugauccccgagaugcagagcagccugcugcaccagcacauggagcugcuggagagcagcgugaucccccugaugcacccccuggccgaccccagcaccguguucaaggacggcgacgaggccgaggacuucguggaggugcaccugcccgacgugcacaagcagaucagcggcguggaccugggccugcccaacuggggcaaguacgugcugaucagcgccggcgcccugaccgcccugaugcugaccaucuuccugaugaccugcugcagaaagaccaacagagccgagagcauccagcacagccccggcgagaccggcagaaaggugagcgugaccagccacaacggcagagugaucagcagcugggagagcuacaagagcggcagcgagaccaagcuguga

SEQ ID NO: 191279 - RNA, 1575 nt, Artificial Sequence
  derived and/or modified CDS sequence (opt4) from glycoprotein__RABV__JN936761.1
augaucccccaggugcugcuguucgugccccugcugguguucagcagcugcuucggcaaguuccccaucuacaccauccccgacaagcugggccccuggagccccaucgacauccaccaccugagcugccccaacaaccuggugguggaggacgagggcugcaccaaccugagcggcuucagcuacauggagcugaaggugggcuacaucagcgccaucaaggugaacggcuucaccugcaccggcguggugaccgaggccgagaccuacaccaacuucgugggcuacgugaccaccaccuucaagagaaagcacuucagacccaugcccgacgccugcagagccgccuacaacuggaagauggccggcgaccccagauacgaggagagccugcacaaccccuaccccgacuaccacuggcugagaaccgugaagaccaccaaggagagccuggugaucaucagccccagcguggccgaccuggaccccuacgacaagagccugcacagcagaguguuccccggcggcaagugcagcggcaucaccgugagcagcaccugcugcagcaccaaccacgacuacaccaucuggaugcccgagaaccccagacugggcaccagcugcgacaucuucaccaacagcagaggcaagagagccagcaagggcggcaagaccugcggcuucguggacgagagaggccuguacaagagccugaagggcgccugcaagcugaagcugugcggcgugcugggccugagacugauggacggcaccuggguggccauccagaccagcgacgagaucaaguggugcagccccgaccagcuggugaaccugcacgacuuccacagcgacgagaucgagcaccuggugguggaggagcuggugaagaagagagaggagugccuggacgcccuggagaccaucaugaccaccaagagcgugagcuucagaagacugagccaccugagaaagcuggugcccggcuucggcaaggccuacaccaucuucaacaagacccugauggaggccgacgcccacuacaagagcaucagaaccuggaacgagaucauccccagcaagggcugccugagagugggcggcagaugccacccccacgugaacggcguguucuucaacggcaucauccugggccccgacggccacgugcugauccccgagaugcagagcagccugcugcaccagcacauggagcugcuggagagcagcgugaucccccugaugcacccccuggccgaccccagcaccguguucaaggacggcgacgaggccgaggacuucguggaggugcaccugcccgacgugcacaagcagaucagcggcguggaccugggccugcccaacuggggcaaguacgugcugaucagcgccggcgcccugaccgcccugaugcugaugaucuuccugaugaccugcugcagaaagaccaacagagccgagagcauccagcacagccccggcgagaccggcagaaaggugagcgugaccagccacaacggcagagugaucagcagcugggagagcuacaagagcggcagcgagaccaagcuguga

SEQ ID NO: 191280 - RNA, 1575 nt, Artificial Sequence; identical to SEQ ID NO: 191144
  derived and/or modified CDS sequence (opt4) from glycoprotein__RABV__JN936762.1

SEQ ID NO: 191281 - RNA, 1575 nt, Artificial Sequence; identical to SEQ ID NO: 190887
  derived and/or modified CDS sequence (opt4) from glycoprotein__RABV__JN936763.1

SEQ ID NO: 191282 - RNA, 1575 nt, Artificial Sequence
  derived and/or modified CDS sequence (opt4) from glycoprotein__RABV__JN936764.1
augaucccccaggugcugcuguucgugcccuuccugguguucagcagcugcuucggcaaguuccccaucuacaccauccccgacaagcugggccccuggagccccaucgacauccaccaccugagcugccccaacaaccuggugguggaggacgagggcugcaccaaccugagcggcuucagcuacauggagcugaaggugggcuacaucagcgccaucaaggugaacggcuucaccugcaccggcguggugaccgaggccgagaccuacaccaacuucgugggcuacgugaccaccaccuucaagagaaagcacuucagacccaugcccgacgccugcagagccgccuacaacuggaagauggccggcgaccccagauacgaggagagccugcacaaccccuaccccgacuaccacuggcugagaaccgugaagaccaccaaggagagccuggugaucaucagccccagcguggccgaccuggaccccuacgacaagagccugcacagcagaguguuccccggcggcaagugcagcggcaucaccgugagcagcaccugcugcagcaccaaccacgacuacaccaucuggaugcccgagaaccccagacugggcaccagcugcgacaucuucaccaacagcagaggcaagagagccagcaagggcggcaagaccugcggcuucguggacgagagaggccuguacaagagccugaagggcgccugcaagcugaagcugugcggcgugcugggccugagacugauggacggcaccuggguggccauccagaccagcgacgagaucaaguggugcagccccgaccagcuggugaaccugcacgacuuccacagcgacgagaucgagcaccuggugguggaggagcuggugaagaagagagaggagugccuggacgcccuggagaccaucaugaccaccaagagcgugagcuucagaagacugagccaccugagaaagcuggugcccggcuucggcaaggccuacaccaucuucaacaagacccugauggaggccgacgcccacuacaagagcaucagaaccuggaacgagaucauccccagcaagggcugccugagagugggcggcagaugccacccccacgugaacggcguguucuucaacggcaucauccugggccccgacggccacgugcugauccccgagaugcagagcagccugcugcaccagcacauggagcugcuggagagcagcgugaucccccugaugcacccccuggccgaccccagcaccguguucaaggacggcgacgaggccgaggacuucguggaggugcaccugcccgacgugcacaagcagaucagcggcguggaccugggccugcccaacuggggcaaguacgugcugaucagcgccggcgcccugaccgcccugaugcugaccaucuuccugaugaccugcugcagaaagaccaacagagccgagagcauccagcacagccccggcgagaccggcagaaaggugagcgugaccagccacaacggcagagugaucagcagcugggagagcuacaagagcggcagcgagaccaagcuguga

SEQ ID NO: 191283 - RNA, 1575 nt, Artificial Sequence; identical to SEQ ID NO: 190905
  derived and/or modified CDS sequence (opt4) from glycoprotein__RABV__JN936765.1

SEQ ID NO: 191284 - RNA, 1575 nt, Artificial Sequence; identical to SEQ ID NO: 190905
  derived and/or modified CDS sequence (opt4) from glycoprotein__RABV__JN936766.1

SEQ ID NO: 191285 - RNA, 1575 nt, Artificial Sequence; identical to SEQ ID NO: 190905
  derived and/or modified CDS sequence (opt4) from glycoprotein__RABV__JN936767.1

SEQ ID NO: 191286 - RNA, 1575 nt, Artificial Sequence; identical to SEQ ID NO: 191127
  derived and/or modified CDS sequence (opt4) from glycoprotein__RABV__JN936768.1

SEQ ID NO: 191287 - RNA, 1575 nt, Artificial Sequence; identical to SEQ ID NO: 190906
  derived and/or modified CDS sequence (opt4) from glycoprotein__RABV__JN936769.1

SEQ ID NO: 191288 - RNA, 1575 nt, Artificial Sequence
  derived and/or modified CDS sequence (opt4) from glycoprotein__RABV__JN936770.1
augaucccccaggugcugcuguucgugccccugcugguguucagcagcugcuucggcaaguuccccaucuacaccauccccgacaagcugggccccuggagccccaucgacauccaccaccugagcugccccaacaaccuggugguggaggacgagggcugcaccaaccugagcggcuucagcuacauggagcugaaggugggcuacaucagcgccaucaaggugaacggcuucaccugcaccggcguggugaccgaggccgagaccuacaccaacuucgugggcuacgugaccaccaccuucaagagaaagcacuucagacccaugcccgacgccugcagaagcgccuacaacuggaagauggccggcgaccccagauacgaggagagccugcacaaccccuaccccgacuaccacuggcugagaaccgugaagaccaccaaggagagccuggugaucaucagccccagcguggccgaccuggaccccuacgacaagagccugcacagcagaguguuccccggcggcaagugcagcggcaucaccgugagcagcaccugcugcagcaccaaccacgacuacaccaucuggaugcccgagaaccccagacugggcaccagcugcgacaucuucaccaacagcagaggcaagagagccagcaagggcggcaagaccugcggcuucguggacgagagaggccuguacaagagccugaagggcgccugcaagcugaagcugugcggcgugcugggccugagacugauggacggcaccuggguggccauccagaccagcgacgagaucaaguggugcagccccgaccagcuggugaaccugcacgacuuccacagcgacgagaucgagcaccuggugguggaggagcuggugaagaagagagaggagugccuggacgcccuggagaccaucaugaccaccaagagcgugagcuucagaagacugagccaccugagaaagcuggugcccggcuucggcaaggccuacaccaucuucaacaagacccugauggaggccgacgcccacuacaagagcaucagaaccuggaacgagaucauccccagcaagggcugccugagagugggcggcagaugccacccccacgugaacggcguguucuucaacggcaucauccugggccccgacggccacgugcugauccccgagaugcagagcagccugcugcaccagcacauggagcugcuggagagcagcgugaucccccugaugcacccccuggccgaccccagcaccguguucaaggacggcgacgaggccgaggacuucguggaggugcaccugcccgacgugcacaagcagaucagcggcguggaccugggccugcccaacuggggcaaguacgugcugaucagcgccggcgcccugaccgcccugaugcugaccaucuuccugaugaccugcugcagaaagaccaacagagccgagagcauccagcacagccccggcgagaccggcagaaaggugagcgugaccagccacaacggcagagugaucagcagcugggagagcuacaagagcggcagcgagaccaagcuguga

SEQ ID NO: 191289 - RNA, 1575 nt, Artificial Sequence; identical to SEQ ID NO: 190887
  derived and/or modified CDS sequence (opt4) from glycoprotein__RABV__JN936771.1

SEQ ID NO: 191290 - RNA, 1575 nt, Artificial Sequence; identical to SEQ ID NO: 191252
  derived and/or modified CDS sequence (opt4) from glycoprotein__RABV__JN936772.1

SEQ ID NO: 191291 - RNA, 1575 nt, Artificial Sequence
  derived and/or modified CDS sequence (opt4) from glycoprotein__RABV__JN936773.1
augaucccccaggugcugcuguucgugccccugcugguguucagcagcugcuucggcaaguuccccaucuacaccauccccgacaagcugggccccuggagccccaucgacauccaccaccugagcugccccaacaaccugaucguggaggacgagggcugcaccaaccugagcggcuucagcuacauggagcugaaggugggcuacaucagcgccaucaaggugaacggcuucaccugcaccggcguggugaccgaggccgagaccuacaccaacuucgugggcuacgugaccaccaccuucaagagaaagcacuucagacccaugcccgacgccugcagagccgccuacaacuggaagauggccggcgaccccagauacgaggagagccugcacaaccccuaccccgacuaccacuggcugagaaccgugaagaccaccaaggagagccuggugaucaucagccccagcguggccgaccuggaccccuacgacaagagccugcacagcagaguguuccccggcggcaagugcagcggcaucaccgugagcagcaccugcugcagcaccaaccacgacuacaccaucuggaugcccgagaaccccagacugggcaccagcugcgacaucuucaccaacagcagaggcaagagagccagcaagggcggcaagaccugcggcuucguggacgagagaggccuguacaagagccugaagggcgccugcaagcugaagcugugcggcgugcugggccugagacugauggacggcaccuggguggccauccagaccagcgacgagaucaaguggugcagccccgaccagcuggugaaccugcacgacuuccacagcgacgagaucgagcaccuggugguggaggagcuggugaagaagagagaggagugccuggacgcccuggagaccaucaugaccaccaagagcgugagcuucagaagacugagccaccugagaaagcuggugcccggcuucggcaaggccuacaccaucuucaacaagacccugauggaggccgacgcccacuacaagagcaucagaaccuggaacgagaucauccccagcaagggcugccugagagugggcggcagaugccacccccacgugaacggcguguucuucaacggcaucauccugggccccgacggccacgugcugauccccgagaugcagagcagccugcugcaccagcacauggagcugcuggagagcagcgugaucccccugaugcacccccuggccgaccccagcaccguguucaaggacggcgacgaggccgaggacuucguggaggugcaccugcccgacgugcacaagcagaucagcggcguggaccugggccugcccaacuggggcaaguacgugcugaucagcgccggcgcccugaccgcccugaugcugaccaucuuccugaugaccugcugcagaaagaccaacagagccggcagcauccagcacagccccggcgagaccggcagaaaggugagcgugaccagccacaacggcagagugaucagcagcugggagagcuacaagagcggcagcgagaccaagcuguga

SEQ ID NO: 191292 - RNA, 1575 nt, Artificial Sequence; identical to SEQ ID NO: 190905
  derived and/or modified CDS sequence (opt4) from glycoprotein__RABV__JN936774.1

SEQ ID NO: 191293 - RNA, 1575 nt, Artificial Sequence; identical to SEQ ID NO: 190906
  derived and/or modified CDS sequence (opt4) from glycoprotein__RABV__JN936775.1

SEQ ID NO: 191294 - RNA, 1575 nt, Artificial Sequence; identical to SEQ ID NO: 190887
  derived and/or modified CDS sequence (opt4) from glycoprotein__RABV__JN936776.1

SEQ ID NO: 191295 - RNA, 1575 nt, Artificial Sequence; identical to SEQ ID NO: 190906
  derived and/or modified CDS sequence (opt4) from glycoprotein__RABV__JN936777.1

SEQ ID NO: 191296 - RNA, 1575 nt, Artificial Sequence; identical to SEQ ID NO: 190906
  derived and/or modified CDS sequence (opt4) from glycoprotein__RABV__JN936778.1

SEQ ID NO: 191297 - RNA, 1575 nt, Artificial Sequence; identical to SEQ ID NO: 191127
  derived and/or modified CDS sequence (opt4) from glycoprotein__RABV__JN936779.1

SEQ ID NO: 191298 - RNA, 1575 nt, Artificial Sequence
  derived and/or modified CDS sequence (opt4) from glycoprotein__RABV__JN936780.1
augaucccccaggugcugcuguucgugccccugcugguguucagcagcugcuucggcaaguuccccaucuacaccauccccgacaagcugggccccuggagccccaucgacauccaccaccugagcugccccaacaaccuggugguggaggacgagggcugcaccaaccugagcggcuucagcuacauggagcugaaggugggcuacaucagcgccaucaaggugaacggcuucaccugcaccggcguggugaccgaggccgagaccuacaccaacuucgugggcuacgugaccaccaccuucaagagaaagcacuucagacccaugcccgacgccugcagagccgccuacaacuggaagauggccggcgaccccagauacgaggagagccugcacaaccccuaccccgacuaccacuggcugagaaccgugaagaccaccaaggagagccuggugaucaucagccccagcguggccgaccuggaccccuacgacaagagccugcacagcagaguguuccccggcggcaagugcagcggcaucaccgugagcagcaccugcugcagcaccaaccacgacuacaccaucuggaugcccgagaaccccagacugggcaccagcugcgacaucuucaccaacagcagaggcaagagagccagcaagggcggcaagaccugcggcuucguggacgagagaggccuguacaagagccugaagggcgccugcaagcugaagcugugcggcgugcugggccugagacugauggacggcaccuggguggccauccagaccagcgacgagaucaaguggugcagccccgaccagcuggugaaccugcacgacuuccacagcgacgagaucgagcaccuggugguggaggagcuggugaagaagagagaggagugccuggacgcccuggagaccaucaugaccaccaagagcgugagcuucagaagacugagccaccugagaaagcuggugcccggcuucggcaaggccuacaccaucuucaacaagacccugauggaggccgacgcccacuacaagagcaucagaaccuggaacgagaucauccccagcaagggcugccugagagugggcggcagaugccacccccacgugaacggcguguucuucaacggcaucauccugggccccgacggccacgugcugauccccgagaugcagagcagccugcugcaccagcacauggagcugcuggagagcagcgugaucccccugaugcacccccuggccgacccccugaccguguucaaggacggcgacgaggccgaggacuucguggaggugcaccugcccgacgugcacaagcagaucagcggcguggaccugggccugcccaacuggggcaaguacgugcugaucagcgccggcgcccugaccgcccugaugcugaccaucuuccugaugaccugcugcagaaagaccaacagagccgagagcauccagcacagccccggcgagaccggcagaaaggugagcgugaccagccacaacggcagagugaucagcagcugggagagcuacaagagcggcagcgagaccaagcuguga

SEQ ID NO: 191299 - RNA, 1575 nt, Artificial Sequence; identical to SEQ ID NO: 190905
  derived and/or modified CDS sequence (opt4) from glycoprotein__RABV__JN936781.1

SEQ ID NO: 191300 - RNA, 1575 nt, Artificial Sequence; identical to SEQ ID NO: 190905
  derived and/or modified CDS sequence (opt4) from glycoprotein__RABV__JN936782.1

SEQ ID NO: 191301 - RNA, 1575 nt, Artificial Sequence
  derived and/or modified CDS sequence (opt4) from glycoprotein__RABV__JN936783.1
augaucccccaggugcugcuguucgugccccugcugguguucagcagcugcuucggcaaguuccccaucuacaccauccccgacaagcugggccccuggagccccaucgacauccaccaccugagcugccccaacaaccuggugguggaggacgagggcugcaccaaccugagcggcuucagcuacauggagcugaaggugggcuacaucagcgccaucaaggugaacggcuucaccugcaccggcguggugaccgaggccgagaccuacaccaacuucgugggcuacgugaccaccaccuucaagagaaagcacuucagacccaugcccgacgccugcagagccgccuacaacuggaagauggccggcgaccccagauacgaggagagccugcacaaccccuaccccgacuaccacuggcugagaaccgugaagaccaccaaggagagccuggugaucaucagccccagcguggccgaccuggaccccuacgacaagagccugcacagcagaguguuccccggcggcaagugcagcggcaucaccgugagcagcaccugcugcagcaccaaccacgacuacaccaucuggaugcccgagaaccccagacugggcaccagcugcgacaucuucaccaacagcagaggcaagagagccagcaagggcggcaagaccugcggcuucguggacgagagaggccuguacaagagccugaagggcgccugcaagcugaagcugugcggcgugcugggccugagacugauggacggcaccuggguggccauccagaccagcgacgagaucaaguggugcagccccgaccagcuggugaaccugcacgacuuccacagcgacgagaucgagcaccuggugguggaggagcuggugaagaagagagaggagugccuggacgcccuggagaccaucaugaccaccaagagcgugagcuucagaagacugagccaccugagaaagcuggugcccggcuucggcaaggccuacaccaucuucaacaagacccugauggaggccgacgcccacuacaagagcaucagaaccuggaacgagaucauccccagcaagggcugccugagagugggcggcagaugccacccccacgugaacggcguguucuucaacggcaucauccugggccccgacggccacgugcugauccccgagaugcagagcagccugcugcaccagcacaucgagcugcuggagagcagcgugaucccccugaugcacccccuggccgaccccagcaccguguucaaggacggcgacgaggccgaggacuucguggaggugcaccugcccgacgugcacaagcagaucagcggcguggaccugggccugcccaacuggggcaaguacgugcugaucagcgccggcgcccugaccgcccugaugcugaccaucuuccugaugaccugcugcagaaagaccaacagagccgagagcauccagcacagccccggcgagaccggcagaaaggugagcgugaccagccacaacggcagagugaucagcagcugggagagcuacaagagcggcagcgagaccaagcuguga

SEQ ID NO: 191302 - RNA, 1575 nt, Artificial Sequence
  derived and/or modified CDS sequence (opt4) from glycoprotein__RABV__JN936784.1
augaucccccaggugcugcuguucgugccccugcugguguucagcagcugcuucggcaaguuccccaucuacaccauccccgacaagcugggccccuggagccccaucgacauccaccaccugagcugccccaacaaccuggugguggaggacgagggcugcaccaaccugagcggcuucagcuacauggagcugaaggugggcuacaucagcgccaucaaggugaacggcuucaccugcaccggcguggugaccgaggccgagaccuacaccaacuucgugggcuacgugaccaccaccuucaagagaaagcacuucagacccaugcccgacgccugcagagccgccuacaacuggaagauggccggcgaccccagauacgaggagagccugcacaaccccuaccccgacuaccacuggcugagaaccgugaagaccaccaaggagagccuggugaucaucagccccagcguggccgaccuggaccccuacgacaagagccugcacagcagaguguuccccggcggcaagugcagcggcaucaccgugagcagcaccugcugcagcaccaaccacgacuacaccaucuggaugcccgagaaccccagacugggcaccagcugcgacaucuucaccaacagcagaggcaagagagccagcaagggcggcaagaccugcggcuucguggacgagagaggccuguacaagagccugaagggcgccugcaagcugaagcugugcggcgugcugggccugagacugauggacggcaccugcguggccauccagaccagcgacgagaucaaguggugcagccccgaccagcuggugaaccugcacgacuuccacagcgacgagaucgagcaccuggugguggaggagcuggugaagaagagagaggagugccuggacgcccuggagaccaucaugaccaccaagagcgugagcuucagaagacugagccaccugagaaagcuggugcccggcuucggcaaggccuacaccaucuucaacaagacccugauggaggccgacgcccacuacaagagcaucagaaccuggaacgagaucauccccagcaagggcugccugagagugggcggcagaugccacccccacgugaacggcguguucuucaacggcaucauccugggccccgacggccacgugcugauccccgagaugcagagcagccugcugcaccagcacaucgagcugcuggagagcagcgugaucccccugaugcacccccuggccgaccccagcaccguguucaaggacggcgacgaggccgaggacuucguggaggugcaccugcccgacgugcacaagcagaucagcggcguggaccugggccugcccaacuggggcaaguacgugcugaucagcgccggcgcccugaccgcccugaugcugaccaucuuccugaugaccugcugcagaaagaccaacagagccgagagcauccagcacagccccggcgagaccggcagaaaggugagcgugaccagccacaacggcagagugaucagcagcugggagagcuacaagagcggcagcgagaccaagcuguga

SEQ ID NO: 191303 - RNA, 1575 nt, Artificial Sequence; identical to SEQ ID NO: 191144
  derived and/or modified CDS sequence (opt4) from glycoprotein__RABV__JN936786.1

SEQ ID NO: 191304 - RNA, 1575 nt, Artificial Sequence
  derived and/or modified CDS sequence (opt4) from glycoprotein__RABV__JN936788.1
augaucccccaggcccugcuguucgugccccugcugguggugagccugugcuucggcaaguuccccaucuacaccauccccgacaagcugggccccuggagccccaucgacauccaccaccugagcugccccaacaaccuggugguggaggacgagggcugcaccaaccugagcggcuucagcuacauggagcugaaggugggcuacaucagcgccaucaaggugaacggcuucaccugcaccggcguggugaccgaggccgagaccuacaccaacuucgugggcuacgugaccaccaccuucaagagaaagcacuucagacccacccccgacgccugcagaagcgccuacaacuggaagauggccggcgaccccagauacgaggagagccugcacaaccccuaccccgacuaccacuggcugagaaccgugaagaccaccaaggagagcuucgugaucaucagccccagcguggccgaccuggaccccuacgacaagagccugcacagcagaguguuccccagaggcaagugcagcggcaucaccgugagcagcaccuacugcagcaccaaccacgacuacaccaucuggaugcccgagaaccccagacugggcaccagcugcgacaucuucaccaacagcagaggcaagagagccuucaagggcagcaagaccugcggcuucguggacgagagaggccuguacaagagccugaagggcgccugcaagcugaagcugugcggcgugcugggccugagacugauggacggcaccuggguggccauccagaccagcgacgagaccaaguggugcccccccgaccagcuggugaaccugcacgacuuccacagcgacgagaucgagcaccuggugguggaggagcuggugaagaagagagaggagugccuggacgcccuggagagcaucaugaccaccaagagcgugagcuucagaagacugagccaccugagaaagcuggugcccggcuucggcaaggccuacaccaucuucaacaagacccugauggaggccgacgcccacuacaagagcgugagaaccuggaacgagaucauccccagcaagggcugccugagagugggcggcagaugccacccccacgugaacggcguguucuucaacggcaucauccugggccccgacggccacgugcugauccccgagaugcagagcagccugcugcagcagcacauggagcugcuggagagcagcgugaucccccugaugcacccccuggccgaccccagcaccguguucaagaacggcgacgaggccgaggacuucguggaggugcaccugcccgacgugcacaagcaggugagcggcguggaccugggccugcccagcuggggcaaguacgugcugaugagcgccggcgugcugaccgcccugaugcugaugaucuuccugaugaccugcugcagaagaaccaacagacccgagagcauccagcacagccugggcgagaccggcagaaaggugagcgugaccagccagaacggcagagugaucagcagcugggagagcuacaagagcggcggcgagaccaagcuguga

SEQ ID NO: 191305 - RNA, 1575 nt, Artificial Sequence; identical to SEQ ID NO: 191282
  derived and/or modified CDS sequence (opt4) from glycoprotein__RABV__JN936790.1

SEQ ID NO: 191306 - RNA, 1575 nt, Artificial Sequence; identical to SEQ ID NO: 191144
  derived and/or modified CDS sequence (opt4) from glycoprotein__RABV__JN936791.1

SEQ ID NO: 191307 - RNA, 1575 nt, Artificial Sequence; identical to SEQ ID NO: 190905
  derived and/or modified CDS sequence (opt4) from glycoprotein__RABV__JN936793.1

SEQ ID NO: 191308 - RNA, 1575 nt, Artificial Sequence
  derived and/or modified CDS sequence (opt4) from glycoprotein__RABV__JQ595307.1
augaucccccaggcccugcuguucgugccccugcugauccccagccugugccugggcgaguuccccaucuacaccauccccgacaagcugggccccuggacccccaucgacauccaccaccugagcugccccaacaaccugguggccgagaacgacggcugcaccagccugagcggcuucagcuacauggagcugaaggugggcuacaucagcgccaucaaggugaacggcuucaccugcaccggcguggugaccgaggccgagaccuacaccaacuucgugggcuacgugaccaccaccuucaagagaaagcacuucagacccaugcccgacgccugcagagccgcccacgacuggaagauggccggcgaccccagauacgaggacagccugcagaaccccuaccccgacuaccacuggcugagaaccgugaagaccaccaaggagagccuggugaucaucagccccagcguggccgaccuggaccccuacgacaagagccugcacagcagaguguuccccagcggcaagugccugggcaucaccgugagcagcaccuacugcagcaccaaccacgacuacaccaucuggaugcccguggagcccagacugggcaccagcugcgacaucuucaccaacagcagaggcaagagagccagcaagggcggcagagugugcggcuucguggacgagagaggccuguacaagagccugaagggcgccugcaagcugaagcugugcggcgugcccggcaucagacugauggacggcaccugggugagcauccagaccagcgaggacaucaaguggugcccccccgacagacuggugaaccugcacgacuuccacagcgacgagcuggagcaccuggugguggaggagcugaucaagagaagagagaacugccuggacgcccuggagagcaucaugaccaccaagagcgugagcuucagaagacugagccaccugagaaagcuggugcccggcuucggcaaggccuacaccaucuucaacaagacccugauggaggccgacgcccacuacaagagcgugaagaccuggaacgaggugauccccagcaagggcugccuggaggugggcggcaagugccacccccccgugaacggcguguucuucaacggcaucauccugggccccgacggcaacgugcugauccccgagaugcagagcagccugcugcagcagcacauggagcugcuggagagcagcgugaucccccugaugcacccccuggccgaccccagcaccguguucaaggagggcgacgaggccgaggacuucguggaggugcaccugcccgacgugcacaagcaggugagcgacguggaccugggccugcccagcuggggcaaguaccugcugaugagcgccggcgcccuggccauccugauccuggccaucgugcugaucaucugcugcagaagagugaacaagaccggcagcacccagagaggccacagagagagcagaggcaagaugagcguggccccccagaacggcaagaucaucagcagcugggagcuguacaagagcgagagcgagaccggccuguga

SEQ ID NO: 191309 - RNA, 1575 nt, Artificial Sequence
  derived and/or modified CDS sequence (opt4) from glycoprotein__RABV__JQ595308.1
augaucccccaggcccugcuguucgugccccugcugauccccagccugugccugggcgaguuccccaucuacaccauccccgacaagcugggccccuggagccccaucgacauccaccaccugagcugccccaacaaccugguggccgagaacgacggcugcaccagccugagcggcuucagcuacauggagcugaaggugggcuacaucagcgccaucaaggugaacggcuucaccugcaccggcguggugaccgaggccgagaccuacaccaacuucgugggcuacgugaccaccaccuucaagagaaagcacuucagacccacccccgacgccugcagagccgcccacgacuggaagauggccggcgaccccagauacgaggccagccugcagaaccccuaccccgacuaccacuggcugagaaccgugaagaccaccaaggagagccuggugaucaucagccccagcguggccgaccuggaccccuacgacaagagccugcacagcagaguguuccccagcggcaagugccugggcaucaccgugagcagcaccuacugcagcaccaaccacgacuacaccaucuggaugcccguggagcccagacugggcaccagcugcgacaucuucaccaacagcagaggcaagagagccagcaagggcggcagagugugcggcuucguggacgagagaggccuguacaagagccugaagggcgccugcagacugaagcugugcggcgugcccggcaucagacugcuggacggcaccugggugagcauccagaccagcgaggacaucaaguggugcccccccgacagacuggugaaccugcacgacuuccacagcgacgagaucgagcaccuggugguggccgagcugaucaagagaagagagaacugccuggacgcccuggagagcaucaugaccaccaagagcgugagcuucagaagacugagccaccugagaaagcuggugcccggcuucggcaaggccuacaccaucuucaacaagacccugauggaggccgacgcccacuacaagagcgugaagaccuggaacgaggugauccccagcaagggcugccuggaggugggcggcagaugccacccccacgugaacggcguguucuucaacggcaucauccugggccccgacggcaacgugcugauccccgagaugcagagcagccugcugcagcagcacauggagcugcuggagagcagcgugaucccccugaugcacccccuggccgaccccagcaccguguucaaggagggcgacgaggccgaggacuucguggaggugcaccugcccgacgugcacaagcaggugagcgacguggaccugggccugcccagcuggggcaaguaccugcugaucagcgccggcgcccuggccauccugauccuggccaucgugcugaucaucugcugcagaagagugaacaagaccggcagcacccagagaggccacagagagagcggcggcaagaugagcguggugccccagaacggcaagaucaucagcagcugggagcuguacaagagcgagagcgagaccggccuguga

SEQ ID NO: 191310 - RNA, 1575 nt, Artificial Sequence
  derived and/or modified CDS sequence (opt4) from glycoprotein__RABV__JQ595309.1
augaucccccaggcccugcuguucgugccccugcugauccccagccugugccugggcgaguuccccaucuacaccauccccgacaagcugggccccuggagccccaucgacauccaccaccugagcugccccaacaaccugguggccgagaacgacggcugcaccagccugagcggcuucagcuacauggagcugaaggugggcuacaucagcgccaucaaggugaacggcuucaccugcaccggcguggugaccgaggccgagaccuacaccaacuucgugggcuacgugaccaccaccuucaagagaaagcacuucagacccacccccgacgccugcagagccgcccacgacuggaagauggccggcgaccccagauacgaggccagccugcagaaccccuaccccgacuaccacuggcugagaaccgugaagaccaccaaggagagccuggugaucaucagccccagcguggccgaccuggaccccuacgacaagagccugcacagcagaguguuccccagcggcaagugccugggcaucaccgugagcagcaccuacugcagcaccaaccacgacuacaccaucuggaugcccguggagcccagacugggcaccagcugcgacaucuucaccaacagcagaggcaagagagccagcaagggcggcagagugugcggcuucguggacgagagaggccuguacaagagccugaagggcgccugcagacugaagcugugcggcgugcccggcaucagacugcuggacggcaccugggugagcauccagaccagcgaggacaucaaguggugcccccccgacagacuggugaaccugcacgacuuccacagcgacgagaucgagcaccuggugguggccgagcugaucaagagaagagagaacugccuggacgcccuggagagcaucaugaccaccaagagcgugagcuucagaagacugagccaccugagaaagcuggugcccggcuucggcaaggccuacaccaucuucaacaagacccugauggaggccgacgcccacuacaagagcgugaagaccuggaacgaggugauccccagcaagggcugccuggaggugggcggcagaugccacccccacgugaacggcguguucuucaacggcaucauccugggccccgacggcaacgugcugauccccgagaugcagagcagccugcugcagcagcacauggagcugcuggagagcagcgugaucccccugaugcacccccuggccgaccccagcaccguguucaaggagggcgacgaggccgaggacuucguggaggugcaccugcccgacgugcacaagcaggugagcgacguggaccugggccugcccagcuggggcaaguaccugcugaucagcgccggcgcccuggccauccugauccuggccaucgugcugaucaucugcugcagaagagugaagaagaccggcagcacccagagaggccacagagagagcggcggcaagaugagcguggugccccagaacggcaagaucaucagcagcugggagcuguacaagagcgagagcgagaccggccuguga

SEQ ID NO: 191311 - RNA, 1575 nt, Artificial Sequence
  derived and/or modified CDS sequence (opt4) from glycoprotein__RABV__JQ595310.1
augaucccccaggcccugcuguucgugccccugcugaucccccugcugugcagaggcgaguuccccaucuacaccauccccgacaagcugggccccuggagccccaucgacauccaccaccugagcugccccaacaaccugguggccgagaacgacggcugcaccagccugagcggcuucagcuacauggagcugaaggugggcuacaucagcgccaucaaggugaacggcuucaccugcaccggcguggugaccgaggccgagaccuacaccaacuucgugggcuacgugaccaccaccuucaagagaaagcacuucagacccacccccgacgccugcagagccgcccacgacuggaagauggccggcgaccccagauacgaggacagccugcagaaccccuaccccgacuaccacuggcugagaaccgugaagaccaccaaggagagccuggugaucaucagccccagcguggccgaccuggaccccuacgacaagagccugcacagcagaguguuccccagcggcaagugccugggcaucaccgugagcagcaccuacugcagcaccaaccacgacuacaccaucuggaugcccguggagcccagacugggcaccagcugcgacaucuucaccaacagcagaggcaagagagccagcaagggcggcagagugugcggcuucguggacgagagaggccuguacaagagccugaagggcgccugcaagcugaagcugugcggcgugcccggcaucagacugcuggacggcaccugggugagcauccagaccagcgaggacaucaaguggugcccccccgacagacuggugaaccugcacgacuuccacagcgacgagaucgagcaccuggugguggaggagcugaucaagagaagagagaacugccuggacgcccuggagagcaucaugaccaccaagagcgugagcuucagaagacugagccaccugagaaagcuggugcccggcuucggcaaggccuacaccaucuucaacaacacccugauggaggccgacgcccacuacaagagcgugaagaccuggaacgaggugauccccagcaagggcugccuggaggugggcggcagaugccacccccccgugaacggcguguucuucaacggcaucauccugggccccgacggcaacgugcugauccccgagaugcagagcagccugcugcagcagcacauggagcugcuggagagcagcgugaucccccugaugcacccccuggccgaccccagcaccguguucaaggagggcgacgaggccgaggacuucguggaggugcaccugcccgacgugcacaagcaggugagcgacguggaccugggccugcccagcuggggcaaguaccugcugaugagcgccggcgcccuggccauccugauccuggccaucgugcugaucaucugcugcagaagagugaacaagaccagaagcagccagagaggccacagagagagcggcggcaagaugagcguggccccccagaacggcaagaucaucagcagcugggagcuguacaagagcgagagcgagaccggccuguga

SEQ ID NO: 191312 - RNA, 1575 nt, Artificial Sequence
  derived and/or modified CDS sequence (opt4) from glycoprotein__RABV__JQ595312.1
augaucccccaggcccugcuguucgugccccugcugauccccagccugugccugggcgaguuccccuucuacaccauccccgacaagcugggccccuggagccccaugcacauccaccaccugagcugccccaacaaccugguggccgaggacgacggcugcaccagccugagcggcuucagcuacauggagcugaaggugggcuacaucagcgccaucaaggugaacggcuucaccugcaccggcguggugaccgaggccgagaccuacaccaacuucgugggcuacgugaccaccaccuucaagagaaagcacuucagacccaugcccgacgccugcagagccgcccacgacuggaagauggccggcgaccccagauacgaggacagccugcagaaccccuaccccgacagccacuggcugagaaccgugaagaccaccaaggagagccuggugaucaucagccccagcguggccgaccuggaccccuacgacaagagccugcacagcagaguguuccccagcggcaagugccugggcaucaccgugagcagcaccuacugcagcaccaaccacgacuacaccaucuggaugcccguggagcccagacugggcaccagcugcgacaucuucaccaacagcagaggcaagagagccagcaagggcggcagagugugcggcuucguggacgagagaggccuguacaagagccugaagggcgccugcaagcugaagcugugcggcgugcccggcaucagacugauggacggcaccugggugagcauccagaccagcgaggacaucaaguggugcccccccgacagacuggugaaccugcacgacuuccacagcgacgagaucgagcaccuggugguggaggagcugaucaagagaagagagaacugccuggacgcccuggagagcaucaugaccaccaagagcgugagcuucagaagacugagccaccugagaaagcuggugcccggcuucggcaaggccuacaccaucuucaacaagacccugauggaggccgacgcccacuacaagagcgugaagaacuggaacgaggugauccccagcaagggcugccuggaggugggcggcagaugccacccccccgugaacggcguguucuucaacggcaucauccugggccccgacggcaacgugcugauccccgagaugcagagcagccugcugcagcagcacauggagcugcuggagagcagcgugaucccccugaugcacccccuggccgaccccagcaccguguucaaggagggcgacgaggccgaggacuucguggaggugcaccugcccgacgugcacaagcaggugagcgacguggaccugggccugcccagcuggggcaaguaccugcugaugagcgccggcgcccuggccauccugcugcuggccaucgugagcaucaucugcugcagaagagugagcaagaccagaagcacccagagaggccacagagagagcggcggcagaaugagcguggccccccagaacggcaagaucaucagcagcugggagcuguacaagagcgagagcgagaccggccuguga

SEQ ID NO: 191313 - RNA, 1575 nt, Artificial Sequence
  derived and/or modified CDS sequence (opt4) from glycoprotein__RABV__JQ595313.1
augaucccccaggcccugcuguucgugccccugcugauccccagccugggccugggcaaguuccccaucuacaccauccccgacaagcugggccccuggagccccaucgacauccaccaccugagcugccccaacaaccuggugguggaggacgagggcugcaccagccugagcggcuucagcuacauggagcugaaggugggcuacaucagcagcaucaaggugaacggcuucaccugcaccggcguggugaccgaggccgagaccuacaccaacuucgugggcuacgugaccaccaccuucaagagaaagcacuucagacccaugcccgacgccugcagagccgcccacgacuggaagaucgccggcgaccccagauacgaggacagccugcagaaccccuaccccgacuaccacuggcugagaaccgugaagaccaccaaggagagccuggugaucaucagccccagcguggccgagcuggaccccuacgacaagagccugcacagcagaguguuccccagcggcaagugccugggcaucaccgugagcagcaccuacugcagcaccaaccacgacuacaccaucuggaugcccguggaggccagacugggcaccagcugcgacaucuucaccaacagcagaggcaagaaggccagcaagggcggcagaaccugcggcuucguggacgagagaggccuguacaagagccugaagggcgccugcaagcugaagcugugcggcgugcccggccugagacugauggacggcaccugggugagcauccagaccagcgacgacaucaaguggugcccccccgaccagcuggugaaccugcacgacuuccacagcgacgagaucgagcaccuggugguggaggagcugaucaagaagagagagggcugccuggacgcccuggagagcaucaugaccaccaagagcgugagcuucagaagacugagccaccugagaaagcuggugcccggcuucggcaaggccuacaccaucuucaacaacacccugauggaggccgacgcccacuacaagagcgugagaaccuggaacgaggugauccccagcaagggcugccugaaggugggcggcagaugccacccccccgugaacggcguguucuucaacggcaucauccugggccccgacggcaacgugcugauccccgagaugcagagcagccugcugcagcagcacauggagcugcuggagagcagcgugaucccccugaugcacccccuggccgaccccagcaccguguucaaggacggcgacgaggccgaggacuucguggaggugcaccugcccgacgugcacaagcaggugagcgacguggaccugggccugcccagcuggggcaaguaccugcugaugagcgccggcgcccuggccacccugauccuggccaucuuccugaucaccugcugcagaagagccaacagaaccgagagcacccagagaggccacagagagagcggcggcaaggugagcguggccccccagaacggcaagaucaucagcagcugggagcuguacaagagcgagagcgagaccggcauguga

SEQ ID NO: 191314 - RNA, 1575 nt, Artificial Sequence
  derived and/or modified CDS sequence (opt4) from glycoprotein__RABV__JQ595315.1
augaucccccaggcccugcuguucgugccccugcugauccccagccugugccugggcaaguuccccaucuacaccauccccgacaagcugggccccuggagccccaucgacauccaccaccugagcugccccaacaaccugguggccgaggacgagggcugcaccagccugagcggcuucagcuacauggagcugaaggugggcuacaucagcgccaucaaggugaacggcuucaccugcaccggcguggugaccgaggccgagaccuacaccaacuucgugggcuacgugaccaccaccuucaagagaaagcacuucagacccaugcccgacgccugcagagccgcccacgacuggaagauggccggcgaccccagauacgaggacagccugcagaaccccuaccccgacuaccacuggcugagaaccgugaagaccaccaaggagagccuggugaucaucagccccagcguggccgaccuggaccccuacgacaagagccugcacagcagaguguuccccagcggcaagugccugggcaucaccgugagcagcaccuacugcagcaccaaccacgacuacaccaucuggaugcccguggaggccagacugggcaccagcugcgacaucuucaccaacagcaagggcaagaaggccagcaagggcggcagaaccugcggcuucguggacgagagaggccuguacaagagccugaagggcgccugcaagcugaagcugugcggcgugcccggccugagacugauggacggcaccugggugagcauccagaccagcgacgacaucaaguggugcccccccgaccagcuggugaaccugcacgacuuccacagcgacgagaucgagcaccuggugguggaggagcugaucaagaagagagagggcugccuggacgcccuggagagcaucaugaccaccaagagcgugagcuucagaagacugagccaccugagaaagcuggugcccggcuucggcaaggccuacaccaucuucaacaacacccugauggaggccgacgcccacuacaagagcgugagaaccuggaacgaggugauccccagcaagggcugccugaaggugggcggcagaugccacccccccgugaacggcguguucuucaacggcaucauccugggccccgacggcaacgugcugauccccgagaugcagagcagccugcugcagcagcacauggagcugcuggagagcagcgugaucccccugaugcacccccuggccgaccccagcaccguguucaaggacggcgacgaggccgaggacuucguggaggugcaccugcccgacgugcacaagcaggugagcgagaucgaccugggccugcccagcuggggcaaguaccugcugaugagcgccggcgugcuggccacccugauccuggccaucuuccugaucaccugcugcagaagagccaacagaaccgagagcacccagagaggcagaagagagagcggcggcaaggugagcguggccccccagaacgugaagaucaucagcagcugggagcuguacaagagcgagagcgagaccggccuguga

SEQ ID NO: 191315 - RNA, 1575 nt, Artificial Sequence
  derived and/or modified CDS sequence (opt4) from glycoprotein__RABV__JQ595316.1
augaucccccaggcccugcuguucgugccccugcugauccccagccugugccugggcaacuuccccaucuacaccauccccgacaagcugggccccuggagccccaucgacauccaccaccugagcugccccaacaaccugguggccgaggacgagggcugcaccagccugagcggcuucagcuacauggagcugaaggugggcuacaucagcgccaucaaggugaacggcuucaccugcaccggcguggugaccgaggccgagaccuacaccaacuucgugggcuacgugaccaccaccuucaagagaaagcacuucagacccaugcccgacgccugcagagccgcccacgacuggaagauggccggcgaccccagauacgaggacagccugcagaaccccuaccccgacuaccacuggcugagaaccgugaagaccaccaaggagagccuggugaucaucagccccagcguggccgaccuggaccccuacgacaagagccugcacagcagaguguuccccagcggcaagugccugggcaucaccgugagcagcaccuacugcagcaccaaccacgacuacaccaucuggaugcccguggaggccagacugggcaccagcugcgacaucuucaccaacagcaagggcaagaaggccagcaagggcggcagaaccugcggcuucguggacgagagaggccuguacaagagccugaagggcgccugcaagcugaagcugugcggcgugcccggccugagacugauggacggcaccugggugagcauccagaccagcgacgacaucaaguggugcccccccgaccagcuggugaaccugcacgacuuccacagcgacgagaucgagcaccuggugguggaggagcugaucaagaagagagagggcugccuggacgcccuggagagcaucaugaccaccaagagcgugagcuucagaagacugagccaccugagaaagcuggugcccggcuucggcaaggccuacaccaucuucaacaacacccugauggaggccgacgcccacuacaagagcgugagaaccuggaacgaggugauccccagcaagggcugccugaaggugggcggcagaugccacccccccgugaacggcguguucuucaacggcaucauccugggccccgacggcaacgugcugauccccgagaugcagagcagccugcugcagcagcacauggagcugcuggagagcagcgugaucccccugaugcacccccuggccgaccccagcaccguguucaaggacggcgacgaggccgaggacuucguggaggugcaccugcccgacgugcacaagcaggugagcgagaucgaccugggccugcccagcuggggcaaguaccugcugaugagcgccggcgugcuggccacccugauccuggccaucuuccugaucaccugcugcagaagagccaacagaaccgagagcacccagagaggcagaagagagagcggcggcaaggugagcguggccccccagaacggcaagaucaucagcagcugggagcuguacaagagcgagagcgagaccggccuguga

SEQ ID NO: 191316 - RNA, 1575 nt, Artificial Sequence
  derived and/or modified CDS sequence (opt4) from glycoprotein__RABV__JQ595317.1
augaucccccaggcccugcuguucgugccccugcugaucagcagccugugcuucggcaaguuccccaucuacaccauccccgacaagcugggccccuggagccccaucgacauccaccaccugugcugccccaacaaccugguggccgaggaggagggcugcaccagccugagcggcuucagcuacauggagcugaaggugggcuacaucagcgccaucaaggugaacggcuucaccugcaccggcguggugaccgaggccgagaccuacaccaacuucgugggcuacgugaccaccaccuucaagagaaagcacuucagacccaugcccgacgccugcagagccgccuacgacuggaagauggccggcgaccccagauacgaggacagccugcagaaccccuaccccgacuaccacuggcugagaaccgugaagaccaccaaggagagccugaucaucaucagccccagcguggccgaccuggaccccuacgacaagagccugcacagcagaguguuccccggcggcaagugccugggcaucaccaucagcagcaccuacugcagcaccaaccacgacuacaccaucuggaugcccgaggaggccagacugggcaccagcugcaacaucuucaccaacagcagaggcaagaaggccagcaagggcggcagaaccugcggcuucguggacgagagaggccuguacaagagccugaagggcgccugcaagcugaagcugugcggcgugcccggccugagacugauggacggcaccugggugagcauccagaccagcaacgagaccaaguggugcccccccgaccagcuggugaaccugcacgacuuccacagcgacgagaucgagcaccuggugguggaggagcuggugaagaagagagaggagugccuggacgcccuggagagcaucaugaccaccaagagcgugagcuucagaagacugagccaccugagaaagcuggugcccggcuucggcaaggccuacaccaucuucaacaagacccugauggaggccgacgcccacuacaagagcgugagaaccuggaacgagaucauccccagcaagggcugccugaaggugggcggcagaugccacccccacguggacggcguguucuucaacggcaucauccugggccccgacggccacgugcugauccccgagaugcagagcagccugcugcagcagcacauggagcugcuggagagcagcgugaucccccugauccacccccuggccgaccccagcaccguguucaaggacggcgacgaggccgacgacuucguggaggugcaccugcccgacgugcacaagcaggugagcggcguggaccugggccugcccggcuggggcaaguaccugcugaugagcgccggcgcccuggccacccugauccugaccaucuuccugaucaagugcugcagaggcgugaacagaaccgagagcgugcagagaagccugagagacagcggcggcaaggugagcgugcccccccagaacggcaaggugaucagcagcugggagcuguacaagagcggcggcgagaccggccuguga

SEQ ID NO: 191317 - RNA, 1575 nt, Artificial Sequence
  derived and/or modified CDS sequence (opt4) from glycoprotein__RABV__JQ595319.1
augaucccccaggcccugcugagcgugccccugcugaucagcagccugugccugggcaaguuccccaucuacaccauccccgacaagcugggccccuggagccccaucgacauccaccaccugagcugccccaacaaccuggugguggaggacgagggcugcaccagccugagcggcuucagcuacauggagcugaaggugggcuacaucagcgccaucaaggugaacggcuucaccugcaccggcguggugaccgaggccgagaccuacaccaacuucgugggcuacgugaccaccaccuucaagagaaagcacuucagacccaugcccgacgccugcagagccgcccacgaguggaagauggccggcgaccccagauacgaggacagccugcagaaccccuaccccgacuaccacuggcugagaaccgugaagaccaccaaggagagccugaucaucaucagccccagcguggccgaccuggaccccuacgacaagagccugcacagcagaguguuccccggcggcaacugccugggcaucaccaucagcagcaccuacugcagcaccaaccacgacuacaccaucuggaugcccgaggaggccagacugggcaccagcugcgacaucuucaccaacagcagaggcaagagagccagcaagggcggcaagaucugcggcuucguggacgagagaggccuguacaagagccugaagggcgccugcaagcugaagcugugcggcgugcccggccugagacugauggacggcaccugggugagcauccagaccagcgacgagaccaaguggugcccccccgaccagcuggugaacgugcacgacuuccacagcgacgagaucgagcaccugaucguggaggagcuggugaagaagagagaggagugccuggacgcccuggagagcaucaugaccaccaagagcgugagcuucagaagacugagccaccugagaaagcuggugcccggcuucggcaaggccuacaccaucuucaacaacacccugauggaggccgacgcccacuacaagagcgugagaaccuggaacgagaucauccccagcaagggcugccugaaggugggcggcaugugccacccccacgugggcggcguguucuucaacggcaucauccugggccccgacggcaccgugcugauccccgagaugcagagcagccugcugcagcagcacauggagcugcuggagagcagcgugaucccccugaugcacccccuggccgaccccagcaccguguucaaggagggcgacgaggccgaggacuucguggagauccaccugcccgacgugcacaagcagaucagcggcguggaccugggccugcccagcuggggcaaguaccugcugaucagcgccggcgcccuggccacccugauccugaccaucuuccugaucaccugcugcagaaaggugaacagaaccgagagcauccagagaggccacggcgagagcgagagaaaggugagcgugagcccccagaacggcagagugaucagcagcugggagcuguacaagagcggcggcgagaccaaccuguga

SEQ ID NO: 191318 - RNA, 1575 nt, Artificial Sequence
  derived and/or modified CDS sequence (opt4) from glycoprotein__RABV__JQ595320.1
augaucuuccaggcccugcuguucgugccccugcugaucagcagccugugccugggcaaguuccccaucuacaccauccccgacaagcugggccccuggagccccaucgacauccaccaccugagcugccccaacaaccuggugguggaggacgagggcugcaccagccugagcggcuucagcuacauggagcugaaggugggcuacaucagcgccaucaaggugaacggcuucaccugcaccggcguggugaccgaggccgagaccuacaccaacuucgugggcuacgugaccaccaccuucaagagaaagcacuucagacccauccccgacgccugcagagccgccuacaacuggaagaucgccggcgaccccagauacgaggagagccugcagaaccccuaccccgacuaccacuggcugagaaccgugaagaccaccaaggagagccugaucaucaucagccccagcguggccgaccuggaccccuacgacaagagccugcacagcagacuguuccccggcggcaagugccugggcaucaccaucagcagcaccuacugcagcaccaaccacgacuacaccaucuggaugcccgaggagcccagacugggcaccagcugcgacaucuucaccaacagcaagggcaagaaggccagcaagggcggcaaggugugcggcuucguggacgagagaggccuguacaagagccugaagggcgccugcaagcugaagcugugcggcgugagcggccugagacugauggacggcaccugggugaccauccagaccagcgacgagaccaaguggugcccccccgaccagcuggugaaccugcacgacuuccacagcgacgagaucgagcaccuggugguggaggagcuggugaagaagagagaggagugccuggacgcccuggagagcaucaugaccaccaagagcgugagcuucagaagacugagcuaccugagaaagcuggugcccggcuucggcaaggccuacaccaucuucaacaagacccugauggaggccgacgcccacuacaagagcgugagaaccuggaacgagaucauccccagcaagggcugccugaaggugagcgacagaugccacccccacguggacggcguguucuucaacggcaucauccugggccccgacggcaacgugcugauccccgagaugcagagcagccugcugcagcagcacauggagcugcuggagagcagcgugaucccccugaugcacccccuggccgaccccagcaccguguucaaggacggcgacgaggccgaggacuucguggaggugcaccugcccgacgugcacaagcagaucagcggcguggaccugggccugcccagcuggggcaaguaccugcugaugaucgccggcggccuggccacccuggugcugaucaucuuccugauggccugcugcagaagaaccaagagaaccgagagcagacccagaggcagcggcgagagcggcgagaaggugcuggccaccccccagcccaagaagguggugagcagcugggagcuguacaagagagagggcgacgccagacuguga

SEQ ID NO: 191319 - RNA, 1575 nt, Artificial Sequence
  derived and/or modified CDS sequence (opt4) from glycoprotein__RABV__JQ595321.1
augaucuuccaggcccugcuguucgugccccugcugaucagcagccugugccugggcaaguuccccaucuacaccauccccgacaagcugggccccuggagccccaucgacauccaccaccugagcugccccaacaaccuggugguggaggacgagggcugcaccagccugagcggcuucagcuacauggagcugaaggugggcuacaucagcgccaucaaggugaacggcuucaccugcaccggcguggugaccgaggccgagaccuacaccaacuucgugggcuacgugaccaccaccuucaagagaaagcacuucagacccauccccgacgccugcagagccgccuacaacuggaagaucgccggcgaccccagauacgaggagagccugcagaaccccuaccccgacuaccacuggcugagaaccgugaagaccaccaaggagagccugaucaucaucagccccagcguggccgaccuggaccccuacgacaagagccugcacagcagacuguuccccggcggcaagugccugggcaucaccaucagcagcaccuacugcagcaccaaccacgacuacaccaucuggaugcccgaggagcccagacugggcaccagcugcgacaucuucaccaacagcaagggcaagaaggccagcaagggcggcaaggugugcggcuucguggacgagagaggccuguacaagagccugaagggcgccugcaagcugaagcugugcggcgugagcggccugagacugauggacggcaccugggugaccauccagaccagcgacgagaccaaguggugcccccccgaccagcuggugaaccugcacgacuuccacagcgacgagaucgagcaccuggugguggaggagcuggugaagaagagagaggagugccuggacgcccuggagagcaucaugaccaccaagagcgugagcuucagaagacugagcuaccugagaaagcuggugcccggcuucggcaaggccuacaccaucuucaacaagacccugauggaggccgacgcccacuacaagagcgugagaaccuggaacgagaucauccccagcaagggcugccugaaggugagcgacagaugccacccccacguggacggcguguucuucaacggcaucauccugggccccgacggcaacgugcugauccccgagaugcagagcagccugcugcagcagcacauggagcugcuggagagcagcgugaucccccugaugcacccccuggccgaccccagcaccguguucaaggacggcgacgaggccgaggacuucguggaggugcaccugcccgacgugcacaagcagaucagcggcguggaccugggccugcccagcuggggcaaguaccugcugaugaucgccggcggccuggccacccuggugcugaucaucuuccugauggccugcugcagaagaaccaagagaaccgagagcagaagaagagcccugggcgagagcggcgagaaggugcuggccaccccccagcccaagaagguggugagcagcugggagcuguacaagagagagggcgacgccagacuguga

SEQ ID NO: 191320 - RNA, 1575 nt, Artificial Sequence
  derived and/or modified CDS sequence (opt4) from glycoprotein__RABV__JQ595322.1
augaucccccaggcccugcugagcgugccccugcugaucagcagccugugcuucggcaaguuccccaucuacaccauccccgagaagcugggccccuggagccccaucgacauccaccaccugagcugccccaacaaccuggugguggaggacgagggcugcaacagccugagcggcuucagcuacauggagcugaaggugggcuacaucagcgccaucaaggugaacggcuucaccugcaccggcguggugaccgaggccgagaccuacaccaacuucgugggcuacgugaccaccaccuucaagagaaagcacuucagacccaugcccgacgccugcagagccgccuacaacuggaagaccgccggcgaccccagauacgaggagagccugcacaaccccuaccccgacuaccacuggcugagaaccgugaagaccaccaaggagagccugaucaucaucagccccagcguggccgaccuggaccccuacgacaagagccugcacagcagaaucuuccccggcggcaagugccugggcaucaccaucagcagcaccuacugcagcaccaaccacgacuacaccaucuggaugcccgaggaggccagacugggcaccagcugcgacaucuucaccaacagcaagggcaagagagccagcaagggcggcagaaccugcggcuucguggacgagagaggccuguacaagagccugaagggcgccugcaagcugaagcugugcggcgugcccggccugagacugauggacggcaccuggguggccauccagacccccaacgagaccaaguggugcagccccgaccagcuggugaacgugcacgacuucagaagcgacgagaucgagcaccuggugguggaggagcugaucagaaagagagaggagugccuggacgcccuggagagcaucaugaccaccaagagcgugagcuucagaagacugagcaaccugagaaagcuggugcccggcuucggcaaggccuacaccaucuucaacaagacccugauggaggccgacgcccacuacaagagcgugagaaccuggaacgagaucauccccagcagaggcugccugaaggugggcggcagaugccacccccacgugaacggcguguucuucaacggcaucauccugggccccgacggccacauccugauccccgagaugcagagcagccugcugcagcagcacauggagcugcuggagagcagcgugaucccccugauccacccccuggccgaccccagcaccguguucaaggacggcgacgaggccgaggacuucguggaggugcaccugcccgacgugcaccagcaggugagcggcguggaccugggccugcccgacuggggcaaguacgugcugaugagcgccggcgcccuggccaccgugaugcugaccaucuuccugaucaccugcugcagaagagugaagagaaccgagagcauccaccagggccugggcgagagcggcagaaaggugagcgugaccccccagaacggcaaggugaugagcagcugggaguacuacaagagcgagggcggcaccagacuguga

SEQ ID NO: 191321 - RNA, 1575 nt, Artificial Sequence
  derived and/or modified CDS sequence (opt4) from glycoprotein__RABV__JQ595323.1
augaucagccaggccgugcuguacgugccccugcugauccccagccugugcaucggcgaguuccccaucuacaccauccccgacaagaucggccccuggagccccaucgacauccaccaccugagcugccccaacaaccuggugguggaggacgagggcugcaccagccugagcggcuucagcuacauggagcugaaggugggcuacaucagcgccaucaaggugaacggcuucaccugcaccggcguggugaccgaggccgagaccuacaccaacuucgugggcuacgugaccaccaccuucaagagaaagcacuucagacccaugcccgacgccugcagagccgccuacaacuggaagauggccggcgaccccagauacgaggagagccugcagaaccccuaccccgacuacaacuggcugagaaccgugaagaccaccaaggagagccugaucaucaucagccccagcguggccgaccuggaccccuacgacaagagccugcacagcagaguguuccccaacggcaagugccugggcgugaccaucagcagcaccuacugcagcaccaaccacgacuacaccaucuggaugcccgaggaggccagacugggcaccagcugcgacaucuucaccaacagcaagggcaagagagccagcaagggcggcagaaccugcggcuucguggacgagagaggccuguacaagagccugagaggcgccugcaagcugaagcugugcggcgugcccggccugagacugauggacggcaccugggugagcauccagaccagcgacgacaccaaguggugcccccccgaccagcuggugaacgugcacgacuuccacagcgacgagaucgagcaccuggugguggaggagcuggugaagaagagagaggagugccuggacgcccuggagagcaucaugaccaccaagagcgugagcuucagaagacugagccaccugagaaagcuggugcccggcuucggcaaggccuacaccaucuucaacaagacccugauggaggccgacgcccacuacaagagcauccagaccuggaacgagaucauccccagcaagggcugccugaaggugggcggcaugugccacccccacguggacggcguguucuucaacggcaucauccugggccccgacggcaacgugcugauccccgagaugcagagcagccugcugcagcagcacauggagcugcuggagagcagcgugaucccccugaugcacccccuggccgaccccagcaccguguucaaggacggcgacgaggccgaggacuucguggaggugcaccugcccgacauccacaagcaggugagcggcaucgaccugggccugcccgacuggggcaaguaccugcugaugagcgccggcgcccuggccauccugcugcugaccaucuuccugaugaccugcugcagaagagugaacagaaccaagagcgcccagagagaccccggcgagcugggcagaaaggugagcgccaccccccagaacagaaaggugaucagcagcugggagcuguacaagagcggcggcgacaccagacuguga

SEQ ID NO: 191322 - RNA, 1575 nt, Artificial Sequence
  derived and/or modified CDS sequence (opt4) from glycoprotein__RABV__JQ595324.1
augaucccccaggcccugcugagcgugccccugcugaucagcagccugugcuucggcaaguuccccaucuacaccauccccgagaagcugggccccuggagccccaucgacauccaccaccugagcugccccaacaaccuggugguggaggacgagggcugcaacagccugagcggcuucagcuacauggagcugaaggugggcuacaucagcgccaucaaggugaacggcuucaccugcaccggcguggugaccgaggccgagaccuacaccaacuucgugggcuacgugaccaccaccuucaagagaaagcacuucagacccaugcccgacgccugcagagccgccuacaacuggaagaccgccggcgaccccagauacgaggagagccugcacaaccccuaccccgacuaccacuggcugagaaccgugaagaccaccaaggagagccugaucaucaucagccccagcguggccgaccuggaccccuacgacaagagccugcacagcagaaucuuccccggcggcaagugccugggcaucaccaucagcagcaccuacugcagcaccaaccacgacuacaccaucuggaugcccgaggaggccagacugggcaccagcugcgacaucuucaccaacagcaagggcaagagagccagcaagggcggcagaaccugcggcuucguggacgagagaggccuguacaagagccugaagggcgccugcaagcugaagcugugcggcgugcccggccugagacugauggacggcaccuggguggccauccagacccccaacgagaccaaguggugcagccccgaccagcuggugaacgugcacgacuucagaagcgacgagaucgagcaccuggugguggaggagcugaucagaaagagagaggagugccuggacgcccuggagagcaucaugaccaccaagagcgugagcuucagaagacugagcaaccugagaaagcuggugcccggcuucggcaaggccuacaccaucuucaacaagacccugauggaggccgacgcccacuacaagagcgugagaaccuggaacgagaucauccccagcagaggcugccugaaggugggcggcagaugccacccccacgugaacggcguguucuucaacggcaucauccugggccccgacggccacauccugauccccgagaugcagagcagccugcugcagcagcacauggagcugcuggagagcagcgugaucccccugauccacccccuggccgaccccagcaccguguucaaggacggcgacgaggccgaggacuucguggaggugcaccugcccgacgugcaccagcaggugagcggcguggaccugggccugcccgacuggggcaaguacgugcugaugagcgccggcgcccuggccaccgugaugcugaccaucuuccugaucaccugcugcagaagagugaagagaaccgagagcgugcaccagggccugggcgagagcggcagaaaggugagcguggccccccagaacggcaaggugaugagcagcugggaguacuacaagagcggcggcggcaccagacuguga

SEQ ID NO: 191323 - RNA, 1575 nt, Artificial Sequence
  derived and/or modified CDS sequence (opt4) from glycoprotein__RABV__JQ595325.1
augaucccccaggcccugcugagcgugccccugcugaucagcagccugugcuucggcaaguuccccaucuacaccauccccgagaagcugggccccuggagccccaucgacauccaccaccugagcugccccaacaaccuggugguggaggacgagggcugcaacagccugagcggcuucagcuacauggagcugaaggugggcuacaucagcgccaucaaggugaacggcuucaccugcaccggcguggugaccgaggccgagaccuacaccaacuucgugggcuacgugaccaccaccuucaagagaaagcacuucagacccauggccgacgccugcagagccgccuacaacuggaagaccgccggcgaccccagauacgaggagagccugcacaaccccuaccccgacuaccacuggcugagaaccgugaagaccaccaaggagagccugaucaucaucagccccagcguggccgaccuggaccccuacgacaagagccugcacagcagaaucuuccccggcggcaagugccugggcaucaccaucagcagcaccuacugcagcaccaaccacgacuacaccaucuggaugcccgaggaggccagacugggcaccagcugcgacaucuucaccaacagcaagggcaagagagccagcaagggcggcagaaccugcggcuucguggacgagagaggccuguacaagagccugaagggcgccugcaagcugaagcugugcggcgugcccggccugagacugauggacggcaccuggguggccauccagacccccaacgagaccaaguggugcagccccgaccagcuggugaacgugcacgacuucagaagcgacgagaucgagcaccuggugguggaggagcugaucagaaagagagaggagugccuggacgcccuggagagcaucaugaccaccaagagcgugagcuucagaagacugagcaaccugagaaagcuggugcccggcuucggcaaggccuacaccaucuucaacaagacccugauggaggccgacgcccacuacaagagcgugagaaccuggaacgagaucauccccagcagaggcugccugaaggugggcggcagaugccacccccacgugaacggcguguucuucaacggcaucauccugggccccgacggccacauccugauccccgagaugcagagcagccugcugcagcagcacauggagcugcuggagagcagcgugaucccccugauccacccccuggccgaccccagcaccguguucaaggacggcgacgaggccgaggacuucguggaggugcaccugcccgacgugcaccagcaggugagcggcguggaccugggccugcccgacuggggcaaguacgugcugaugagcgccggcgcccuggccaccgugaugcugaccaucuuccugaucaccugcugcagaagagugaagaagaccgagagcauccaccagggccccggcgagagcggcagaaaggugagcgugaccccccagaacggcaaggugaugagcagcugggaguacuacaagagcggcggcggcaccagacuguga

SEQ ID NO: 191324 - RNA, 1575 nt, Artificial Sequence
  derived and/or modified CDS sequence (opt4) from glycoprotein__RABV__JQ595326.1
augaucccccaggcccugcuguucgugccccugcuguuccccagccugugccugggcaaguuccccaucuacaccauccccgagaagcugggccccuggagccccaucgacauccaccaccugagcugccccaacaaccuggugguggaggacgagggcugcgacagccugagcggcuucagcuacaucgagcugaaggugggcuacaucagcgccaucaaggugaacggcuucaccugcaccggcguggugaccgaggccgagaccuacaccaacuucgugggcuacgugaccaccaccuucaagagaaagcacuucagacccaugcccgacgccugcagagccgccuacaacuggaagaccgccggcgaccccagauacgaggagagccugcacaaccccuaccccgacuaccacuggcugagaaccgugaagaccaccaaggagagccugaucaucaucagccccagcguggccgaccuggaccccuacgacaagagccugcacagcagaguguuccccggcggcaagugccugggcaucaccgugagcagcaccuacugcagcaccaaccacgacuacaccaucuggaugcccgaggaggccagacugggcaccagcugcgacaucuucaccaacagcaagggcaagagagccagcaagggcggcagaaccugcggcuucguggacgagagaggccuguacaagagccugaagggcgccugcaagcugaagcugugcggcgugcccggccugagacugauggacggcaccuggguggccauccagacccccggcgagaccaaguggugcagccccgaccagcuggugaaccugcacgacuucagaagcgacgagaucgagcaccuggugguggaggagcugaucaagaagagagaggagugccuggacgcccuggagagcaucaugaccaccaagagcgugagcuucagaagacugagcaaccugagaaagcuggugcccggcuucggcaaggccuacaccaucuucaacaagacccugauggaggccgacgcccacuacaagagcgugagaaccugggacgagaucauccccagcaagggcugccugagagugggcggcagaugccacccccacgugaacggcguguucuucaacggcaucauccugggccccgacggccacgugcugauccccgagaugcagagcagccugcugcagcagcacauggagcugcuggagagcagcgugaucccccugauccacccccuggccgaccccagcaccguguucaaggacggcgacgaggccgaggacuucguggaggugcaccugcccgacgugcacaagcaggugagcggcguggaccugggccugcccaacuggggcaaguacgugcugaugagcgccggcgugcuggccaccgugauccugaccaucuuccugcugaccugcugcagaagagugaacagaaccaagcccaagcagcagagccuggaggagagcggcagaaaggugagcgugaccccccagaacggcaaggugaugagcagcugggaguacuacaagagcgagggcagaaccagccuguga

SEQ ID NO: 191325 - RNA, 1575 nt, Artificial Sequence
  derived and/or modified CDS sequence (opt4) from glycoprotein__RABV__JQ595327.1
augauccugcaggcccugcuguucgugccccugcugaucagcagccugugcuucggcgacuuccccaucuacaccauccccgagaagcugggccccuggagccccaucgacauccaccaccugagcugccccaacaaccuggugguggaggacgagggcugcagcagccugagcggcuucagcuacauggagcugaaggugggcuacaucagcgccaucaaggugaacggcuucaccugcaccggcguggugaccgaggccgagaccuacaccaacuucgugggcuacgugaccaccaccuucaagagaaagcacuucagacccaugcccgacgccugcagagccgccuacaacuggaagaccgccggcgaccccagauacgaggagagccugcagaaccccuaccccgacuaccacuggcugagaaccgugaagaccaccaaggagagccuggugaucaucagccccagcguggccgaccuggaccccuacgacaagagccugcacagcagaguguucagcgacggcaagugccugggcaucaccaucagcagcaccuacugcagcaccaaccacgacuacaccaucuggaugcccgaggaggccagacugggcaccagcugcgacaucuucaccaccagcagaggcaagagagccagcaagggcggcaagaccugcggcuucguggacgagagaggccuguacaagagccugaagggcgccugcaagcugaagcugugcggcgugagcggccugagacugauggacggcaccugggugagcauccaggcccccgacgaggccaaguggugcagcaccgaccagcuggugaacauccacgacaucagaagcgacgagaucgagcaccuggugguggaggagcuggugaagaagagagaggagugccuggacgcccuggagagcaucaugaccaccaagagcgugagcuucagaagacugagccaccugagaaagcuggugcccggcuucggcaaggccuacaccaucuucaacaagacccugauggaggccgacgcccacuacaagagcgugagaaccuggagcgaggugauccccagcaagggcugccugagcgugggcggcagaugccacccccacgagaacggcguguucuucaacggcaucauccugggccccgacggcagcgugcugauccccgagaugcagagcagccugcugcagcagcacauggagcugcuggagagcagcgugaucccccugaugcacccccuggccaaccccagcaccguguucaaggacggcgacgaggccgaggacuucguggaggugcaccugcccgacgugcaggagcagaucagcggcguggaccugggccugcccaacuggggcaaguacgugaugaugagcgccggcgcccuggccauccugaugcugaccaucuuccugaugaccugcugcagaagagccaacagaaccagaagcacccagagagaccugggcggccuggagagaaaggugagcgugccccccaaggacggcagagugaugagcagcugggagagcuacaagagcggcggcgagaccagccuguga

SEQ ID NO: 191326 - RNA, 1575 nt, Artificial Sequence
  derived and/or modified CDS sequence (opt4) from glycoprotein__RABV__JQ595328.1
augaucacccaggcccugcuguucgugccccugcugaucagcagccugugccugggccaguuccccaucuacaccauccccgacaagcugggccccuggagccccaucgacauccaccaccugagcugccccaacaaccuggugguggaggacgagggcugcaacagccugagcggcuucagcuacauggagcugaaggugggcuacaucagcagcaucaaggugaacggcuucaccugcaccggcguggugaccgaggccgagaccuacaccaacuucgugggcuacgugaccaccaccuucaagagaaagcacuucagacccaugcccgacgccugcagagccgccuacagcuggaagauggccggcgaccccagauacgaggagagccugcacacccccuaccccgacuaccacuggcugagaaccgugaagaccaccaaggagagccuggugaucaucagccccagcguggccgaccuggaccccuacgacaagagccugcacagcagaguguucagcggcggcaagugccugggcaucaccaucagcagcaccuacugcagcaccaaccacgacuacaccaucuggaugcccgaggaggccagacugggcaccagcugcgacaucuucaccaacagcaagggcaagagagccagcaagggcggcagaaccugcggcuucguggacgagagaggccuguacaagagccugaagggcgccugcaagcugaagcugugcggcgugcccggccugagacugauggacggcaccugggugagcauccagaccagcgacgagaccaaguggugcccccccgaccagcuggugaacauccacgacuucagaagcgacgagaucgagcaccuggugguggaggagcuggugaagaagagagaggagugccuggacgcccuggagagcaucaugaccaccaagagcgugagcuucagaagacugagccaccugagaaagcuggugcccggcuucggcaaggccuacaccaucuucaacaagacccugauggaggccgacgcccacuacaagagcgugagaaccuggaacgagaucauccccagcaagggcugccugagcgugggcggcagaugccacccccacgugaacggcguguucuucaacggcaucauccugggccccgacggcagcgugcugauccccgagaugcagagcagccugcugcagcagcacauggagcugcuggagagcagcgugaucccccugaugcacccccuggccaaccccagcaccguguucaaggacggcgacgaggccgaggacuucguggaggugcaccugcccgacgugcaggagcaggugagcggcguggaccugggccugcccaacuggggcaaguacgugcugaugagcgccggcgugcuggccauccugauccugaccaucuuccugaugaucugcugcagaagagccaacagaaccaagagcauccagcagggccccggcgagagcggcagaaaggugagcgugcccccccagaacggcaaggugaucagcagcugggagagcuucaagagcggcggcgagaccagacuguga

SEQ ID NO: 191327 - RNA, 1575 nt, Artificial Sequence
  derived and/or modified CDS sequence (opt4) from glycoprotein__RABV__JQ647510.1
augaucccccaggugcugcuguucgugccccugcugguguucagcagcugcuucggcaaguuccccaucuacaccauccccgacaagcugggccccuggagccccaucgacauccaccaccugagcugccccaacaaccuggugguggaggacgagggcugcaccaaccugagcggcuucagcuacauggagcugaaggugggcuacaucagcgccaucaaggugaacggcuucaccugcaccggcguggugaccgaggccgagaccuacaccaacuucgugggcuacgugaccaccaccuucaagagaaagcacuucagacccaugcccgacgccugcagaaccgccuacaacuggaagauggccggcgaccccagauacgaggagagccugcacaaccccuaccccgacuaccacuggcugagaaccgugaagaccaccaaggagagccuggugaucaucagccccagcguggccgaccuggaccccuacgacaagagccugcacagcagaguguuccccggcggcaagugcagcggcaucaccgugagcagcaccagaugcagcaccaaccacgacuacaccaucuggaugcccgagaaccccagacugggcaccagcugcgacaucuucaccaacagcagaggcaagagagccagcaagggcggcaagaccugcggcuucguggacgagagaggccuguacaagagccugaagggcgccugcaagcugaagcugugcggcgugcugggccugagacugauggacggcaccuggguggccauccagaccagcgacgagaucaaguggugcagccccgaccagcuggugaaccugcacgacuuccacagcgacgagaucgagcaccuggugguggaggagcuggugaagaagagagaggagugccuggacgcccuggagaccaucaugaccaccaagagcgugagcuucagaagacugagccaccugagaaagcuggugcccggcuucggcaaggccuacaccaucuucaacaagacccugauggaggccgacgcccacuacaagagcaucagaaccuggaacgagaucauccccagcaagggcugccugagagugggcggcagaugccacccccacgugaacggcguguucuucaacggcaucauccugggccccgacggccacgugcugauccccgagaugcagagcagccugcugcaccagcacauggagcugcuggagagcagcgugaucccccugaugcacccccuggccgaccccagcaccguguucaaggacggcgacgaggccgaggacuucguggaggugcaccugcccgacgugcacaagcagaucagcggcguggaccugggccugcccaacuggggcaaguacgugcugaucagcgccggcagccugaccgcccugaugcugaugaucuuccugaugaccugcugcagaaagaccaacagagccgagagcauccagcacagccccggcgagaccggcagaaaggugagcgugaccagccacaacggcagagugaucagcagcugggagagcuacaagagcggcggcgagaccaagcuguga

SEQ ID NO: 191328 - RNA, 1575 nt, Artificial Sequence
  derived and/or modified CDS sequence (opt4) from glycoprotein__RABV__JQ685892.1
augaucccccaggcccugcuguacgugccccugcugaucagcagccugugcuucggcggcuuccccaucuacaccauccccgacaagcugggccccuggagccccaucgacauccaccaccugagcugccccaacaaccuggugguggaggacgagggcugcaccagccugagcggcuucagcuacauggagcugaaggugggcuacaucagcgccaucaaggugaacggcuucaccugcaccggcguggugaccgaggccgagaccuacaccaacuucgugggcuacgugaccaccaccuucaagagaaagcacuucagacccaugcccgacgccugcagagccgccuacaacuggaagauggccggcgaccccagauacgaggagagccugcagaaccccuaccccgacuacagcuggcugagaaccgugaagaccaccaaggagagccugaucaucaucagccccagcguggccgaccuggaccccuacgacaagagccugcacagcagaguguuccccggcggcaagugccugggcaucaccaucagcagcaccuacugcagcaccaaccacgacuacaccaucuggaugcccgaggaggccagacugggcaccagcugcgacaucuucaccaacagcagaggcaagagagccagcaagggcggcaagaccugcggcuucguggacgagagaggccuguacaagagccugaagggcgccugcaagcugaagcugugcggcgugcccggccugagacugauggacggcaccugggugaccauccagaccagcgacgagaccaaguggugccccagcgaccagcuggugaaccugcacgacuuccacagcgacgagaucgagcaccuggugguggaggagcuggugaagaagagagaggagugccuggacgcccuggagagcaucaugaccaccaagagcgugagcuucagaagacugagccaccugagaaagcuggugcccggcuucggcaaggccuacaccaucuucaacaagacccugauggaggccgacgcccacuacaagagcaucagaaccuggaacgagaucauccccagcaagggcugccugaaggugggcggcagaugccacccccacguggacggcguguucuucaacggcaucauccugggccccgacggcaacgugcugauccccgagaugcagagcagccugcugcagcagcacguggagcugcuggagagcagcgugaucccccugaugcacccccuggccgaccccagcaccguguucaaggacggcgacgaggccgaggacuucguggaggugcaccugcccgacauccacaagcaggugagcggcguggaccugggccugcccaacuggggcaaguaccugcugaugagcgccggcgcccuggccacccugaugcugaucaucuuccugauggccugcugcagaagagccaacagaaccgagagcauccagagagaccccggcgagagcggcagaaaggugagcauccccagccaggacggcaaggugaucagcagcugggagcuguacaagagcggcggcgagaccagacuguga

SEQ ID NO: 191329 - RNA, 1575 nt, Artificial Sequence
  derived and/or modified CDS sequence (opt4) from glycoprotein__RABV__JQ685893.1
augaucccccaggcccugcuguacgugccccugcugauccccagccugugcuucggcggcuuccccaucuacaccauccccgacaagcugggccccuggagccccaucgacauccaccaccugagcugccccaacaaccuggugguggaggacgagggcugcaccagccugagcggcuucagcuacauggagcugaaggugggcuacaucagcgccaucaaggugaacggcuucaccugcaccggcguggugaccgaggccgagaccuacaccaacuucgugggcuacgugaccaccaccuucaagagaaagcacuucagacccaugcccgacgccugcagagccgccuacaacuggaagguggccggcgaccccagauacgaggagagccugcagaaccccuaccccgacuacagcuggcugagaaccgugaagaccaccaaggagagccugaucaucaucagccccagcguggccgaccuggaccccuacgacaagagccugcacagcagaguguuccccggcggcaagugccugggcaucaccaucagcagcaccuacugcagcaccaaccacgacuacaccaucuggaugcccgaggaggccagacugggcaccagcugcgacaucuucaccaacagcagaggcaagagagccagcaagggcggcaagaccugcggcuucguggacgagagaggccuguacaagagccugaagggcgccugcaagcugaagcugugcggcgugcccggccugagacugauggacggcaccugggugaccauccagaccagcgacgagaccaaguggugccccagcgaccagcuggugaaccugcacgacuuccacagcgacgagaucgagcaccuggugguggaggagcuggugaagaagagagaggagugccuggacgcccuggagagcaucaugaccaccaagagcgugagcuucagaagacugagccaccugagaaagcuggugcccggcuucggcaaggccuacaccaucuucaacaagacccugauggaggccgacgcccacuacaagagcaucagaaccuggaacgagaucauccccagcaagggcugccugaaggugggcggcagaugccacccccacguggacggcguguucuucaacggcaucauccugggccccgacggcaacgugcugauccccgagaugcagagcagccugcugcagcagcacguggagcugcuggagagcagcgugaucccccugaugcacccccuggccgaccccagcaccguguucaaggacggcgacgaggccgaggacuucguggaggugcaccugcccgacauccacaagcaggugagcggcguggaccugggccugcccaacuggggcaaguaccugcugaugagcgccggcgcccuggccacccugaugcugaccaucuuccugaugaccugcugcagaagagccaacagaaccgagagcauccagagagaccccggcgagagcggcaagaaggugagcaucaccagccaggacggcaaggugaucagcagcugggagcuguacaagagcggcggcgagaccagacuguga

SEQ ID NO: 191330 - RNA, 1575 nt, Artificial Sequence
  derived and/or modified CDS sequence (opt4) from glycoprotein__RABV__JQ685894.1
auguucccccaggcccugcuguucgugagccugcugaucagcagccugugcuucggcaaguuccccaucuacaccauccccgacaagcugggccccuggagccccaucgacauccaccaccugagcugccccaacaaccuggugguggaggacgagggcugcaccaaccugagcggcuucagcuacauggagcugaaggugggcuacaucagcgccaucaaggugaacggcuucaccugcaccggcguggugaccgaggccgagaccuacaccaacuucaucggcuacgugaccaccguguucaagagaaagcacagcagacccacccccgacgccugcagagccgccuacaacuggaagauggccggcgaccccagauacgaggagagccugcacaaccccuaccccgacuaccacuggcugagaaccgugaagaccaccaaggagagccuggugaucaucagccccagcguggccgaccuggaccccuacgacaagagccugcacagcagaguguuccccagcggcaagugcagcggcaucaccgugagcagcaccuacugccugaccaaccacgaguacaccaucuggaugcccgagaaccugagacugggcaccagcugcgacaucuucaccaacagcagaggcaagagagccagcagaggcagcaagaccugcggcuucguggacgagagaggccuguacaagagccugaagggcgccugcaagcugaagcugugcggcgugcugggccugagacugauggacggcaccuggguggccaugcagaccagcgacgagaccaaguggugcccccccgaccagcuggugaaccugcacgacuucagaagcgacgagaucgagcaccuggugguggaggagcuggugaagaagagagaggagugccuggacgccaucgagagcaucaugaccaccaagagcgugagcuucagaagacugagccaccugagaaagcuggugcccggcuucggcaaggccuacaccaucuucaacaagacccugauggaggccgacgcccacuacaagagcgugagaaccuggaacgagaucauccccagcaagggcugccugagagugggcggcagaugccacccccacgugaagggcguguucuucaacggcaucauccugggccccgacggccacgugcugauccccgagaugcagagcagccugcugcagcagcacauggagcugcuggagagcagcaucaucccccugaugcacccccuggccgaccccagcgccguguucaaggacggcgacgaggccgaggacuucguggaggugcaccugcccgacgugcacaagcaggugagcggcguggaccugggccugcccaacuggggcaaguacauccuggugagcgccggcgcccugaucgcccugaugcugaucaucuuccugaugaccugcuucagaggcuucaaccugcccaagagcacccagcacagccugggcgagaccgagagaaagaugagcgugaccccccagagcggcaagaucaucagcagcugggagagcuacaagagcggcggcgagaccagacuguga

SEQ ID NO: 191331 - RNA, 1575 nt, Artificial Sequence
  derived and/or modified CDS sequence (opt4) from glycoprotein__RABV__JQ685896.1
augaucccccaggcccugcuguacgugccccugcugaucagcagccugugcuucggcggcuuccccaucuacaccauccccgacaagcugggccccuggagccccaucgacauccaccaccugagcugccccaacaaccuggugguggaggacgagggcugcaccagccugagcggcuucagcuacauggagcugaaggugggcuacaucagcgccaucaaggugaacggcuucaccugcaccggcguggugaccgaggccgagaccuacaccaacuucgugggcuacgugaccaccaccuucaagagaaagcacuucagacccaugcccgacgccugcagagccgccuacaacuggaagauggccggcgaccccagauacgaggagagccugcagaaccccuaccccgacuacagcuggcugagaaccgugaagaccaccaaggagagccugaucaucaucagccccagcguggccgaccuggaccccuacgacaagagccugcacagcagaguguuccccggcggcaagugccugggcaucaccaucagcagcaccuacugcagcaccaaccacgacuacaccaucuggaugcccgaggaggccagacugggcaccagcugcgacaucuucaccaacagcagaggcaagagagccagcaagggcggcaagaccugcggcuucguggacgagagaggccuguacaagagccugaagggcgccugcaagcugaagcugugcggcgugcccggccugagacugauggacggcaccugggugaccauccagaccagcgacgagaccaaguggugccccagcgaccagcuggugaaccugcacgacuuccacagcgacgagaucgagcaccuggugcuggaggagcuggugaagaagagagaggagugccuggacgcccuggagagcaucaugaccaccaagagcgugagcuucagaagacugagccaccugagaaagcuggugcccggcuucggcaaggccuacaccaucuucaacaagacccugauggaggccgacgcccacuacaagagcaucagaaccuggaacgagaucauccccagcaagggcugccugaaggugggcggcagaugccacccccacguggacggcguguucuucaacggcaucauccugggccccgacggcaacgugcugauccccgagaugcagagcagccugcugcagcagcacguggagcugcuggagagcagcgugaucccccugaugcacccccuggccgaccccagcaccguguucaaggacggcgacgaggccgaggacuucguggaggugcaccugcccgacauccacaagcaggugagcggcguggaccugggccugcccaacuggggcaaguaccugcugaugagcgccggcgcccuggccacccugaugcugaucaucuuccugauggccugcugcagaagagccaaccccaccgagagcauccagagagaccccggcgagagcggcagaaaggugagcauccccagccaggacggcaaggugaucagcagcugggagcuguacaagagcggcggcgagaccagacuguga

SEQ ID NO: 191332 - RNA, 1575 nt, Artificial Sequence
  derived and/or modified CDS sequence (opt4) from glycoprotein__RABV__JQ685897.1
augaucccccaggcccugcuguacgugccccugcugaucagcagccugugcuucggcggcuuccccaucuacaccauccccgacaagcugggccccuggagccccaucgacauccaccaccugagcugccccaacaaccuggugguggaggacgagggcugcaccagccugagcggcuucagcuacauggagcugaaggugggcuacaucagcgccaucaaggugaacggcuucaccugcaccggcguggugaccgaggccgagaccuacaccaacuucgugggcuacgugaccaccaccuucaagagaaagcacuucagacccaugcccgacgccugcagagccgccuacaacuggaagguggccggcgaccccagauacgaggagagccugcagaaccccuaccccgacuacagcuggcugagaaccgugaagaccaccaaggagagccugaucaucaucagccccagcguggccgaccuggaccccuacgacaagagccugcacagcagaguguuccccggcggcaagugccugggcaucaccaucagcagcaccuacugcagcaccaaccacgacuacaccaucuggaugcccgaggaggccagacugggcaccagcugcgacaucuucaccaacagcagaggcaagagagccagcaagggcggcaagaccugcggcuucguggacgagagaggccuguacaagagccugaagggcgccugcaagcugaagcugugcggcgugcccggccugagacugauggacggcaccugggugaccauccagaccagcgacgagaccaaguggugccccagcgaccagcuggugaaccugcacgacuuccacagcgacgagaucgagcaccuggugguggaggagcuggugaagaagagagaggagugccuggacgcccuggagagcaucaugaccaccaagagcgugagcuucagaagacugagccaccugagaaagcuggugcccggcuucggcaaggccuacaccaucuucaacaagacccugauggaggccgacgcccacuacaagagcaucagaaccuggaacgagaucauccccagcaagggcugccugaaggugggcggcagaugccacccccacguggacggcguguucuucaacggcaucauccugggccccgacggcaacgugcugauccccgagaugcagagcagccugcugcagcagcacguggagcugcuggagagcagcgugaucccccugaugcacccccuggccgaccccagcaccguguucaaggacggcgacgaggccgaggacuucguggaggugcaccugcccgacauccacaagcaggugagcggcguggaccugggccugcccaacuggggcaaguaccugcugaucagcgccggcgcccuggccacccugaugcugaccaucuuccugaugaccugcugcagaagagccaacagaaccgagagcauccagagagaccccggcgagcccggcaagaaggugagcaucaccagccaggacggcaaggugaucagcagcugggagcuguacaagagcggcggcgagaccagacuguga

SEQ ID NO: 191333 - RNA, 1575 nt, Artificial Sequence; identical to SEQ ID NO: 191328
  derived and/or modified CDS sequence (opt4) from glycoprotein__RABV__JQ685898.1

SEQ ID NO: 191334 - RNA, 1575 nt, Artificial Sequence
  derived and/or modified CDS sequence (opt4) from glycoprotein__RABV__JQ685899.1
auggugccccaggcccugcuguucgugccccugcugguguuccccagcugccugggcaaguuccccaucuacaccauccccgacaagcugggccccuggagccccaucgacauccaccaccugagcugccccaacaaccuggugguggaggacgagggcugcaacaaccugagcggcuucagcuacauggagcugaaggugggcuacaucagcgccaucaaggugaacggcuucaccugcaccggcguggugaccgaggccgagaccuacaccaacuucgugggcuacgugaccaccaccuucaagagaaagcacuucagacccacccccgacgccugcagagccgccuacaacuggaagauggccggcgaccccagauacgaggagagccugcacacccccuaccccgacuaccacuggcugagaaccgugaagaccaccaaggagagccuggugaucaucagccccagcguggccgaccuggaccccuacgacaagagccugcacagcagaguguuccccagcggcaagugcagcggcaugaccgugagcagcaccugcugcagcaccaaccacgacuacaccaucuggaugcccgagaaccccagacugggcaccagcugcgacaucuucaccaacagcagaggcaagagagccagcaagggcagcaagaccugcggcuucguggacgagagaggccuguacaagagccugaagggcgccugcaagcugaagcugugcggcgugcugggccugagacugauggacggcaccuggguggccaugcagaucagcgacgagaccaaguggugcccccccgaccagcuggugaaccugcacgacuucagaagcgacgagaucgagcaccuggugguggaggagcuggugaagaagagagaggagugccuggacgcccuggagagcaucaugaccaccaagagcgugagcuucagaagacugagccaccugagaaagcuggugcccggcuucggcaaggccuacaccaucuucaacagaacccugauggaggccgacgcccacuacaagagcgugagaaccuggaacgaggugauccccagcaagggcugccugagagugggcggcagaugccacccccacgugaacggcguguucuucaacggcaucauccugggccccgacggccacgugcugauccccgagaugcagagcagccugcugcagcagcacauggagcugcuggagagcagcgugaucccccugaugcacccccuggccaaccccagcaccguguucaaggagggcgacgaggccgaggacuucguggaggugcaccugcccgacgugcacaagcaggugagcggcguggaccugggccugcccaacuggggcaaguacgugcugaugagcgccggcgcccugaucgcccugaugcugaucaucuuccugaugaccugcugcagaagagugagcagacccgagagcaugcagagaagccugggcggcaccggcagaaaggugagcgccgccagccagagcggcaaggugaucagcagcugggagagcuacaagagcggcggcgagaccagacuguga

SEQ ID NO: 191335 - RNA, 1575 nt, Artificial Sequence
  derived and/or modified CDS sequence (opt4) from glycoprotein__RABV__JQ685900.1
augaucccccaggcccugcuguucgugccccugcugauccccagccugugccugggcgaguuccccaucuacaccauccccgacaagcugggccccuggauccccaucgacauccaccaccugagcugccccaacaaccugguggccgagaacgacggcugcaacagccugagcggcuucagcuacauggagcugaaggugggcuacaucagcgccaucaaggugaacggcuucaccugcaccggcguggugaccgaggccgagaccuacaccaacuucgugggcuacgugaccaccaccuucaagagaaagcacuucagacccaugcccgacgccugcagagccgcccacgacuggaagauggccggcgaccccagauacgaggacagccugcagaaccccuaccccgacuaccacuggcugagaaccgugaagaccaccaaggagagccuggugaucaucagccccagcguggccgaccuggaccccuacgacaagagccugcacagcagaguguuccccagcggcaagugccugggcaucaccgugagcagcaccuacugcagcaccaaccacgacuacaccaucuggaugcccguggagcccagacugggcaccagcugcgacaucuucaccaacagcagaggcaagagagccagcaagggcggcaaggugugcggcuucguggacgagagaggccuguacaagagccugaagggcgccugcaagcugaagcugugcggcgugcccggcaucagacugauggacggcaccugggugagcauccagaccagcgaggacaucaaguggugcccccccgacagacuggugaaccugcacgacuuccacagcgacgagaucgagcaccuggugguggaggagcugaucaagagaagagagaacugccuggacgcccuggagagcaucaugaccaccaagagcgugagcuucagaagacugagccaccugagaaagcuggugcccggcuucggcaaggccuacaccaucuucaacaagacccugauggaggccgacgcccacuacaagagcgugaagaccuggaacgaggugauccccagcaagggcugccuggaggugggcggcagaugccacccccccgugaacggcguguucuucaacggcaucauccugggccccgacggcaacgugcugauccccgagaugcagagcagccugcugcagcagcacauggagcugcuggagagcagcgugaucccccugaugcacccccuggccgaccccagcaccguguucaaggagggcgacgaggccgaggacuucguggaggugcaccugcccgacgugcacaagcaggugagcgacguggaccugggccugcccagcuggggcaaguaccugcugaugagcgccggcgcccuggccauccugauccuggccaucgugcugaucaucugcugcagaagagugaacaagaccggcagcacccagagaggccacagagagagcggcggcaagaugagcguggccccccagaacggcaagaucaucagcagcugggagcuguacaagagcgagagcgagaccggccuguga

SEQ ID NO: 191336 - RNA, 1575 nt, Artificial Sequence
  derived and/or modified CDS sequence (opt4) from glycoprotein__RABV__JQ685901.1
auggugcccugggugcugcuguucgugcccuuccugaucagcagccugugcuucggcaaguuccccaucuacaccauccccgacaagcugggccccuggagccccaucgacauccaccaccugagcugccccaacaaccuggugguggaggacgagggcugcaacagccugagcggcuucagcuacauggagcugaaggugggcuacaucagcgccaucaaggugaacggcuucaccugcaccggcguggugaccgaggccgagaccuacaccaacuucgugggcuacgugaccaccaccuucaagagaaagcacuucagacccaugcccgacgccugcagaagcgccuacaacuggaagauggccggcgaccccagauacgaggagagccugcacaaccccuaccccgacuaccacuggcugagaaccgugaagaccaccaaggagagccugaucaucaucagccccagcguggccgaccuggaccccuacgacaagagccugcacagcagaaucuuccccggcggcaagugcaccggccugaccgugagcagcaccuacugcagcaccaaccacgacuacaccaucuggaugcccgagaaggccggccugggcaccagcugcgacaucuucaccaacagcaagggcaagagagccagcaagggcggcaagaccugcggcuucguggacgagagaggccuguacaagagccugaagggcgccugcaagcugaagcugugcggcgugagcggccugagacugauggacggcaccuggguggccauccagacccuggacgagaccaaguggugcagccccgaccagcuggugaaccugcacgacuuccacagcgacgagcuggagcaccuggugguggaggagcuggugagaaagagagaggagugccuggacgcccuggagagcaucaugaccaccaagagcgugagcuucagaagacugagccaccugagaaagcuggugcccggcuucggcaaggccuacaccaucuucaacaagacccugauggaggccgacgcccacuacaagagcgugagaaccuggagcgagaucauccccagcaagggcugccugagagugggcggcagaugccacccccacgugaacggcguguucuucaacggcaucauccugggccccgacggccacgugcugauccccgagaugcagagcagccugcugcagcagcacguggagcugcuggagagcagcgugaucccccugaugcacccccuggccgaccccagcgccguguucaaggacggcgacgaggccgaggacuucguggaggugcaccugcccgacgugcacaagcagaucagcggcguggaccugggccugcccagcuggggcaaguacaugcugaugaucgccggcgcccugaugacccugaugcuguucaucuuccugaugaccugcugcagaagagugaacagaaccgagagcaucagacagggccccagagagcuggagagcaaggugagcgugaccccccagaacagaaaggugaucagcagcugggagagcuacaagagcggcggcgagaccaagcuguga

SEQ ID NO: 191337 - RNA, 1575 nt, Artificial Sequence
  derived and/or modified CDS sequence (opt4) from glycoprotein__RABV__JQ685902.1
augaucccccaggcccugcuguucgugccccugcugauccccagccugugccugggcgaguuccccaucuacaccauccccgacaagcugggccccuggagccccaucgacauccaccaccugagcugccccaacaaccugguggccgagaacgacggcugcaccagccugagcggcuucagcuacauggagcugaaggugggcuacaucagcgccaucaaggugaacggcuucaccugcaccggcguggugaccgaggccgagaccuacaccaacuucgugggcuacgugaccaccaccuucaagagaaagcacuucagacccacccccgacgccugcagagccgcccacgacuggaagauggccggcgaccccagauacgaggccagccugcagaaccccuaccccgacuaccacuggcugagaaccgugaagaccaccaaggagagccuggugaucaucagccccagcguggccgaccuggaccccuacgacaagagccugcacagcagaguguuccccagcggcaagugccugggcaucaccgugagcagcaccuacugcagcaccaaccacgacuacaccaucuggaugcccguggagcccagacugggcaccagcugcgacaucuucaccaacagcagaggcaagagagccagcaagggcggcagagugugcggcuucguggacgagagaggccuguacaagagccugaagggcgccugcagacugaagcugugcggcgugcccggcaucagacugcuggacggcaccugggugagcauccagaccagcgaggacaucaaguggugcccccccgacagacuggugaaccugcacgacuuccacagcgacgagaucgagcaccuggugguggccgagcugaucaagagaagagagaacugccuggacgcccuggagagcaucaugaccaccaagagcgugaccuucagaagacugacccaccugagaaagcuggugcccggcuucggcaaggccuacaccaucuucaacaagacccugauggaggccgacgcccacuacaagagcgugaagaccuggaacgaggugauccccagcaagggcugccuggaggugggcggcagaugccacccccacgugaacggcguguucuucaacggcaucauccugggccccgacggcaacgugcugauccccgagaugcagagcagccugcugcagcagcacauggagcugcuggagagcagcgugaucccccugaugcacccccuggccgaccccagcaccguguucaaggagggcgacgaggccgaggacuucguggaggugcaccugcccgacgugcacaagcaggugagcgacguggaccugggccugcccagcuggggcaaguaccugcugaucagcgccggcgcccuggccauccugauccuggccaucgugcugaucaucugcugcagaagagugaacaagaccggcagcacccagagaggccacagagagagcggcggcaagaugagcguggugccccagaacggcaagaucaucagcagcugggagcuguacaagagcgagagcgagaccggccuguga

SEQ ID NO: 191338 - RNA, 1575 nt, Artificial Sequence
  derived and/or modified CDS sequence (opt4) from glycoprotein__RABV__JQ685903.1
augauccugcaggcccugcuguucgugccccugcugaucagcagccugugcuucggcggcuuccccaucuacaccauccccgacaagcugggccccuggagccccaucgacauccaccaccugagcugccccaacaaccuggugguggaggacgagggcugcaccagccugagcggcuucagcuacauggagcugaaggugggcuacaucagcgccaucaaggugaacggcuucaccugcaccggcguggugaccgaggccgagaccuacaccaacuucgugggcuacgugaccaccaccuucaagagaaagcacuucagacccaugcccgacagcugcagagccgccuacaacuggaagaccgccggcgaccccagauacgaggagagccugcagaaccccuaccccgacuaccacuggcugagaaccgugaagaccaccaaggagagccugaucaucaucagccccagcguggccgaccuggaccccuacgacaagagccugcacagcagaguguuccccggcggcaagugccugggcaucaccgugagcagcaccuacugcagcaccaaccacgacuacaccaucuggaugcccgaggaggccagacugggcaccagcugcgacaucuucaccaacagcagaggcaagagagccagcaagggcggcagaaccugcggcuucguggacgagagaggccuguacaagagccugaagggcgccugcaagcugaagcugugcggcgugcugggccugagacugauggacggcaccugggugaccauccacaccagcaacgagaccaaguggugccccagcgaccagcuggugaaccugcacgacuuccacagcgacgagaucgagcaccuggugguggaggagcuggugaagaagagagaggagugccuggacgcccuggagagcaucaugaccaccaagagcgugagcuucagaagacugagccaccugagaaagcuggugcccggcuucggcaaggccuacaccaucuucaacaagacccugauggaggccgacgcccacuacaagagcaucagaaccuggaacgagaucauccccagcaagggcugccugaaggugggcggcagaugccacccccacguggacggcguguucuucaacggcaucauccugggccccgacggcaacgugcugauccccgagaugcagagcagccugcugcagcagcacguggagcugcuggagagcagcgugaucccccugaugcacccccuggccgaccccagcaccguguucaaggacggcgacgaggccgaggacuucguggaggugcaccugcccgacgugcacaagcaggugagcggcguggaccugggccugcccaacuggggcaaguaccugcugaugagcgccggcgugcuggccacccugaugcugaccaucuuccugaucaccugcugcagaagaguggacagaaccgagagcauccagagaggccccggcgagcugggcagagagaugagcgugaccagccagaacggcaaggugaucagcagcugggagcuguacaagagcggcggcgagaccagacuguga

SEQ ID NO: 191339 - RNA, 1575 nt, Artificial Sequence
  derived and/or modified CDS sequence (opt4) from glycoprotein__RABV__JQ685905.1
augaucuuccaggcccugcuguucgugccccugcugaucagcagccugugccugggcaaguuccccaucuacaccauccccgacaagcugggccccuggagccccaucgacauccaccaccugagcugccccaacaaccuggugguggaggacgagggcugcaccagccugagcggcuucagcuacauggagcugaaggugggcuacaucagcgccaucaaggugaacggcuucaccugcaccggcguggugaccgaggccgagaccuacaccaacuucgugggcuacgugaccaccaccuucaagagaaagcacuucagacccauccccgacgccugcagagccgccuacaacuggaagaucgccggcgaccccagauacgaggagagccugcagaaccccuaccccgacuaccacuggcugagaaccgugaagaccaccaaggagagccugaucaucaucagccccagcguggccgaccuggaccccuacgacaagagccugcacagcagacuguuccccggcggcaagugccugggcaucaccaucagcagcaccuacugcagcaccaaccacgacuacaccaucuggaugcccgaggagcccagacugggcaccagcugcgacaucuucaccaacagcaagggcaagaaggccagcaagggcggcaaggugugcggcuucguggacgagagaggccuguacaagagccugaagggcgccugcaagcugaagcugugcggcgugagcggccugagacugauggacggcaccugggugaccauccagaccagcgacgagaccaaguggugcccccccgaccagcuggugaaccugcacgacuuccacagcgacgagaucgagcaccuggugguggaggagcuggugaagaagagagaggagugccuggacgcccuggagagcaucaugaccaccaagagcgugagcuucagaagacugagcuaccugagaaagcuggugcccggcuucggcaaggccuacaccaucuucaacaagacccugauggaggccgacgcccacuacaagagcgugagaaccuggaacgagaucauccccagcaagggcugccugaaggugagcgacagaugccacccccacguggacggcguguucuucaacggcaucauccugggccccgacggcaacgugcugauccccgagaugcagagcagccugcugcagcagcacauggagcugcuggagagcagcgugaucccccugaugcacccccuggccgaccccagcaccguguucaaggacggcgacgaggccgaggacuucguggaggugcaccugcccgacgugcacaagcagaucagcggcguggaccugggccugcccagcuggggcaaguaccugcugaugaucgccggcggccuggccacccuggugcugaucaucuuccugauggccugcugcagaagaaccaagagaaccgagagcagaagaagaggcagcggcgagagcggcgagaaggugcuggccaccccccagcccaagaagguggugagcagcugggagcuguacaagagagagggcgacgccagacuguga

SEQ ID NO: 191340 - RNA, 1575 nt, Artificial Sequence
  derived and/or modified CDS sequence (opt4) from glycoprotein__RABV__JQ685906.1
augaucccccaggcccugcuguacgugccccugcugauccccagccugugcuucggcggcuuccccaucuacaccauccccgacaagcugggccccuggagccccaucgacauccaccaccugagcugccccaacaaccuggugguggaggacgagggcugcaccagccugagcggcuucagcuacauggagcugaaggugggcuacaucagcgccaucaaggugaacggcuucaccugcaccggcguggugaccgaggccgagaccuacaccaacuucgugggcuacgugaccaccaccuucaagagaaagcacuucagacccaugcccgacgccugcagagccgccuacaacuggaagguggccggcgaccccagauacgaggagagccugcagaaccccuaccccgacuacagcuggcugagaaccgugaagaccaccaaggagagccugaucaucaucagccccagcguggccgaccuggaccccuacgacaagagccugcacagcagaguguuccccggcggcaagugccugggcaucaccaucagcagcaccuacugcagcaccaaccacgacuacaccaucuggaugcccgaggaggccagacugggcaccagcugcgacaucuucaccaacagcagaggcaagagagccagcaagggcggcaagaccugcggcuucguggacgagagaggccuguacaagagccugaagggcgccugcaagcugaagcugugcggcgugcccggccugagacugauggacggcaccugggugaccauccagaccagcgacgagaccaaguggugccccagcgaccagcuggugaaccugcacgacuuccacagcgacgagaucgagcaccuggugguggaggagcuggugaagaagagagaggagugccuggacgcccuggagagcaucaugaccaccaagagcgugagcuucagaagacugagccaccugagaaagcuggugcccggcuucggcaaggccuacaccaucuucaacaagacccugauggaggccgacgcccacuacaagagcaucagaaccuggaacgagaucauccccagcaagggcugccugaaggugggcggcagaugccacccccacguggacggcguguucuucaacggcaucauccugggccccgacggcaacgugcugauccccgagaugcagagcagccugcugcagcagcacguggagcugcuggagagcagcgugaucccccugaugcacccccuggccgaccccagcaccguguucaaggacggcgacgaggccgaggacuucguggaggugcaccugcccgacauccacaagcaggugagcggcguggaccugggccugcccaacuggggcaaguaccugcugaugagcgccggcgcccuggccacccugaugcugaccaucuuccugaugaccugcugcagaagagccaacagaaccgagagcauccagagagaccccggcgagagcggcaagaaggugagcaccaccagccaggacggcaaggugaucagcagcugggagcuguacaagagcggcggcgagaccagacuguga

SEQ ID NO: 191341 - RNA, 1575 nt, Artificial Sequence
  derived and/or modified CDS sequence (opt4) from glycoprotein__RABV__JQ685907.1
augaucccccaggcccugcuguacgugccccugcugaucagcagccugugcuucggcggcuuccccaucuacaccauccccgacaagcugggccccuggagccccaucgacauccaccaccugagcugccccaacaaccuggugguggaggacgagggcugcaccagccugagcggcuucagcuacauggagcugaaggugggcuacaucagcgccaucaaggugaacggcuucaccugcaccggcguggugaccgaggccgagaccuacaccaacuucgugggcuacgugaccaccaccuucaagagaaagcacuucagacccaugcccgacgccugcagagccgccuacaacuggaagaucgccggcgaccccagauacgaggagagccugcagaaccccuaccccgacuacagcuggcugagaaccgugaagaccaccaaggagagccugaucaucaucagccccagcguggccgaccuggaccccuacgacaagagccugcacagcagaguguuccccggcggcaagugccugggcaucaccaucagcagcaccuacugcagcaccaaccacgacuacaccaucuggaugcccgaggaggccagacugggcaccagcugcgacaucuucaccaacagcagaggcaagagagccagcaagggcggcaagaccugcggcuucguggacgagagaggccuguacaagagccugaagggcgccugcaagcugaagcugugcggcgugcccggccugagacugauggacggcaccugggugaccauccagaccagcgacgagaccaaguggugccccagcgaccagcuggugaaccugcacgacuuccacagcgacgagaucgagcaccuggugguggaggagcuggugaagaagagagaggagugccuggacgcccuggagagcaucaugaccaccaagagcgugagcuucagaagacugagccaccugagaaagcuggugcccggcuucggcaaggccuacaccaucuucaacaagacccugauggaggccgacgcccacuacaagagcaucagaaccuggaacgagaucauccccagcaagggcugccugaaggugggcggcagaugccacccccacguggacggcguguucuucaacggcaucauccugggccccgacggcaacgugcugauccccgagaugcagagcagccugcugcagcagcacguggagcugcuggagagcagcgugaucccccugaugcacccccuggccgaccccagcaccguguucaaggacggcgacgaggccgaggacuucguggaggugcaccugcccgacauccacaagcaggugagcggcguggaccugggccugcccaacuggggcaaguaccugcugaugagcgccggcgcccuggccacccugaugcugaucaucuuccugauggccugcugcagaagagccaacagaaccgagagcauccagagagaccccggcgagagcggcagaaaggugagcauccccagccaggacggcaaggugaucagcagcugggagcuguacaagagcggcggcgagaccagacuguga

SEQ ID NO: 191342 - RNA, 1575 nt, Artificial Sequence
  derived and/or modified CDS sequence (opt4) from glycoprotein__RABV__JQ685909.1
augaucccccaggcccugcuguacgugccccugcugaucagcagccugugcuucggcggcuuccccaucuacaccauccccgacaagcugggccccuggagccccaucgacauccaccaccugagcugccccaacaaccuggugguggaggacgagggcugcaccagccugagcggcuucagcuacauggagcugaaggugggcuacaucagcgccaucaaggugaacggcuucaccugcaccggcguggugaccgaggccgagaccuacaccaacuucgugggcuacgugaccaccaccuucaagagaaagcacuucagacccaugcccgacgccugcagagccgccuacaacuggaagauggccggcgaccccagauacgaggagagccugcagaaccccuaccccgacuacagcuggcugagaaccgugaagaccaccaaggagagccugaucaucaucagccccagcguggccgaccuggaccccuacgacaagagccugcacagcagaguguuccccggcggcaagugccugggcaucaccaucagcagcaccuacugcagcaccaaccacgacuacaccaucuggaugcccgaggaggccagacugggcaccagcugcgacaucuucaccaacagcagaggcaagagagccagcaagggcggcaagaccugcggcuucguggacgagagaggccuguacaagagccugaagggcgccugcaagcugaagcugugcggcgugcccggccugagacugauggacggcaccugggugaccauccagaccagcgacgagaccaaguggugccccagcgaccagcuggugaaccugcacgacuuccacagcgacgagaucgagcaccuggugguggaggagcuggugaagaagagagaggagugccuggacgcccuggagagcaucaugaccaccaagagcgugagcuucagaagacugagccaccugagaaagcuggugcccggcuucggcaaggccuacaccaucuucaacaagacccugauggaggccgacgcccacuacaagagcaucagaaccuggaacgagaucauccccagcaagggcugccugaaggugggcggcagaugccacccccacguggacggcguguucuucaacggcaucauccugggccccgacggcaacgugcugauccccgagaugcagagcagccugcugcagcagcacguggagcugcuggagagcagcgugaucccccugaugcacccccuggccgaccccagcaccguguucaaggacggcgacgaggccgaggacuucguggaggugcaccugcccgacauccacaagcaggugagcggcguggaccugggccugcccaacuggggcaaguaccugcugaugagcgccggcgcccuggccacccugaugcugaccaucuuccugaugaccugcugcagaagagccaacagaaccgagagcauccagagagaccccggcgagagcggcagaaaggugagcaucaccagccccgacggcaaggugaucagcagcugggagcuguacaagagcggcggcgagaccggccuguga

SEQ ID NO: 191343 - RNA, 1575 nt, Artificial Sequence
  derived and/or modified CDS sequence (opt4) from glycoprotein__RABV__JQ685910.1
augaucccccaggccuuccuguucgugccccugcugauccccagccugugccugggcgaguuccccaucuacaccauccccgacaagcugggccccuggagccccaucgacauccaccaccugagcugccccaacaaccugguggccgagaacgacggcugcaccagccugagcggcuucagcuacauggagcugaaggugggcuacaucagcgccaucaaggugaacggcuucaccugcaccggcgugaugaccgaggccgagaccuacaccaacuucgugggcuacgugaccaccaccuucaagagaaagcacuucagacccaugcccgacgccugcagagccgcccacgacuggaagaucgccggcgaccccagauacgaggacagccugcagaaccccuaccccgacuaccacuggcugagaaccgugaagaccaccaaggagagccuggugaucaucagccccagcguggccgaccuggaccccuacgacaagagccugcacagcagaguguuccccagcggcaagugccugggcaucaccgugagcagcaccuacugcagcaccaaccacgacuacaccaucuggaugcccguggagcccagacugggcaccagcugcgacaucuucaccaacagcagaggcaagagagccagcaagggcggcagagugugcggcuucguggacgagagaggccuguacaagagccugaagggcgccugcaagcugaagcugugcggcgugcccggcaucagacugauggacggcaccugggugagcauccagaccagcgaggagaucaaguggugcccccccgacagacuggugaaccugcacgacuuccacagcgacgagaucgagcaccuggugguggaggagcugaucaagagaagagagaacugccuggacgcccuggagagcaucaugaccaccaagagcgugagcuucagaagacugagccaccugagaaagcuggugcccggcuucggcaaggccuacaccaucuucaacaagacccugauggaggccgacgcccacuacaagagcgugaagaccuggaacgaggugauccccagcaagggcugccuggaggugggcggcagaugccacccccccgugaacggcguguucuucaacggcaucauccugggccccgacggcaacgugcugauccccgagaugcagagcagccugcugcagcagcacauggagcugcuggagagcagcgugaucccccugaugcacccccuggccgaccccagcaccguguucaaggagggcgacgaggccgaggacuucguggaggugcaccugcccgacgugcacaagcaggugagcgacguggaccugggccugcccagcuggggcaaguaccugcugaugagcgccggcgcccuggccauccugauccuggugaucgugcugaucaucugcugcagaagagugaacaagaccggcagcacccagagaggccacagagagagcggcggcaagaugagcguggccccccagaacggcaagaucaucagcagcugggagcuguacaagagcgagagcgagaccggccuguga

SEQ ID NO: 191344 - RNA, 1575 nt, Artificial Sequence
  derived and/or modified CDS sequence (opt4) from glycoprotein__RABV__JQ685911.1
augaucccccaggcccugcuguacgugccccugcugauccccagccugugcuucggcggcuuccccaucuacaccauccccgacaagcugggccccuggagccccaucgacauccaccaccugagcugccccaacaaccuggugguggaggacgagggcugcaccagccugagcggcuucagcuacauggagcugaaggugggcuacaucagcgccaucaaggugaacggcuucaccugcaccggcguggugaccgaggccgagaccuacaccaacuucgugggcuacgugaccaccaccuucaagagaaagcacuucagacccaugcccgacgccugcagagccgccuacaacuggaagguggccggcgaccccagauacgaggagagccugcagaaccccuaccccgacuacagcuggcugagaaccgugaagaccaccaaggagagccugaucaucaucagccccagcguggccgaccuggaccccuacgacaagagccugcacagcagaguguuccccggcggcaagugccugggcaucaccaucagcagcaccuacugcagcaccaaccacgacuacaccaucuggaugcccgaggaggccagacugggcaccagcugcgacaucuucaccaacagcagaggcaagagagccagcaagggcggcaagaccugcggcuucguggacgagagaggccuguacaagagccugaagggcgccugcaagcugaagcugugcggcgugcccggccugagacugauggacggcaccugggugaccauccagaccagcgacgagaccaaguggugccccagcgaccagcuggugaaccugcacgacuuccacagcgacgagaucgagcaccuggugguggaggagcuggugaagaagagagaggagugccuggacgcccuggagagcaucaugaccaccaagagcgugagcuucagaagacugagccaccugagaaagcuggugcccggcuucggcaaggccuacaccaucuucaacaagacccugauggaggccgacgcccacuacaagagcaucagaaccuggaacgagaucauccccagcaagggcugccugaaggugggcggcagaugccacccccacguggacggcguguucuucaacggcaucauccugggccccgacggcaacgugcugauccccgagaugcagagcagccugcugcagcagcacguggagcugcuggagagcagcgugaucccccugaugcacccccuggccgaccccagcaccguguucaaggacggcgacgaggccgaggacuucguggaggugcaccugcccgacauccacaagcaggugagcggcguggaccugggccugcccaacuggggcaaguaccugcugaugagcgccggcgcccuggccacccugaugcugaccaucuuccugaugaccugcugcagaagaagcaacagaaccgagagcauccagagagaccccggcgagagcggcaagaaggugagcaucaccagccaggacggcaaggugaucagcagcugggagcuguacaagagcggcggcgagaccagacuguga

SEQ ID NO: 191345 - RNA, 1575 nt, Artificial Sequence; identical to SEQ ID NO: 191328
  derived and/or modified CDS sequence (opt4) from glycoprotein__RABV__JQ685912.1

SEQ ID NO: 191346 - RNA, 1575 nt, Artificial Sequence; identical to SEQ ID NO: 191328
  derived and/or modified CDS sequence (opt4) from glycoprotein__RABV__JQ685913.1

SEQ ID NO: 191347 - RNA, 1575 nt, Artificial Sequence
  derived and/or modified CDS sequence (opt4) from glycoprotein__RABV__JQ685914.1
augaucccccaggcccugcuguucgugccccugcugaucagcagccugugcuucggcggcuuccccaucuacaccauccccgacaagcugggccccuggagccccaucgacauccaccaccugagcugccccaacaaccuggugguggaggacgagggcugcaccagccugagcggcuucagcuacauggagcugaaggugggcuacaucagcgccaucaaggugaacggcuucaccugcaccggcguggugaccgaggccgagaccuacaccaacuucgugggcuacgugaccaccaccuucaagagaaagcacuucagacccaugcccgacagcugcagagccgccuacaacuggaagaccgccggcgaccccagauacgaggagagccugcagaaccccuaccccgacuaccacuggcugagaaccgugaagaccaccaaggagagccugaucaucaucagccccagcguggccgaccuggaccccuacgacaagagccugcacagcagaguguuccccggcggcaagugccugggcaucaccgugagcagcaccuacugcagcaccaaccacgacuacaccaucuggaugcccgaggaggccagacugggcaccagcugcgacaucuucgccaacagcagaggcaagagagccagcaagggcggcagaaccugcggcuucguggacgagagaggccuguacaagagccugaagggcgccugcaagcugaagcugugcggcgugcugggccugagacugauggacggcaccugggccaccauccacaccagcaacgagaccaaguggugccccagcgaccagcuggugaaccugcacgacuuccacagcgacgagaucgagcaccuggugguggaggagcuggugaagaagagagaggagugccuggacgcccuggagagcaucaugaccaccaagagcgugagcuucagaagacugagccaccugagaaagcuggugcccggcuucggcaaggccuacaccaucuucaacaagacccugauggaggccgacgcccacuacaagagcaucagaaccuggaacgagaucauccccagcaagggcugccugaaggugggcggcagaugccacccccacguggacggcguguucuucaacggcaucauccugggccccgacggcaacgugcugauccccgagaugcagagcagccugcugcagcagcacguggagcugcuggagagcagcgugaucccccugaugcacccccuggccgaccccagcaccguguucaaggacggcgacgaggccgaggacuucguggaggugcaccugcccgacgugcacaagcaggugagcggcguggaccugggccugcccaacuggggcaaguaccugcugaugagcgccggcgcccuggccacccugaugcugaccaucuuccugaucaccugcugcagaagaguggacaagaccgagagcauccagagaggccccggcgagcugggcagagaggugagcgugaccagccagaacggcaaggugaucagcagcugggagcuguacaagagcggcggcgagaccagacuguga

SEQ ID NO: 191348 - RNA, 1575 nt, Artificial Sequence
  derived and/or modified CDS sequence (opt4) from glycoprotein__RABV__JQ685915.1
augauccugcaggcccugcugcugcugccccugcugaucagcagcuggugccugggcaaguuccccaucuacaccauccccgacaagcugggccccuggagccccaucgacauccaccaccugagcugccccaacaaccuggugguggaggacgagggcugcaccagccugagcggcuucagcuacauggagcugaaggugggcuacaucagcgccaucaaggugaacggcuucaccugcaccggcguggugaccgaggccgagaccuacaccaacuucgugggcuacgugaccaccaccuucaagagaaagcacuucagacccaugcccgacgccugcagagccgcccacgaguggaagauggccggcgaccccagauacgaggacagccugcagaaccccuaccccgacuaccacuggcugagaaccgugaagaccaccaaggagagccugaucaucaucagccccagcguggccgaccuggaccccuacgacaagagccugcacagcagaguguuccccggcggcaacugccugggcgugaccaucagcagcaccuacugcagcaccaaccacgacuacaccaucuggaugcccgaggaggccagacugggcaccagcugcgacaucuucaccaacagcaagggcaagaaggccagcaagggcggcaaggugugcggcuucguggacgagagaggccuguacaagagccugaagggcgccugcaagcugaagcugugcggcgugcccggccugagacugauggacggcaccugggugagcauccagaccagcgacgagaccaaguggugcccccccgaccagcuggugaacauccacgacuuccacagcgacgagaucgagcaccugaucguggaggagcuggugaagaagagagaggagugccuggacgcccuggagagcaucaugaccaccaagagcgugagcuucagaagacugagccaccugagaaagcuggugcccggcuucggcaaggccuacaccaucuucaacaagacccugauggaggccgacgcccacuacaagagcgugagaaccuggaacgaggugauccccagcaagggcugccugaaggugggcggcagaugccacccccacgugggcggcguguucuucaacggcaucauccugggccccgacggcaccgugcugauccccgagaugcagagcagccugcugcagcagcacauggagcugcuggagagcagcgugaucccccugaugcacccccuggccgaccccagcaagguguucaaggagggcgacgaggccgaggacuucguggaggugcaccugcccgacgugcacaagcaggugagcggcguggaccugggccugcccagcuggggcaaguaccugcugaugagcgugggcgcccuggccacccugauccugaucaucuuccugaucaccugcugcagaaaggugaagagaaccgagagcauccagagaggccacggcgagagcggcagaaaggugagcgccagcccccagaacggcaaggugaucagcagcugggagcuguacaagagcgagggcgagaccaaccuguga

SEQ ID NO: 191349 - RNA, 1575 nt, Artificial Sequence
  derived and/or modified CDS sequence (opt4) from glycoprotein__RABV__JQ685916.1
augaucccccaggcccugcugagccugcugcugcugaucagcagccugugccugggcaaguuccccaucuacaccauccccgacaagcugggccccuggagccccaucgacauccaccaccugagcugccccaacaaccuggugguggaggacgagggcugcaccagccugagcggcuucagcuacauggagcugaaggugggcuacaucagcgccaucaaggugaacggcuucaccugcaccggcguggugaccgaggccgagaccuacaccaacuucgugggcuacgugaccaccaccuucaagagaaagcacuucagacccaugcccgacgccugcagagccgcccacgaguggaagauggccggcgaccccagauacgaggacagccugcagaaccccuaccccgacuaccacuggcugagaaccgugaagaccaccaaggagagccugaucaucaucagccccagcguggccgaccuggaccccuacgacaagagccugcacagcagaguguuccccggcggcaacugccugggcaucaccaucagcagcaccuacugcagcaccaaccacgacuacaccaucuggaugcccgaggaggccagacugggcaccagcugcgacaucuucaccaacagcaagggcaagagagccagcaagggcggcaagaucugcggcuucguggacgagagaggccuguacaagagccugaagggcgccugcaagcugaagcugugcggcgugcccggccugagacugauggacggcaccugggugagcauccagaccagcgacgagaccaaguggugcccccccgaccagcuggugaacgugcacgacuuccacagcgacgagaucgagcaccugaucguggaggagcuggugaagaagagagaggagugccuggacgcccuggagagcaucaugaccaccaagagcgugagcuucagaagacugagccaccugagaaagcuggugcccggcuucggcaaggccuacaccaucuucaacaagacccugauggaggccgacgcccacuacaagagcgugagaaccuggaacgagaucauccccagcaagggcugccugaaggugggcggcaugugccacccccacgugggcggcguguucuucaacggcaucauccugggccccgacggcaccgugcugauccccgagaugcagagcagccugcugcagcagcacauggagcugcuggagagcagcgugaucccccugaugcacccccuggccgaccccagcaccguguucaaggagggcgacgaggccgaggacuucguggagauccaccugcccgacgugcacaagcagaucagcggcguggaccugggccugcccagcuggggcaaguaccugcugaucagcgccggcgcccuggccacccugauccugaccaucuuccugaucaccugcugcagaaaggugaacagaaccgagagcauccagagaggccacggcgagagcgagagaaaggugagcgugagcccccagaacggcagagugaucagcagcugggagcuguacaagagcggcggcgagaccaaccuguga

SEQ ID NO: 191350 - RNA, 1575 nt, Artificial Sequence
  derived and/or modified CDS sequence (opt4) from glycoprotein__RABV__JQ685917.1
augaucccccaggcccugcuguacgugccccugcugaucagcagccugugcuucggcggcuuccccaucuacaccauccccgacaagcugggccccuggagccccaucgacauccaccaccugagcugccccaacaaccuggugguggaggacgagggcugcaccagccugagcggcuucagcuacauggagcugaaggugggcuacaucagcgccaucaaggugaacggcuucaccugcaccggcguggugaccgaggccgagaccuacaccaacuucgugggcuacgugaccaccaccuucaagagaaagcacuucagacccgugcccgacgccugcagagccgccuacaacuggaagguggccggcgaccccagauacgaggagagccugcagaaccccuaccccgacuacagcuggcugagaaccgugaagaccaccaaggagagccugaucaucaucagccccagcguggccgaccuggaccccuacgacaagagccugcacagcagaguguuccccggcggcaagugccugggcaucaccaucagcagcaccuacugcagcaccaaccacgacuacaccaucuggaugcccgaggaggccagacugggcaccagcugcgacaucuucaccaacagcagaggcaagagagccagcaagggcggcaagaccugcggcuucguggacgagagaggccuguacaagagccugaagggcgccugcaagcugaagcugugcggcgugcccggccugagacugauggacggcaccugggugaccauccagaccagcgacgagaccaaguggugccccagcgaccagcuggugaaccugcacgacuuccacagcgacgagaucgagcaccuggugguggaggagcuggugaagaagagagaggagugccuggacgcccuggagagcaucaugaccaccaagagcgugagcuucagaagacugagccaccugagaaagcuggugcccggcuucggcaaggccuacaccaucuucaacaagacccugauggaggccgacgcccacuacaagagcaucagaaccuggaacgagaucauccccagcaagggcugccugaaggugggcggcagaugccacccccacguggacggcguguucuucaacggcaucauccugggccccgacggcaacgugcugauccccgagaugcagagcagccugcugcagcagcacguggagcugcuggagagcagcgugaucccccugaugcacccccuggccgaccccagcaccguguucaaggacggcgacgaggccgaggacuucguggaggugcaccugcccgacauccacaagcaggugagcggcguggaccugggccugcccgacuggggcaaguaccugcugaugagcgccggcgcccuggccacccugaugcugaccaucuuccugaugaucugcugcagaagagccaacagaaccgagagcauccagagagaccccggcgagagcggcaagaaggugagcaucaccagccaggacggcaaggugaucagcagcugggagcuguacaagagcggcggcgagaccagacuguga

SEQ ID NO: 191351 - RNA, 1575 nt, Artificial Sequence
  derived and/or modified CDS sequence (opt4) from glycoprotein__RABV__JQ685918.1
augaucccccagagccugcuguuccugccccugcugaucagcagccugugcuucggcgaguuccccaucuacaccauccccgagaagcugggccccuggagccccaucgacauccaccaccugagcugccccaacaaccuggugguggaggacgagggcugcaacagccugagcggcuucagcuacauggagcugaaggugggcuacaucagcagcaucaaggugaacggcuucaccugcaccggcguggugaccgaggccgagaccuacaccaacuucgugggcuacgugaccaccaccuucaagagaaagcacuucagacccaugcccgacgccugcagagccgccuacagcuggaagauggccggcgaccccagauacgaggagagccugcacaaccccuaccccgacuaccacuggcugagaaccgugaagaccaccaaggagagccuggugaucaucagccccagcguggccgaccuggaccccuacgacaagagccugcacagcagaguguucagcggcggcaagugccugggcaucaccaucagcagcaccuacugcagcaccaaccacgacuacaccaucuggaugcccgaggaggccagacugggcaccagcugcgacaucuucaccaacagcaagggcaagagagccagcaagggcggcagaaccugcggcuucguggacgagagaggccuguacaagagccugaagggcgccugcaagcugaagcugugcggcgugcccggccugagacugauggacggcaccugggugagcauccagaccagcaacgagaccaaguggugcccccccgaccagcuggugaacauccacgacuucagaagcgacgagaucgagcaccuggugguggaggagcuggugaagaagagagaggagugccuggacgcccuggagagcaucaugaccaccaagagcgugagcuucagaagacugagccaccugagaaagcuggugcccggcuucggcaaggccuacaccaucuucaacaagacccugauggaggccgacgcccacuacaagagcgugagaaccuggaacgaggugauccccagcaagggcugccugagcgugggcggcagaugcuacccccacgugagcggcguguucuucaacggcaucauccugggccccgacggcagcgugcugauccccgagaugcagagcagccugcugcagcagcacauggagcugcuggagagcagcgugaucccccugaugcacccccuggccaaccccagcaccguguucaaggacggcgacgaggccgaggacuucguggaggugcaccugcccgacgugaaggagcaggugagcggcguggaccugggccugcccaacuggggcaaguacgugcugaugagcgccggcgcccuggccauccugaugcuggccaucuuccugaugaccugcugcagaagagccaacagaaccaagagcauccagcagggccccagagagagcggcagaaaggugagcgugcccccccagaacggcaaggugaucagcagcugggagagcuucaagagcggcggcgagaccagacuguga

SEQ ID NO: 191352 - RNA, 1575 nt, Artificial Sequence
  derived and/or modified CDS sequence (opt4) from glycoprotein__RABV__JQ685920.1
augaucccccaggcccugcuguucgugcccuuccuguuccccagccugugccugggcaaguuccccaucuacaccauccccgagaagcugggccccuggagccccaucgacauccaccaccugagcugccccaacaaccuggugguggaggacgagggcugcgacagccugagcggcuucagcuacauggagcugaaggugggcuacaucagcgccaucaaggugaacggcuucaccugcaccggcguggugaccgaggccgagaccuacaccaacuucgugggcuacgugaccaccaccuucaagagaaagcacuucagacccaugcccgacgccugcagagccgccuacaacuggaagaccgccggcgaccccagauacgaggagagccugcacaaccccuaccccgacuaccacuggcugagaaccgugaagaccaccaaggagagccuggugaucaucagccccagcguggccgaccuggaccccuacgacaagagccugcacagcagaguguuccccggcggcaagugccugggcaucaccaucagcagcaccuacugcagcaccaaccacgacuacaccaucuggaugcccgaggaggccagacugggcaccagcugcgacaucuucaccaacagcaagggcaagagagccagcaagggcggcagaaccugcggcuucguggacgagagaggccuguacaagagccugaagggcgccugcaagcugaagcugugcggcgugcccggccugagacugauggacggcaccuggguggccauccagacccccggcgagaccaaguggugcagccccgaccagcuggugaaccugcacgacuucagaagcgacgagaucgagcaccuggugguggaggagcugaucaagaagagagaggagugccuggacgcccuggagagcaucaugaccaccaagagcgugagcuucagaagacugagcaaccugagaaagcuggugcccggcuucggcaaggccuacaccaucuucaacaagacccugauggaggccgacgcccacuacaagagcgugagaaccugggacgagaucauccccagcaagggcugccugagagugggcggcagaugccacccccacgugaacggcguguucuucaacggcaucauccugggccccgacggccacgugcugauccccgagaugcagagcagccugcugcagcagcacauggagcugcuggagagcagcgugaucccccugauccacccccuggccgaccccagcaccguguucaaggacggcgacgaggccgaggacuucguggaggugcaccugcccgacgugcacaagcaggugagcggcguggaccugggccugcccaacuggggcaaguacgugcugaugagcgccggcgugcuggccaccgugauccugaccaucuuccugcugaccugcugcagaagagugaacagaaccaagcccaagcagcagagccugggcgagagcggcagaaaggugagcgugaccccccagaacggcaaggugaugagcagcugggaguacuacaagagcgagggcagaaccagccuguga

SEQ ID NO: 191353 - RNA, 1575 nt, Artificial Sequence
  derived and/or modified CDS sequence (opt4) from glycoprotein__RABV__JQ685921.1
augauccugcaggcccugcuguucgugcccauccugaucagcagcuucugcuucggcgacuuccccaucuacaccauccccgagaagcugggccccuggagccccaucgacauccaccaccugagcugccccaacaaccuggugguggaggacgagggcugcagcagccugagcggcuucagcuacauggagcugaaggugggcuacaucagcgccaucaaggugaacggcuucaccugcaccggcguggugaccgaggccgagaccuacaccaacuucgugggcuacgugaccaccaccuucaagagaaagcacuucagacccaugcccgacgccugcagagccgccuacaacuggaagaccgccggcgaccccagauacgaggagagccugcagaaccccuaccccgacuaccacuggcugagaaccgugaagaccaccaaggagagccuggugaucaucagccccagcguggccgaccuggaccccuacgacaagagccugcacagcagaguguucagcgacggcaagugccugggcaucaccaucagcagcaccuacugcagcaccaaccacgacuacaccaucuggaugcccgaggaggccagacugggcaccagcugcgacaucuucaccaccagcagaggcaagagagccagcaagggcggcaagaccugcggcuucguggacgagagaggccuguacaagagccugaagggcgccugcaagcugaagcugugcggcgugagcggccugagacugauggacggcaccugggugagcauccaggcccccgacgaggccaaguggugcagcaccgaccagcuggugaacauccacgacaucagaagcgacgagaucgagcaccuggugguggaggagcuggugaagaagagagaggagugccuggacgcccuggagagcaucaugaccaccaagagcgugagcuucagaagacugagccaccugagaaagcuggugcccggcuucggcaaggccuacaccaucuucaacaagacccugauggaggccgacgcccacuacaagagcgugagaaccuggagcgaggugauccccagcaagggcugccugagcgugggcggcagaugccacccccacgagaacggcguguucuucaacggcaucauccugggccccgacggcagcgugcugauccccgagaugcagagcagccugcugcagcagcacauggagcugcuggagagcagcgugaucccccugaugcacccccuggccaaccccagcaccguguucaaggacggcgacgaggccgaggacuucguggaggugcaccugcccgacgugcaggagcagaucagcggcguggaccugggccugcccaacuggggcaaguacgugaugaugagcgccggcgcccuggccauccugaugcugaccaucuuccugaugaccugcugcagaagagccaacagaaccagaagcacccagagagaccugggcggccuggagagaaaggugagcgugccccccaaggacggcagagugaugagcagcugggagagcuacaagagcggcggcgagaccagccuguga

SEQ ID NO: 191354 - RNA, 1575 nt, Artificial Sequence
  derived and/or modified CDS sequence (opt4) from glycoprotein__RABV__JQ685922.1
augaucccccaggcccugcuguucgugccccugcugauccccagccugugccugggcaaguuccccaucuacaccauccccgacaagcugggccccuggagccccaucgacauccaccaccugagcugccccaacaaccuggugguggaggacgagggcugcaccagccugagcggcuucagcuacauggagcugaaggugggcuacaucagcgccaucaaggugaacggcuucaccugcaccggcguggugaccgaggccgagaccuacaccaacuucgugggcuacgugaccaccaccuucaagagaaagcacuucagacccaugcccgacgccugcagagccgcccacgacuggaagaucgccggcgaccccagauacgaggacagccugcagaaccccuaccccgacuaccacuggcugagaaccgugaagaccaccaaggagagccuggugaucaucagccccagcguggccgagcuggaccccuacgacaagagccugcacagcagaguguuccccagcggcaagugccugggcaucaccgugagcagcaccuacugcagcaccaaccacgacuacaccaucuggaugcccguggaggccagacugggcaccagcugcgacaucuucaccaacagcagaggcaagaaggccagcaagggcggcagaaccugcggcuucguggacgagagaggccuguacaagagccugaagggcgccugcaagcugaagcugugcggcgugcccggccugagacugauggacggcaccugggugagcauccagaccagcgacgacaucaaguggugcccccccgaccagcuggugaaccugcacgacuuccacagcgacgagaucgagcaccuggugguggaggagcugaucaagaagagagagggcugccuggacgcccuggagagcaucaugaccaccaagagcgugagcuucagaagacugagccaccugagaaagcuggugcccggcuucggcaaggccuacaccaucuucaacaacacccugauggaggccgacgcccacuacaagagcgugagaaccuggaacgaggugauccccagcaagggcugccugaaggugggcggcagaugccacccccccgugaacggcguguucuucaacggcaucauccugggccccgacggcaacgugcugauccccgagaugcagagcagccugcugcagcagcacauggagcugcuggagagcagcgugaucccccugaugcacccccuggccgaccccagcaccguguucaaggacggcgacgaggccgaggacuucguggaggugcaccugcccgacgugcacaagcaggugagcgacguggaccugggccugcccagcuggggcaaguaccugcugaugagcgccggcgcccuggccacccugauccuggccaucuuccugaucaccugcugcagaagagccaacagaaccgagagcacccagagaggccacagagagagcggcggcaaggugagcguggccccccagaacggcaagaucaucagcagcugggagcuguacaagagcgagagcgagaccggcauguga

SEQ ID NO: 191355 - RNA, 1575 nt, Artificial Sequence; identical to SEQ ID NO: 191329
  derived and/or modified CDS sequence (opt4) from glycoprotein__RABV__JQ685923.1

SEQ ID NO: 191356 - RNA, 1575 nt, Artificial Sequence
  derived and/or modified CDS sequence (opt4) from glycoprotein__RABV__JQ685925.1
augaucccccaggcccugcugagcgugccccugcugaucagcagccugugcuucggcaaguuccccaucuacaccauccccgagaagcugggccccuggagccccaucgacauccaccaccugagcugccccaacaaccuggugguggaggacgagggcugcaacagccugagcggcuucagcuacauggagcugaaggugggcuacaucagcgccaucaaggugaacggcuucaccugcaccggcguggugaccgaggccgagaccuacaccaacuucgugggcuacgugaccaccaccuucaagagaaagcacuucagacccaugcccgacgccugcagagccgccuacaacuggaagaccgccggcgaccccagauacgaggagagccugcacaaccccuaccccgacuaccacuggcugagaaccgugaagaccaccaaggagagccugaucaucaucagccccagcguggccgaccuggaccccuacgacaagagccugcacagcagaaucuuccccggcggcaagugccugggcaucaccaucagcagcaccuacugcagcaccaaccacgacuacaccaucuggaugcccgaggaggccagacugggcaccagcugcgacaucuucaccaacagcaagggcaagagagccagcaagggcggcagaaccugcggcuucguggacgagagaggccuguacaagagccugaagggcgccugcaagcugaagcugugcggcgugcccggccugagacugauggacggcaccuggguggccauccagacccccaacgagaccaaguggugcagccccgaccagcuggugaacgugcacgacuucagaagcgacgagaucgagcaccuggugguggaggagcugaucagaaagagagaggagugccuggacgcccuggagagcaucaugaccaccaagagcgugagcuucagaagacugagcaaccugagaaagcuggugcccggcuucggcaaggccuacaccaucuucaacaagacccugauggaggccgacgcccacuacaagagcgugagaaccuggaacgagaucauccccagcagaggcugccugaaggugggcggcagaugccacccccacgugaacggcguguucuucaacggcaucauccugggccccgacggccacauccugauccccgagaugcagagcagccugcugcagcagcacauggagcugcuggagagcagcgugaucccccugauccacccccuggccgaccccagcaccguguucaaggacggcgacgaggccgaggacuucguggaggugcaccugcccgacgugcaccagcaggugagcggcguggaccugggccugcccgacuggggcaaguacgugcugaugagcgccggcgcccuggccaccgugaugcugaccaucuuccugaucaccugcugcagaagagugaagagaaccgagagcgugcagcagggccugggcgagagcggcagaaaggugagcguggccccccagaacggcaaggugaugagcagcugggaguacuacaagagcggcggcggcaccagacuguga

SEQ ID NO: 191357 - RNA, 1575 nt, Artificial Sequence
  derived and/or modified CDS sequence (opt4) from glycoprotein__RABV__JQ685926.1
augaucccccaggcccugcuguacgugccccugcugauccccagccugugccugggcggcuuccccaucuacaccauccccgacaagcugggccccuggagccccaucgacauccaccaccugagcugccccaacaaccuggugguggaggacgagggcugcaccagccugagcggcuucagcuacauggagcugaaggugggcuacaucagcgccaucaaggugaacggcuucaccugcaccggcguggugaccgaggccgagaccuacaccaacuucgugggcuacgugaccaccaccuucaagagaaagcacuucagacccaugcccgacgccugcagagccgccuacaacuggaagguggccggcgaccccagauacgaggagagccugcagaaccccuaccccgacuacagcuggcugagaaccgugaugaccaccaaggagagccugaucaucaucagccccagcguggccgaccuggaccccuacgacaagagccugcacagcagaguguuccccggcggcaagugccugggcaucaccaucuucagcaccuacugcagcaccaaccacgacuacaccaucuggaugcccgaggaggccagacugggcaccagcugcgacaucuucaccaacagcagaggcaagagagccagcaagggcggcaagaccugcggcuucguggacgagagaggccuguacaagagccugaagggcgccugcaagcugaagcugugcggcgugcccggccugagacugauggacggcaccugggugaccauccagaccagcgacgagaccaaguggugccccagcgaccagcuggugaaccugcacgacuuccacagcgacgagaucgagcaccuggugguggaggagcuggugaagaagagagaggagugccuggacgcccuggagagcaucaugaccaccaagagcgugagcuucagaagacugagccaccugagaaagcuggugcccggcuucggcaaggccuacaccaucuucaacaagacccugauggaggccgacgcccacuacaagagcaucagaaccuggaacgagaucauccccagcaagggcugccugaaggugggcggcagaugccacccccacguggacggcguguucuucaacggcaucauccugggccccgacggcaacgugcugauccccgagaugcagagcagccugcugcagcagcacguggagcugcuggagagcagcgugaucccccugaugcacccccuggccgaccccagcaccguguucaaggacggcgacgaggccgaggacuucguggaggugcaccugcccgacauccacaagcaggugagcggcguggaccugggccugcccaacuggggcaaguaccugcugaugagcgccggcgcccuggccacccugaugcugaccaucuuccugaugaccugcugcagaagagccaacagaaccgagagcauccagagagaccccggcgagagcggcaagaaggugagcgugaccagccaggacggcaaggugaucagcagcugggagcuguacaagagcggcggcgagaccagacuguga

SEQ ID NO: 191358 - RNA, 1575 nt, Artificial Sequence; identical to SEQ ID NO: 191328
  derived and/or modified CDS sequence (opt4) from glycoprotein__RABV__JQ685928.1

SEQ ID NO: 191359 - RNA, 1575 nt, Artificial Sequence
  derived and/or modified CDS sequence (opt4) from glycoprotein__RABV__JQ685929.1
auggugccccaggcccugcuguucgugccccugcugaucccccccgugugccugggcaaguuccccaucuacaccauccccgacaagcugggccccuggagccccaucgacauccaccaccugagcugccccaacaaccuggugguggaggacgagggcugcagcaaccugagcggcuucagcuacauggagcugaaggugggcuacaucagcgccaucaagguggacggcuucaccugcaccggcguggugaccgaggccgagaccuacaccaacuucaucggcuacgugaccaccaccuucaagagaaagcacuucagacccaugcccgacgccugcagaagcgccuacaacuggaagaucgccggcgaccccagauacgaggagagccugcacacccccuaccccgacuaccacuggcugagaaccgugaagaccaccaaggagagccuggugaucaucagccccagcguggccgaccuggaccccuacgacaagagccugcacagcaugguguuccccaacggcaagugcagcggcaucaccguguacagcaccuacugcagcaccaaccacgacuacaccaucuggaugcccgagaaggccggccugggcaccagcugcgacaucuucaccaacagcagaggcaagagagccagcaagggcggcagaaccugcggcuucguggacgagagaggccuguacaagagccugagaggcgccugcaagcugaagcugugcggcgugcccggccugagacugauggacggcaccugggccaccauccagacccccgaggagaccaaguggugcagccccgaccagcuggugaaccugcacgacuuccacagcgacgagaucgagcaccuggugguggaggaccuggugaagaagagagaggagugccuggacacccuggagagcaucaugaccaccaagagcgugagcuucagaagacugagccaccugagaaagcuggugcccggcuucggcaaggccuacaccaucuucaacaagacccugauggaggccgacgcccacuacaagagcgugagaaccuggaacgagaucauccccagcaagggcugccugagagugggcggcagaugccacccccacgugaacggcguguucuucaacggcgugaucaugggccccgacggccacgugcugauccccgagaugcagagcagccugcugcagcagcacauggagcugcuggagagcagcgugaucccccugauccacccccuggccgaccccagcaccguguucaaggacaacgacgaggccgaggacuucguggaggugcaccugcccgacgugcacaagcaggugagcggcaucgaccugggccugcccagcuggggcagauaccuggugaugaucgccggcgcccugaugacccugacccuggugaucuuccugaugaucugcugcagaagagugaacaaggccggcagcauccagcaggaccccgagaagagcgagaagagaagaagcgugaccccccagaacggcaaggugaucagcagcugggagagcuacaagagcggcagcgagaccagacuguga

SEQ ID NO: 191360 - RNA, 1575 nt, Artificial Sequence
  derived and/or modified CDS sequence (opt4) from glycoprotein__RABV__JQ685931.1
augaucccccaggcccugcuguucgugccccugcugaucagcagccugugcuucggcggcuuccccaucuacaccauccccgacaagcugggccccuggagccccaucgacauccaccaccugagcugccccaacaaccuggugguggaggacgagggcugcaccagccugagcggcuucagcuacauggagcugaaggugggcuacaucagcgccaucaaggugaacggcuucaccugcaccggcguggugaccgaggccgagaccuacaccaacuucgugggcuacgugaccaccaccuucaagagaaagcacuucagacccaugcccgacgccugcagagccgccuacaacuggaagaccgccggcgaccccagauacgaggagagccugcagaaccccuaccccgacuaccacuggcugagaaccgugaagaccaccaaggagagccugaucaucaucagccccagcguggccgaccuggaccccuacgacaagagccugcacagcagaguguuccccggcggcaagugccugggcaucaccgugagcagcaccuacugcagcaccaaccacgacuacaccaucuggaugcccgaggaggccagacugggcaccagcugcgacaucuucaccaacagcagaggcaagagagccagcaagggcggcagaaccugcggcuucguggacgagagaggccuguacaagagccugaagggcgccugcaagcugaagcugugcggcgugcugggccugagacugauggacggcaccugggugaccauccagaccagcaacgagaccaaguggugccccagcgaccagcuggugaaccugcacgacuuccacagcgacgagaucgagcaccuggugguggaggagcuggugaagaagagagaggagugccuggacgcccuggagagcaucaugaccaccaagagcgugagcuucagaagacugagccaccugagaaagcuggugcccggcuucggcaaggccuacaccaucuucaacaagacccugauggaggccgacgcccacuacaagagcaucagaaccuggaacgagaucauccccagcaagggcugccugaaggugggcggcagaugccacccccacguggacggcguguucuucaacggcaucauccugggccccgacggcaacgugcugauccccgagaugcagagcagccugcugcagcagcacguggagcugcuggagagcagcgugaucccccugaugcacccccuggccgaccccagcaccguguucaaggacggcgacgaggccgaggacuucguggaggugcaccugcccgacgugcacaagcaggugagcggcguggaccugggccugcccaacuggggcaaguaccugcugaugagcgccggcgcccuggccacccugaugcugaccaucuuccugaucaccugcugcagaagaguggacagaaccgagagcauccagagaggccccggcgagcugggcagagaggugagcgugaccagccagaacggcaaggugaucagcagcugggagcuguacaagagcggcggcgagaccagacuguga

SEQ ID NO: 191361 - RNA, 1575 nt, Artificial Sequence; identical to SEQ ID NO: 191329
  derived and/or modified CDS sequence (opt4) from glycoprotein__RABV__JQ685932.1

SEQ ID NO: 191362 - RNA, 1575 nt, Artificial Sequence
  derived and/or modified CDS sequence (opt4) from glycoprotein__RABV__JQ685933.1
augaucccccaggcccugcuguacgugccccugcugauccccagccugugcuucggcggcuuccccaucuacaccauccccgacaagcugggccccuggagccccaucgacauccaccaccugagcugccccaacaaccuggugguggaggacgagggcugcaccagccugagcggcuucagcuacauggagcugaaggugggcuacaucagcgccaucaaggugaacggcuucaccugcaccggcguggugaccgaggccgagaccuacaccaacuucgugggcuacgugaccaccaccuucaagagaaagcacuucagacccaugcccgacgccugcagagccgccuacaacuggaagauggccggcgaccccagauacgaggagagccugcagaaccccuaccccgacuacagcuggcugagaaccgugaagaccaccaaggagagccugaucaucaucagccccagcguggccgaccuggaccccuacgacaagagccugcacagcagaguguuccccggcggcaagugccugggcaucaccaucagcagcaccuacugcagcaccaaccacgacuacaccaucuggaugcccgaggaggccagacugggcaccagcugcgacaucuucaccaacagcagaggcaagagagccagcaagggcggcaagaccugcggcuucguggacgagagaggccuguacaagagccugaagggcgccugcaagcugaagcugugcggcgugcccggccugagacugauggacggcaccugggugaccauccagaccagcgacgagaccaaguggugccccagcgaccagcuggugaaccugcacgacuuccacagcgacgagaucgagcaccuggugguggaggagcuggugaagaagagagaggagugccuggacgcccuggagagcaucaugaccaccaagagcgugagcuucagaagacugagccaccugagaaagcuggugcccggcuucggcaaggccuacaccaucuucaacaagacccugauggaggccgacgcccacuacaagagcaucagaaccuggaacgagaucauccccagcaagggcugccugaaggugggcggcagaugccacccccacguggacggcguguucuucaacggcaucauccugggccccgacggcaacgugcugauccccgagaugcagagcagccugcugcagcagcacguggagcugcuggagagcagcgugaucccccugaugcacccccuggccgaccccagcaccguguucaaggacggcgacgaggccgaggacuucguggaggugcaccugcccgacauccacaagcaggugagcggcguggaccugggccugcccaacuggggcaaguaccugcugaugagcgccggcgcccuggccacccugaugcugaucauccugcugaugaccugcugcagaagagccaacagaaccgagagcauccagagagaccccggcgagagcggcagaaaggugagcaucaccagccccgacggcaaggugaucagcagcugggagcuguacaagagcggcggcgagaccagacuguga

SEQ ID NO: 191363 - RNA, 1575 nt, Artificial Sequence
  derived and/or modified CDS sequence (opt4) from glycoprotein__RABV__JQ685934.1
augaucccccaggcccugcuguacgugccccugcugaucagcagccugugcuucggcggcuuccccaucuacaccauccccgacaagcugggccccuggagccccaucgacauccaccaccugagcugccccaacaaccuggugguggaggacgagggcugcaccagccugagcggcuucagcuacauggagcugaaggugggcuacaucagcgccaucaaggugaacggcuucaccugcaccggcguggugaccgaggccgagaccuacaccaacuucgugggcuacgugaccaccaccuucaagagaaagcacuucagacccaugcccgacgccugcagagccgccuacaacuggaagauggccggcgaccccagauacgaggagagccugcagaaccccuaccccgacuacagcuggcugagaaccgugaagaccaccaaggagagccugaucaucaucagccccagcguggccgaccuggaccccuacgacaagagccugcacagcagaguguuccccggcggcaagugccugggcaucaccaucagcagcaccuacugcagcaccaaccacgacuacaccaucuggaugcccgaggaggccagacugggcaccagcugcgacaucuucaccaacagcagaggcaagagagccagcaagggcggcaagaccugcggcuucguggacgagagaggccuguacaagagccugaagggcgccugcaagcugaagcugugcggcgugcccggccugagacugauggacggcaccugggugaccauccagaccagcgacgagaccaaguggugccccagcgaccagcuggugaaccugcacgacuuccacagcgacgagaucgagcaccuggugguggaggagcuggugaagaagagagaggagugccuggacgcccuggagagcaucaugaccaccaagagcgugagcuucaagagacugagccaccugagaaagcuggugcccggcuucggcaaggccuacaccaucuucaacaagacccugauggaggccgacgcccacuacaagagcaucagaaccuggaacgagaucauccccagcaagggcugccugaaggugggcggcagaugccacccccacguggacggcguguucuucaacggcaucauccugggccccgacggcaacgugcugauccccgagaugcagagcagccugcugcagcagcacguggagcugcuggagagcagcgugaucccccugaugcacccccuggccgaccccagcaccguguucaaggacggcgacgaggccgaggacuucguggaggugcaccugcccgacauccacaagcaggugagcggcguggaccugggccugcccaacuggggcaaguaccugcugaugagcgccggcgcccuggccacccugaugcugaucaucuuccugauggccugcugcagaagagccaacagaaccgagagcauccagagagaccccggcgagagcggcagaaaggugagcauccccagccaggacggcaaggugaucagcagcugggagcuguacaagagcggcggcgagaccagacuguga

SEQ ID NO: 191364 - RNA, 1575 nt, Artificial Sequence
  derived and/or modified CDS sequence (opt4) from glycoprotein__RABV__JQ685936.1
augauccugcaggcccugcuguucgugccccugcugaucagcccccugugccugggcaaguuccccaucuacaccauccccgacaagcugggccccuggagccccaucgacauccaccaccugagcugccccaacaaccuggugguggaggacgagggcugcaccaaccugagcggcuucagcuacauggagcugaaggugggcuacaucagcgccaucaaggugaacggcuucaccugcaccggcguggugaccgaggccgagaccuacaccaacuucgugggcuacgugaccaccaccuucaagagaaagcacuucagacccauccccgacgccugcagagccgccuacaacuggaagauggccggcgaccccagauacgaggagagccugcagaaccccuaccccgaguaccacuggcugagaaccgugaagaccaccaaggagagccugaucaucaucagccccagcguggccgaccuggaccccuacgacaagagccugcacagcagaguguuccccggcggcaagugccugggcaucaccgugagcagcaccuacugcagcaccaaccacgacuacaccaucuggaugcccgaggagcccagacugggcaccagcugcgacaucuucaccagcagcaagggcaagaaggccagcaagggcggcaagaccugcggcuucguggacgagagaggccuguacaagagccugaagggcgccugcaagcugaagcugugcggcgugcugggccugagacugauggacggcaccugggugagcauccagaccagcgacgacaccaaguggugcccccccgaccagcuggugaaccugcacgacuuccacagcgacgagaucgagcaccuggugguggaggagcuggugaagaagagagaggagugccuggacgcccuggagagcaucaugaccaccaagagcgugagcuucagaagacugagcuaccugagaaagcuggugcccggcuucggcaaggccuacaccaucuucaacaagacccugauggaggccgacgcccacuacaagagcgugagaaccuggaacgagaucauccccagcaagggcugccugaaggugagagagagaugccacccccccguggacggcguguucuucaacggcaucauccugggccccgacggcaacgugcugauccccgagaugcagagcagccugcugcagcagcacauggagcugcuggagagcagcgugaucccccugaugcacccccuggccgaccccagcaccguguucaaggagggcgacgaggccgaggacuucguggaggugcaccugcccgacgugcacaagcagaucagcggcguggaccugggccugcccagcuggggcaaguaccugcugaugaucgccggcggccuggugacccuggugcugaucaucugcagcaucgccugcugcagaagagccaagagaaccgagagcagaagaagaggcagcggcgagagcggcaagaaggugaacgccaccccccagaccagaaagguggugagcagcugggagcuguacaagagagagggcgacgccagacuguga

SEQ ID NO: 191365 - RNA, 1575 nt, Artificial Sequence
  derived and/or modified CDS sequence (opt4) from glycoprotein__RABV__JQ685938.1
auggugcugcaggcccugcuguucgcccccuuccugaucagcagccugugccugggcaaguuccccaucuacaccauccccgacaagcugggccccuggagccccaucgacauccaccaccugagcugccccaacaaccuggugguggaggacgagggcugcaacagccugagcggcaucagcuacauggagcugaaggugggcuacaucagcgccaucaaggugaacggcuucaccugcaccggcguggugaccgaggccgagaccuacaccaacuucgugggcuacgugaccaccaccuucaagagaaagcacuuccaccccaugcccgacgccugcagaagcgccuacaacuggaagcuggccggcgaccccagauacgaggagagccugcagaaccccuaccccgacuaccacuggcugagaaccgugaagaccaccaaggagagccugaucaucaucagccccagcguggccgaccuggaccccuacgacaagagccugcacagcagaaucuuccccagcggcaagugcagcggcaugaccaucagcagcaccuacugcagcaccaaccacgaguacaccaucuggaugcccgagaaggccggccugggcaccagcugcgacaucuucaccaccagcaagggcaagagagccagcaagggcggcaagaccugcggcuucguggacgagagaggccuguacaagagccugaagggcgccugcaagcugaagcugugcggcgugagcggccugagacugauggacggcaccuggguggccauccagaccagcgaggagaccaaguggugcccccccgaccagcuggugaaccugcacgaccugcacagcgacgagaucgagcaccuggugguggaggagcuggugaagaagagagaggagugccuggacgcccuggagagcaucaugaccaccaagagcgugagcuucagaagacugagccaccugagaaagcuggugcccggcuucggcaaggccuacaccaucuucaacaagacccugauggaggccgacgcccacuacaagagcaucagaaccuggaacgagaucauccccagcaagggcugccugagagugggcggcaagugccacccccacgugaacggcguguucuucaacggcaucauccugggccccgacggccacgugcugauccccgagaugcagagcagccugcugcagcagcacauggagcugcuggagagcagcgugaucccccugaugcacccccuggccgaccugagcaccguguucaaggacggcgacgaggccgaggacuucguggaggugcaccugcccgacgugcacaagcagaucagcggcguggaccugggccugcccagcuggggcaaguacgugcugaugagcgccggcgcccuggccauccugaugcuggugaucagccugaugaagugcuucuggggcgugaacagaaccaagcccauccagcagggccccagagagagcgagagaaaggugagcaucgccccccagagcagaaaggugaucagcagcugggagagcuacaagagcggcggcgagaccgagcuguga

SEQ ID NO: 191366 - RNA, 1575 nt, Artificial Sequence
  derived and/or modified CDS sequence (opt4) from glycoprotein__RABV__JQ685940.1
augaucccccaggcccugcuguacgugccccugcugauccccagccugugcuucggcggcuuccccaucuacaccauccccgacaagcugggccccuggagccccaucgacauccaccaccugagcugccccaacaaccuggugguggaggacgagggcugcaccagccugagcggcuucagcuacauggagcugaaggugggcuacaucagcgccaucaaggugaacggcuucaccugcaccggcguggugaccgaggccgagaccuacaccaacuucgugggcuacgugaccaccaccuucaagagaaagcacuucagacccaugcccgacgccugcagagccgccuacaacuggaagguggccggcgaccccagauacgaggagagccugcagaaccccuaccccgacuacagcuggcugagaaccgugaagaccaccaaggagagccugaucaucaucagccccagcguggccgaccuggaccccuacgacaagagccugcacagcagaguguuccccggcggcaagugccugggcaucaccaucagcagcaccuacugcagcaccaaccacgacuacaccaucuggaugcccgaggaggccagacugggcaccagcugcgacaucuucaccaacagcagaggcaagagagccagcaagggcggcaagaccugcggcuucguggacgagagaggccuguacaagagccugaagggcgccugcaagcugaagcugugcggcgugcccggccugagacugauggacggcaccugggugaccauccagaccagcgacgagaccaaguggugccccagcgaccagcuggugaaccugcacgacuuccacagcgacgagaucgagcaccuggugguggaggagcuggugaagaagagagaggagugccuggacgcccuggagagcaucaugaccaccaagagcgugagcuucagaagacugagccaccugagaaagcuggugcccggcuucggcaaggccuacaccaucuucaacaagacccugauggaggccgacgcccacuacaagagcaucagaaccuggaacgagaucauccccagcaagggcugccugaaggugggcggcagaugccacccccacguggacggcguguucuucaacggcaucauccugggccccgacggcaacgugcugauccccgagaugcagagcagccugcugcagcagcacguggagcugcuggagagcagcgugaucccccugaugcacccccuggccgaccccagcaccguguucaaggacggcgacgaggccgaggacuucguggaggugcaccugcccgacauccacaagcaggugagcggcguggaccugggccugcccaacuggggcaaguaccugcugaugagcgccggcgcccuggccacccugaugcugaccaucuuccugaucaccugcugcagaagaagcaacagaaccgagagcauccagagagaccccggcgagagcggcaagaaggugagcaucaccagccaggacggcaaggugaucagcagcugggagcuguacaagagcggcggcgagaccagacuguga

SEQ ID NO: 191367 - RNA, 1575 nt, Artificial Sequence; identical to SEQ ID NO: 191328
  derived and/or modified CDS sequence (opt4) from glycoprotein__RABV__JQ685941.1

SEQ ID NO: 191368 - RNA, 1575 nt, Artificial Sequence
  derived and/or modified CDS sequence (opt4) from glycoprotein__RABV__JQ685942.1
augaucccccaggcccugcugcuggugccccugcugaucagcagccugugcuucggcggcuuccccaucuacaccauccccgacaagcugggccccuggagccccaucgacauccaccaccugagcugccccaacaaccuggugguggaggacgagggcugcaccagccugagcggcuucagcuacauggagcugaaggugggcuacaucagcgccaucaaggugaacggcuucaccugcaccggcguggugaccgaggccgagaccuacaccaacuucgugggcuacgugaccaccaccuucaagagaaagcacuucagacccacccccgacgccugcagagccgccuacaacuggaagauggccggcgaccccagauacgaggagagccugcagaaccccuaccccgacuaccacuggcugagaaccgugaagaccaccaaggagagccugaucaucaucagccccagcguggccgaccuggaccccuacgacaagagccugcacagcagaguguuccccggcggcaagugccugggcaucaccgugagcagcaccuacugcagcaccaaccacgacuacaccaucuggaugcccgaggaggccagacugggcaccagcugcgacaucuucaccaacagcagaggcaagagagccagcaagggcggcaagaccugcggcuucguggacgagagaggccuguacaagagccugaagggcgccugcaagcugaagcugugcggcgugcccggccugagacugauggacggcaccugggugaccauccagaccagcgacgagaccaaguggugccccagcgaccagcuggugaaccugcacgacuuccacagcgacgagaucgagcaccuggugguggaggagcuggugaagaagagagaggagugccuggacgcccuggagagcaucaugaccaccaagagcgugagcuucagaagacugagccaccugagaaagcuggugcccggcuucggcaaggccuacaccaucuucaacaagacccugauggaggccgacgcccacuacaagagcaucagaaccuggaacgagaucauccccagcaagggcugccugaaggugggcggcagaugccacccccacguggacggcguguucuucaacggcaucauccugggccccgacggcaacgugcugauccccgagaugcagagcagccugcugcagcagcacguggagcugcuggagagcagcgugaucccccugaugcacccccuggccgaccccagcaccguguucaaggacggcgacgaggccgaggacuucguggaggugcaccugcccgacauccacaagcaggugagcggcguggaccugggccugcccaacuggggcaaguaccugcugaugagcgccggcgcccuggccacccugauccugaccaucuuccuggugaccugcugcagaagaguggacagaaccagaagcauccagagaggcagcggcgagagcggcagaaaggugagcgugaccagccagaacggcaaggugaucagcagcugggagcuguacaagagcggcggcgagaccagacuguga

SEQ ID NO: 191369 - RNA, 1575 nt, Artificial Sequence
  derived and/or modified CDS sequence (opt4) from glycoprotein__RABV__JQ685943.1
auggugcugcaggcccugcuguucgugccccugcugguguuccccagcugcuucggcaaguuccccaucuacaccauccccgacaagcugggccccuggagccccaucgacauccaccaccugagcugccccaacaaccuggugguggaggacgagggcugcaacaaccugagcggcuucagcuacauggagcugaaggugggcuacaucagcgccaucaaggugaacggcuucaccugcaccggcguggugaccgaggccgagaccuacaccaacuucgugggcuacgugaccaccaccuucaagagaaagcacuucagacccacccccgacgccugcagagccgccuacaacuggaagauggccggcgaccccagauacgaggagagccugcacaaccccuaccccgacuaccacuggcugagaaccgugaagaccaccaaggagagccuggugaucaucagccccagcguggccgaccuggaccccuacgacaagagccugcacagcagaguguuccccagcggcaagugcagcggcaugaccgugagcagcaccugcugcagcaccaaccacgacuacaccaucuggaugcccgagaaccccagacugggcaccagcugcgacaucuucaccaacagcagaggcaagagagccagcaagggcagcaagaccugcggcuucguggacgagagaggccuguacaagagccugaagggcgccugcaagcugaagcugugcggcgugcugggccugagacugauggacggcaccuggguggccaugcagaccagcgacgagaucaaguggugcccccccgaccagcuggugaaccugcacgacuucagaagcgacgagaucgagcaccuggugguggaggagcuggugaagaagagagaggagugccuggacgcccuggagagcaucaugaccaccaagagcgugagcuucagaagacugagccaccugagaaagcuggugcccggcuucggcaaggccuacaccaucuucaacagaacccugauggaggccgacgcccacuacaagagcgugagaaccuggaacgaggugauccccagcaagggcugccugagagugggcggcagaugccacccccacgugaacggcguguucuucaacggcaucauccugggccccgacggccacgugcugauccccgagaugcagagcagccugcugcagcagcacauggagcugcuggagagcagcgugaucccccugaugcacccccuggccaaccccagcaccguguucaaggagggcgacgaggccgaggacuucguggaggugcaccugcccgacgugcacaagcaggugagcggcguggaccugggccugcccaacuggggcaaguacgugcugaugagcgccggcgcccugaucgcccugaugcugaucaucuuccugaugaccugcugcagaagagugaacagacccgagagcacccagagaauccugggcggcaccggcaagaaggugagcgccgccagccagagcggcaaggugaucagcagcugggagagcuacaagagcggcggcgagacccagcuguga

SEQ ID NO: 191370 - RNA, 1575 nt, Artificial Sequence
  derived and/or modified CDS sequence (opt4) from glycoprotein__RABV__JQ685944.1
auggugccccaggcccugcugguggugccccugcugggcuucagccugugcuucggcaaguuccccaucuacaccauccccgacaagcugggccccuggagccccaucgacauccaccaccugagcugccccaacaaccuggugguggaggacgagggcugcaccaaccugagcggcuucagcuacauggagcugaaggugggcuacaucagcgccaucaaggugaacggcuucaccugcaccggcguggugaccgaggccgagaccuacaccaacuucgugggcuacgugaccaccaccuucaagagaaagcacuuccaccccacccccgacgagugcagagccgccuacaacuggaagauggccggcgaccccagauacgaggagagccugcacaaccccuaccccgacuaccacuggcugagaaccgugaagaccaccaaggagagccuggugaucaucagccccagcguggccgaccuggaccccuacgacaagagccugcacagcagaguguuccccagcggcaagugcagcggcaucaccgugagcagcaccuacugcagcaccaaccacgacuacaccaucuggaugcccgagaaccccagacugggcaccagcugcgacaucuucaccaacagcagaggcaagagagccagcaagggcagcaagaccugcggcuucguggacgagagaggccuguacaagagccugaagggcgccugcaagcugaagcugugcggcgugcccggccugaagcugaucgacggcaccuggaucgccaugcagaccagcgacgagaccaaguggugcccccccgaccagcuggugaaccugcacgacuucagaagcgacgagaucgagcaccuggugguggaggaccuggugaagaagagagaggagugccuggacgcccuggagagcaucaugaccaccaagagcgugagcuucagaagacugagccaccugagaaagcuggugcccggcuucggcaaggccuacaccaucuucaacaagacccugauggaggccgacgcccacuacaagagcgugagaaccuggaacgagaucauccccagcaagggcugccugaaggugggcggcagaugccacccccacgugaacggcguguucuucaacggcgugauccugggccccgacggccacgugcugauccccgagaugcagagcagccugcugcagcagcacauggagcugcuggagagcagcgugaucccccugaugcacccccuggccgaccccagcaccguguucaaggacggcgacgaggccgaggacuucguggagauccaccugcccaacgugcacaagcaggugagcggcguggaccugggccugcccaacuggggcaaguacgugagccugagcgccggcgcccugaccgcccugaugcugaucaucuuccugauggccugcugcagaaaggugaacagacccgagcccacccagagaagccuggagggcaagggcagaaaggugagcaucaccagccagagcggcaaggugaucagcagcugggagagcuacaagagcggcggcgagaccagacuguga

SEQ ID NO: 191371 - RNA, 1575 nt, Artificial Sequence; identical to SEQ ID NO: 191332
  derived and/or modified CDS sequence (opt4) from glycoprotein__RABV__JQ685945.1

SEQ ID NO: 191372 - RNA, 1575 nt, Artificial Sequence
  derived and/or modified CDS sequence (opt4) from glycoprotein__RABV__JQ685946.1
augaucccccaggcccugcuguacgugccccugcugauccccagccugugcuucggcggcuuccccaucuacaccauccccgacaagcugggccccuggagccccaucgacauccaccaccugagcugccccaacaaccuggugguggaggacgagggcugcaccagccugagcggcuucagcuacauggagcugaaggugggcuacaucagcgccaucaaggugaacggcuucaccugcaccggcguggugaccgaggccgagaccuacaccaacuucgugggcuacgugaccaccaccuucaagagaaagcacuucagacccaugcccgacgccugcagagccgccuacaacuggaagauggccggcgaccccagauacgaggagagccugcagaaccccuaccccgacuacagcuggcugagaaccgugaagaccaccaaggagagccugaucaucaucagccccagcguggccgaccuggaccccuacgacaagagccugcacagcagaguguuccccggcggcaagugccugggcaucaccaucagcagcaccuacugcagcaccaaccacgacuacaccaucuggaugcccgaggaggccagacugggcaccagcugcgacaucuucaccaacagcagaggcaagagagccagcaagggcggcaagaccugcggcuucguggacgagagaggccuguacaagagccugaagggcgccugcaagcugaagcugugcggcgugcccggccugagacugauggacggcaccugggugaccauccagaccagcgacgagaccaaguggugccccagcgaccagcuggugaaccugcacgacuuccacagcgacgagaucgagcaccuggugguggaggagcuggugaagaagagagaggagugccuggacgcccuggagagcaucaugaccaccaagagcgugagcuucagaagacugagccaccugagaaagcuggugcccggcuucggcaaggccuacaccaucuucaacaagacccugauggaggccgacgcccacuacaagagcaucagaaccuggaacgagaucauccccagcaagggcugccugaaggugggcggcagaugccacccccacguggacggcguguucuucaacggcaucauccugggccccgacggcaacgugcugauccccgagaugcagagcagccugcugcagcagcacguggagcugcuggagagcagcgugaucccccugaugcacccccuggccgaccccagcaccguguucaaggacggcgacgaggccgaggacuucguggaggugcaccugcccgacgugcacaagcaggugagcggcguggaccugggccugcccaacuggggcaaguaccugcugaugagcgccggcgcccuggccacccugaugcugaccaucuuccugaugaccuacugcagaagagccaacagagccgagagcauccagagagaccccggcgagagcggcagaaaggugagcaucaccagccaggacggcaaggugaucagcagcugggagcuguacaagagcggcggcgaggccagacuguga

SEQ ID NO: 191373 - RNA, 1575 nt, Artificial Sequence
  derived and/or modified CDS sequence (opt4) from glycoprotein__RABV__JQ685947.1
augaucccccaggcccugcuguucgugagccugcugauccccagccugugccugggcgaguuccccaucuacaccauccccgacaagcugggccccuggacccccaucgacauccaccaccugagcugccccaacaaccugguggccgagaacgacggcugcaccagccugagcggcuucagcuacauggagcugaaggugggcuacaucagcgccaucaaggugaacggcuucaccugcaccggcguggugaccgaggccgagaccuacaccaacuucgugggcuacgugaccaccaccuucaagagaaagcacuucagacccaugcccgacgccugcagagccgcccacgacuggaagauggccggcgaccccagauacgaggacagccugcagaaccccuaccccgacuaccacuggcugagaaccgugaagaccaccaaggagagccuggugaucaucagccccagcguggccgaccuggaccccuacgacaagagccugcacagcagaguguuccccagcggcaagugccugggcaucaccgugagcagcaccuacugcagcaccaaccacgacuacaccaucuggaugcccguggagcccagacugggcaccagcugcgacaucuucaccaacagcagaggcaagagagccagcaagggcggcagagugugcggcuucguggacgagagaggccuguacaagagccugaagggcgccugcaagcugaagcugugcggcgugcccggcaucagacugauggacggcaccugggugagcauccagaccagcgaggacaucaaguggugcccccccgacagacuggugaaccugcacgacuuccacagcgacgagcuggagcaccuggugguggaggagcugaucaagagaagagagaacugccuggacgcccuggagagcaucaugaccaccaagagcgugagcuucagaagacugagccaccugagaaagcuggugcccggcuucggcaaggccuacaccaucuucaacaagacccugauggaggccgacgcccacuacaagagcgugaagaccuggaacgaggugauccccagcaagggcugccuggaggugggcggcaagugccacccccccgugaacggcguguucuucaacggcaucauccugggccccgacggcaacgugcugauccccgagaugcagagcagccugcugcagcagcacauggagcugcuggagagcagcgugaucccccugaugcacccccuggccgaccccagcaccguguucaaggagggcgacgaggccgaggacuucguggaggugcaccugcccgacgugcacaagcaggugagcgacguggaccugggccugcccagcuggggcaaguaccugcugaugagcgccggcgcccuggccauccugauccuggccaucgugcugaucaucugcugcagaagagugaacaagaccagaagcacccagagaggccagagagagagcagaggcaagaugagcguggccccccagaacggcaagaucaucagcagcugggagcuguacaagagagagagcgagaccggccuguga

SEQ ID NO: 191374 - RNA, 1575 nt, Artificial Sequence; identical to SEQ ID NO: 191372
  derived and/or modified CDS sequence (opt4) from glycoprotein__RABV__JQ685951.1

SEQ ID NO: 191375 - RNA, 1575 nt, Artificial Sequence
  derived and/or modified CDS sequence (opt4) from glycoprotein__RABV__JQ685952.1
augaucccccaggccauccugagcgugccccugcugaucagcagccugugcuucggcaaguuccccaucuacaccauccccgagaagcugggccccuggagccccaucgacauccaccaccugagcugccccaacaaccuggugguggaggacgagggcugcaccacccugagcggcuucagcuacaucgagcugaaggugggcuacaucagcgccaucaaggugaacggcuucaccugcaccggcguggugaccgaggccgagaccuacaccaacuucgugggcuacgugaccaccaccuucaagagaaagcacuucagacccaugcccgacgccugcagagccgccuacaacuggaagauggccggcgaccccagauacgaggagagccugcacaaccccuaccccgacuaccacuggcugagaaccgugaagaccaccaaggagagccuggugaucaucagccccagcguggccgaccuggaccccuacgacaagagccugcacagcagaguguuccccggcggcaagugccugggcaucaccaucagcagcaccuacugcagcaccaaccacgacuacaccaucuggaugcccgaggaggccagacugggcaccagcugcgacaucuucaucaacagcagaggcaagagagccagcaagggcggcagaaccugcggcuucguggacgagagaggccuguacaagagccugaagggcgccugcaagcugaagcugugcggcgugcccggccugagacugauggacggcaccugggugagcauccccgccagcgacgagaccaaguggugcagccccgaccagcuggugaacgugcacgacuuccacagcgacgagaucgagcaccuggugguggaggagcuggugaagagaagagaggagugccuggacgcccuggagagcaucgugaccaccaagagcaucagcuucagaagacugagccaccugagaaagcuggugcccggcuucggcaaggccuacaccaucuucaacaagacccugauggaggccgacgcccacuacaagagcgugagaaccuggaacgagaucauccccagcaagggcugccugagcgugggcggcagaugccacccccacgugaacggcguguucuucaacggcaucauccugggccccgacggcaacgugcugauccccgagaugcagagcagccugcugcagcagcacauggagcugcuggagagcagcgugaucccccugaugcacccccuggccgaccccagcaccguguucaaggacggcgacgaggccgaggacuucguggaggugcaccugcccgacgugcaggagcaggugagcggcguggaccugggccugcccaacuggggcaaguacgugcugaugagcgccggcgcccuggccauccugauccugaccaucuuccugaucaccugcugcagaagagccgacaagaccaagagcauccagcagggccugggcggcagcggcagaaaggugagcgugagcccccagaacggcaaggugaucagcagcugggagagcuacaagaacggcggcgagaccagacuguga

SEQ ID NO: 191376 - RNA, 1575 nt, Artificial Sequence
  derived and/or modified CDS sequence (opt4) from glycoprotein__RABV__JQ685953.1
augaucuuccaggcccugcccuucgugccccugcugaucagcagccugugccugggcaaguuccccaucuacaccauccccgacaagcugggccccuggagccccaucgacauccaccaccugagcugccccaacaaccuggugguggaggacgagggcugcaccagccugagcggcuucagcuacauggagcugaaggugggcuacaucagcgccaucaaggugaacggcuucaccugcaccggcguggugaccgaggccgagaccuacaccaacuucgugggcuacgugaccaccaccuucaagagaaagcacuucagacccauccccgacgccugcagagccgccuacaacuggaagauggccggcgaccccagauacgaggagagccugcagaaccccuaccccgaguaccacuggcugagaaccgugaagaccaccaaggagagccugaucaucaucagccccagcguggccgaccuggaccccuacaacaagagccugcacagcagaguguuccccggcggcaagugccugggcaucaccaucagcagcaccuacugcagcaccaaccacgacuacaccaucuggaugcccgaggagcccagacugggcaccagcugcgacaucuucaccagcagcaagggcaagaaggccagcaagggcggcaagaccugcggcuucguggacgagagaggccuguacaagagccugaagggcgccugcaagcugaagcugugcggcgugcugggccugagacugauggacggcaccugggugagcauccagaccagcgacgacaccaaguggugcccccccgaccagcuggugaaccugcacgacuuccacagcgacgagaucgagcaccuggugguggaggagcuggugaagaagagagaggagugccuggacgcccuggagagcaucaugaccaccaagagcgugagcuucagaagacugagcuaccugagaaagcuggugcccggcuucggcaaggccuacaccaucuucaacaagacccugauggaggccgacgcccacuacaagagcgugagaaccuggaacgagaucauccccagcaagggcugccugaaggugagagagagaugccacccccccguggacggcguguucuucaacggcaucauccugggccccgacggcaacgugcugauccccgagaugcagagcagccugcugcagcagcacauggagcugcuggagagcagcgugaucccccugaugcacccccuggccgaccccagcaccguguucaaggacggcgacgaggccgaggacuucguggaggugcaccugcccgacgugcacaagcagaucagcggcguggaccugggccugcccagcuggggcaaguaccugcugaugaucgccggcggccuggccacccuggcccugaucaucuucagcauggccugcugcagaagagccaagagaaccgagcccggcagaagaggcagcggcgagagcggcaagagagugcccgccaccccccagaccagaaagguggugagcagcugggagcuguacaagagcgagggcgacgccagacuguga

SEQ ID NO: 191377 - RNA, 1575 nt, Artificial Sequence
  derived and/or modified CDS sequence (opt4) from glycoprotein__RABV__JQ685954.1
auggugccccaggcccugcuguucgugccccugcugauccccagcgugugccugggcaaguuccccaucuacaccauccccgacaagcugggccccuggagccccaucgacauccaccaccugagcugccccaacaaccuggugguggaggacgagggcugcagcaaccugagcggcuucagcuacauggagcugaaggugggcuacaucagcgccaucaagguggacggcuucaccugcaccggcguggugaccgaggccgagaccuacaccaacuucaucggcuacgugaccaccaccuucaagagaaagcacuucagacccaugcccgacgccugcagaagcgccuacaacuggaagaucgccggcgaccccagauacgaggagagccugcacacccccuaccccgacuaccacuggcugagaaccgugaagaccaccaaggagagccuggugaucaucagccccagcguggccgaccuggaccccuacgacaagagccugcacagcaugguguuccccaacggcaagugcagcggcaucaccguguacagcaccuacugcagcaccaaccacgacuacaccaucuggaugcccgagaaggccggccugggcaccagcugcgacaucuucaccaacagcaagggcaagagagccagcaagggcggcagaaccugcggcuucguggacgagagaggccuguacaagagccugagaggcgccugcaagcugaagcugugcggcgugcccggccugagacugauggacggcaccugggccaccauccagacccccgaggagaccaaguggugcagccccgaccagcuggugaaccugcacgacuuccacagcgacgagaucgagcaccuggugguggaggaccuggugaagaagagagaggagugccuggacacccuggagagcaucaugaccaccaagagcgugagcuucagaagacugagccaccugagaaagcuggugcccggcuucggcaaggccuacaccaucuucaacaagacccugauggaggccgacgcccacuacaagagcgugagaaccuggaacgagaucauccccagcaagggcugccugagagugggcggcagaugccacccccacgugaacggcguguucuucaacggcgugaucaugggccccgacggccacgugcugauccccgagaugcagagcagccugcugcagcagcacauggagcugcuggagagcagcgugaucccccugauccacccccuggccgaccccagcaccguguucaaggacaacgacgaggccgaggacuucguggaggugcaccugcccgacgugcacaagcaggugagcggcaucgaccugggccugcccagcuggggcagauaccugcugaugaucgccggcgcccugaugacccugacccuggugaucuuccugaugaucugcugcagaagagugaacaaggccggcagcauccagcaggaccccgagaagagcgagagaagaagaagcgugaccccccagaacggcaaggugaucagcagcugggagagcuacaagagcggcagcgagaccagacuguga

SEQ ID NO: 191378 - RNA, 1575 nt, Artificial Sequence
  derived and/or modified CDS sequence (opt4) from glycoprotein__RABV__JQ685955.1
augaucagccaggccuuccuguacgugccccugcugaucagcagccugugcuucggcaaguuccccaucuacaccauccccgacaagaucggccccuggagccccaucgacauccaccaccugagcugccccaacaaccuggugguggaggacgagggcugcaccagccugagcggcuucagcuacauggagcugaaggugggcuacaucagcgccaucaaggugaacggcuucaccugcaccggcguggugaccgaggccgagaccuacaccaacuucgugggcuacgugaccaccaccuucaagagaaagcacuucagacccaugcccgacgccugcagaagcgccuacaacuggaagaccgccggcgaccccagauacgaggagagccugcagaaccccuaccccgacuacagcuggcugagaaccgugaagaccaccaaggagagccuggugaucaucagccccagcguggccgaccuggaccccuacgacaagagccugcacagcagaguguuccccaacggcaagugccugggcaucaccaucagcagcaccuacugcagcaccaaccacgacuacaccaucuggaugcccgaggaggccagacugggcaccagcugcgacaucuucaccaacagcaagggcaagagagccagcaagggcggcagaaccugcggcuucguggacgagagaggccuguacaagagccugagaggcgccugcaagcugaagcugugcggcgugcccggccugagacugauggacggcaccugggugagcauccagaccagcgacgagaccaaguggugcccccccgaccagcuggugaacgugcacgacuuccacagcgacgagaucgagcaccuggugguggaggagcuggugaagaagagagaggagugccuggacgcccuggagagcaucaugaccaccaagagcgugagcuucagaagacugagccaccugagaaagcuggugcccggcuucggcaaggccuacaccaucuucaacaagacccugauggaggccgacgcccacuacaagagcgugcagaccuggaacgagaucauccccagcaagggcugccugaaggugggcggcaugugccacccccacguggacggcguguucuucaacggcaucauccugggccccgacggcaacgugcugauccccgagaugcagagcagccugcugcagcagcacauggagcugcuggagagcagcgugaucccccugaugcacccccuggccgaccccagcaccguguucaaggacggcgacgaggccgaggacuucguggaggugcaccugcccgacauccacaagcaggugagcggcaucgaccugggccugcccgacuggggcaaguaccugcugaugagcgccggcgcccuggccauccugcugcugaccaucuuccugaugaccugcugcagaagagugaacagaaccgagagcgcccagagagaccccggcgagcugggcagaaaggugagcgccaccccccagaacagaaaggugaucagcagcugggagcuguacaagagcggcggcgacaccagacuguga

SEQ ID NO: 191379 - RNA, 1575 nt, Artificial Sequence
  derived and/or modified CDS sequence (opt4) from glycoprotein__RABV__JQ685956.1
augaucccccaggcccugcuguacgugccccugcugaucagcagccugugcuucggcggcuuccccaucuacaccauccccgacaagcugggccccuggagccccaucgacauccaccaccugagcugccccaacaaccuggugguggaggacgagggcugcaccagccugagcggcuucagcuacauggagcugaaggugggcuacaucagcgccaucaaggugaacggcuucaccugcaccggcguggugaccgaggccgagaccuacaccaacuucgugggcuacgugaccaccaccuucaagagaaagcacuucagacccaugcccgacgccugcagagccgccuacaacuggaagguggccggcgaccccagauacgaggagagccugcagaaccccuaccccgacuacagcuggcugagaaccgugaagaccaccaaggagagccugaucaucaucagccccagcguggccgaccuggaccccuacgacaagagccugcacagcagaguguuccccggcggcaagugccugggcaucaccaucagcagcaccuacugcagcaccaaccacgacuacaccaucuggaugcccgaggaggccagacugggcaccagcugcgacaucuucaccaacagcagaggcaagagagccagcaagggcggcaagaccugcggcuucguggacgagagaggccuguacaagagccugaagggcgccugcaagcugaagcugugcggcgugcccggccugagacugauggacggcaccugggugaccauccagaccagcgacgagaccaaguggugccccagcgaccagcuggugaaccugcacgacuuccacagcgacgagaucgagcaccuggugguggaggagcuggugaagaagagagaggagugccuggacgcccuggagagcaucaugaccaccaagagcgugagcuucagaagacugagccaccugagaaagcuggugcccggcuucggcaaggccuacaccaucuucaacaagacccugauggaggccgacgcccacuacaagagcaucagaaccuggaacgagaucauccccagcaagggcugccugaaggugggcggcagaugccacccccacguggacggcguguucuucaacggcaucauccugggccccgacggcaacgugcugauccccgagaugcagagcagccugcugcagcagcacguggagcugcuggagagcagcgugaucccccugaugcacccccuggccgaccccagcaccguguucaaggacggcgacgaggccgaggacuucguggaggugcaccugcccgacauccacaagcaggugagcggcguggaccugggccugcccaacuggggcaaguaccugcugaugagcgccggcgcccuggccacccugaugcugaccaucuuccugaugaccugcugcagaagagccaacagaaccgagagcauccagagagaccccggcgagagcggcaagaaggugagcaucaccagccaggacggcaaggugaucagcagcugggagcuguacaagagcggcggcgagaccagacuguga

SEQ ID NO: 191380 - RNA, 1575 nt, Artificial Sequence
  derived and/or modified CDS sequence (opt4) from glycoprotein__RABV__JQ685957.1
augaucagccaggcccugcuguucgugccccugcugaucagcagccugugccugggcgaguuccccaucuacaccauccccgagaagcugggccccuggagccccaucgacauccaccaccugagcugccccaacaaccuggugguggaggacgagggcugcaacagccugagcggcuucagcuacauggagcugaaggugggcuacaucagcagcaucaaggugaacggcuucaccugcaccggcguggugaccgaggccgagaccuacaccaacuucgugggcuacgugaccaccaccuucaagagaaagcacuucagacccaugcccgacgccugcagagccgccuacaacuggaagaugagcggcgaccccagauacgaggagagccugcacaaccccuaccccgacuaccacuggcugagaaccgugaagaccaccaaggagagccuggugaucaucagccccagcguggccgaccuggaccccuacgacaagagccugcacagcagaguguucagcggcggcaagugccugggcaucaccaucagcagcaccuacugcagcaccaaccacgacuacaccaucuggaugcccgaggaggccagacugggcaccagcugcgacaucuucaccaacagcaagggcaagaaggccagcaagggcggcagaaccugcggcuucguggacgagagaggccuguacaagagccugaagggcgccugcaagcugaagcugugcggcgugcccggccugagacugauggacggcaccugggugagcauccagaccagcgacgagaccaaguggugcccccccgaccagcuggugaacauccacgacuucagaagcgacgagaucgagcaccuggugguggaggagcuggugaagaagagagaggagugccuggacgcccuggagagcaucaugaccaccaagagcgugagcuucagaagacugagccaccugagaaagcuggugcccggcuucggcaaggccuacaccaucuucaacaagacccugauggaggccgacgcccacuacaagagcgugagaaccuggaacgagaucauccccagcaagggcugccugagcgugggcggcagaugccacccccacguggacggcguguucuucaacggcaucauccugggccccgacggcagcgugcugauccccgagaugcagagcagccugcugcagcagcacauggagcugcuggagagcagcgugaucccccugaugcacccccuggccaaccccagcaccguguucaaggacggcgacgaggccgaggacuucguggaggugcaccugcccgacauccaggagcaggugagcggcguggaccugggccugcccaacuggggcaaguacgugcugaugagcgccggcgcccuggccauccugcugcugaccaucuuccugaugaccugcugcaucagaaccaacagaaccaagagcauccagcagggccccggcgagagcggcagaaaggugagcgugcccccccagaacggcagagugaucagcagcugggagagcuucaagagcggcggcgagaccggccuguga

SEQ ID NO: 191381 - RNA, 1575 nt, Artificial Sequence; identical to SEQ ID NO: 191344
  derived and/or modified CDS sequence (opt4) from glycoprotein__RABV__JQ685959.1

SEQ ID NO: 191382 - RNA, 1575 nt, Artificial Sequence
  derived and/or modified CDS sequence (opt4) from glycoprotein__RABV__JQ685960.1
augaucccccaggcccugcuguacgugccccugcugaucagcagccugugcuucggcggcuuccccaucuacaccauccccgacaagcugggccccuggagccccaucgacauccaccaccugagcugccccaacaaccuggugguggaggacgagggcugcaccagccugagcggcuucagcuacauggagcugaaggugggcuacaucagcgccaucaaggugaacggcuucaccugcaccggcguggugaccgaggccgagaccuacaccaacuucgugggcuacgugaccaccaccuucaagagaaagcacuucagacccaugcccgacgccugcagagccgccuacaacuggaagguggccggcgaccccagauacgaggagagccugcagaaccccuaccccgacuacagcuggcugagaaccgugaagaccaccaaggagagccugaucaucaucagccccagcguggccgaccuggaccccuacgacaagagccugcacagcagaguguuccccggcggcaagugccugggcaucaccaucagcagcaccuacugcagcaccaaccacgacuacaccaucuggaugcccgaggaggccagacugggcaccagcugcgacaucuucaccaacagcagaggcaagagagccagcaagggcggcaagaccugcggcuucguggacgagagaggccuguacaagagccugaagggcgccugcaagcugaagcugugcggcgugcccggccugagacugauggacggcaccugggugaccauccagaccagcgacgagaccaaguggugccccagcgaccagcuggugaaccugcacgacuuccacagcgacgagaucgagcaccuggugguggaggagcuggugaagaagagagaggagugccuggacgcccuggagagcaucaugaccaccaagagcgugagcuucagaagacugagccaccugagaaagcuggugcccggcuucggcaaggccuacaccaucuucaacaagacccugauggaggccgacgcccacuacaagagcaucagaaccuggaacgagaucauccccagcaagggcugccugaaggugggcggcagaugccacccccacguggacggcguguucuucaacggcaucauccugggccccgacggcaacgugcugauccccgagaugcagagcagccugcugcagcagcacguggagcugcuggagagcagcgugaucccccugaugcacccccuggccgaccccagcaccguguucaaggacggcgacgaggccgaggacuucguggaggugcaccugcccgacauccacaagcaggugagcggcguggaccugggccugcccaacuggggcaaguaccugcugaugagcgccggcgcccuggccacccugaugcugaccaucuuccugaugaccugcugcagaagagccaacagaaccgagagcauccagagagaccccggcgagagcggcaagaaggugagcaucaccagccaggacggcaaggugaucagcagcugggagcuguacaagagaggcggcgagaccagacuguga

SEQ ID NO: 191383 - RNA, 1575 nt, Artificial Sequence
  derived and/or modified CDS sequence (opt4) from glycoprotein__RABV__JQ685961.1
augaucccccaggcccugcuguacgugccccugcugaucagcccccugugcuucggcggcuuccccaucuacaccauccccgacaagcugggccccuggagccccaucgacauccaccaccugagcugccccaacaaccuggugguggaggacgagggcugcaccagccugagcggcuucagcuacauggagcugaaggugggcuacaucagcgccaucaaggugaacggcuucaccugcaccggcguggugaccgaggccgagaccuacaccaacuucgugggcuacgugaccaccaccuucaagagaaagcacuucagacccaugcccgacgccugcagagccgccuacaacuggaagguggccggcgaccccagauacgaggagagccugcagaaccccuaccccgacuacagcuggcugagaaccgugaagaccaccaaggagagccugaucaucaucagccccagcguggccgaccuggaccccuacgacaagagccugcacagcagaguguuccccggcggcaagugccugggcaucaccaucagcagcaccuacugcagcaccaaccacgacuacaccaucuggaugcccgaggaggccagacugggcaccagcugcgacaucuucaccaacagcagaggcaagagagccagcaagggcggcaagaccugcggcuucguggacgagagaggccuguacaagagccugaagggcgccugcaagcugaagcugugcggcgugcccggccugagacugauggacggcaccugggugaccauccagaccagcgacgagaccaaguggugccccagcgaccagcuggugaaccugcacgacuuccacagcgacgagaucgagcaccuggugguggaggagcuggugaagaagagagaggagugccuggacgcccuggagagcaucaugaccaccaagagcgugagcuucagaagacugagccaccugagaaagcuggugcccggcuucggcaaggccuacaccaucuucaacaagacccugauggaggccgacgcccacuacaagagcaucagaaccuggaacgagaucauccccagcaagggcugccugaaggugggcggcagaugccacccccacguggacggcguguucuucaacggcaucauccugggccccgacggcaacgugcugauccccgagaugcagagcagccugcugcagcagcacguggagcugcuggagagcagcgugaucccccugaugcacccccuggccgaccccagcaccguguucaaggacggcgacgaggccgaggacuucguggaggugcaccugcccgacauccacaagcaggugagcggcguggaccugggccugcccaacuggggcaaguaccugcugaucagcgccggcgcccuggccacccugaugcugaccaucuuccugaugaccugcugcagaagagccaacagaaccgagagcauccagagagaccccggcgagcccggcaagaaggugagcaucaccagccaggacggcaaggugaucagcagcugggagcuguacaagagcggcggcgagaccagacuguga

SEQ ID NO: 191384 - RNA, 1575 nt, Artificial Sequence
  derived and/or modified CDS sequence (opt4) from glycoprotein__RABV__JQ685962.1
augaucccccaggcccugcuguacgugccccugcugauccccagccugugcuucggcggcuuccccaucuacaccauccccgacaagcugggccccuggagccccaucgacauccaccaccugagcugccccaacaaccuggugguggaggacgagggcugcaccagccugagcggcuucagcuacauggagcugaaggugggcuacaucagcgccaucaaggugaacggcuucaccugcaccggcguggugaccgaggccgagaccuacaccaacuucgugggcuacgugaccaccaccuucaagagaaagcacuucagacccaugcccgacgccugcagagccgccuacaacuggaagguggccggcgaccccagauacgaggagagccugcagaaccccuaccccgacuacagcuggcugagaaccgugaagaccaccaaggagagccugaucaucaucagccccagcguggccgaccuggaccccuacgacaagagccugcacagcagaguguuccccggcggcaagugccugggcaucaccaucagcagcaccuacugcagcaccaaccacgacuacaccaucuggaugcccgaggaggccagacugggcaccagcugcgacaucuucaccaacagcagaggcaagagagccagcaagggcggcaagaccugcggcuucguggacgagagaggccuguacaagagccugaagggcgccugcaagcugaagcugugcggcgugcccggccugagacugauggacggcaccugggugaccauccagaccagcgacgagaccaaguggugccccagcgaccagcuggugaaccugcacgacuuccacagcgacgagaucgagcaccuggugguggaggagcuggugaagaagagagaggagugccuggacgcccuggagagcaucaugaccaccaagagcgugagcuucagaagacugagccaccugagaaagcuggugcccggcuucggcaaggccuacaccaucuucaacaagacccugauggaggccgacgcccacuacaagagcaucagaaccuggaacgagaucauccccagcaagggcugccugaaggugagaggcagaugccacccccacguggacggcguguucuucaacggcaucauccugggccccgacggcaacgugcugauccccgagaugcagagcagccugcugcagcagcacguggagcugcuggagagcagcgugaucccccugaugcacccccuggccgaccccagcaccguguucaaggacggcgacgaggccgaggacuucguggaggugcaccugcccgacauccacaagcaggugagcggcguggaccugggccugcccaacuggggcaaguaccugcugaugagcgccggcgcccuggccacccugaugcugaccaucuuccugaugaccugcugcagaagaagcaacagaaccgagagcauccagagagaccccggcgagagcggcaagaaggugagcaucaccagccaggacggcaaggugaucagcagcugggagcuguacaagagcggcggcgagaccagacuguga

SEQ ID NO: 191385 - RNA, 1575 nt, Artificial Sequence
  derived and/or modified CDS sequence (opt4) from glycoprotein__RABV__JQ685963.1
augauccugcaggcccugcuguucgugccccugcugaucagcagccugugccugggcaaguuccccaucuacaccauccccgacaagcugggccccuggagccccaucgacauccaccaccugagcugccccaacaaccuggugguggaggacgagggcugcaccagccugagcggcuucagcuacauggagcugaaggugggcuacaucagcagcaucaaggugaacggcuucaccugcaccggcguggugaccgaggccgagaccuacaccaacuucgugggcuacgugaccaccaccuucaagagaaagcacuucagacccauccccgacgccugcagagccgccuacaacuggaagauggccggcgaccccagauacgaggagagccugcagaaccccuaccccgacuaccacuggcugagaaccgugaagaccaccaaggagagccugaucaucaucagccccagcguggccgaccuggaccccuacgacaagagccugcacagcagaguguuccccggcggcaagugccugggcaucaccaucagcagcaccuacugcagcaccaaccacgacuacaccguguggaugcccgaggagcccagacugggcaccuucugcgacaucuucaccaacagcaagggcaagaaggccagcaagggcggcaaggugugcggcuucguggacgagagaggccuguacaagagccugaagggcgccugcaagcugaagcugugcggcgugcccggccugagacugauggacggcaccugggugaccauccagaccagcgaggaggugaaguggugccccgccgaccagcuggugaaccugcacgacuuccacagcgacgagaucgagcaccuggugguggaggagcuggugaagaagagagaggagugccuggacgcccuggagagcaucaugaccaccaagagcgugagcuucagaagacugagcuaccugagaaagcuggugcccggcuucggcaaggccuacaccaucuucaacaagacccugauggaggccgacgcccacuacaagagcgugagaaccuggaacgagaucauccccagcaagggcugccugaaggugaaggagagaugccacccccacguggacggcguguucuucaacggcaucauccugggccccgacggcaacgugcugauccccgagaugcagagcagccugcugcagcagcacauggagcugcuggagagcagcgugaucccccugaugcacccccuggccgaccccagcaccguguucaaggacggcgacgaggccgaggacuucguggaggugcaccugcccgacgugcacaagcagaucagcggcguggaccugggccugcccagcuggggcaaguaccugcugaugaucgccggcggccuggccgcccuggugcugaucaucuuccugauggugugcugcagaagaaccaagagaaccgagagcagaagaagaggcagcggcgagagcggcaagaaggugagcgugaccccccagaccagaaagguggugagcagcugggagcuguacaagagcgagggcgacgccagacuguga

SEQ ID NO: 191386 - RNA, 1575 nt, Artificial Sequence
  derived and/or modified CDS sequence (opt4) from glycoprotein__RABV__JQ685964.1
augaucccccaggcccugcuguacgugccccugcugaucagcagccugugcuucggcggcuuccccaucuacaccauccccgacaagcugggccccuggagccccaucgacauccaccaccugagcugccccaacaaccuggugguggaggacgagggcugcaccagccugagcggcuucagcuacauggagcugaaggugggcuacaucagcgccaucaaggugaacggcuucaccugcaccggcguggugaccgaggccgagaccuacaccaacuucgugggcuacgugaccaccaccuucaagagaaagcacuucagacccaugcccgacgccugcagagccgccuacaacuggaagauggccggcgaccccagauacgaggagagccugcagaaccccuaccccgacuacagcuggcugagaaccgugaagaccaccaaggagagccugaucaucaucagccccagcguggccgaccuggaccccuacgacaagagccugcacagcagaguguuccccggcggcaagugccugggcaucaccaucagcagcaccuacugcagcaccaaccacgacuacaccaucuggaugcccgaggaggccagacugggcaccagcugcgacaucuucaccaacagcagaggcaagagagccagcaagggcggcaagaccugcggcuucguggacgagagaggccuguacaagagccugaagggcgccugcaagcugaagcugugcggcgugcccggccugagacugauggacggcaccugggugaccauccagaccagcgacgagaccaaguggugccccagcgaccagcuggugaaccugcacgacuuccacagcgacgagaucgagcaccuggugguggaggagcuggugaagaagagagaggagugccuggacgcccuggagagcaucaugaccaccaagagcgugagcuucagaagacugagccaccugagaaagcuggugcccggcuucggcaaggccuacaccaucuucaacaagacccugauggaggccgacgcccacuacaagagcaucagaaccuggaacgagaucauccccagcaagggcugccugaaggugggcggcagaugccacccccacguggacggcguguucuucaacggcaucauccugggccccgacggcaacgugcugauccccgagaugcagagcagccugcugcagcagcacguggagcugcuggagagcagcgugaucccccugaugcacccccuggccgaccccagcaccguguucaaggacggcgacgaggccgaggacuucguggaggugcaccugcccgacauccacaagcaggugagcggcguggaccugggccugcccaacuggggcaaguaccugcugaugagcgccggcgcccuggccacccugaugcugaucaucuuccugauggccugcugcagaagagccaacagaaccgagagcauccagagagaccccggcgagagcggcaagaaggugagcauccccagccaggacggcaaggugaucagcagcugggagcuguacaagagcggcggcgagaccagacuguga

SEQ ID NO: 191387 - RNA, 1575 nt, Artificial Sequence
  derived and/or modified CDS sequence (opt4) from glycoprotein__RABV__JQ685965.1
augaucccccaggccauccugagcgugccccugcugaucagcagccugugcuucggcaaguuccccaucuacaccauccccgagaagcugggccccuggagccccaucgacauccaccaccugagcugccccaacaaccuggugguggaggacgagggcugcaccacccugagcggcuucagcuacaucgagcugaaggugggcuacaucagcgccaucaaggugaacggcuucaccugcaccggcguggugaccgaggccgagaccuacaccaacuucgugggcuacgugaccaccaccuucaagagaaagcacuucagacccaugcccgacgccugcagagccgccuacaacuggaagauggccggcgaccccagauacgaggagagccugcacaaccccuaccccgacuaccacuggcugagaaccgugaagaccaccaaggagagccuggugaucaucagccccagcguggccgaccuggaccccuacgacaagagccugcacagcagaguguuccccggcggcaagugccugggcaucaccaucagcagcaccuacugcagcaccaaccacgacuacaccaucuggaugcccgaggaggccagacugggcaccagcugcgacaucuucaccaacagcagaggcaagagagccagcaagggcggcagaaccugcggcuucguggacgagagaggccuguacaagagccugaagggcgccugcaagcugaagcugugcggcgugcccggccugagacugauggacggcaccugggugagcauccaggccagcgacgagaccaaguggugcagccccgaccagcuggugaacgugcacgacuuccacagcgacgagaucgagcaccuggugguggaggagcuggugaagagaagagaggagugccuggacgcccuggagagcaucgugaccaccaagagcaucagcuucagaagacugagccaccugagaaagcuggugcccggcuucggcaaggccuacaccaucuucaacaagacccugauggaggccgacgcccacuacaagagcgugagaaccuggaacgagaucauccccagcaagggcugccugagcgugggcggcagaugccacccccacgugaacggcguguucuucaacggcaucauccugggccccgacggcaacgugcugauccccgagaugcagagcagccugcugcagcagcacauggagcugcuggagagcagcgugaucccccugaugcacccccuggccgaccccagcaccguguucaaggacggcgacgaggccgaggacuucguggaggugcaccugcccgacgugcaggagcaggugagcggcguggaccugggccugcccaacuggggcaaguacgugcugaugagcgccggcgcccuggccauccugauccugaccaucuuccugaucaccugcugcagaagagccaacaagaccaagagcauccagcagggccugggcggcagcggcagaaaggugagcgugagcccccagaacggcaaggugaucagcagcugggagagcuacaagagcggcggcgagaccagacuguga

SEQ ID NO: 191388 - RNA, 1575 nt, Artificial Sequence
  derived and/or modified CDS sequence (opt4) from glycoprotein__RABV__JQ685967.1
auggugccccaggcccugcugguggugccccugcugggcuucagccugugcuucggcaaguuccccaucuacaccauccccgacaagcugggccccuggagccccaucgacauccaccaccugagcugccccaacaaccuggugguggaggacgagggcugcaccaaccugagcggcuucagcuacauggagcugaaggugggcuacaucagcgccaucaaggugaacggcuucaccugcaccggcguggugaccgaggccgagaccuacaccaacuucgugggcuacgugaccaccaccuucaagagaaagcacuucagacccacccccgacgagugcagagccgccuacaacuggaagauggccggcgaccccagauacgaggagagccugcacaaccccuaccccgacuaccacuggcugagaaccgugaagaccaccaaggagagccuggugaucaucagccccagcguggccgaccuggaccccuacgacaagagccugcacagcagaguguuccccagcggcaagugcagcggcaucaccgugagcagcaccuacugcagcaccaaccacgacuacaccaucuggaugcuggagaaccccagacugggcaccagcugcgacaucuucaccaacagcagaggcaagagagccagcaagggcagcaagaccugcggcuucguggacgagagaggccuguacaagagccugaagggcgccugcaagcugaagcugugcggcgugcugggccugaagcugauggacggcaccuggguggccaugcagaccagcgacgagaccaaguggugcccccccgaccagcuggugaaccugcacgaccugagaagcgacgagaucgagcaccuggugguggaggagcuggugaagaagagagaggagugccuggacgcccuggagagcaucaugaccaccaagagcgugagcuucagaagacugagccaccugagaaagcuggugcccggcuucggcaaggccuacaccaucuucaacaagacccugauggaggccgacgcccacuacaagagcgugagaaccuggaacgagaucauccccagcaagggcugccugaaggugggcggcagaugccacccccacgugaacggcguguucuucaacggcgugauccugggccccgacggccacgugcugauccccgagaugcagagcagccugcugcagcagcacauggagcugcuggagagcagcgugaucccccugaugcacccccuggccgaccccagcaccguguucaaggacggcgacgaggccgaggacuucguggaggugcaccugcccgacgugcacaagcaggugagcggcguggaccugggccugcccaacuggggcaaguacgugagccugagcgccggcgcccugaucgcccugaugcugaucauccugcugaucaccugcugcagaaaggugaacagacccgagcccacccagagaagccuggagggcaaggagagaaaggugagcgugaccagccagagcggcaaggugaucagcagcugggagagcuacaagagcggcggcgagaccagacuguga

SEQ ID NO: 191389 - RNA, 1575 nt, Artificial Sequence
  derived and/or modified CDS sequence (opt4) from glycoprotein__RABV__JQ685968.1
auggugcugcaggcccugcuguucgcccccuuccugaucagcagccugugccugggcaaguuccccaucuacaccauccccgacaagcugggccccuggagccccaucgacauccaccaccugagcugccccaacaaccuggugguggaggacgagggcugcaacagccugagcggcaucagcuacauggagcugaaggugggcuacaucagcgccaucaaggugaacggcuucaccugcaccggcguggugaccgaggccgagaccuacaccaacuucgugggcuacgugaccaccaccuucaagagaaagcacuuccaccccaugcccgacgccugcagaagcgccuacaacuggaagcuggccggcgaccccagauacgaggagagccugcacaaccccuaccccgacuaccacuggcugagaaccgugaagaccaccaaggagagccugaucaucaucagccccagcguggccgaccuggaccccuacgacaagagccugcacagcagaaucuuccccagaggcaagugcagcggcaugaccaucagcagcaccuacugcagcaccaaccacgaguacaccaucuggaugcccgagaaggccggccugggcaccagcugcgacaucuucaccaccagcaagggcaagagagccagcaagggcggcaagaccugcggcuucguggacgagagaggccuguacaagagccugaagggcgccugcaagcugaagcugugcggcgugagcggccugagacugauggacggcaccuggguggccauccagaccagcgaggagaccaaguggugcccccccgaccagcuggugaaccugcacgaccugcacagcgacgagaucgagcaccuggugguggaggagcuggugaagaagagagaggagugccugaacgcccugaagagcaucaugaccaccaagagcgugagcuucagaagacugagccaccugagaaagcuggugcccggcuucggcaaggccuacaccaucuucaacaagacccugauggaggccgacgcccacuacaagagcaucagaaccuggaacgagaucauccccagcaagggcugccugagagugggcggcaagugccacccccacguggacggcguguucuucaacggcaucauccugggccccgacggccacgugcugauccccgagaugcagagcagccugcugcagcagcacauggagcugcuggagagcagcgugaucccccugaugcacccccuggccgaccugagcaccguguucaaggacggcgacgaggccgaggacuucguggaggugcaccugcccgacgugcacaagcagaucagcggcguggaccugggccugcccagcuggggcaaguacgugcugaugagcgccggcgcccuggccauccugaugcuggugaucagccugaugaagugcuucuggggcgugaacagaaccaagcccauccagcagggccccagagagagcgagagaaaggugagcaucgccccccagagcagaaaggugaucagcagcugggagagcuacaagaacggcggcgagaccgagcuguga

SEQ ID NO: 191390 - RNA, 1575 nt, Artificial Sequence
  derived and/or modified CDS sequence (opt4) from glycoprotein__RABV__JQ685970.1
auggugagccaggcccugcuguucgugagcccccugauccugagccugugcagcggcgaguuccccaucuacaccauccccgacaagcugggccccuggagccccaucgacauccaccaccugagcugccccaacaaccuggugguggaggacgagggcugcaccaaccugagcggcuucagcuacauggagcugaaggugggcuacaucagcgccaucaaggugaacggcuucaccugcaccggcguggugaccgaggccgagaccuacaccaacuucgugggcuacgugaccaccaccuucaagagaaagcacuucagacccacccccgacgccugcagagccgccuacaacuggaagauggccggcgaccccagauacgaggagagccugcacaaccccuaccccgacuaccacuggcugagaaccgugaagaccaccaaggagagccuggugaucaucagccccagcguggccgaccuggaccccuacgacaagagccugcacagcagaguguuccccagcggcaagugcagcggcaucaccgugagcagcaccuacugccugaccaaccacgacuacaccaucuggaugcccgagaaccugagacugggcaccagcugcgacaucuucaccaacagcagaggcaagagagccagcagaggcagcaagaccugcggcuucguggacgagagaggccuguacaagagccugaagggcgccugcaagcugaagcugugcggcgugcugggccugagacugauggacggcaccuggguggccaugcagaccagcgacgagaccaaguggugccccagcgaccagcuggugaaccugcacgacuucagaagcgacgagaucgagcaccuggugguggaggagcuggugaagaagagagaggagugccuggacgccaucgagagcaucaugaccaccaagagcgugagcuucagaagacugagccaccugagaaagcuggugcccggcuucggcaaggccuacaccaucuucaacaagacccugauggaggccgacgcccacuacaagagcgugagaaccuggaacgagaucauccccagcaagggcugccugagagugggcggcagaugccacccccacgugaacggcguguucuucaacggcaucauccugggccccgacggccacgugcugauccccgagaugcagagcagccugcugcagcagcacguggagcugcuggagagcagcgugaucccccugaugcacccccuggccgaccccagcaccguguucaaggacggcgaggaggccgaggacuucguggaggugcaccugcccgacgugcacaagcaggugagcggcguggaccugggccugcccaacuggggcaaguacgcccuggugagcgccggcgcccugaccgcccugaugcugaucgccuuccugaugaccugcugcagaggcgugaaccugcccaagagcacccagagaagccccggcggcaccagaagaaaggugagcguggccagccagagcggcaaggugaucgccagcugggaggccuacaagagcggcugcgagaccaagauguga

SEQ ID NO: 191391 - RNA, 1575 nt, Artificial Sequence
  derived and/or modified CDS sequence (opt4) from glycoprotein__RABV__JQ685971.1
augaucccccaggcccugcuguucgugccccugcugaucagcagccugugcuucggcaaguuccccaucuacaccauccccgagaagcugggccccuggagccccaucgacauccaccaccugagcugccccaacaaccugguggccgaggacgagggcugcaacagccugagcggcuucagcuacauggagcugaaggugggcuacaucagcgccaucaaggugaacggcuucaccugcaccggcguggugaccgaggccgagaccuacaccaacuucgugggcuacgugaccaccaccuucaagagaaagcacuucagacccacccccgacgccugcagagccgccuacaacuggaagauggccggcgaccccagauacgaggagagccugcacaaccccuaccccgacuaccacuggcugagaaccgugaagaccaccaaggagagccuggugaucaucagccccagcguggccgaccuggaccccuacgacaagagccugcacagcagaguguuccccgacggcaagugccugggcaucaccaucagcagcaccuacugcagcaccaaccacgacuacaccaucuggaugcccgaggaggccagacugggcaccagcugcgacaucuucaccaccagcaagggcaagagagccagcaagggcgacaagaucugcggcuucguggacgagagaggccuguacaagagccugaagggcgccugcaagcugaagcugugcggcgugcugggccugagacugauggacggcaccugggugagcauccagacccccggcgagaccaaguggugcagccccgaccagcuggugaaccugcacgacuuccacagcgacgagaucgagcaccugguggccgaggagcuggugaagaagagagaggagugccuggacgcccuggagagcaucaugaccaccaagagcgugagcuucagaagacugagccaccugagaaagcuggugcccggcuucggcaaggccuacaccaucuucaacaagacccugauggaggccgacgcccacuacaagagcgugagaaccuggaacgaggugauccccagcaagggcugccugagcgugggcggcagaugccacccccacgugaacggcguguucuucaacggcaucauccugggccccgacggcagcgugcugauccccgagaugcagagcagccugcugcagcagcacauggagcugcuggagagcagcgugaucccccugaugcacccccuggccgaccccagcaccguguucaaggacggcgacgaggccgagaacuucguggaggugcaccugcccgacgugcacaagcaggugagcggcguggaccugggccugcccaacuggggcaaguaccugcugaugaucgccggcgcccuggccacccugaugcugaccaucuuccugaugaccugcugcagaagaaccaagagagccgagagcauccaguacggccugggcgagagcggcagaaaggugagcgugaccccccagagcggcaaggugaucagcagcugggagagcuacaagagcggcggcgagaccagacuguga

SEQ ID NO: 191392 - RNA, 1575 nt, Artificial Sequence; identical to SEQ ID NO: 191328
  derived and/or modified CDS sequence (opt4) from glycoprotein__RABV__JQ685974.1

SEQ ID NO: 191393 - RNA, 1575 nt, Artificial Sequence
  derived and/or modified CDS sequence (opt4) from glycoprotein__RABV__JQ685975.1
auggugccccaggcccugcuguucgugccccugcugguguucagccugugcuucggcaaguuccccaucuacaccauccccgacaagcugggccccuggagccccaucgacauccaccaccugagcugccccaacaaccuggugguggaggacgagggcugcaccaaccugagcggcuucagcuacauggagcugaaggugggcuacaucagcgccaucaaggugaacggcuucaccugcaccggcguggugaccgaggccgagaccuacaccaacuucgugggcuacgugaccaccaccuucaagagaaagcacuucagacccauccccgacgccugcagagccgccuacaacuggaagauggccggcgaccccagauacgaggagagccugcacaaccccuaccccgacuaccacuggcugagaaccgugaagaccaccaaggagagccuggugaucaucagccccagcguggccgaccuggaccccuacgacaagagccugcacagcagaguguuccccggcggcaagugcagcggcaugaccguguucagcaccuacugcagcaccaaccacgacuacaccaucuggaugcccgagaaccccagacugggcaccagcugcgacaucuucgccaacagcagaggcaagagagccagcagaggcagcaagaccugcggcuucguggacgagagaggccuguacaagagccugaagggcgccugcaagcugaagcugugcggcgugcugggccugagacugguggacggcaccuggguggccaugcagaccagcgacgacaccaaguggugcccccccgaccagcuggugaaccugcacgacuucagaagcgacgagaucgaguaccuggugguggaggagcuggugaagaagagagaggagugccuggacgcccuggagagcaucaugaccaccaagagcgugagcuucagaagacugagccaccugagaaagcuggugcccggcuucggcaaggccuacaccaucuucaacaagacccugauggaggccgacgcccacuacaagagcgugagaaccuggaacgagaucauccccagcaagggcugccugagagugggcggcagaugccacccccacgugaacggcguguucuucaacggcaucauccugggccccgacggccacgugcugauccccgagaugcagagcagccugcugcagcagcacauggagcugcuggagagcagcgugaucccccugaugcacccccuggccgaccccagcaccguguucaaggagggcgacgaggccgaggacuucguggaggugcaccugcccgacgugcacaagcaggugagcgagguggaccugggccugcccaacuggggcaaguacauccugaugaucgccggcgcccugaucgcccugaugcugaucaucuuccugaugaccugcugcggcagagugaacagaagcgagagcaagcagagaagccugggcggcaccggcagaaaggugagcgugaccagccagagcggcaaggugaucagcagcugggagagcuacaagagcggcggcgagaccagacuguga

SEQ ID NO: 191394 - RNA, 1575 nt, Artificial Sequence
  derived and/or modified CDS sequence (opt4) from glycoprotein__RABV__JQ685978.1
augaucagccaggcccugcuguucgugccccugcugaucagcagccugugcuucggcgaguuccccaucuacaccauccccgagaagcugggccccuggagccccaucgacauccaccaccugagcugccccaacaaccuggugguggaggacgagggcugcaacagccugagcggcuucagcuacauggagcugaaggugggcuacaucagcagcaucaaggugaacggcuucaccugcaccggcguggugaccgaggccgagaccuacaccaacuucgugggcuacgugaccaccaccuucaagagaaagcacuucagacccaugcccgacgccugcagagccgccuacaacuggaagaugagcggcgaccccagauacgaggagagccugcacaaccccuaccccgacuaccacuggcugagaaccgugaagaccaccaaggagagccuggugaucaucagccccagcguggccgaccuggaccccuacgacaagagccugcacagcagaguguucagcggcggcaagugccugggcaucaccaucagcagcaccuacugcagcaccaaccacgacuacaccaucuggaugcccgaggaggccagacugggcaccagcugcgacaucuucaccaacagcaagggcaagaaggccagcaagggcggcagaaccugcggcuucguggacgagagaggccuguacaagagccugaagggcgccugcaagcugaagcugugcggcgugcccggccugagacugauggacggcaccugggugagcauccagaccagcgacgagaccaaguggugcccccccgaccagcuggugaacauccacgacuucagaagcgacgagaucgagcaccuggugguggaggagcuggugaagaagagagaggagugccuggacgcccuggagagcaucaugaccaccaagagcgugagcuucagaagacugagccaccugagaaagcuggugcccggcuucggcaaggccuacaccaucuucaacaagacccugauggaggccgacgcccacuacaagagcgugagaaccuggaacgagaucauccccagcaagggcugccugagcgugggcggcagaugccacccccacguggacggcguguucuucaacggcaucauccugggccccgacggcagcgugcugauccccgagaugcagagcagccugcugcagcagcacauggagcugcuggagagcagcgugaucccccugaugcacccccuggccaaccccagcaccguguucaaggacggcgacgaggccgaggacuucguggaggugcaccugcccgacgugcaggagcaggugagcggcguggaccugggccugcccaacuggggcaaguacgugcugaugagcgccggcgcccuggccauccugcugcugaccaucuuccugaugaccugcugcagaagagccaacagaaccaagagcaucagacagggccccggcgagagcggcagaaaggugagcgugcccccccagaacggcagagugaucagcagcugggagagcuucaagagcggcgacgagaccggccuguga

SEQ ID NO: 191395 - RNA, 1575 nt, Artificial Sequence; identical to SEQ ID NO: 191394
  derived and/or modified CDS sequence (opt4) from glycoprotein__RABV__JQ685979.1

SEQ ID NO: 191396 - RNA, 1575 nt, Artificial Sequence
  derived and/or modified CDS sequence (opt4) from glycoprotein__RABV__JQ685980.1
auggugccccaggcccugcuguucgugccccugcuggccuuccccaugugcuucggcaaguuccccaucuacaccauccccgacaagcugggccccuggagccccaucgacauccaccaccugagcugccccaacaaccuggugguggaggacgagggcugcaccaaccugagcggcuucagcuacauggagcugaaggugggcuacaucagcgccaucaaggugaacggcuucaccugcaccggcguggugaccgaggccgagaccuacaccaacuucgugggcuacgugaccaccaccuucagaagaaagcacuucagacccacccccgacgccugcagagccgccuacaacuggaagauggccggcgaccccagauacgaggagagccugcacaaccccuaccccgacuaccacuggcugagaaccgugaagaccaccaaggagagccugaucaucaucagccccagcguggccgaccuggaccccuacgacaagagccugcacagcagaguguuccccagcggcaagugccugggcaucaccaucagcagcaccuacugcagcaccaaccacgacuacaccaucuggaugcccgagaaccugagacugggcaccagcugcgacaucuucaccaacagcagaggcaagagagccagcaagggcagcagaaccugcggcuucguggacgagagaggccuguacaagagccugaagggcgccugcaagcugaagcugugcggcgugcugggccugagacugauggacggcaccuggguggccaugcagaccagcgacgagaccaaguggugcccccccgaccagcuggugaaccugcacgacuucagaagcgacgagaucgagcaccuggugguggaggagcuggugaagaagagagaggagugccuggacgcccuggagagcaucaugaccaccaagagcgugagcuucagaagacugagccaccugagaaagcuggugcccggcuucggcaaggccuacaccaucuucaacaagacccugauggaggccgacgcccacuacaagagcgugagaaccuggaacgagaucauccccagcaagggcugccugagagugggcggcagaugccacccccacgugaacggcguguucuucaacggcaucauccugggccccgacggccacgugcugauccccgagaugcagagcagccugcugcagcagcacauggagcugcuggagagcagcgugaucccccugaugcacccccuggccgaccccagcaccguguucaaggacggcgacgaggccgaggacuucguggaggugcaccugcccgacgugcacaagcagaucagcggcguggaccugggccugcccaacuggggcaaguacgugcugaucaucgccggcgugcugaucgccaugauccugaccaucuuccugaugaccugcugcggcagaggcaacagacccaagagcacccagcacagccugggcggcaucggcagaaaggugagcgccaccagccagagcggcaaggugaucagcagcugggagagcuacaagaacggcggcgagaccagacuguga

SEQ ID NO: 191397 - RNA, 1575 nt, Artificial Sequence
  derived and/or modified CDS sequence (opt4) from glycoprotein__RABV__JQ685981.1
auggugccccaggugcugcuguucgugccccugcugguguucagcaugugcuucggcaaguuccccaucuacaccauccccgacaagcugggccccuggagccccaucgacauccaccaccugagcugccccaacaaccuggugguggaggacgagggcugcaccaaccugagcggcuucagcuacauggagcugaaggugggcuacaucagcgccaucaaggugaacggcuucaccugcaccggcguggugaccgaggccgagaccuacaccaacuucgugggcuacgugaccaccaccuucaagagaaagcacuucagacccacccccgacgccugcagagccgccuacaacuggaagauggccggcgaccccagauacgaggagagccugcacaaccccuaccccgacuaccacuggcugagaaccgugaagaccaccaaggagagccuggugaucaucagccccagcguggccgaccuggaccccuacgacaagagccugcacagcagaguguuccccagcggcaagugcagcggcaucaccaucagcagcaccuacugcagcaccaaccacgacuacaccaucuggaugcccgagaaccccagacugggcaccagcugcgacaucuucaccaacagcagaggcaagagagccagcaagggcggcaagaccugcggcuucguggacgagagaggccuguacaagagccugaagggcgccugcaagcugaagcugugcggcgugcugggccugagacugauggacggcaccuggguggccaugcagaccagcgacgagaccaaguggugcccccccgaccagcuggugaaccugcacgacuucagaagcgacgagaucgagcaccuggugguggaggagcuggugaagaagagagaggagugccuggacgcccuggagagcaucaugaccaccaagagcgugagcuucagaagacugagccaccugagaaagcuggugcccggcuucggcaaggccuacaccaucuucaacaagacccugauggaggccgacgcccacuacaagagcgugagaaccuggaacgagaucauccccagcaagggcugccugagagugggcggcagaugccacccccacgugaagggcguguucuucaacggcaucauccugggccccgacggccacgugcugauccccgagaugcagagcagccugcugcagcagcacauggagcugcuggagagcagcgugaucccccugaugcacccccuggccgaccccagcaccguguucaaggacggcgacgaggccgaggacuucguggaggugcaccugcccgacgugcacaagcagaucagcggcguggaccugggccugcccagcuggggcagauacgugcuggugagcgccggcgugcugguggugcugaugcugaccaucuucaucaucaccugcugcggcagagugcacagacccaagagcacccagcacggccugggcggcaccggcagaaaggugagcgugaccagccagagcggcaaggugaucagcagcugggagagcuacaagagcggcggcgagaccagacuguga

SEQ ID NO: 191398 - RNA, 1575 nt, Artificial Sequence
  derived and/or modified CDS sequence (opt4) from glycoprotein__RABV__JQ685982.1
auggugccccaggcccugcuguucgugccccugcuggccuuccccaugugcuucggcaaguuccccaucuacaccauccccgacaagcugggccccuggagccccaucgacauccaccaccugagcugccccaacaaccuggugguggaggacgagggcugcaccaaccugagcggcuucagcuacauggagcugaaggugggcuacaucagcgccaucaaggugaacggcuucaccugcaccggcguggugaccgaggccgagaccuacaccaacuucgugggcuacgugaccaccaccuucaagagaaagcacuucagacccacccccgacgccugcagagccgccuacaacuggaagauggccggcgaccccagauacgaggagagccugcacaaccccuaccccgacuaccacuggcugagaaccgugaagaccaccaaggagagccugaucaucaucagccccagcguggccgaccuggaccccuacgacaagagccugcacagcagaguguuccccagcggcaagugccugggcaucaccaucagcagcaccuacugcagcaccaaccacgacuacaccaucuggaugcccgagaaccugagacugggcaccagcugcgacaucuucaccaacagcagaggcaagagagccagcaagggcagcaagaccugcggcuucguggacgagagaggccuguacaagagccugaagggcgccugcaagcugaagcugugcggcgugcugggccugagacugauggacggcaccuggguggccaugcagaccagcgacgagaccaaguggugcccccccgaccagcuggugaaccugcacgacuucagaagcgacgagaucgagcaccuggugguggaggagcuggugaagaagagagaggagugccuggacgcccuggagagcaucaugaccaccaagagcgugagcuucagaagacugagccaccugagaaagcuggugcccggcuucggcaaggccuacaccaucuucaacaagacccugauggaggccgacgcccacuacaagagcgugagaaccuggaacgagaucauccccagcaagggcugccugagagugggcggcagaugccacccccacgugaacggcguguucuucaacggcaucauccugggccccgacggccacgugcugauccccgagaugcagagcagccugcugcagcagcacauggagcugcuggagagcagcgugaucccccugaugcacccccuggccgaccccagcaccguguucaaggacggcgacgaggccgaggacuucguggaggugcaccugcccgacgugcacaagcagaucagcggcguggaccugggccugcccaacuggggcaaguacgugcugaucaucgccggcgugcugaucgccaugauccugaccaucuuccugaugaccugcugcggcagaggcaacagacccaagagcacccagcacagccugggcggcaucggcagaaaggugagcgccaccagccagagcggcaaggugaucagcagcugggagagcuacaagagcggcggcgagaccagacuguga

SEQ ID NO: 191399 - RNA, 1575 nt, Artificial Sequence
  derived and/or modified CDS sequence (opt4) from glycoprotein__RABV__JQ685983.1
auggugccccaggcccugcuguucgugccccugcugguguuccccaugugcuucggcaaguuccccaucuacaccauccccgacaagcugggccccuggagccccaucgacauccaccaccugagcugccccaacaaccuggugguggaggacgagggcugcaccaaccugagcggcuucagcuacauggagcugaaggugggcuacaucagcgccaucaaggugaacggcuucaccugcaccggcguggugaccgaggccgagaccuacaccaacuucgugggcuacgugaccaccaccuucaagagaaagcacuucagacccacccccgacgccugcagagccgccuacaacuggaagauggccggcgaccccagauacgaggagagccugcacaaccccuaccccgacuaccacuggcugagaaccgugaagaccaccaaggagagccuggugaucaucagccccagcguggccgaccuggaccccuacgacaagagccugcacagcagaguguuccccgacggcaagugcagcggcaucaccaucagcagcaccuacugccccaccaaccacgacuacaccaucuggcugcccgagaaccccagacugggcaccagcugcgacaucuucaccaacagcagaggcaagagagccagcaagggcagcaagaccugcggcuucguggacgagagaggccuguacaagagccugaagggcgccugcaagcugaagcugugcggcgugcugggccugagacugauggacggcaccuggguggccaugcagaccagcgacgagaccaaguggugcccccccgaccagcuggugaaccugcacgacuucagaagcgacgagaucgagcaccuggugguggaggagcuggugaagaagagagaggagugccuggacgcccuggagagcaucaugaccaccaagagcgugagcuucagaagacugagccaccugagaaagcuggugcccggcuucggcaaggccuacaccaucuucaacaagacccugauggaggccgacgcccacuacaagagcgugagaaccuggaacgagaucauccccagcaagggcugccugagagugggcggcagaugccacccccacgugaacggcguguucuucaacggcaucauccugggccccgacggccacgugcugauccccgagaugcagagcagccugcugcagcagcacauggagcugcuggagagcagcgugaucccccugaugcacccccuggccgaccccagcaccguguucaaggacggcgacgaggccgaggacuucguggaggugcaccugcccgacgugcacaagcagaucagcggcguggaccugggccugcccaacuggggcaaguacgugcuggugagcgccggcgugcugaucgcccugaugcugaucaucuuccugaugaccugcugcggcagaauccacagacccaagagcacccagugcgaccugggcggcaccggcagaaaggugagcgugaccagccagagcggcaaggugaucagcagcugggagagcuacaagagcggcggcgagaccagacuguga

SEQ ID NO: 191400 - RNA, 1575 nt, Artificial Sequence
  derived and/or modified CDS sequence (opt4) from glycoprotein__RABV__JQ685984.1
auggugccccaggugcugcuguucgugccccugcugguguucagccugugcuucggcaaguuccccaucuacaccauccccgacaagcugggccccuggagccccaucgacauccaccaccugagcugccccaacaaccuggugguggaggacgagggcugcaccaaccugagcggcuucagcuacauggagcugaaggugggcuacaucagcgccaucaaggugaacggcuucaccugcaccggcguggugaccgaggccgagaccuacaccaacuucgugggcuacgugaccaccaccuucaagagaaagcacuucagacccacccccgacgccugcagagccgccuacaacuggaagauggccggcgaccccagauacgaggagagccugcacaaccccuaccccgacuaccacuggcugagaaccgugaagaccaccaaggagagccuggugaucaucagccccagcgugaccgaccuggaccccuacgacaagagccugcacagcagaguguuccccggcggcaagugcagcggcaucaccgugagcagcaccuacugcagcaccaaccacgacuacaccaucuggaugcccgagaaccccagacugggcaccagcugcgacaucuucaccaacagcagaggcaagagagccagcaagggcagcaagaccugcggcuucguggacgagagaggccuguacaagagccugaagggcgccugcaagcugaagcugugcggcgugcugggccugagacugauggacggcaccuggguggccaugcagaccagcgacgagaccaaguggugcccccccgaccagcuggugaaccugcacgacuucagaagcgacgagaucgagcaccuggugguggaggagcuggugaagaagagagaggagugccuggacgcccuggagagcaucaugaccaccaagagcgugagcuucagaagacugagccaccugagaaagcuggugcccggcuucggcaaggccuacaccaucuucaacaagacccugauggaggccgacgcccacuacaagagcgugagaaccuggaacgagaucauccccagcaagggcugccugagagugggcggcagaugccacccccacgugaacggcguguucuucaacggcaucauccugggccccgacggccacgugcugauccccgagaugcagagcagccugcugcagcagcacauggagcugcuggagagcagcgugaucccccugaugcacccccuggccgaccccagcaccguguucaaggacggcgacgaggccgaggacuucguggaggugcaccugcccgacgugcacaagcaggugagcggcguggaccugggccugcccaacuggggcaaguacgugcugaugaucgccggcgcccugaucgcccugaugcugaucaucuuccugaugaccugcugcagaagagugaacagacccgagagcacccagagaagccugggcggcaccggcagaaaggugagcaucaccagccagagcggcaaggugaucagcagcugggagagcuacaagagcggcggcgagaccagacuguga

SEQ ID NO: 191401 - RNA, 1575 nt, Artificial Sequence
  derived and/or modified CDS sequence (opt4) from glycoprotein__RABV__JQ685985.1
auggugccccaggcccugcuguucgugcccauccugguguucagccugugcuucggcaaguuccccaucuacaccauccccgacaagcugggccccuggagccccaucgacauccaccaccugagcugccccaacaaccuggugguggaggacgagggcugcaccaaccugagcggcuucagcuacauggagcugaaggugggcuacaucagcgccaucaaggugaacggcuucaccugcaccggcguggugaccgaggccgagaccuacaccaacuucgugggcuacgugaccaccaccuucagaagaaagcacuucagacccacccccgacgccugcagagccgccuacaacuggaagauggccggcgaccccagauacgaggagagccugcacaaccccuaccccgacuaccacuggcugagaaccgugagaaccaccaaggagagccuggugaucaucagccccagcguggccgaccuggaccccuacgacaagagccugcacagcagaguguuccccagcggcaagugcagcggcaucaccgugagcagcaccuacugcagcaccaaccacgacuacaccaucuggaugcccgagaaccccagacugggcaccagcugcgacaucuucaucaacagcagaggcaagagagccagcaagggcagcaagaccugcggcuucguggacgagagaggccuguacaagagccugaagggcgccugcaagcugaagcugugcggcgugcugggccugagacugauggacggcaccuggguggccaugcagaccagcgaggagaccaaguggugcccccccgaccagcuggugaaccugcacgacuucagaagcgacgagaucgagcaccuggugguggaggagcuggugaagaagagagaggagugccuggacgcccuggagagcaucaugaccaccaagagcgugagcuucagaagacugagccaccugagaaagcuggugcccggcuucggcaaggccuacaccaucuucaacaagacccugauggaggccgacgcccacuacaagagcgugagaaccuggaacgagaucauccccagcaagggcugccugagagugggcggcagaugccacccccacgugaacggcguguucuucaacggcaucauccugggccccgacggccacgugcugauccccgagaugcagagcagccugcugcagcagcacauggagcugcuggagagcagcgugaucccccugaugcacccccuggccgaccccagcaccguguucaaggagggcgacgaggccgaggacuucguggaggugcaccugcccgacgugcacaagcaggugagcggcguggaccugggccugcccaacuggggcaaguacgugcugaugagcgccggcgugcugaucagcagaaugcugcugaucuuccugaugaccugcugcagaagagugaacagacccgagagcacccagagaagccccggcggcgccggcagaaaggugagcgugaccagccagagcggcaaggugaucagcagcugggagagcuacaagagcggcggcgagaccagacuguga

SEQ ID NO: 191402 - RNA, 1575 nt, Artificial Sequence
  derived and/or modified CDS sequence (opt4) from glycoprotein__RABV__JQ685986.1
auggugcugcaggugcugcuguucgcccccuuccugaucagcagccugugccugggcaaguuccccaucuacaccauccccgacaagcugggccccuggagccccaucgacauccaccaccugagcugccccaacaaccuggugguggaggacgagggcugcaacagccugagcggcuucagcuacauggagcugaaggugggcuacaucagcgccaucaaggugaacggcuucaccugcaccggcguggugaccgaggccgagaccuacaccaacuucgugggcuacgugaccaccaccuucaagagaaagcacuucagacccgugcccgacgccugcagaagcgccuacaacuggaagcuggccggcgaccccagauacgaggagagccugcacaaccccuaccccgaguaccacuggcugagaaccgugaagaccaccaaggagagccugaucgugaucagccccagcguggccgaccuggaccccuacgacaagagccugcacagcagaaucuuccccagcggcaagugcagcggcaugaccgugagcagcaccuacugcagcaccaaccacgaguacaccaucuggaugcccgagaaggccagccugggcaccagcugcgacaucuucaccaccagcaagggcaagagagccagcaagggcggcagaaccugcggcuucguggacgagagaggccuguacaagagccugaagggcgccugcaagcugaagcugugcggcgugagcggccugagacugauggacggcaccuggguggccauccagaccagcgacgaggccaaguggugcagccccgaccagcuggugaaccugcacgaccugcacagcgacgagaucgagcaccuggugguggaggagcuggugagaaagagagaggagugccuggacgcccuggagagcaucaugaccaccaagagcgugagcuucagaagacugagccaccugagaaagcuggugcccggcuucggcaaggccuacaccaucuucaacaagacccugauggaggccgacgcccacuacaagagcgugagaaccuggaacgagaucauccccagcaagggcugccugagagugggcggcaagugccacccccacgugaacggcguguucuucaacggcaucauccugggccccgacggccacgugcugauccccgagaugcagagcagccugcugcagcagcacaucgagcugcuggagagcagcgugaucccccugaugcacccccuggccgaccugagcaccguguucaaggacggcgacgaggccgaggacuucguggaggugcaccugcccgacgugcacaagcagaucagcggcguggaccugggccugcccagcuggggcaaguacgugcugaugagcgccggcgcccuggccacccuggugcuggugaucagccugaugaagugcugcagaugggugaacaagaccaagagcauccagcagggccccagagagagcgagagaaaggugagcgugaccccccagaacggcaaggugaucagcagcugggagagcuacaagaucggcggcgagaccggccuguga

SEQ ID NO: 191403 - RNA, 1575 nt, Artificial Sequence
  derived and/or modified CDS sequence (opt4) from glycoprotein__RABV__JQ685987.1
auggccccccaggcccuguggguggugccccugcugggcuucagccugugcuucggcaaguuccccaucuacaccauccccgacaagcugggccccuggagccccaucgacauccaccaccugagcugccccaacaaccuggugguggaggacgagggcugcaccaaccugagcggcuucagcuacauggagcugaaggugggcuacaucagcgccaucaaggugaacggcuucaccugcaccggcguggugaccgaggccgagaccuacaccaacuucgugggcuacgugaccaccaccuucaagagaaagcacuucagacccacccccgacgccugcagaaccgccuacaacuggaagauggccggcgaccccagauacgaggagagccugcacaaccccuaccccgacuaccacuggcugagaaccgugaagaccaccaaggagagccuggugaucaucagccccagcguggccgaccuggaccccuacgacaagagccugcacagcagaguguuccccagcggcaagugcagcggcaucaccgugagcagcaccuacugccugaccaaccacgacuacaccaucuggaugcccgagaaccccagacugggcaccagcugcgacaucuucaccaacagcagaggcaagagagccagcaagggcagcaagaccugcggcuucguggacgagagaggccuguacaagagccugaagggcgccugcaagcugaagcugugcggcgugcugggccugaagcugauggacggcaccuggguggccaugcagaccagcgacgagaccaaguggugccccagcgaccagcuggugaaccugcacgacuucagaagcgacgagaucgagcaccuggugguggaggagcuggugaagaagagagaggagugccuggacgcccuggagagcaucaugaccaccaagagcgugagcuucagaagacugagccaccugagaaagcuggugcccggcuucggcaaggccuacaccaucuucaacaagacccugauggaggccgacgcccacuacaagagcgugagaaccuggaacgagaucauccccagcaagggcugccugagagugggcggcagaugccacccccacgugaacggcguguucuucaacggcaucauccugggccccgacggccacauccugauccccgagaugcagagcagccugcugcagcagcacauggagcugcuggagagcagcgugaucccccugaugcacccccuggccgaccccagcaccguguucaaggacggcgacgaggccgaggacuucguggaggugcaccugcccgacgugcacaagcaggugagcggcguggaccugggccugcccaacuggggcagauacgugagccugggcgccggcgcccugaucgcccugaugcugaucaucuuccugaugaccugcugcagaagagugaacagacccgagcccacccagagaagccuggagggcaagggcagaaaggugagcgugaccagccagagcggcaaggugaucagcagcugggagagcuacaagagcggcggcgagaccagacuguga

SEQ ID NO: 191404 - RNA, 1575 nt, Artificial Sequence
  derived and/or modified CDS sequence (opt4) from glycoprotein__RABV__JQ685988.1
auggugccccaggcccugcugcuggugccccugcuggccuuccccaugugcuucggcaaguuccccaucuacaccauccccgacaagcugggccccuggagccccaucgacauccaccaccugagcugccccaacaaccuggugguggaggacgagggcugcaccaaccugagcggcuucagcuacauggagcugaaggugggcuacaucagcgccaucaaggugaacggcuucaccugcaccggcguggugaccgaggccgagaccuacaccaacuucgugggcuacgugaccaccaccuucaagagaaagcacuucagacccacccccgacgccugcagagccgccuacaacuggaagauggccggcgaccccagauacgaggagagccugcacaaccccuaccccgacuaccacuggcugagaaccgugaagaccaccaaggagagccugaucaucaucagccccagcguggccgaccuggaccccuacgacaagagccugcacagcagaguguuccccagcggcaagugccugggcaucaccaucagcagcaccuacugcagcaccaaccacgacuacaccaucuggaugcccgagaaccugagacugggcaccagcugcgacaucuucaccaacagcagaggcaagagagccagcaagggcagcaagaccugcggcuucguggacgagagaggccuguacaagagccugaagggcgccugcaagcugaagcugugcggcgugcugggccugagacugauggacggcaccuggguggccaugcagaccagcaacgagaccaaguggugcccccccgaccagcuggugaaccugcacgacuucagaagcgacgagaucgagcaccuggugguggaggagcuggugaagaagagagaggagugccuggacgcccuggagagcaucaugaccaccaagagcgugagcuucagaagacugagccaccugagaaagcuggugcccggcuucggcaaggccuacaccaucuucaacaagacccugauggaggccgacgcccacuacaagagcgugagaaccuggaacgagaucauccccagcaagggcugccugagagugggcggcagaugccacccccacgugaacggcguguucuucaacggcaucauccugggccccgacggccacgugcugauccccgagaugcagagcagccugcugcagcagcacauggagcugcuggagagcagcgugaucccccugaugcacccccuggccgaccccagcaccguguucaaggacggcgacgaggccgaggacuucguggaggugcaccugcccgacgugcacaagcagaucagcggcguggaccugggccugcccaacuggggcaaguacgugcugaucaucgccggcgugcugaucgccaugauccugaccaucuuccugaugaccugcugcggcagaggcaacagacccaagagcacccagcacagccugggcggcaucggcagaaaggugagcgccaccagccagagcggcaaggugaucagcagcugggagagcuacaagagcggcagcgagaccagacuguga

SEQ ID NO: 191405 - RNA, 1575 nt, Artificial Sequence
  derived and/or modified CDS sequence (opt4) from glycoprotein__RABV__JQ685989.1
auggugccccaggcccugcuguucgugcccauccugguguucagccugugcuucggcaaguuccccaucuacaccauccccgacaagcugggccccuggagccccaucgacauccaccaccugagcugccccaacaaccuggugguggaggacgagggcugcaccaaccugagcggcuucagcuacauggagcugaaggugggcuacaucagcgccaucaaggugaacggcuucaccugcaccggcguggugaccgaggccgagaccuacaccaacuucgugggcuacgugaccaccaccuucagaagaaagcacuucagacccacccccgacgccugcagagccgccuacaacuggaagauggccggcgaccccagauacgaggagagccugcacaaccccuaccccgacuaccacuggcugagaaccgugagaaccaccaaggagagccuggugaucaucagccccagcguggccgaccuggaccccuacgacaagagccugcacagcagaguguuccccagcggcaagugcagcggcaucaccgugagcagcaccuacugcagcaccaaccacgacuacaccaucuggaugcccgagaaccccagacugggcaccagcugcgacaucuucaucaacagcagaggcaagagagccagcaagggcagcaagaccugcggcuucguggacgagagaggccuguacaagagccugaagggcgccugcaagcugaagcugugcggcgugcugggccugagacugauggacggcaccuggguggccaugcagaccagcgaggagaccaaguggugcccccccgaccagcuggugaaccugcacgacuucagaagcgacgagaucgagcaccuggugguggaggagcuggugaagaagagagaggagugccuggacgcccuggagagcaucaugaccaccaagagcgugagcuucagaagacugagccaccugagaaagcuggugcccggcuucggcaaggccuacaccaucuucaacaagacccugauggaggccgacgcccacuacaagagcgugagaaccuggaacgagaucauccccagcaagggcugccugagagugggcggcagaugccacccccacgugaacggcguguucuucaacggcaucauccugggccccgacggccacgugcugauccccgagaugcagagcagccugcugcagcagcacauggagcugcuggagagcagcgugaucccccugaugcacccccuggccgaccccagcaccguguucaaggagggcgacgaggccgaggacuucguggaggugcaccugcccgacgugcacaagcaggugagcggcguggaccugggccugcccaacuggggcaaguacgugcugaugagcgccggcgugcugaucagccugaugcugcugaucuuccugaugaccugcugcagaagagugaacagacccgagagcacccagagaagccccggcggcgccggcagaaaggugagcgugaccagccagagcggcaaggugaucagcagcugggagagcuacaagagcggcggcgagaccagacuguga

SEQ ID NO: 191406 - RNA, 1575 nt, Artificial Sequence; identical to SEQ ID NO: 191404
  derived and/or modified CDS sequence (opt4) from glycoprotein__RABV__JQ685990.1

SEQ ID NO: 191407 - RNA, 1575 nt, Artificial Sequence
  derived and/or modified CDS sequence (opt4) from glycoprotein__RABV__JQ685991.1
auggugcugcaggcccugcuguucgcccccuuccugaucagcagcuucugccugggcaaguuccccaucuacaccauccccgacaagcugggccccuggagccccaucgacauccaccaccugagcugccccaacaaccuggugaucgaggacgagggcugcaacagccugagcggcuucagcuacauggagcugaaggugggcuacaucagcgccaucaaggugaacggcuucaccugcaccggcguggugaccgaggccgagaccuacaccaacuucgugggcuacgugaccaccaccuucaagagaaagcacuucagacccaugcccgacgccugcagaagcgccuacaacuggaagcuggccggcgaccccagauacgaggagagccugcacaaccccuaccccgaguaccacuggcugagaaccgugaagaccaccaaggagagccugaucgugaucagccccagcguggccgaccuggaccccuacgacaagagccugcacagcagaaucuuccccagcggcaagugcagcggcaugaccgugagcagcaccuacugcagcaccaaccacgaguacaccaucuggaugcccgagaaggugggccugggcaccagcugcgacaucuucaucaccagcaagggcaagagagccagcaagggcggcagaaccugcggcuucguggacgagagaggccuguacaagagccugaagggcgccugcaagcugaagcugugcggcgugagcggccugagacugauggacggcaccuggguggccauccagaccagcgacgagaccaaguggugcagccccgaccagcuggugaaccugcacgaccugcacagcgacgagaucgagcaccuggugguggaggagcuggugagaaagagagaggagugccuggacgcccuggagagcaucaugaccaccaagagcgugagcuucagaagacugagccaccugagaaagcuggugcccggcuucggcaaggccuacaccaucuucaacaagacccugauggaggccgacgcccacuacaagagcgugagaaccuggaacgagaucauccccagcaagggcugccugagagugggcggcaagugccacccccacgugaacggcguguucuucaacggcaucauccugggccccgacggccacgugcugauccccgagaugcagagcagccugcugcagcagcacaucgagcugcuggagagcagcgugaucccccugaugcacccccuggccgaccugagcaccguguucaaggacggcgacgaggccgaggacuucguggaggugcaccugcccgacgugcacaagcagaucagcggcguggaccugggccugcccagcuggggcaaguacgugcugaucagcgccggcgcccuggccacccugauccuggugaucagccugaugaagugcugcagaugggugaacagaaccaagagcauccagcagggccccagagagagcgagagaaaggugagcguggccccccagagcggcaaggugaucagcagcugggagagcuacaagaucggcggcgagaccggccuguga

SEQ ID NO: 191408 - RNA, 1575 nt, Artificial Sequence
  derived and/or modified CDS sequence (opt4) from glycoprotein__RABV__JQ685992.1
auggugccccaggcccugcuguucgugccccugcugguguucagccugugcuucggcaaguuccccaucuacaccauccccgacaagcugggccccuggagccccaucgacauccaccaccugagcugccccaacaaccuggugguggaggacgagggcugcaccaaccugagcggcuucagcuacauggagcugaaggugggcuacaucagcgccaucaaggugaacggcuucaccugcaccggcguggugaccgaggccgagaccuacaccaacuucgugggcuacgugaccaccaccuucagaagaaagcacuucagacccacccccgacgccugcagagccgccuacaacuggaagauggccggcgaccccagauacgaggagagccugcacaaccccuaccccgacuaccacuggcugagaaccgugaagaccaccaaggagagccuggugaucaucagccccagcguggccgaccuggaccccuacgacaagagccugcacagcagaguguuccccggcggcaagugcagcggcaucaccgugagcagcaccuacugcagcaccaaccacgacuacaccaucuggaugcccgagaaccccagacugggcaccagcugcgacaucuucgugaacagcagaggcaagagagccagcaagggcggcaagaccugcggcuucguggacgagagaggccuguacaagagccugaagggcgccugcaagcugaagcugugcggcgugcccggccugagacugauggacggcaccuggguggccauccagaccagcgacgagaccaaguggugcccccccgaccagcuggugaaccugcacgacuucagaagcgacgagaucgagcaccuggugguggaggagcuggugaagaagagagaggagugccuggacgcccuggagagcaucaugaccaccaagagcgugagcuucagaagacugagccaccugagaaagcuggugcccggcuucggcaaggccuacaccaucuucaacaagacccugauggaggccgacgcccacuacaagagcgugagaaccuggaacgagaucauccccagcaagggcugccugagagugggcggcagaugccacccccacgugaacggcguguucuucaacggcaucauccugggccccgacggccacgugcugauccccgagaugcagagcagccugcugcagcagcacauggagcugcuggagagcagcgugaucccccugaugcacccccuggccgaccccagcaccguguucaaggacggcgacgaggccgaggacuucguggaggugcaccugcccgacgugcacaagcugaucagcggcguggaccugggccugcccagcuggggcaaguacgugcugaugagcgccggcauccugaccacccugaugcugaugaucuuccugaugaccugcugcagaagagugaaccaggugggcagcaagcagcacggccuggagggcgccggcagaaaggugagcgugaccagccagaacggcagagugaucagcagcugggagagcuacaagagcggcggcgagaccagacuguga

SEQ ID NO: 191409 - RNA, 1575 nt, Artificial Sequence
  derived and/or modified CDS sequence (opt4) from glycoprotein__RABV__JQ685993.1
auggugcugcaggcccugcuguucgcccccuuccugaucagcagccugugccugggcaaguuccccaucuacaccauccccgacaagcugggccccuggagccccaucgacauccaccaccugagcugccccaacaaccuggugguggaggacgagggcugcaacagccugagcggcuucagcuacauggagcugaaggugggcuacaucagcgccaucaaggugaacggcuucaccugcaccggcguggugaccgaggccgagaccuacaccaacuucgugggcuacgugaccaccaccuucaagagaaagcacuucagacccaugcccgacgccugcagaagcgccuacaacuggaagcuggccggcgaccccagauacgaggagagccugcacaaccccuaccccgacuaccacuggcugagaaccgugaagaccaccaaggagagccugaucgugaucagccccagcguggccgaccuggaccccuacgacaagagccugcacagcagaaucuuccccggcggcaagugcagcggcaugaccgugagcagcaccuacugcagcaccaaccacgaguacaccaucuggaugcccgagaaggccggccugggcaccagcugcgacaucuucaccaccagcaagggcaagagagccaccaagggcggcaagaccugcggcuucguggacgagagaggccuguacaagagccugaagggcgccugcaagcugaagcugugcggcgugagcggccugagacugauggacggcaccuggguggccauccagaccagcgacgagaccaaguggugcagccccgaccagcuggugaaccugcacgaccugcacagcgacgagaucgagcaccuggugguggaggagcuggugagaaagagagaggagugccuggacgcccuggagagcaucaugaccaccaagagcgugagcuucagaagacugagccaccugagaaagcuggugcccggcuucggcaaggccuacaccaucuucaacaagacccugauggaggccgacgcccacuacaagagcgugagaaccuggaacgagaucauccccagcaagggcugccugagagugggcggcaagugccacccccacgugaacggcguguucuucaacggcaucauccugggccccgacggccacgugcugauccccgagaugcagagcagccugcugcagcagcacauggagcugcuggagagcagcgugaucccccugaugcacccccuggccgaccccagcaccguguucaaggacgacgacgaggccgaggacuucguggaggugcaccugcccgacgugcacaagcaggugagcggcguggaccugggccugcccagcuggggcagauacgugcugaugagcgccggcgcccuggccacccugaugguggugaucagccugaugaagugcugcaagggcgugaacagaaccaagagcaucaagcagggcagcagagagagcgagagaaaggugagcaucaccccccagagcggcaaggugaucagcagcugggagagcuacaagagcggcggcgagaccggccuguga

SEQ ID NO: 191410 - RNA, 1575 nt, Artificial Sequence
  derived and/or modified CDS sequence (opt4) from glycoprotein__RABV__JQ685994.1
auggugcccugggcccugcuguucgugcccuuccugaucagcagccugugcuucggcaaguuccccaucuacaccauccccgacaagcugggccccuggagccccaucgacauccaccaccugagcugccccaacaaccuggugguggaggacgagggcugcaacagccugagcggcuucagcuacauggagcugaaggugggcuacaucagcgccaucaaggugaacggcuucaccugcaccggcguggugaccgaggccgagaccuacaccaacuucgugggcuacgugaccaccaccuucaagagaaagcacuucagacccaugcccgacgccugcagaagcgccuacaacuggaagauggccggcgaccccagauacgaggagagccugcacaaccccuaccccgacuaccacuggcugagaaccgugaagaccaccaaggagagccugaucaucaucagccccagcguggccgaccuggaccccuacgacagaagccugcacagcagaaucuuccccggcggcaagugcaccggccugaccgugagcagcaccuacugcagcaccaaccacgacuacaccaucuggaugcccgagaaggccggccugggcaccagcugcgacaucuucaccaacagcaagggcaagagagccagcaagggcggcaagaccugcggcuucguggacgagagaggccuguacaagagccugaagggcgccugcaagcugaagcugugcggcgugagcggccugagacugauggacggcaccuggguggccauccagacccuggacgagaccaaguggugcagccccgaccagcuggugaaccugcacgacuuccacagcgacgagcuggagcaccuggugguggaggagcuggugagaaagagagaggagugccuggacgcccuggagagcaucaugaccaccaagagcgugagcuucagaagacugagccaccugagaaagcuggugcccggcuucggcaaggccuacaccaucuucaacaagacccugauggaggccgacgcccacuacaagagcgugagaaccuggagcgagaucauccccagcaagggcugccugagagugggcggcagaugccacccccacgugaacggcguguucuucaacggcaucauccugggccccgacggccacgugcugauccccgagaugcagagcagccugcugcagcagcacguggagcugcuggagagcagcgugaucccccugaugcacccccuggccgaccccagcgccguguucaaggacggcgacgaggccgaggacuucguggaggugcaccugcccgacgugcacaagcagaucagcggcguggaccugggccugcccagcuggggcaaguacaugcugaugaucgccggcgcccugaccacccugaugcuguucaucuuccugaugaccugcugcaagagagugaacaagaaggagagcaucagacagagccccagagagcuggagagcaaggugagcgugaccccccagaacagaaaggugaucagcagcugggagagcuacaagagcggcggcgagaccaagcuguga

SEQ ID NO: 191411 - RNA, 1575 nt, Artificial Sequence
  derived and/or modified CDS sequence (opt4) from glycoprotein__RABV__JQ685995.1
auggugccccaggugcugcuguucgugccccugcugguguucagccugugcuucggcaaguucccccuguacaccauccccgacaagcugggccccuggagccccaucgacauccaccaccugagcugccccaacaaccuggugguggaggacgagggcugcaccaaccugagcggcuucagcuacauggagcugaaggugggcuacaucagcgccaucaaggugagcggcuucaccugcaccggcguggugaccgaggccgagaccuacaccaacuucgugggcuacgugaccaccaccuucaagagaagacacuucagacccacccccgacgccugcagagccgccuacaacuggaagauggccggcgaccccagauacgaggagagccugcacaaccccuaccccgacuaccacuggcugagaaccgugaagaccaccaaggagagccuggugaucaucagccccagcgugaccgaccuggaccccuacgacaagagccugcacagcagaguguuccccggcggcaagugcagcggcaucaccgugagcagcaccuacugcagcaccaaccacgacuacaccaucuggaugcccgagagccccagacugggcaccagcugcgacaucuucaccaacagcagaggcaagagagccagcaagggcagcaagaccugcggcuucguggacgagagaggccuguacaagagccugaagggcgccugcaagcugaagcugugcggcgugcugggccugagacugauggacggcaccuggguggccaugcagaccagcgacgagaccaaguggugccugcccgaccagcuggugaaccugcacgacuucagaagcgacgagaucgagcaccuggugguggaggagcuggugagaaagagagaggagugccuggacgcccuggagagcaucaugaccaccaagagcgugagcuucagaagacugagccaccugagaaagcuggugcccggcuucggcaaggccuacaccaucuucaacaagacccugauggaggccgacgcccacuacaagagcaucagaaccuggaacgagaucgugcccagcaagggcugccugagagugggcggcagaugccacccccacgugaacggcguguucuucaacggcaucauccugggccccgacggccaggugcugauccccgagaugcagagcagccugcugcagcagcacauggagcugcuggagagcagcgugaucccccugaugcacccccuggccgaccccagcaccguguucaaggagggcgacgaggccgaggacuucguggaggugcaccugcccgacgugcacaagcaggugagcggcguggaccugggccugcccaacuggggcaaguacgugcugaugaucgccggcgcccugaucgcccugaugcugaucaucuuccugaugaccugcugcagaagagugaacagaagcgagagcacccagcacagacugagaggcaccggcagaaaggugagcgugaccagccagaccggcaaggugaucagcagcugggagagcuacaagagcggcggcgagaccagacuguga

SEQ ID NO: 191412 - RNA, 1575 nt, Artificial Sequence
  derived and/or modified CDS sequence (opt4) from glycoprotein__RABV__JQ685996.1
augaucccccaggcccugcugagcgugccccugcugaucagcagccugugcuucggcaaguuccccaucuacaccauccccgagaagcugggccccuggagccccaucgacauccaccaccugagcugccccaacaaccuggugguggaggacgagggcugcaacagccugagcggcuucagcuacauggagcugaaggugggcuacaucagcgccaucaaggugaacggcuucaccugcaccggcguggugaccgaggccgagaccuacaccaacuucgugggcuacgugaccaccaccuucaagagaaagcacuucagacccaugcccgacgccugcagagccgccuacaacuggaagaccgccggcgaccccagauacgaggagagccugcacaaccccuaccccgacuaccacuggcugagaaccgugaagaccaccaaggagagccugaucaucaucagccccagcguggccgaccuggaccccuacgacaagagccugcacagcagaaucuuccccggcggcaagugccugggcaucaccaucagcagcaccuacugcagcaccaaccacgacuacaccaucuggaugcccgaggaggccagacugggcaccagcugcgacaucuucaccaacagcaagggcaagagagccagcaagggcggcagaaccugcggcuucguggacgagagaggccuguacaagagccugaagggcgccugcaagcugaagcugugcggcgugcugggccugagacugauggacggcaccuggguggccauccagacccccaacgagaccaaguggugcagccccgaccagcuggugaacgugcacgacuucagaagcgacgagaucgagcaccuggugguggaggagcugaucagaaagagagaggagugccuggacgcccuggagagcaucaugaccaccaagagcgugagcuucagaagacugagcaaccugagaaagcuggugcccggcuucggcaaggccuacaccaucuucaacaagacccugauggaggccgacgcccacuacaagagcgugagaaccuggaacgagaucauccccagcagaggcugccugaaggugggcggcagaugccacccccacgugaacggcguguucuucaacggcaucauccugggccccgacggccacauccugauccccgagaugcagagcagccugcugcagcagcacauggagcugcuggagagcagcgugaucccccugauccacccccuggccgaccccagcaccguguucaaggacggcgacgaggccgaggacuucguggaggugcaccugcccgacgugcaccagcaggugagcggcguggaccugggccugcccgacuggggcaaguacgugcugaugagcgccggcgcccuggccaccgugaugcugaccaucuuccugaucaccugcugcagaagagugaagagaaccgagagcauccagcagggccugggcgagagcggcagaaaggugagcgugaccccccagaacggcaaggugaugagcagcugggaguacuacaagagcggcggcggcaccagacuguga

SEQ ID NO: 191413 - RNA, 1575 nt, Artificial Sequence
  derived and/or modified CDS sequence (opt4) from glycoprotein__RABV__JQ685997.1
augaucagccagacccugcuguucgugccccugcugaucagcagcgugugcuucggcgaguuccccaucuacaccauccccgagaagcugggccccuggagccccaucgacauccaccaccugagcugccccaacaaccuggugguggaggacgagggcugcaacagccugagcggcuucagcuacauggagcugaaggugggcuacaucagcagcaucaaggugaacggcuucaccugcaccggcguggugaccgaggccgagaccuacaccaacuucgugggcuacgugaccaccaccuucaagagaaagcacuucagacccaugcccgacgccugcagagccgccuacaacuggaagaugagcggcgaccccagauacgaggagagccugcacaaccccuaccccgacuaccacuggcugagaaccgugaagaccaccaaggagagccuggugaucaucagccccagcgugggcgaccuggaccccuacgacaagagccugcacagcagaguguucagcggcggcaagugccugggcaucaccaucagcagcaccuacugcagcaccaaccacgacuacacccuguggaugcccgaggaggccagacugggcaccagcugcgacaucuucaccaacagcaagggcaagagagccagcaagggcggcagaaccugcggcuucguggacgagagaggccuguacaagagccugaagggcgccugcaagcugaagcugugcggcgugcccggccugagacugauggacggcaccugggugagcauccagaccagcgacgagaccaaguggugcccccccgaccagcuggugaacauccacgacuucagaagcgacgagaucgagcaccuggugguggaggagcuggugaagaagagagaggagugccuggacgcccuggagagcaucaugaccaccaagagcgugagcuucagaagacugagccaccugagaaagcuggugcccggcuucggcaaggccuacaccaucuucaacaagacccugauggaggccgacgcccacuacaagagcgugagaaccuggaacgaggugauccccagcaagggcugccugagcgugggcggcagaugccacccccacguggacggcguguucuucaacggcaucauccugggccccgacggcagcgugcugauccccgagaugcagagcagccugcugcagcagcacauggagcugcuggagagcagcgugaucccccugaugcacccccuggccaaccccagcaccguguucaaggacggcgacgaggccgaggacuucguggaggugcaccugcccgacgugcaggagcaggugagcggcguggaccugggccugcccaacuggggcaaguacgugcugaugagcgccggcgcccuggccauccugcugcugaccaucuuccugaugaccugcugcagaagagccaacagaaccaagagcaucagacagggccccgaggagagcggcagaaaggugagcgugcccccccagagcggcaaggugaucagcagcugggagagcuucaagagcggcggcgagaccagacuguga

SEQ ID NO: 191414 - RNA, 1575 nt, Artificial Sequence
  derived and/or modified CDS sequence (opt4) from glycoprotein__RABV__JQ685998.1
augaucccccaggcccugcuguuccugccccugcugaucagcagccugugcagcggcaaguuccccaucuacaccauccccgagaagcugggccccuggagccccaucgacauccaccaccugagcugccccaacaaccuggugguggaggacgagggcugcaacagccugagcggcuucagcuacauggagcugaaggugggcuacaucagcgccaucaaggugaacggcuucaccugcaccggcguggugaccgaggccgagaccuacaccaacuucgugggcuacgugaccaccaccuucaagagaaagcacuucagacccaugcccgacgccugcagagccgccuacaacuggaagauggccggcgaccccagauacgaggagagccugcacaaccccuaccccgacuaccacuggcugagaaccgugaagaccaccaaggagagccuggugaucaucagccccagcguggccgaccuggaccccuacgacaagagccugcacagcagaguguuccccggcggcaagugccugggcaucaccaucagcagcaccuacugcagcaccaaccacgacuacaccaucuggaugcccgaggaggccagacugggcaccagcugcgacaucuucaccaacagcaagggcaagagagccagcaagggcggcagaaccugcggcuucguggacgagagaggccuguacaagagccugaagggcgccugcaagcugaagcugugcggcgugcccggccugagacugauggacggcaccugggugagcauccagaccagcgaggagaccaaguggugcagcagcgaccagcuggugaacauccacgacuucagaagcgacgagaucgagcaccuggugguggaggagcuggugaagaagagagaggagugccuggacgcccuggagagcaucaugaccaccaagagcgugagcuucagaagacugagccaccugagaaagcuggugcccggcuucggcaaggccuacaccaucuucaacaacacccugauggaggccgacgcccacuacaagagcgugaagaccuggaacgagaucauccccagcaagggcugccugagcgugggcggcagaugccaccccaacgugaacggcguguucuucaacggcaucauccugggccccgacggcagcgugcugauccccgagaugcagagcagccugcugcagcagcacauggagcugcuggagagcagcgugaucccccugaugcacccccuggccaaccccagcaccguguucaaggacggcgacgaggccgaggaguucguggaggugcaccugcccgacgugaaggagcaggugagcggcguggaccugggccugcccaacuggggcagauacgugcugaugagcgccggcgcccuggccauccuggugcugaccaucuuccugaugaccugcugcagaagagccaacagaaccaagagcauccagcagggccugggcgagagcgugagaaaggugagcgugccccugcagaacggcaaggugaucagcagcugggagagcuacaagagcggcggcgagaccagacuguga

SEQ ID NO: 191415 - RNA, 1575 nt, Artificial Sequence
  derived and/or modified CDS sequence (opt4) from glycoprotein__RABV__JQ685999.1
augaucccccaggcccugcuguucgugccccugcugauccccagccugugccugggcgaguuccccaucuacaccauccccgacaagcugggccccuggacccccaucgacauccaccaccugagcugccccaacaaccugguggccgagaacgacggcugcaccagccugagcggcuucagcuacauggagcugaaggugggcuacaucagcgccaucaaggugaacggcuucaccugcaccggcguggugaccgaggccgagaccuacaccaacuucgugggcuacgugaccaccaccuucaagagaaagcacuucagacccaugcccgacgccugcagagccgcccacgacuggaagauggccggcgaccccagauacgaggacagccugcagaaccccuaccccgacuaccacuggcugagaaccgugaagaccaccaaggagagccuggugaucaucagccccagcguggccgaccuggaccccuacgacaagagccugcacagcagaguguuccccagcggcaagugccugggcaucaccgugagcagcaccuacugcagcaccaaccacgacuacaccaucuggaugcccguggagcccagacugggcaccagcugcgacaucuucaccaacagcagaggcaagagagccagcaagggcggcagagugugcggcuucguggacgagagaggccuguacaagagccugaagggcgccugcaagcugaagcugugcggcgugcccggcaucagacugauggacggcaccugggugagcauccagaccagcgaggacaucaaguggugcccccccgacagacuggugaaccugcacgacuuccacagcgacgagcuggagcaccuggugguggaggagcugaucaagagaagagagaacugccuggacgcccuggagagcaucaugaccaccaagagcgugagcuucagaagacugagccaccugagaaagcuggugcccggcuucggcaaggccuacaccaucuucaacaagacccugauggaggccgacgcccacuacaagagcgugaagaccuggaacgaggugauccccagcaagggcugccuggaggugggcggcagaugccacccccccgugaacggcguguucuucaacggcaucauccugggccccgacggcaacgugcugauccccgagaugcagagcagccugcugcagcagcacauggagcugcuggagagcagcgugaucccccugaugcacccccuggccgaccccagcaccguguucaaggagggcgacgaggccgaggacuucguggaggugcaccugcccgacgugcacaagcaggugagcgacguggaccugggccugcccagcuggggcaaguaccugcugaugagcgccggcgcccuggccauccugauccuggccaucgugcugaucaucugcugcagaagagugaacaagaccggcagcacccagagaggccacagagagagcagaggcaagaugagcguggccccccagaacggcaagaucaucagcagcugggagcuguacaagagagagagcgagaccggccuguga

SEQ ID NO: 191416 - RNA, 1575 nt, Artificial Sequence
  derived and/or modified CDS sequence (opt4) from glycoprotein__RABV__JQ686000.1
augaucccccaggcccugcuguucgugccccugcugauccccagccugugccugggcaaguuccccaucuacaccauccccgacaagcugggccccuggagccccaucgacauccaccaccugagcugccccaacaaccuggugguggaggacgagggcugcaccagccugagcggcuucagcuacauggagcugaaggugggcuacaucagcgccaucaaggugaacggcuucaccugcaccggcguggugaccgaggccgagaccuacaccaacuucgugggcuacgugaccaccaccuucaagagaaagcacuucagacccaugcccgacgccugcagagccgcccacgacuggaagaucgccggcgaccccagauacgaggacagccugcagaaccccuaccccgacuaccacuggcugagaaccgugaagaccaccaaggagagccuggugaucaucagccccagcguggccgagcuggaccccuacgacaagagccugcacagcagaguguuccccagcggcaagugccugggcaucaccgugagcagcaccuacugcagcaccaaccacgacuacaccaucuggaugcccguggaggccagacugggcaccagcugcgacaucuucaccaacagcagaggcaagaaggccagcaagggcggcagaaccugcggcuucguggacgagagaggccuguacaagagccugaagggcgccugcaagcugaagcugugcggcgugcccggccugagacugauggacggcaccugggugagcauccagaccagcgacgacaucaaguggugcccccccgaccagcuggugaaccugcacgacuuccacagcgacgagaucgagcaccuggugguggaggagcugaucaagaagagagagggcugccuggacgcccuggagagcaucaugaccaccaagagcgugagcuucagaagacugagccaccugagaaagcuggugcccggcuucggcaaggccuacaccaucuucaacaacacccugauggaggccgacgcccacuacaagagcgugagaaccuggaacgaggugauccccagcaagggcugccugaaggugggcggcagaugccacccccccgugaacggcguguucuucaacggcaucauccugggccccgacggcaacgugcugauccccgagaugcagagcagccugcugcagcagcacauggagcugcuggagagcagcgugaucccccugaugcacccccuggccgaccccagcaccguguucaaggacggcgacgaggccgaggacuucguggaggugcaccugcccgacgugcacaagcaggugagcgacguggaccugggccugcccagcuggggcaaguaccugcugaugagcgccggcgcccuggccacccugagccuggccaucuuccugaucaccugcugcagaagagccaacagaaccgagagcacccagagaggccacagagagagcggcggcaaggugagcguggccccccagaacggcaagaucaucagcagcugggagcuguacaagagcgagagcgagaccggcauguga

SEQ ID NO: 191417 - RNA, 1575 nt, Artificial Sequence
  derived and/or modified CDS sequence (opt4) from glycoprotein__RABV__JQ686001.1
augaucccccaggcccugcuguucgugccccugcugauccccagccugugccugggcaaguuccccaucuacaccauccccgacaagcugggccccuggagccccaucgacauccaccaccugagcugccccaacaaccugguggccgaggacgagggcugcaccagccugagcggcuucagcuacauggagcugaaggugggcuacaucagcgccaucaaggugaacggcuucaccugcaccggcguggugaccgaggccgagaccuacaccaacuucgugggcuacgugaccaccaccuucaagagaaagcacuucagacccaugcccgacgccugcagagccgcccacgacuggaagauggccggcgaccccagauacgaggacagccugcagaaccccuaccccgacuaccacuggcugagaaccgugaagaccaccaaggagagccuggugaucaucagccccagcguggccgaccuggaccccuacgacaagagccugcacagcagaguguuccccagcggcaagugccugggcaucaccgugagcagcaccuacugcagcaccaaccacgacuacaccaucuggaugcccguggaggccagacugggcaccagcugcgacaucuucaccaacagcaagggcaagaaggccagcaagggcggcagaaccugcggcuucguggacgagagaggccuguacaagagccugaagggcgccugcaagcugaagcugugcggcgugcccggccugagacugauggacggcaccugggugagcauccagaccagcgacgacaucaaguggugcccccccgaccagcuggugaaccugcacgacuuccacagcgacgagaucgagcaccuggugguggaggagcugaucaagaagagagagggcugccuggacgcccuggagagcaucaugaccaccaagagcgugagcuucagaagacugagccaccugagaaagcuggugcccggcuucggcaaggccuacaccaucuucaacaacacccugauggaggccgacgcccacuacaagagcgugagaaccuggaacgaggugauccccagcaagggcugccugaaggugggcggcagaugccacccccccgugaacggcguguucuucaacggcaucauccugggccccgacggcaacgugcugauccccgagaugcagagcagccugcugcagcagcacauggagcugcuggagagcagcgugaucccccugaugcacccccuggccgaccccagcaccguguucaaggacggcgacgaggccgaggacuucguggaggugcaccugcccgacgugcacaagcaggugagcgagaucgaccugggccugcccagcuggggcaaguaccugcugaugagcgccggcgugcuggccacccugauccuggccaucuuccugaucaccugcugcagaagagccaacagaaccgagagcacccagagaggcagaagagagagcggcggcaaggugagcguggccccccagaacggcaagaucaucagcagcugggagcuguacaagagcgagagcgagaccggccuguga

SEQ ID NO: 191418 - RNA, 1575 nt, Artificial Sequence
  derived and/or modified CDS sequence (opt4) from glycoprotein__RABV__JQ686002.1
augaucccccaggcccugcuguuccugcccuuccuguuccccagccugugccugggcaaguuccccaucuacaccauccccgagaagcugggccccuggagccccaucgacauccaccaccugagcugccccaacaaccuggugguggaggacgagggcugcgacagccugagcggcuucagcuacauggagcugaaggugggcuacaucagcgccaucaaggugaacggcuucaccugcaccggcguggugaccgaggccgagaccuacaccaacuucgugggcuacgugaccaccaccuucaagagaaagcacuucagacccaugcccgacgccugcagagccgccuacaacuggaagaccgccggcgaccccagauacgaggagagccugcacaaccccuaccccgacuaccacuggcugagaaccgugaagaccaccaaggagagccugaucaucaucagccccagcguggccgaccuggaccccuacgacaagagccugcacagcagaguguuccccggcggcaagugccugggcaucaccgugagcagcaccuacugcagcaccaaccacgacuacaccaucuggaugcccgaggaggccagacugggcaccagcugcgacaucuucaccaacagcaagggcaagagagccagcaagggcggcagaaccugcggcuucguggacgagagaggccuguacaagagccugaagggcgccugcaagcugaagcugugcggcgugcccggccugagacugauggacggcaccuggguggccauccagacccccggcgagaccaaguggugcagccccgaccagcuggugaaccugcacgacuucagaagcgacgagaucgagcaccuggugguggaggagcugaucaagaagagagaggagugccuggacgcccuggagagcaucaugaccaccaagagcgugagcuucagaagacugagcaaccugagaaagcuggugcccggcuucggcaaggccuacaccaucuucaacaagacccugauggaggccgacgcccacuacaagagcgugagaaccugggacgagaucauccccagcaagggcugccugagagugggcggcagaugccacccccacgugaacggcguguucuucaacggcaucauccugggccccgacggccacgugcugauccccgagaugcagagcagccugcugcagcagcacauggagcugcuggagagcagcgugaucccccugauccacccccuggccgaccccagcaccguguucaaggacggcgacgaggccgaggacuucguggaggugcaccugcccgacgugcacaagcaggugagcggcguggaccugggccugcccaacuggggcaaguacgugcugaugggcgccggcgugcuggccaccgugauccugaccauccugcugcugaccugcugcagaagagugaacagaaccaagcccaagcagcagagccuggaggagagcggcagaaaggugagcgugaccccccagaacggcaaggugaugagcagcugggaguacuacaagagcgagggcagaaccagccuguga

SEQ ID NO: 191419 - RNA, 1575 nt, Artificial Sequence; identical to SEQ ID NO: 191354
  derived and/or modified CDS sequence (opt4) from glycoprotein__RABV__JQ686003.1

SEQ ID NO: 191420 - RNA, 1575 nt, Artificial Sequence
  derived and/or modified CDS sequence (opt4) from glycoprotein__RABV__JQ686004.1
augaucccccaggcccugcuguucgugccccugcugauccccagccugugccugggcaaguuccccaucuacaccauccccgacaagcugggccccuggagccccaucgacauccaccaccugagcugccccaacaaccugguggccgaggacgagggcugcaccagccugagcggcuucagcuacauggagcugaaggugggcuacaucagcgccaucaaggugaacggcuucaccugcaccggcguggugaccgaggccgagaccuacaccaacuucgugggcuacgugaccaccaccuucaagagaaagcacuucagacccaugcccgacgccugcagagccgcccacgacuggaagauggccggcgaccccagauacgaggacagccugcagaaccccuaccccgacuaccacuggcugagaaccgugaagaccaccaaggagagccuggugaucaucagccccagcguggccgaccuggaccccuacgacaagagccugcacagcagaguguuccccagcggcaagugccugggcaucaccgugagcagcaccuacugcagcaccaaccacgacuacaccaucuggaugcccguggaggccagacugggcaccagcugcgacaucuucaccaacagcaagggcaagaaggccagcaagggcggcagaaccugcggcuucguggacgagagaggccuguacaagagccugaagggcgccugcaagcugaagcugugcggcgugcccggccugagacugauggacggcaccugggccagcauccagaccagcgacgacaucaaguggugcccccccgaccagcuggugaaccugcacgacuuccacagcgacgagaucgagcaccuggugguggaggagcugaucaagaagagagagggcugccuggacgcccuggagagcaucaugaccaccaagagcgugagcuucagaagacugagccaccugagaaagcuggugcccggcuucggcaaggccuacaccaucuucaacaacacccugauggaggccgacgcccacuacaagagcgugagaaccuggaacgaggugauccccagcaagggcugccugaaggugggcggcagaugccacccccccgugaacggcguguucuucaacggcaucauccugggccccgacggcaacgugcugauccccgagaugcagagcagccugcugcagcagcacauggagcugcuggagagcagcgugaucccccugaugcacccccuggccgaccccagcaccguguucaaggacggcgacgaggccgaggacuucguggaggugcaccugcccgacgugcacaagcaggugagcgagaucgaccugggccugcccagcuggggcaaguaccugcugaugagcgccggcgugcuggccacccugauccuggccaucuuccugaucaccugcugcagaagagccaacagaaccgagagcacccagagaggcagaagagagagcggcggcaaggugagcguggccccccagaacggcaagaucaucagcagcugggagcuguacaagagcgagagagagaccggccuguga

SEQ ID NO: 191421 - RNA, 1575 nt, Artificial Sequence
  derived and/or modified CDS sequence (opt4) from glycoprotein__RABV__JQ686005.1
augaucccccaggcccugcugagccugcugcugcugaucagcagccugugccugggcaaguuccccaucuacaccauccccgacaagcugggccccuggagccccaucgacauccaccaccugagcugccccaacaaccuggugguggaggacgagggcugcaccagccugagcggcuucagcuacauggagcugaaggugggcuacaucagcgccaucaaggugaacggcuucaccugcaccggcguggugaccgaggccgagaccuacaccaacuucgugggcuacgugaccaccaccuucaagagaaagcacuucagacccaugcccgacgccugcagagccgcccacgaguggaagauggccggcgaccccagauacgaggacagccugcagaaccccuaccccgacuaccacuggcugagaaccgugaagaccaccaaggagagccugaucaucaucagccccagcguggccgaccuggaccccuacgacaagagccugcacagcagaguguuccccggcggcaacugccugggcaucaccaucagcagcaccuacugcagcaccaaccacgacuacaccaucuggaugcccgaggaggccagacugggcaccagcugcgacaucuucaccaacagcagaggcaagagagccagcaagggcggcaagaucugcggcuucguggacgagagaggccuguacaagagccugaagggcgccugcaagcugaagcugugcggcgugcccggccugagacugauggacggcaccugggugagcauccagaccagcgacgagaccaaguggugcccccccgaccagcuggugaacgugcacgacuuccacagcgacgagaucgagcaccugaucguggaggagcuggugaagaagagagaggagugccuggacgcccuggagagcaucaugaccaccaagagcgugagcuucagaagacugagccaccugagaaagcuggugcccggcuucggcaaggccuacaccaucuucaacaagacccugauggaggccgacgcccacuacaagagcgugagaaccuggaacgagaucauccccagcaagggcugccugaaggugggcggcaugugccacccccacgugggcggcguguucuucaacggcaucauccugggccccgacggcaccgugcugauccccgagaugcagagcagccugcugcagcagcacauggagcugcuggagagcagcgugaucccccugaugcacccccuggccgaccccagcaccguguucaaggagggcgacgaggccgaggacuucguggagauccaccugcccgacgugcacaagcagaucagcggcguggaccugggccugcccagcuggggcaaguaccugcugaucagcgccggcgcccuggccacccugauccugaccaucuuccugaucaccugcugcagaaaggugaacagaaccgagagcgugcagagaggccacagagagagcgagagaaaggugcccgugagcccccagaacggcagagugaucagcagcugggagcuguacaagagcggcggcgagaccaaccuguga

SEQ ID NO: 191422 - RNA, 1575 nt, Artificial Sequence
  derived and/or modified CDS sequence (opt4) from glycoprotein__RABV__JQ686006.1
augaucccccaggcccugcuguucgugccccugcugaucagcagccugugcuucggcaaguuccccaucuacaccauccccgagaagcugggccccuggagccccaucgacauccaccaccugagcugccccaacaaccugguggccgaggacgagggcugcaacagccugagcggcuucagcuacauggagcugaaggugggcuacaucagcgccaucaaggugaacggcuucaccugcaccggcguggugaccgaggccgagaccuacaccaacuucgugggcuacgugaccaccaccuucaagagaaagcacuucagacccacccccgacgccugcagagccgccuacaacuggaagauggccggcgaccccagauacgaggagagccugcacaaccccuaccccgacuaccacuggcugagaaccgugaagaccaccaaggagagccuggugaucaucagccccagcguggccgaccuggaccccuacgacaagagccugcacagcagaguguuccccgacggcaagugccugggcaucaccaucagcagcaccuacugcagcaccaaccacgacuacaccaucuggaugcccgaggaggccagacugggcaccagcugcgacaucuucaccaccagcaagggcaagagagccagcaagggcgacaagaucugcggcuucguggacgagagaggccuguacaagagccugaagggcgccugcaagcugaagcugugcggcgugcugggccugagacugauggacggcaccugggugagcauccagacccccggcgagaccaaguggugcagccccgaccagcuggugaaccugcacgacuuccacagcgacgagaucgagcaccugguggccgaggagcuggugaagaagagagaggagugccuggacgcccuggagagcaucaugaccaccaagagcgugagcuucagaagacugagccaccugagaaagcuggugcccggcuucggcaaggccuacaccaucuucaacaagacccugauggaggccgacgcccacuacaagagcgugagaaccuggaacgaggugauccccagcaagggcugccugagcgugggcggcagaugccacccccacgugaacggcguguucuucaacggcaucauccugggccccgacggcagcgugcugauccccgagaugcagagcagccugcugcagcagcacauggagcugcuggagagcagcgugaucccccugaugcacccccuggccgaccccagcaccguguucaaggacggcgacgaggccgagaacuucguggaggugcaccugcccgacgugcacaagcaggugagcggcguggaccugggccugcccaacuggggcaaguaccugcugaugaucgccggcgcccuggccacccugaugcugaccaucuuccugaugaccugcugcagaagaaccaagagagccgagagcauccagcacggccugggcgagagcggcagaaaggugagcgugaccccccagagcggcaaggugaucagcagcugggagagcuacaagagcggcggcgagaccagacuguga

SEQ ID NO: 191423 - RNA, 1575 nt, Artificial Sequence
  derived and/or modified CDS sequence (opt4) from glycoprotein__RABV__JQ686007.1
augauccccagagcccugcuguucgugccccugcugauccccagccugugccugggcgaguuccccaucuacaccauccccgacaagcugggccccuggagccccaucgacauccaccaccugagcugccccaacaaccugguggccgagaacgacggcugcaccagccugagcggcuucagcuacauggagcugaaggugggcuacaucagcgccaucaaggugaacggcuucaccugcaccggcguggugaccgaggccgagaccuacaccaacuucgugggcuacgugaccaccaccuucaagagaaagcacuucagacccacccccgacgccugcagagccgcccacgacuggaagauggccggcgaccccagauacgaggccagccugcagaaccccuaccccgacuaccacuggcugagaaccgugaagaccaccaaggagagccuggugaucaucagccccagcguggccgaccuggaccccuacgacaagagccugcacagcagaguguuccccagcggcaagugccugggcaucaccgugagcagcaccuacugcagcaccaaccacgacuacaccaucuggaugcccguggagcccagacugggcaccagcugcgacaucuucaccaacagcagaggcaagagagccagcaagggcggcagagugugcggcuucguggacgagagaggccuguacaagagccugaagggcgccugcagacugaagcugugcggcgugcccggcaucagacugcuggacggcaccugggugagcauccagaccagcgaggacaucaaguggugcccccccgacagacuggugaaccugcacgacuuccacagcgacgagaucgagcaccuggugguggccgagcugaucaagagaagagagaacugccuggacgcccuggagagcaucaugaccaccaagagcgugagcuucagaagacugagccaccugagaaagcuggugcccggcuucggcaaggccuacaccaucuucaacaagacccugauggaggccgacgcccacuacaagagcgugaagaccuggaacgaggugauccccagcaagggcugccuggaggugggcggcagaugccacccccacgugaacggcguguucuucaacggcaucauccugggccccgacggcaacgugcugauccccgagaugcagagcagccugcugcagcagcacauggagcugcuggagagcagcgugaucccccugaugcacccccuggccgaccccagcaccguguucaaggagggcgacgaggccgaggacuucguggaggugcaccugcccgacgugcacaagcaggugagcgacguggaccugggccugcccagcuggggcaaguaccugcugaucagcgccggcgcccuggccauccugauccuggccaucgugcugaucaucugcugcagaagagugaacaagaccagaagcacccagagaggccacagagagagcggcggcaagaugagcguggugccccagaacggcaagaucaucagcagcugggagcuguacaagagcgagagcgagaccggccuguga

SEQ ID NO: 191424 - RNA, 1575 nt, Artificial Sequence
  derived and/or modified CDS sequence (opt4) from glycoprotein__RABV__JQ686008.1
augaucagccaggccuuccuguucgugcccuuccugaucagcagccugugcuucggcaaguuccccaucuacaccauccccgacaagaucggccccuggagccccaucgacauccaccaccugagcugccccaacaaccuggugguggaggacgagggcugcaccagccugagcggcuucagcuacauggagcugaaggugggcuacaucagcgccaucaaggugaacggcuucaccugcaccggcguggugaccgaggccgagaccuacaccaacuucgugggcuacgugaccaccaccuucaagagaaagcacuucagacccaugcccgacgccugcagagccgccuacaacuggaagauggccggcgaccccagauacgaggagagccugcagaaccccuaccccgacuacaacuggcugagaaccgugaagaccaccaaggagagccugaucaucaucagccccagcguggccgaccuggaccccuacgacaagagccugcacagcagaguguuccccaacggcaagugccugggcaucaccgugagcagcaccuacugcagcaccaaccacgacuacaccaucuggaugcccgaggaggccagacugggcaccagcugcgacaucuucaccaacagcaagggcaagagagccagcaagggcggcaagaccugcggcuucguggacgagagaggccuguacaagagccugagaggcgccugcaagcugaagcugugcggcgugcccggccugagacugauggacggcaccugggugagcauccagaccagcgacgagaccaaguggugcccccccgaccagcuggugaacgugcacgacuuccacagcgacgagaucgagcaccuggugguggaggagcuggugagaaagagagaggagugccuggacgcccuggagagcaucaugaccaccaagagcgugagcuucagaagacugagccaccugagaaagcuggugcccggcuucggcaaggccuacaccaucuucaacaagacccugauggaggccgacgcccacuacaagagcauccagaccuggaacgagaucauccccagcaagggcugccugaaggugggcggcaugugccacccccaccuggacggcguguucuucaacggcaucauccugggccccgacggcaacgugcugauccccgagaugcagagcagccugcugcagcagcacauggagcugcuggagagcagcgugaucccccugaugcacccccuggccgaccccagcaccguguucaaggacggcgacgaggccgaggacuucguggaggugcaccugcccgacauccacaagcaggugagcggcaucgaccugggccugcccgacuggggcaaguaccugcugaugagcgccggcgcccuggccauccugcugcugaccaucuuccugaugaccugcugcagaagagugaacagaaccgagagcgcccagagagaccccggcgagagcggcagaaaggugagcgugaccccccagaacggcaaggugaucagcagcugggagcuguacaagagcggcggcgacaccagacuguga

SEQ ID NO: 191425 - RNA, 1575 nt, Artificial Sequence
  derived and/or modified CDS sequence (opt4) from glycoprotein__RABV__JQ686009.1
augaucccccaggcccugcuguucgugccccugcugauccccagccugugccugggcaaguuccccaucuacaccauccccgacaagcugggccccuggagccccaucgacauccaccaccugagcugccccaacaaccuggugguggaggacgagggcugcaccagccugagcggcuucagcuacauggagcugaaggugggcuacaucagcgccaucaaggugaacggcuucaccugcaccggcguggugaccgaggccgagaccuacaccaacuucgugggcuacgugaccaccaccuucaagagaaagcacuucagacccaugcccgacgccugcagagccgcccacgacuggaagaucgccggcgaccccagauacgaggacagccugcagaaccccuaccccgacuaccacuggcugagaaccgugaagaccaccaaggagagccuggugaucaucagccccagcguggccgaccuggaccccuacgacaagagccugcacagcagaguguuccccagcggcaagugccugggcaucaccgugagcagcaccuacugcagcaccaaccacgacuacaccaucuggaugcccguggaggccagacugggcaccagcugcgacaucuucaccaacagcagaggcaagaaggccagcaagggcggcagaaccugcggcuucguggacgagagaggccuguacaagagccugaagggcgccugcaagcugaagcugugcggcgugcccggccugagacugauggacggcaccugggugagcauccagaccagcgacgacaucaaguggugcccccccgaccagcuggugaaccugcacgacuuccacagcgacgagaucgagcaccuggugguggaggagcugaucaagaagagagagggcugccuggacgcccuggagagcaucaugaccaccaagagcgugagcuucagaagacugagccaccugagaaagcuggugcccggcuucggcaaggccuacaccaucuucaacaacacccugauggaggccgacgcccacuacaagagcgugagaaccuggaacgaggugauccccagcaagggcugccugaaggugggcggcagaugccacccccccgugaacggcguguucuucaacggcaucauccugggccccgacggcaacgugcugauccccgagaugcagagcagccugcugcagcagcacauggagcugcuggagagcagcgugaucccccugaugcacccccuggccgaccccagcaccguguucaaggacggcgacgaggccgaggacuucguggaggugcaccugcccgacgugcacaagcaggugagcgacguggaccugggccugcccagcuggggcaaguaccugcugaugagcgccggcgcccuggccacccugauccuggccaucuuccugaucaccugcugcagaagagccaacagaaccgagagcacccagagaggccacagagagagcggcggcaaggugagcguggccccccagaacggcaagaucaucagcagcugggagcuguacaagagcgagagcgagaccggcauguga

SEQ ID NO: 191426 - RNA, 1575 nt, Artificial Sequence; identical to SEQ ID NO: 191394
  derived and/or modified CDS sequence (opt4) from glycoprotein__RABV__JQ686011.1

SEQ ID NO: 191427 - RNA, 1575 nt, Artificial Sequence
  derived and/or modified CDS sequence (opt4) from glycoprotein__RABV__JQ699230.1
auggugccccaggugcugcuguucgugccccugcugguguucagcagcugcuucggcaaguuccccaucuacaccauccccgacaagcugggccccuggagccccaucgacaucagacaccugagcugccccaacaaccuggugguggaggacgagggcugcaccaaccugagcggcuucagcuacauggagcugaaggugggcuacaucagcgccaucaaggugaacggcuucaccugcaccggcguggugaccgaggccgagaccuacaccaacuucgugggcuacgugaccaccaccuucaagagaaagcacuucagacccaugcccgacgccugcagagccgccuacaacuggaagauggccggcgaccccagauacgaggagagccugcacaaccccuaccccgacuaccacuggcugagaaccgugaagaccaccaaggagagccuggugaucaucagccccagcguggccgaccuggaccccuacgacaagagccugcacagcagaguguuccccggcggcaagugcagcggcaucaccgugagcagcaccugcugcagcaccaaccacgacuacaccaucuggaugcccgagaaccccagacugggcaccagcugcgacaucuucaccaacagcagaggcaagagagccagcaagggcggcaagaccugcggcuucguggacgagagaggccuguacaagagccugaagggcgccugcaagcugaagcugugcggcgugcugggccugagacugauggacggcaccuggguggccauccagaccagcgacgagaucaaguggugcagccccgaccagcuggugaaccugcacgacuuccacagcgacgagaucgagcaccuggugguggaggagcuggugaagaagagagaggagugccuggacgcccuggagaccaucaugaccaccaagagcgugagcuucagaagacugagccaccugagaaagcuggugcccggcuucggcaaggccuacaccaucuucaacaagacccugauggaggccgacgcccacuacaagagcaucagaaccuggaacgagaucauccccagcaagggcugccugagagugggcggcagaugccacccccacgugaacggcguguucuucaacggcaucauccugggccccgacggccacgugcugauccccgagaugcagagcagccugcugcaccagcacauggagcugcuggagagcagcgugaucccccugaugcacccccuggccgaccccagcaccguguucaaggacggcgacgaggccgaggacuucguggaggugcaccugcccgacgugcacaagcagaucagcggcguggaccugggccugcccaacuggggcaaguacgugcugaucagcgccggcgcccugaccgcccugaugcugaugaucuuccugaugaccugcugcagaaaggccaacagagccgagagcauccagcacaaccccggcgagaccggcagaaaggugagcgugaccagccacaacggcagagugaucagcagcugggagagcuacaagagcggcggcgagaccaagcuguga

SEQ ID NO: 191428 - RNA, 1575 nt, Artificial Sequence
  derived and/or modified CDS sequence (opt4) from glycoprotein__RABV__JQ699231.1
auggugccccaggugcugcuguucgugccccugcugguguucagcagcugcuucggcaaguuccccaucuacaccauccccgacaagcugggccccuggagccccaucgacauccaccaccugagcugccccaacaaccuggugguggaggacgagggcugcaccaaccugagcggcuucagcuacauggagcugaaggugggcuacaucagcgccaucaaggugaacggcuucaccugcaccggcguggugaccgaggccgagaccuacaccaacuucgugggcuacgugaccaccaccuucaagagaaagcacuucagacccaugcccgacgccugcagagccgccuacaacuggaagauggccggcgaccccagauacgaggagagccugcacaaccccuaccccgacuaccacuggcugagaaccgugaagaccaccaaggagagccuggugaucaucagccccagcguggccgaccuggaccccuacgacaagagccugcacagcagaguguuccccggcggcaagugcagcggcaucaccgugagcagcaccugcugcagcaccaaccacgacuacaccaucuggaugcccgagaaccccagacugggcaccagcugcgacaucuucaccaacagcagaggcaagagagccagcaagggcggcaagaccugcggcuucguggacgagagaggccuguacaagagccugaagggcgccugcaagcugaagcugugcggcgugcugggccugagacugauggacggcaccuggguggccauccagaccagcgacgagaucaaguggugcagccccgaccagcuggugaaccugcacgacuuccacagcgacgagaucgagcaccuggugguggaggagcuggugaagaagagagaggagugccuggacgcccuggagaccaucaugaccaccaagagcgugagcuucagaagacugagccaccugagaaagcuggugcccggcuucggcaaggccuacaccaucuucaacaagacccugauggaggccgacgcccacuacaagagcaucagaaccuggaacgagaucauccccagcaagggcugccugagagugggcggcagaugccacccccacgugaacggcguguucuucaacggcaucauccugggccccgacggccacgugcugauccccgagaugcagagcagccugcugcaccagcacauggagcugcuggagagcagcgugaucccccugaugcacccccuggccgaccccagcaccguguucaaggacggcgacgaggccgaggacuucguggaggugcaccugcccgacgugcacaagcugaucagcggcguggaccugggccugcccaacuggggcaaguacgugcugaucagcgccggcgcccugaccgcccugaugcugaugaucuuccugaugaccugcugcagaaaggccaacagagccgagagcauccagcacaaccccggcgagaccggcagaaaggugagcgugaccagccacaacggcagagugaucagcagcugggagagcuacaagagcggcggcgagaccaagcuguga

SEQ ID NO: 191429 - RNA, 1575 nt, Artificial Sequence; identical to SEQ ID NO: 190906
  derived and/or modified CDS sequence (opt4) from glycoprotein__RABV__JQ699255.1

SEQ ID NO: 191430 - RNA, 1575 nt, Artificial Sequence; identical to SEQ ID NO: 190906
  derived and/or modified CDS sequence (opt4) from glycoprotein__RABV__JQ699257.1

SEQ ID NO: 191431 - RNA, 1575 nt, Artificial Sequence
  derived and/or modified CDS sequence (opt4) from glycoprotein__RABV__JQ699258.1
augaucccccaggugcugcuguucgugacccugcugguguucagcagcugcuucggcaaguuccccaucuacaccauccccgacaagcugggccccuggagccccaucgacauccaccaccugagcugccccaacaaccuggugguggaggacgagggcugcaccaaccugagcggcuucagcuacauggagcugaaggugggcuacaucagcgccaucaaggugaacggcuucaccugcaccggcguggugaccgaggccgagaccuacaccaacuucgugggcuacgugaccaccaccuucaagagaaagcacuucagacccaugcccgacgccugcagagccgccuacaacuggaagauggccggcgaccccagauacgaggagagccugcacaaccccuaccccgacuaccacuggcugagaaccgugaagaccaccaaggagagccuggugaucaucagccccagcguggccgaccuggaccccuacgacaagagccugcacagcagaguguuccccggcggcaagugcagcggcaucaccgugagcagcaccugcugcagcaccaaccacgacuacaccaucuggaugcccgagagccccagacugggcaccagcugcgacaucuucaccaacagcagaggcaagagagccagcaagggcggcaagaccugcggcuucguggacgagagaggccuguacaagagccugaagggcgccugcaagcugaagcugugcggcgugcugggccugagacugauggacggcaccuggguggccauccagaccagcgacgagaucaaguggugcccccccgaccagcuggugaaccugcacgacuuccacagcgacgagaucgagcaccuggugguggaggagcuggugaagaagagagaggagugccuggacgcccuggagaccaucaugaccaccaagagcgugagcuucagaagacugagccaccugagaaagcuggugcccggcuucggcaaggccuacaccaucuucaacaagacccugauggaggccgacgcccacuacaagagcaucagaaccuggaacgagaucauccccagcaagggcugccugagagugggcggcagaugccacccccacgugaacggcguguucuucaacggcaucauccugggccccgacggccacgugcugauccccgagaugcagagcagccugcugcaccagcacauggagcugcuggagagcagcgugaucccccugaugcacccccuggccgaccccagcaccguguucaaggacggcgacgaggccgaggacuucguggaggugcaccugcccgacgugcacaagcagaucagcggcguggaccugggccugcccaacuggggcaaguacgugcugaucagcgccggcgcccugaccgcccugaugcugaccaucuuccugaugaccugcugcagaaagaccaacggcgccggcagcauccagcacagccccggcgagaccggcagaaaggugagcgugaccagccacaacggcagagugaucagcagcugggagagcuacaagagcggcagcgagaccaagcuguga

SEQ ID NO: 191432 - RNA, 1575 nt, Artificial Sequence
  derived and/or modified CDS sequence (opt4) from glycoprotein__RABV__JQ699259.1
augaucccccaggcccugcuguucgugccccugcugguguucagcagcugcuucggcaaguuccccaucuacaccauccccgacaagcugggccccuggagccccaucgacauccaccaccugagcugccccaacaaccuggugguggaggacgagggcugcaccaaccugagcggcuucagcuacauggagcugaaggugggcuacaucagcgccaucaaggugaacggcuucaccugcaccggcguggugaccgaggccgagaccuacaccaacuucgugggcuacgugaccaccaccuucaagagaaagcacuucagacccaugcccgacgccugcagaagcgccuacaacuggaagauggccggcgaccccagauacgaggagagccugcacaaccccuaccccgacuaccacuggcugagaaccgugaagaccaccaaggagagccuggugaucaucagccccagcguggccgaccuggaccccuacgacaagagccugcacagcagaguguuccccagaggcaagugcagcggcaucaccgugagcagcaccugcugcagcaccaaccacgacuacaccaucuggaugcccgagaaccccagacugggcaccagcugcgacaucuucaccaacagcagaggcaagagagccagcaagggcagcaagaccugcggcuucguggacgagagaggccuguacaagagccugaagggcgccugcaagcugaagcugugcggcgugcugggccugagacugauggacggcaccuggguggccauccagaccagcaacgagaucaaguggugcccccccgaccagcuggugaaccugcacgacuuccacagcgacgagaucgagcaccuggugguggaggagcuggugaagaagagagaggagugccuggacgcccuggagaccaucaugaccaccaagagcgugagcuucagaagacugagccaccugagaaagcuggugcccggcuucggcaaggccuacaccaucuucaacaagacccugauggaggccgacgcccacuacaagagcaucagaaccuggaacgagaucauccccagcaagggcugccugagagugggcggcagaugccacccccacgugaacggcguguucuucaacggcaucauccugggccccgacggccacgugcugauccccgagaugcagagcagccugcugcaccagcacauggagcugcuggagagcagcgugaucccccugaugcacccccuggccgaccccagcaccguguucaaggacggcgacgaggccgaggacuucguggaggugcaccugcccgacgugcacaagcagaucagcggcguggaccugggccugcccaacuggggcaaguacgugcugaucagcgccggcgcccugaccgcccugaugcugaccaucuuccugaucaccugcugcagaaagaccaacagagccggcagcauccagcacagccccggcgagaccggcagaaaggugagcgugaccagccacaacggcagagugaucagcagcugggagagcuacaagagcggcagcgagaccaagcuguga

SEQ ID NO: 191433 - RNA, 1575 nt, Artificial Sequence
  derived and/or modified CDS sequence (opt4) from glycoprotein__RABV__JQ699260.1
auggugccccaggccuuccuguucgugcccuuccuggccgugccccugugcuucggcaaguuccccaucuacaccauccccgacaagcugggccccuggagccccaucgacauccaccaccugagcugccccaacaaccuggugguggaggacgagggcugcaccaaccugagcggcuucagcuacauggagcugaaggugggcuacaucagcgccaucaaggugaccggcuucaccugcaccggcguggugaccgaggccgagaccuacaccaacuucgugggcuacgugaccaccaccuucaagagaaagcacuucagacccacccccgacgccugcagaagcgccuacaacuggaagaucgccggcgaccccagauacgaggagagccugcacaaccccuaccccgacuaccacuggcugagaaccgugaagaccaccaaggagagcuucgugaucaucagccccagcguggccgaccuggaccccuacgacaagagccugcacagcagaguguuccccagaggcaagugcagcggcaucaccgugagcagcaccuacugcagcaccaaccacgacuacaccaucuggaugcccgagaaccccagacugggcaccagcugcgacaucuucaccaacagcagaggcaagagagccagcaagggcagcaagaccugcggcuucguggacgagagaggccuguacaagagccugaagggcgccugcaagcugaagcugugcggcgugcugggccugagacugauggacggcaccuggguggccauccagaccagcgacgagaccaaguggugcccccccgaccagcuggugaaccugcacgacuuccacagcgacgagaucgagcaccuggugguggaggagcuggugaagaagagagaggagugccuggacgcccuggagagcaucaugaccaccaagagcgugagcuucagaagacugagccaccugagaaagcuggugcccggcuucggcaaggccuacaccaucuucaacaagacccugauggaggccgacgcccacuacaagagcgugagaaccuggaacgagaucauccccagcaagggcugccugagagugggcggcagaugccacccccacgugaacggcguguucuucaacggcaucauccugggccccgacggccacgugcugauccccgagaugcagagcagccugcugcagcagcacauggagcugcuggagagcagcgugaucccccugaugcacccccuggccgaccccagcaccguguucaaggacggcgacgaggccgaggacuucguggaggugcaccugcccgacgugcacaagcaggugagcggcguggaccugggccugcccagcuggggcaaguacgugcugaugagcgccggcauccugaccgcccugaugcugaugaucuuccugaugaccugcugcagaagaaccaacagagccgagagcauccagcacagccugggcgagaccggcagaaaggugagcgugaccagccagaacggcagagugaucagcagcugggagagcuacaagagcggcggcgagaccaagcuguga

SEQ ID NO: 191434 - RNA, 1575 nt, Artificial Sequence
  derived and/or modified CDS sequence (opt4) from glycoprotein__RABV__JQ699262.1
auggugccccaggcccugcuguucgugccccugcuggccgugccccugugcuucggcaaguuccccaucuacaccauccccgacaagcugggccccuggagccccaucgacauccaccaccugagcugccccaacaaccuggugguggaggacgagggcugcaccaaccugagcggcuucagcuacauggagcugaaggugggcuacaucagcgccaucaaggugaccggcuucaccugcaccggcguggugaccgaggccgagaccuacaccaacuucgugggcuacgugaccaccaccuucaagagaaagcacuucagacccacccccgacgccugcagaagcgccuacaacuggaagaucgccggcgaccccagauacgaggagagccugcacaaccccuaccccgacuaccacuggcugagaaccgugaagaccaccaaggagagcuucgugaucaucagccccagcguggccgaccuggaccccuacgacaagagccugcacagcagaguguuccccagaggcaagugcagcggcaucaccgugagcagcaccuacugcagcaccaaccacgacuacaccaucuggaugcccgagaaccccagacugggcaccagcugcgacaucuucaccaacagcagaggcaagagagccagcaagggcagcaagaccugcggcuucguggacgagagaggccuguacaagagccugaagggcgccugcaagcugaagcugugcggcgugcugggccugagacugauggacggcaccuggguggccauccagaccagcgacgagaccaaguggugcccccccgaccagcuggugaaccugcacgacuuccacagcgacgagaucgagcaccuggugguggaggagcuggugaagaagagagaggagugccuggacgcccuggagagcaucaugaccaccaagagcgugagcuucagaagacugagccaccugagaaagcuggugcccggcuucggcaaggccuacaccaucuucaacaagacccugauggaggccgacgcccacuacaagagcgugagaaccuggaacgagaucauccccagcaagggcugccugagagugggcggcagaugccacccccacgugaacggcguguucuucaacggcaucauccugggccccgacggccacgugcugauccccgagaugcagagcagccugcugcagcagcacauggagcugcuggagagcagcgugaucccccugaugcacccccuggccgaccccagcaccguguucaaggacggcgacgaggccgaggacuucguggaggugcaccugcccgacgugcacaagcaggugagcggcguggaccugggccugcccagcuggggcaaguacgugcugaugagcgccggcauccugaccgcccugaugcugaugaucuuccugaugaccugcugcagaagaaccaacagagccgagagcauccagcacagccugggcgagaccggcagaaaggugagcgugaccagccagaacggcagagugaucagcagcugggagagcuacaagagcggcggcgagaccaagcuguga

SEQ ID NO: 191435 - RNA, 1575 nt, Artificial Sequence
  derived and/or modified CDS sequence (opt4) from glycoprotein__RABV__JQ699264.1
auggugccccaggcccugcuguucgugccccugcuggccgugccccugugcuucggcaaguuccccaucuacaccauccccgacaagcugggccccuggagccccaucgacauccaccaccugagcugccccaacaaccuggugguggaggacgagggcugcaccaaccugagcggcuucagcuacauggagcugaaggugggcuacaucagcgccaucaaggugaacggcuucaccugcaccggcguggugaccgaggccgagaccuacaccaacuucgugggcuacgugaccaccaccuucaagagaaagcacuucagacccacccccgacgccugcagaagcgccuacaacuggaagauggccggcgaccccagauacgaggagagccugcacaaccccuaccccgacuaccacuggcugagaaccgugaagaccaccaaggagagcuucgugaucaucagccccagcguggccgaccuggaccccuacgacaagagccugcacagcagaguguuccccagaggcaagugcagcggcaucaccgugagcagcaccuacugcagcaccaaccacgacuacaccaucuggaugcccgagaaccccagacugggcaccagcugcgacaucuucaccaacagcagaggcaagagagccagcaagggcagcaagaccugcggcuucguggacgagagaggccuguacaagagccugaagggcgccugcaagcugaagcugugcggcgugcugggccugagacugauggacggcaccuggguggccauccagaccagcgacgagaccaaguggugcccccccgaccagcuggugaaccugcacgacuuccacagcgacgagaucgagcaccuggugguggaggagcuggugaagaagagagaggagugccuggacgcccuggagagcaucaugaccaccaagagcgugagcuucagaagacugagccaccugagaaagcuggugcccggcuucggcaaggccuacaccaucuucaacaagacccugauggaggccgacgcccacuacaagagcaucagaaccuggaacgagaucauccccagcaagggcugccugagagugggcggcagaugccacccccacgugaacggcguguucuucaacggcaucauccugggccccgacggccacgugcugauccccgagaugcagagcagccugcugcagcagcacauggagcugcuggagagcagcgugaucccccugaugcacccccuggccgaccccagcaccguguucaaggacggcgacgaggccgaggacuucguggaggugcaccugcccgacgugcacaagcaggugagcggcguggaccugggccugcccagcuggggcaaguacgugcugaugagcgccggcauccugaccgcccugaugcugaugaucuuccugaugaccugcugcagaagaaccaacagagccgagagcauccagcacagccugggcgagaccggcagaaaggugagcgugaccagccagaacggcagagugaucagcagcugggagagcuacaagagcggcggcgagaccaagcuguga

SEQ ID NO: 191436 - RNA, 1575 nt, Artificial Sequence; identical to SEQ ID NO: 191113
  derived and/or modified CDS sequence (opt4) from glycoprotein__RABV__JQ699267.1

SEQ ID NO: 191437 - RNA, 1575 nt, Artificial Sequence; identical to SEQ ID NO: 190587
  derived and/or modified CDS sequence (opt4) from glycoprotein__RABV__JQ699272.1

SEQ ID NO: 191438 - RNA, 1575 nt, Artificial Sequence
  derived and/or modified CDS sequence (opt4) from glycoprotein__RABV__JQ730682.1
augaucccccagacccugcuguucgugccccugcugguguucagccugugcuucggcaaguuccccaucuacaccauccccgacaagcugggccccuggagccccaucgacauccaccaccugagcugccccaacaaccuggugguggaggacgagggcugcaccaaccugagcggcuucagcuacauggagcugaaggugggcuacaucagcgccaucaaggugaacggcuucaccugcaccggcguggugaccgaggccgagaccuacaccaacuucgugggcuacgugaccaccaccuucaagagaaagcacuucagacccacccccgacgccugcagagccgccuacaacuggaagauggccggcgaccccagauacgaggagagccugcacaaccccuaccccgacuaccacuggcugagaaccgugaagaccaccaaggagagccuggugaucaucagccccagcgugagcgaccuggaccccuacgacaagagccugcacagcagaguguuccccagcggcaagugcagcggcaucaccgugagcagcaccuacugccccaccaaccacgacuacaccaucuggaugcccgagaaccccagacugggcaccagcugcgacaucuucaccaacagcagaggcaagagagccagcaagggcagcaagaccugcggcuucguggacgagagaggccuguacaagagccugaagggcgccugcaagcugaagcugugcggcgugcugggccugagacugauggacggcaccugggccgccauccagaccagcgacgaggccaaguggugcccccccgaccagcuggugaacauccacgacuucagaagcgacgagaucgagcaccuggugguggaggagcuggugaagaagagagaggagugccuggacgcccuggagagcaucaugaccaccaagagcgugagcuucagaagacugagccaccugagaaagcuggugcccggcuucggcaaggccuacaccaucuucaacaagacccugauggaggccgacgcccacuacaagagcgugagaaccuggaacgagaucauccccagcaagggcugccugagagugggcggcagaugccacccccacgugaacggcguguucuucaacggcaucauccugggccccgacggccacgugcugauccccgagaugcagagcagccugcugcagcagcacauggagcugcuggagagcagcgugaucccccugaugcacccccuggccgaccccagcaccguguucaaggacggcgacgaggccgaggacuucguggaggugcaccugcccgacgugcacaagcaggugagcggcguggaccugggccugcccagcuggggcaaguacgugcugaugagcgugggcacccugaucgcccugaugcugaugauccugcugaccaccugcugcagaaaggccaacggcgccgagagcauccagcacagacugggcgagaccggcagaaaggugagcgugaccagccagaacggcagagugaucagcagcugggagagcuacaagagcggcggcgagaccaagcuguga

SEQ ID NO: 191439 - RNA, 1575 nt, Artificial Sequence
  derived and/or modified CDS sequence (opt4) from glycoprotein__RABV__JQ824889.1
augaucccccacgcccugcugagcgugccccugcugaucagcagccugugcuucggcaaguuccccaucuacaccauccccgagaagcugggccccuggagccccaucgacauccaccaccugagcugccccaacaaccuggugguggaggacgagggcugcaacagccugagcggcuucagcuacauggagcugaaggugggcuacaucagcgccaucaaggugaacggcuucaccugcaccggcguggugaccgaggccgagaccuacaccaacuucgugggcuacgugaccaccaccuucaagagaaagcacuucagacccaugcccgacgccugcagagccgccuacaacuggaagaccgccggcgaccccagauacgaggagagccugcacaaccccuaccccgacuaccacuggcugagaaccgugaagaccaccaaggagagccugaucaucaucagccccagcguggccgaccuggaccccuacgacaagagccugcacagcagaaucuuccccggcggcaagugccugggcaucaccaucagcagcaccuacugcagcaccaaccacgacuacaccaucuggaugcccgaggaggccagacugggcaccagcugcgacaucuucaccaacagcaagggcaagagagccagcaagggcggcagaaccugcggcuucguggacgagagaggccuguacaagagccugaagggcgccugcaagcugaagcugugcggcgugcccggccugagacugauggacggcaccuggguggccauccagacccccaacgagaccaaguggugcagccccgaccagcuggugaacgugcacgacuucagaagcgacgagaucgagcaccuggugguggaggagcugaucagaaagagagaggagugccuggacgcccuggagagcaucaugaccaccaagagcgugagcuucagaagacugagcaaccugagaaagcuggugcccggcuucggcaaggccuacaccaucuucaacaagacccugauggaggccgacgcccacuacaagagcgugagaaccuggaacgagaucauccccagcagaggcugccugaaggugggcggcagaugccacccccacgugaacggcguguucuucaacggcaucauccugggccccgacggccacauccugauccccgagaugcagagcagccugcugcagcagcacauggagcugcuggagagcagcgugaucccccugauccacccccuggccgaccccagcaccguguucaaggacggcgacgaggccgaggacuucguggaggugcaccugcccgacgugcaccagcaggugagcggcguggaccugggccugcccgacuggggcaaguacgugcugaugagcgccggcgcccuggccaccgugaugcugaccaucuuccugaucaccugcugcagaagagugaagagaaccgagagcgugcagcagggccugggcgagagcggcagaaaggugagcguggccccccagaacggcaaggugaugagcagcugggaguacuacaagagcggcggcggcaccagacuguga

SEQ ID NO: 191440 - RNA, 1575 nt, Artificial Sequence
  derived and/or modified CDS sequence (opt4) from glycoprotein__RABV__JQ944704.1
auggacccccaggcccugcugcuggugccccugcugggcuucagccugugcuucggcaaguuccccaucuacaccauccccgacaagcugggccccuggauccccaucgacauccaccaccugagcugccccaacaaccuggugguggaggacgagggcugcaccaaccugagcggcuucagcuacauggagcugaaggugggcuacaucagcagcaucaaggugaacggcuucaccugcaccggcguggugaccgaggccgagaccuacaccaacuucgugggcuacgugaccaccaccuucagaagaaagcacuucagacccacccccgacgccugcagagccgccuacaacuggaagauggccggcgaccccagauacgaggagagccugcacaaccccuaccccgacuaccacuggcugagaaccgugaagaccaccaaggagagccuggugaucaucagccccagcguggccgaccuggaccccuacgacaagagccugcacagcagaguguuccccagcggcaagugcagcggcaucaccgugagcagcaccuacugcagcaccaaccacgacuacaccaucuggaugcccgagaaccugagacugggcaccagcugcgacaucuucaccaacagcagaggcaagagagccagcaagggcagcaagaccugcggcuucguggacgagagaggccuguacaagagccugaagggcgccugcaagcugaagcugugcggcgugcugggccugagacugauggacggcaccuggguggccaugcagaccagcgacgagaccaaguggugcccccccgaccagcuggugaaccugcacgacuucagaagcgacgagaucgagcaccuggugguggaggagcuggugaagaagagagaggagugccuggacgcccuggagagcaucaugaccaccaagagcgugagcuucagaagacugagccaccugagaaagcuggugcccggcuucggcaaggccuacaccaucuucaacaagacccugauggaggccgacgcccacuacaagagcgugagaaccuggaacgaggugauccccagcagaggcugccugagagugggcggcagaugccacccccacgugaacggcguguucuucaacggcaucauccugggccccgacggccacgugcugauccccgagaugcagagcagccugcugcagcagcacaucgagcugcuggagagcagcgugaucccccugaugcacccccuggccgaccccagcaccguguucaaggacggcgacgaggccgaggacuucguggaggugcaccugcccgacgugcacaagcaggugagcggcguggaccugggccugcccaacuggggcaaguacgugcugcugagcgccggcgcccugaucgcccugaugcugaucaucuuccugaucaccugcugcagaagagugaacagacccgagagcacccagagaagccugagaggcgccggcagaaaggugagcaucaccagccagagcggcaaggugaucagcagcugggagagcuacaagagcggcggcgagaccagacuguga

SEQ ID NO: 191441 - RNA, 1575 nt, Artificial Sequence
  derived and/or modified CDS sequence (opt4) from glycoprotein__RABV__JQ944705.1
auggugccccagguguuccuguucgugccccugcugguguucccccugugcagcggcaaguuccccaucuacaccauccccgacaagcugggccccuggagccccaucgacauccaccaccugagcugccccaacaaccuggugguggaggacgagggcugcaccaaccugagcggcuucagcuacauggagcugaaggugggcuacaucagcgccaucaaggugaacggcuucaccugcaccggcguggugaccgaggccgagaccuacaccaacuucgugggcuacgugaccaccaccuucagaagaaagcacuucagacccacccccgacgccugcagagccgccuacaacuggaagauggccggcgaccccagauacgaggagagccugcacaaccccuaccccgacuaccacuggcugagaaccgugaagaccaccaaggagagccuggugaucaucagccccagcguggccgaccuggaccccuacgacaagagccugcacagcagaguguuccccagcggcaagugccugggcaucaccgugagcagcacccacugcagcaccaaccacgacuacaccaucuggaugcccgagaaccccagacccggcaccagcugcgacaucuucaccaacagcagaggcaagagagccagcaagggcagcaagaccugcggcuucguggacgagagaggccuguacaagagccugaagggcgccugcaagcugaagcugugcggcgugcugggccugagacugauggacggcaccuggguggccaugcagaccagcgacgagaccaaguggugcccccccgaccagcuggugaaccugcacgacuucagaagcgacgagaucgagcaccuggugguggaggagcuggugaagaagagagaggagugccuggacgcccuggagagcaucaugaccaccaagagcgugagcuucagaagacugagccaccugagaaagcuggugcccggcuucggcaaggccuacaccaucuucaacaagacccugauggaggccgacgcccacuacaagagcgugagaaccuggaacgagaucauccccagcaagggcugccugagagugggcggcagaugccacccccacgugaacggcguguucuucaacggcaucauccugggccccgacggccacgugcugauccccgagaugcagagcagccugcugcagcagcacauggagcugcuggagagcagcgugaucccccugaugcacccccuggccgaccccagcaccguguucaaggacggcgacgaggccgaggacuucguggaggugcaccugcccgacgugcacaagcaggugagcggcguggaccugggccugcccaacuggggcaaguacgugcugcugagcgccggcgcccugaucgcccugaugcugaugaucuuccugaugaccugcugcagaaaggugaacagacccgagagcacccagagaagccugggcggcaccggcagaaaggugagcaucaccagccagagcggcaaggugaucagcagcugggagagcuacaagagcggcggcgagaccagacuguga

SEQ ID NO: 191442 - RNA, 1575 nt, Artificial Sequence
  derived and/or modified CDS sequence (opt4) from glycoprotein__RABV__JQ944706.1
auggccccccaggcccugcuguucgugccccugcugguguucccccugugcuucggcaaguuccccaucuacaccauccccgacaagcugggccccuggagccccaucgacauccaccaccugagcugccccaacaaccuggugguggaggacgagggcugcaccaaccugagcggcuucagcuacauggagcugaaggugggcuacaucagcgccaucaaggugaacggcuucaccugcaccggcguggugaccgaggccgagaccuacaccaacuucgugggcuacgugaccaccaccuucaagagaaagcacuucagacccauccccgacgccugcagagccgccuacaacuggaagauggccggcgaccccagauacgaggagagccugcacaaccccuaccccgacuaccacuggcugagaaccgugaagaccaccaaggagagccuggugaucaucagccccagcguggccgaccuggaccccuacgacaagagccugcacagcagaguguuccccagcggcaagugcagcggcaucaccgugagcagcaccuacugcagcaccaaccacgacuacaccaucuggaugcccgagaaccccagacugggcaccagcugcgacaucuucgccaacagcagaggcaagagagccagcaagggcagcaagaccugcggcuucguggacgagagaggccuguacaagagccugaagggcgccugcaagcugaagcugugcggcgugcugggccugagacugauggacggcaccuggguggccaugcagaccagcgacgagaccaaguggugcccccccgaccagcuggugaaccugcacgacuucagaagcgacgagaucgagcaccuggugguggaggagcuggugaagaagagagaggagugccuggacgcccuggagagcaucaugaccaccaagagcgugagcuucagaagacugagccaccugagaaagcuggugcccggcuucggcaaggccuacaccaucuucaacaagacccugauggaggccgacgcccacuacaagagcgugagaaccuggaacgagaucauccccagcaagggcugccugagagugggcggcagaugccacccccacgugaacggcguguucuucaacggcaucauccugggccccgacggccacgugcugauccccgagaugcagagcagccugcugcagcagcacauggagcugcuggagagcagcgugaucccccugaugcacccccuggccgaccccagcaccguguucaaggacggcgacgaggccgaggacuucguggaggugcaccugcccgacgugcacaagcaggugagcggcguggaccugggccugcccaacuggggcaaguacgugcugcugagcgccggcgcccugaucgcccugaugcugaucaucuuccugaugaccugcugcagaagagugaacagacccgagagcacccagagaugccugggcggcaccggcagaaaggugagcgugaccagccagagcggcaaggugaucagcagcugggagagcuacaagagcggcggcgagaccagacuguga

SEQ ID NO: 191443 - RNA, 1575 nt, Artificial Sequence
  derived and/or modified CDS sequence (opt4) from glycoprotein__RABV__JQ944707.1
augaucccccaggcccugcuguucgugccccugcuggccuuccccaugugcuucggcaaguuccccaucuacaccauccccgacaagcugggccccuggagccccaucgacauccaccaccugagcugccccaacaaccuggugguggaggacgagggcugcaccaaccugagcggcuucagcuacauggagcugaaggugggcuacaucagcgccaucaaggugaacggcuucaccugcaccggcgugaucaccgaggccgagaccuacaccaacuucgugggcuacgugaccaccaccuucaagagaaagcacuucagacccacccccgacgccugcagagccgccuacaacuggaagauggccggcgaccccagauacgaggagagccugcacaaccccuaccccgacuaccacuggcugagaaccgugaagaccaccaaggagagccugaucaucaucagccccagcguggccgaccuggaccccuacgacaagagccugcacagcagaguguuccccagcggcaagugccugggcaucaccaucagcagcaccuacugcagcaccaaccacgacuacaccaucuggaugcccgagaaccugagacugggcaccagcugcgacaucuucaccaacagcagaggcaagagagccagcaagggcagcaagaccugcggcuucguggacgagagaggccuguacaagagccugaagggcgccugcaagcugaagcugugcggcgugcugggccugagacugauggacggcaccuggguggccaugcagaccagcgacgagaccaaguggugcccccccgaccagcuggugaaccugcacgacuucagaagcgacgagaucgagcaccuggugguggaggagcuggugaagaagagagaggagugccuggacgcccuggagagcaucaugaccaccaagagcgugagcuucagaagacugagccaccugagaaagcuggugcccggcuucggcaaggccuacaccaucuucaacaagacccugauggaggccgacgcccacuacaagagcgugagaaccuggaacgagaucauccccagcaagggcugccugagagugggcggcagaugccacccccacgugaacggcguguucuucaacggcaucauccugggccccgacggccacgugcugauccccgagaugcagagcagccugcugcagcagcacauggagcugcuggagagcagcgugaucccccugaugcacccccuggccgaccccagcaccguguucaaggacggcgacgaggccgaggacuucguggaggugcaccugcccgacgugcacaagcagaucagcggcguggaccugggccugcccaacuggggcaaguacgugcugaucaucgccggcgugcugaucgccaugauccugaccaucuuccugaugaccugcugcggcagaggcaacagacccaagagcacccagcacagccugggcggcaucggcagaaaggugagcgccaccagccagagcggcaaggugaucagcagcugggagagcuacaagagcggcggcgagaccagacuguga

SEQ ID NO: 191444 - RNA, 1575 nt, Artificial Sequence
  derived and/or modified CDS sequence (opt4) from glycoprotein__RABV__JQ944708.1
auggugccccaggcccugcuguucgugccccugcugguguucccccugugcuucggcaaguuccccaucuacaccauccccgacaagcugggccccuggagccccaucgacauccaccaccugagcugccccaacaaccuggugguggaggacgagggcugcaccaaccugagcggcuucagcuacauggagcugaaggugggcuacaucagcgccaucaaggugaacggcuucaccugcaccggcguggugaccgaggccgagaccuacaccaacuucgugggcuacgugaccaccaccuucaagagaaagcacuucagacccacccccgacgccugcagagccgccuacaacuggaagaccgccggcgaccccagauacgaggagagccugcacaaccccuaccccgacuaccacuggcugagaaccgugaagaccaccaaggagagccuggugaucaucagccccagcguggccgaccuggaccccuacgacaagagccugcacagcagaguguuccccagcggcaagugcagcggcaucaccgugagcagcaccuacugcagcaccaaccacgacuacaccaucuggaugcccgagaaccugagacugggcaccagcugcgacaucuucaucaacagcagaggcaagagagccagcaagggcagccagaccugcggcuucaucgacgagagaggccuguacaagagccugaagggcgccugcaagcugaagcugugcggcgugcugggccugagacugauggacggcaccuggguggccaugcagaccagccacgagaccaaguggugcccccccgaccagcuggugaaccugcacgacuucagaagcgacgagaucgagcaccuggugguggaggagcuggugaagaagagagaggagugccuggacgcccuggagagcaucaugaccaccaagagcgugagcuucagaagacugagccaccugagaaagcuggugcccggcuucggcaaggccuacaccaucuucaacaagacccugauggaggccgacgcccacuacaagagcgugagaaccuggaacgagaucauccccagcaagggcugccugagagugggcggcagaugccacccccacgugaacggcguguucuucaacggcaucauccugggccccgagggccacgugcugauccccgagaugcagagcagccugcugcagcagcacauggagcugcuggagagcagcgugaucccccugaugcacccccuggccgaccccagcaccguguucaaggagggcgacgaggccgagaacuucguggaggugcaccugcccgacgugcacaagcaggugagcggcguggaccugggccugcccaacuggggcaaguacgugcugcugagcagcggcgcccugaucgcccugaugcugaucaucuuccugcugaccugcugcagaagagugaacagacccgagagcacccagcacagccugggcggcaagagaagaaaggugagcaucaccagccagagcggcaaggugaucagcagcugggagagcuacaagagcggcggcgagaccagacuguga

SEQ ID NO: 191445 - RNA, 1575 nt, Artificial Sequence
  derived and/or modified CDS sequence (opt4) from glycoprotein__RABV__JQ944709.1
auggugccccaggugcugcuguucgugccccugcugggcuucagccugugcuucggcaaguuccccaucuacaccauccccgacgagcugggccccuggagccccaucgacauccaccaccugagcugccccaacaaccuggugguggaggacgagggcugcaccaaccugagcgaguucagcuacauggagcugaaggugggcuacaucagcgccaucaaggugaacggcuucaccugcaccggcguggugaccgaggccgagaccuacaccaacuucgugggcuacgugaccaccaccuucaagagaaagcacuucagacccacccccgacgccugcagagccgccuacaacuggaagauggccggcgaccccagauacgaggagagccugcacaaccccuaccccgacuaccacuggcugcagaccgugagaaccaccaaggagagccugaucaucaucagccccagcgugaccgaccuggaccccuacgacaagagccugcacagcagaguguuccccggcggcaagugcagcggcaucaccgugagcagcaccuacugcagcaccaaccacgacuacaccaucuggaugcccgagaaccccagacccagaacccccugcgacaucuucaccaacagcagaggcaagagagccagcaagggcaacaagaccugcggcuucguggacgagagaggccuguacaagagccugaagggcgccugcagacugaagcugugcggcgugcugggccugagacugauggacggcaccuggguggccaugcagaccagcgacgagaccaaguggugcccccccgaccagcuggugaaccugcacgacuucagaagcgacgagaucgagcaccuggugguggaggagcuggugaagaagagagaggagugccuggacgcccuggagagcaucaugaccaccaagagcgugagcuucagaagacugagccaccugagaaagcuggugcccggcuucggcaaggccuacaccaucuucaacaagacccugauggaggccgacgcccacuacaagagcgugagaaccuggaacgagaucauccccagcaagggcugccugaaggugggcggcagaugccacccccacgugaacggcguguucuucaacggcaucauccugggccccgacggccacgugcugauccccgagaugcagagcagccugcugcagcagcacauggagcugcuggagagcagcgugaucccccugaugcacccccuggccgaccccagcaccguguucaaggagggcgacgaggccgaggacuucguggaggugcaccugcccgacguguacaagcagaucagcggcguggaccugggccugcccaacuggggcaaguacgugcugaugaccgccggcgccaugaucggccuggugcugaucuucagccugaugaccuggugcagaagagccaacagacccgagagcaagcagagaagcuucggcggcaccggcagaaacgugagcgugaccagccagagcggcaaggugauccccagcugggagagcuacaagagcggcggcgagaucagacuguga

SEQ ID NO: 191446 - RNA, 1575 nt, Artificial Sequence
  derived and/or modified CDS sequence (opt4) from glycoprotein__RABV__JQ950447.1
augaucccccaggccuuccuguucgugccccugcugguggugccccugugcuucggcaaguuccccaucuacaccauccccgacaagcugggccccuggagccccaucgacauccaccaccugagcugccccaacaaccuggugguggaggacgagggcugcaccaaccugagcggcuucagcuacauggagcugaaggugggcuacaucagcgccaucaaggugaacggcuucaccugcaccggcguggugaccgaggccgagaccuacaccaacuucgugggcuacgugaccaccaccuucaagagaaagcacuucagacccacccccgacgccugcagaagcgccuacaacuggaagauggccggcgaccccagauacgaggagagccugcacaaccccuaccccgacuaccacuggcugagaaccgugaagaccaccaaggagagcuucgugaucaucagccccagcguggccgaccuggaccccuacgacaagagccugcacagcagaguguuccccagaggcaagugcagcggcaucaccgugagcagcaccuacugccccaccaaccacgacuacaccaucuggaugcccgagaaccccagacugggcaccagcugcgacaucuucaccaacagcagaggcaagagagccuucaagggcagcaagaccugcggcuucguggacgagagaggccuguacaagagccugaagggcgccugcaagcugaagcugugcggcgugcugggccugagacugauggacggcaccuggguggccauccagaccagcgacgagaccaaguggugcccccccgaccagcuggugaaccugcacgacuuccacagcgacgagaucgagcaccuggugguggaggagcuggugaagaagagagaggagugccuggacgcccuggagagcaucaugaccaccaagagcgugagcuucagaagacugagccaccugagaaagcuggugcccggcuucggcaaggccuacaccaucuucaacaagacccugauggaggccgacgcccacuacaagagcgugagaaccuggaacgagaucauccccagcaagggcugccugagagugggcggcagaugccacccccacgugaacggcguguucuucaacggcaucauccugggccccgacggccacgugcugauccccgagaugcagagcagccugcugcagcagcacauggagcugcuggagagcagcgugaucccccugaugcacccccuggccgaccccagcaccguguucaagaacggcgacgaggccgaggacuucguggaggugcaccugcccgacgugcacaagcaggugagcggcguggaccugggccugcccagcuggggcaaguacgugcugaugagcgccggcauccugaccgcccugaugcugaugaucuuccugaugaccugcugcagaagaaccaacagaagcgagagcauccagcacagccugggcgagaccggcagaaaggugagcgugaccagccagagcggcagagugaucagcagcugggagagcuacaagagcggcggcgagaccaagcuguga

SEQ ID NO: 191447 - RNA, 1575 nt, Artificial Sequence
  derived and/or modified CDS sequence (opt4) from glycoprotein__RABV__JQ950449.1
augaucccccaggccuuccuguucgugccccugcugguggugccccugugcuucggcaaguuccccaucuacaccauccccgacaagcugggccccuggagccccaucgacauccaccaccugagcugccccaacaaccuggugguggaggacgagggcugcaccaaccugagcggcuucagcuacauggagcugaaggugggcuacaucagcgccaucaaggugaacggcuucaccugcaccggcguggugaccgaggccgagaccuacaccaacuucgugggcuacgugaccaccaccuucaagagaaagcacuucagacccacccccgacgccugcagaagcgccuacaacuggaagauggccggcgaccccagauacgaggagagccugcacaaccccuaccccgacuaccacuggcugagaaccgugaagaccaccaaggagagcuucgugaucaucagccccagcguggccgaccuggaccccuacgacaagagccugcacagcagaguguuccccagaggcaagugcagcggcaugaccgugagcagcaccuacugccccaccaaccacgacuacaccaucuggaugcccgagaaccccagacugggcaccagcugcgacaucuucaccaacagcagaggcaagagagccuucaagggcagcaagaccugcggcuucguggacgagagaggccuguacaagagccugaagggcgccugcaagcugaagcugugcggcgugcugggccugagacugauggacggcaccuggguggccauccagaccagcgacgagaccaaguggugcccccccgaccagcuggugaaccugcacgacuuccacagcgacgagaucgagcaccuggugguggaggagcuggugaagaagagagaggagugccuggacgcccuggagagcaucaugaccaccaagagcgugagcuucagaagacugagccaccugagaaagcuggugcccggcuucggcaaggccuacaccaucuucaacaagacccugauggaggccgacgcccacuacaagagcgugagaaccuggaacgagaucauccccagcaagggcugccugagagugggcggcagaugccacccccacgugaacggcguguucuucaacggcaucauccugggccccgacggccacgugcugauccccgagaugcagagcagccugcugcagcagcacauggagcugcuggagagcagcgugaucccccugaugcacccccuggccgaccccagcaccguguucaagaacggcgacgaggccgaggacuucguggaggugcaccugcccgacgugcacaagcaggugagcggcguggaccugggccugcccagcuggggcaaguacgugcugaugagcgccggcauccugaccgcccugaugcugaugaucuuccugaugaccugcugcagaagaaccaacagaagcgagagcauccagcacagccugggcgagaccggcagaaaggugagcgugaccagccagagcggcagagugaucagcagcugggagagcuacaagagcggcggcgagaccaagcuguga

SEQ ID NO: 191448 - RNA, 1575 nt, Artificial Sequence
  derived and/or modified CDS sequence (opt4) from glycoprotein__RABV__JX088694.1
auggugccccaggcccugcuguucgugccccugcuggccgugccccugugcuucggcaaguuccccaucuacaccauccccgacaagcugggccccuggagccccaucgacauccaccaccugagcugccccaacaaccuggugguggaggacgagggcugcaccaaccugagcggcuucagcuacauggagcugaaggugggcuacaucagcgccaucaaggugaacggcuucaccugcaccggcguggugaccgaggccgagaccuacaccaacuucgugggcuacgugaccaccgccuucaagagaaagcacuucagacccacccccgacgccugcagaagcgccuacaacuggaagauggccggcgaccccagauacgaggagagccugcacaaccccuaccccgacuaccacuggcugagaaccgugaagaccaccaaggagagcuucgugaucaucagccccagcguggccgaccuggaccccuacgacaagagccugcacagcagaguguuccccagaggcaagugcagcggcaucaccgugagcagcaccuacugcagcaccaaccacgacuacaccaucuggaugcccgagaaccccagacugggcaccagcugcgacaucuucaccaacagcagaggcaagagagccagcaagggcagcaagaccugcggcuucguggacgagagaggccuguacaagagccugaagggcgccugcaagcugaagcugugcggcgugcugggccugagacugauggacggcaccuggguggccauccagaccagcgacgagaccaaguggugcccccccgaccagcuggugaaccugcacgacuuccacagcgacgagaucgagcaccuggugguggaggagcuggugaagaagagagaggagugccuggacgcccuggagagcaucaugaccaccaagagcgugagcuucagaagacugagccaccugagaaagcuggugcccggcuucggcaaggccuacaccaucuucaacaagacccugauggaggccgacgcccacuacaagagcgugagaaccuggaacgagaucauccccagcaagggcugccugagagugggcggcagaugccacccccacgugaacggcguguucuucaacggcaucauccugggccccgacggccacgugcugauccccgagaugcagagcagccugcugcagcagcacauggagcugcuggagagcagcgugaucccccugaugcacccccuggccgaccccagcaccguguucaaggacggcgacgaggccgaggacuucguggaggugcaccugcccgacgugcacaagcaggugagcggcguggaccugggccugcccagcuggggcaaguacgugcugaugagcgccggcauccugaccgcccugaugcugaugaucuuccugaugaccugcugcagaagaaccaacagagccgagagcauccagcacagccugggcgagaccggcagaaaggugagcgugaccagccagaacggcagagugaucagcagcugggagagcuacaagagcggcggcgagaccaagcuguga

SEQ ID NO: 191449 - RNA, 1575 nt, Artificial Sequence
  derived and/or modified CDS sequence (opt4) from glycoprotein__RABV__JX473838.1
auggugccccaggcccugcuguucaucccccugcugguguucccccugugccugggcaaguuccccaucuacaccauccccgacaagcugggccccuggagccccaucgacauccaccaccugagcugccccaacaaccuggugguggaggacgagggcugcaccaaccugagcggcuucagcuacauggagcugaaggugggcuacaucagcgccaucaaggugaacggcuucaccugcaccggcguggugaccgaggccgagaccuacaccaacuucgugggcuacgugaccaccaccuucaagagaaagcacuucagacccauccccgacgccugcagagccgccuacaacuggaagauggccggcgaccccagauacgaggagagccugcacaaccccuaccccgacuaccacuggcugagaaccgugaagaccaccaaggagagccuggugaucaucagccccagcguggccgaccuggaccccuacgacaagagccugcacagcagaaucuuccccagcggcaagugcagcggcaucaccgugagcagcaccuacugcagcaccaaccacgacuacaccaucuggaugcccgagaaccccagacugggcaccagcugcgacaucuucgccaacagcagaggcaagagagccagcaagggcggcaagaccugcggccugguggacgagagaggccuguacaagagccugaagggcgccugcaagcugaagcugugcggcgugcugggccugagacugauggacggcaccuggguggccaugcagaccagcgacgagaccaaguggugcccccccgaccagcuggugaacaugcacgacuucagaagcgacgagaucgagcaccuggugguggaggagcuggugaagaagagagaggagugccuggacgcccuggagagcaucaugaccaccaagagcgugagcuucagaagacugagccaccugagaaagcuggugcccggcuucggcaaggccuacaccaucuucaacaagacccugauggaggccgacgcccacuacaagagcgugagaaccuggaacgagaucauccccagcaagggcugccugagagugggcggcagaugccacccccacgugaacggcguguucuucaacggcaucauccugggccccgacggccacgugcugauccccgagaugcagagcagccugcugcagcagcacauggagcugcuggagagcagcgugaucccccugaugcacccccuggccgaccccagcaccguguucaaggacggcgacgaggccgaggacuucguggaggugcaccugcccgacgugcacaagcaggugagcggcguggaccugggccugcccaacuggggcaaguacgugcugcugagcgccggcacccugaucgcccugaugcugaucaucuuccugaugaccugcugcagaagagugaacagacccgagagcacccagagaagccugggcggcgccggcagaagagugagcgugaccagccagagcggcaaggugaucagcagcugggagagcuacaagagcggcggcgagaccagacuguga

SEQ ID NO: 191450 - RNA, 1575 nt, Artificial Sequence; identical to SEQ ID NO: 191449
  derived and/or modified CDS sequence (opt4) from glycoprotein__RABV__JX473839.1

SEQ ID NO: 191451 - RNA, 1575 nt, Artificial Sequence
  derived and/or modified CDS sequence (opt4) from glycoprotein__RABV__JX473840.1
auggugcccagagcccugcuguucaucccccugcugguguucagccugugcuucggcaaguuccccaucuacaccauccccgacaagcugggccccuggaaccccaucgacauccaccaccugagcugccccaacaaccuggugguggaggacgagggcugcaccaaccugagcggcuucagcuacauggagcugaaggugggcuacaucagcgccaucaaggugaacggcuucaccugcaccggcguggugaccgaggccgagaccuacaccaacuucgugggcuacgugaccaccaccuucaagagaaagcacuucagacccauccccgacaccugcagagccgccuacaacuggaagauggccggcgaccccagauacgaggagagccugcacaaccccuaccccgacuaccacuggcugagaaccgugaagaccaccaaggagagccuggugaucaucagccccagcguggccgaccuggaccccuacgacaagagccugcacagcagaaucuuccccagcggcaagugcagcggcaucaccgugagcagcaccuacugcagcaccagccacgacuacaccaucuggaugcccgagaaccccagacugggcaccagcugcgacaucuucgccaacagcagaggcaagagagccagcaagggcggcaagaccugcggccugguggacgagagaggccuguacaagagccugaagggcgccugcaagcugaagcugugcggcgugcugggccugagacugauggacggcaccuggguggccaugcagaccagcgacgagaccaaguggugcccccccgaccagcuggugaacaugcacgacuucagaagcgacgagaucgagcaccuggugguggaggagcuggugaagaagagagaggagugccuggacgcccuggagagcaucaugaccaccaagagcgugagcuucagaagacugagccaccugagaaagcuggugcccggcuucggcaaggccuacaccaucuucaacaagacccugauggaggccgacgcccacuacaagagcgugagaaccuggaacgagaucauccccagcaagggcugccugagagugggcggcagaugccacccccacgugaacggcguguucuucaacggcaucauccugggccccgacggccacgugcugauccccgagaugcagagcagccugcugcagcagcacauggagcugcuggagagcagcgugaucccccugaugcacccccuggccgaccccagcaccguguucaaggacggcgacgaggccgaggacuucguggaggugcaccugcccgacgugcacaagcaggugagcggcguggaccugggccugcccaacuggggcaaguacgugcugcugagcgccggcacccugaucgcccugaugcugaugaucuuccugaugaccugcugcagaagagugaacagacccgagagcacccagagaagccugggcggcgccggcagaagagugagcgugaccagccagagcggcaaggugaucagcagcugggagagcuacaagagcggcggcgagaccagacuguga

SEQ ID NO: 191452 - RNA, 1575 nt, Artificial Sequence
  derived and/or modified CDS sequence (opt4) from glycoprotein__RABV__JX473841.1
auggugccccaggcccugcuguucaucccccugcugguguucagccugugcuucggcaaguuccccaucuacaccauccccgacaagcugggccccuggaaccccaucgacauccaccaccugagcugccccaacaaccuggugguggaggacgagggcugcaccaaccugagcggcuucagcuacauggagcugaaggugggcuacaucagcgccaucaaggugaacggcuucaccugcaccggcguggugaccgaggccgagaccuacaccaacuucgugggcuacgugaccaccaccuucaagagaaagcacuucagacccauccccgacaccugcagagccgccuacaacuggaagauggccggcgaccccagauacgaggagagccugcacaaccccuaccccgacuaccacuggcugagaaccgugaagaccaccaaggagagccuggugaucaucagccccagcguggccgaccuggaccccuacgacaagagccugcacagcagaaucuuccccagcggcaagugcagcggcaucaccgugagcagcaccuacugcagcaccagccacgacuacaccaucuggaugcccgagaaccccagacugggcaccagcugcgacaucuucgccaacagcagaggcaagagagccagcaagggcggcaagaccugcggccugguggacgagagaggccuguacaagagccugaagggcgccugcaagcugaagcugugcggcgugcugggccugagacugauggacggcaccuggguggccaugcagaccagcgacgagaccaaguggugcccccccgaccagcuggugaacaugcacgacuucagaagcgacgagaucgagcaccuggugguggaggagcuggugaagaagagagaggagugccuggacgcccuggagagcaucaugaccaccaagagcgugagcuucagaagacugagccaccugagaaagcuggugcccggcuucggcaaggccuacaccaucuucaacaagacccugauggaggccgacgcccacuacaagagcgugagaaccuggaacgagaucauccccagcaagggcugccugagagugggcggcagaugccacccccacgugaacggcguguucuucaacggcaucauccugggccccgacggccacgugcugauccccgagaugcagagcagccugcugcagcagcacauggagcugcuggagagcagcgugaucccccugaugcacccccuggccgaccccagcaccguguucaaggacggcgacgaggccgaggacuucguggaggugcaccugcccgacgugcacaagcaggugagcggcguggaccugggccugcccaacuggggcaaguacgugcugcugagcgccggcacccugaucgcccugaugcugaugaucuuccugaugaccugcugcagaagagugaacagacccgagagcacccagagaagccugggcggcgccggcagaagagugagcgugaccagccagagcggcaaggugaucagcagcugggagagcuacaagagcggcggcgagaccagacuguga

SEQ ID NO: 191453 - RNA, 1575 nt, Artificial Sequence
  derived and/or modified CDS sequence (opt4) from glycoprotein__RABV__JX871837.1
augaucccccaggcccugcuguucgugccccugcugauccccagccugugccugggcaaguuccccaucuacaccauccccgacaagcugggccccuggagccccaucgacauccaccaccugagcugccccaacaaccuggugguggaggacgagggcugcaccagccugagcggcuucagcuacauggagcugaaggugggcuacaucagcgccaucaaggugaacggcuucaccugcaccggcguggugaccgaggccgagaccuacaccaacuucgugggcuacgugaccaccaccuucaagagaaagcacuucagacccaugcccgacgccugcagagccgcccacgacuggaagaucgccggcgaccccagauacgaggacagccugcagaaccccuaccccgacuaccacuggcugagaaccgugaagaccaccaaggagagccuggugaucaucagccccagcguggccgagcuggaccccuacgacaagagccugcacagcagaguguuccccagcggcaagugccugggcaucaccgugagcagcaccuacugcagcaccaaccacgacuacaccaucuggaugcccguggaggccagacugggcaccagcugcgacaucuucaccaacagcagaggcaagaaggccagcaagggcggcagaaccugcggcuucguggacgagagaggccuguacaagagccugaagggcgccugcaagcugaagcugugcggcgugcccggccugagacugauggacggcaccugggugagcauccagaccagcgacgacaucaaguggugcccccccgaccagcuggugaaccugcacgacuuccacagcgacgagaucgagcaccuggugguggaggagcugaucaagaagagagagggcugccuggacgcccuggagagcaucaugaccaccaagagcgugagcuucagaagacugagccaccugagaaagcuggugcccggcuucggcaaggccuacaccaucuucaacaacacccugauggaggccgacgcccacuacaagagcgugagaaccuggaacgaggugauccccagcaagggcugccugaaggugggcggcagaugccacccccccgugaacggcguguucuucaacggcaucauccugggccccgacggcaacgugcugauccccgagaugcagagcagccugcugcagcagcacauggagcugcuggagagcagcgugaucccccugaugcacccccuggccgaccccagcaccguguucaaggacggcgacgaggccgaggacuucguggaggugcaccugcccgacgugcacaagcaggugagcgacguggaccugggccugcccagcuggggcaaguaccugcugaugagcgccggcgugcuggccacccugauccuggccaucuuccugaucaccugcugcagaagagccaacagaaccgagagcacccagagaggccacagagagagcggcggcaaggugagcguggccccccagaacggcaagaucaucagcagcugggagcuguacaagagcgagagcgagaccggcauguga

SEQ ID NO: 191454 - RNA, 1575 nt, Artificial Sequence; identical to SEQ ID NO: 191309
  derived and/or modified CDS sequence (opt4) from glycoprotein__RABV__JX871838.1

SEQ ID NO: 191455 - RNA, 1575 nt, Artificial Sequence; identical to SEQ ID NO: 191309
  derived and/or modified CDS sequence (opt4) from glycoprotein__RABV__JX871839.1

SEQ ID NO: 191456 - RNA, 1575 nt, Artificial Sequence
  derived and/or modified CDS sequence (opt4) from glycoprotein__RABV__JX871840.1
augaucagccagacccugcuguucgugccccugcugaucagcagccugugcuucggcgaguuccccaucuacaccauccccgagaagcugggccccuggagccccaucgacauccaccaccugagcugccccaacaaccuggugguggaggacgagggcugcaacagccugagcggcuucagcuacauggagcugaaggugggcuacaucagcagcaucaaggugaacggcuucaccugcaccggcguggugaccgaggccgagaccuacaccaacuucgugggcuacgugaccaccaccuucaagagaaagcacuucagacccaugcccgacgccugcagagccgccuacaacuggaagaugagcggcgaccccagauacgaggagagccugcacaaccccuaccccgacuaccacuggcugagaaccgugaagaccaccaaggagagccuggugaucaucagccccagcguggccgaccuggaccccuacgacaagagccugcacagcagaguguucagcggcggcaagugccugggcaucaccaucagcagcaccuacugcagcaccaaccacgacuacacccuguggaugcccgaggaggccagacugggcaccagcugcgacaucuucaucaacagcaagggcaagagagccagcaagggcggcagaaccugcggcuucguggacgagagaggccuguacaagagccugaagggcgccugcaagcugaagcugugcggcgugcccggccugagacugauggacggcaccugggugagcauccagaccagcgacgagaccaaguggugcccccccgaccagcuggugaacauccacgacuucagaagcgacgagaucgagcaccuggugguggaggagcuggugaagaagagagaggagugccuggacgcccuggacagcaucaugaccaccaagagcgugagcuucagaagacugagccaccugagaaagcuggugcccggcuucggcaaggccuacaccaucuucaacaagacccugauggaggccgacgcccacuacaagagcgugagaaccuggaacgaggugauccccagcaagggcugccugagcgugggcggcagaugccacccccacguggacggcguguucuucaacggcaucauccugggccccgacggcagcgugcugauccccgagaugcagagcagccugcugcagcagcacauggagcugcuggagagcagcgugaucccccugaugcacccccuggccaaccccagcaccguguucaaggacggcgacgaggccgaggacuucguggaggugcaccugcccgacgugcaggagcaggugagcggcguggaccugggccugcccaacuggggcaaguacaugcugaugagcgccggcgcccuggccauccugcugcugaccaucuuccugaugaccugcugcagaagagccaacagaaccaagagcaucagacagggccccgaggagagcagaagaaaggugagcgugcccccccagagcggcaaggugaucagcagcugggagagcuucaagagcggcggcgagaccggccuguga

SEQ ID NO: 191457 - RNA, 1575 nt, Artificial Sequence
  derived and/or modified CDS sequence (opt4) from glycoprotein__RABV__JX871841.1
augaucccccaggcccugcuguucgugccccugcugauccccagccugugccugggcgaguuccccaucuacaccauccccgacaagcugggccccuggagccccaucgacauccaccaccugagcugccccaacaaccugguggccgagaacgacggcugcaccagccugagcggcuucagcuacauggagcugaaggugggcuacaucagcgccaucaaggugaacggcuucaccugcaccggcguggugaccgaggccgagaccuacaccaacuucgugggcuacgugaccaccaccuucaagagaaagcacuucagacccacccccgacgccugcagagccgcccacgacuggaagauggccggcgaccccagauacgaggccagccugcagaaccccuaccccgacuaccacuggcugagaaccgugaagaccaccaaggagagccuggugaucaucagccccagcguggccgaccuggaccccuacgacaagagccugcacagcagaguguuccccagcggcaagugccugggcaucaccgugagcagcaccuacugcagcaccaaccacgacuacaccaucuggaugcccguggagcccagacugggcaccagcugcgacaucuucaccaacagcagaggcaagagagccagcaagggcggcagagugugcggcuucguggacgagagaggccuguacaagagccugaagggcgccugcagacugaagcugugcggcgugcccggcaucagacugcuggacggcaccugggugagcauccagaccagcgaggacaucaaguggugcccccccgacagacuggugaaccugcacgacuuccacagcgacgagaucgagcaccuggugguggccgagcugaucaagagaagagagaacugccuggacgcccuggagagcaucaugaccaccaagagcgugagcuucagaagacugagccaccugagaaagcuggugcccggcuucggcaaggccuacaccaucuucaacaagacccugauggaggccgacgcccacuacaagagcgugaagaccuggaacgaggugauccccagcaagggcugccuggaggugggcggcagaugccacccccacgugaacggcguguucuucaacggcaucauccugggccccgacggcaacgugcugauccccgagaugcagagcagccugcugcagcagcacauggagcugcuggagagcagcgugaucccccugaugcacccccuggccgaccccagcaccguguucaaggagggcgacgaggccgaggacuucguggaggugcaccugcccgacgugcacaagcaggugagcgacguggaccugggccugcccagcuggggcaaguaccugcugaucagcgccggcgcccuggccauccugauccuggccaucgugcugaucaucugcugcagaaaggugaacaagaccggcagcacccagagaggccacagagagagcggcggcaagaugagcguggugccccagaacggcaagaucaucagcagcugggagcuguacaagagcgagagcgagaccggccuguga

SEQ ID NO: 191458 - RNA, 1575 nt, Artificial Sequence
  derived and/or modified CDS sequence (opt4) from glycoprotein__RABV__JX871842.1
augaucccccaggcccugcuguucgugcccuuccuguuccccagccugugccugggcaaguuccccaucuacaccauccccgagaagcugggccccuggagccccaucgacauccaccaccugagcugccccaacaaccuggugguggaggacgagggcugcgacagccugagcggcuucagcuacauggagcugaaggugggcuacaucagcgccaucaaggugaacggcuucaccugcaccggcguggugaccgaggccgagaccuacaccaacuucgugggcuacgugaccaccaccuucaagagaaagcacuucagacccaugcccgacgccugcagagccgccuacaacuggaagaccgccggcgaccccagauacgaggagagccugcacaaccccuaccccgacuaccacuggcugagaaccgugaagaccaccaaggagagccugaucaucaucagccccagcguggccgaccuggaccccuacgacaagagccugcacagcagaguguuccccggcggcaagugccugggcaucaccgugagcagcaccuacugcagcaccaaccacgacuacaccaucuggaugcccgaggaggccagacugggcaccagcugcgacaucuucaccaacagcaagggcaagagagccagcaagggcggcagaaccugcggcuucguggacgagagaggccuguacaagagccugaagggcgccugcaagcugaagcugugcggcgugcccggccugagacugauggacggcaccuggguggccauccagacccccggcgagaccaaguggugcagccccgaccagcuggugaaccugcacgacuucagaagcgacgagaucgagcaccuggugguggaggagcugaucaagaagagagaggagugccuggacgcccuggacagcaucaugaccaccaagagccugagcuucggcagacugagcaaccugagaaagcuggugcccggcuucggcaaggccuacaccaucuucaacaagacccugauggaggccgacgcccacuacaagagcuucagaaccugggacgagaucauccccagcaagggcugccugagagugggcggcagaugccacccccacgugaacggcguguucuucaacggcaucauccugggccccgacggccacgugcugauccccgagaugcagagcagccugcugcagcagcacauggagcugcuggagagcagcgugaucccccugauccacccccuggccgaccccagcaccguguucaaggacggcgacgaggccgaggacuucguggaggugcaccugcccgacgugcacaagcaggugagcggcguggaccugggccugcccaacuggggcaaguacgugcugaugggcgccggcgugcuggccaccgugauccugaccaucuuccugcugaccugcugcagaagagugaacagaaccaagcccaagcagcagagccuggaggagagcggcagaaaggugagcgugaccccccagaacggcaaggugaugagcagcugggaguacuacaagagcgagggcagaaccagccuguga

SEQ ID NO: 191459 - RNA, 1575 nt, Artificial Sequence
  derived and/or modified CDS sequence (opt4) from glycoprotein__RABV__JX871844.1
augaucccccaggcccugcuguucgugccccugcugauccccagccugugccugggcaaguuccccaucuacaccauccccgacaagcugggccccuggagccccaucgacauccaccaccugagcugccccaacaaccuggugguggaggacgagggcugcaccagccugagcggcuucagcuacauggagcugaaggugggcuacaucagcgccaucaaggugaacggcuucaccugcaccggcguggugaccgaggccgagaccuacaccaacuucgugggcuacgugaccaccaccuucaagagaaagcacuucagacccaugcccgacgccugcagagccgcccacgacuggaagaucgccggcgaccccagauacgaggacagccugcagaaccccuaccccgacuaccacuggcugagaaccgugaagaccaccaaggagagccuggugaucaucagccccagcguggccgaccuggaccccuacgacaagagccugcacagcagaguguuccccagcggcaagugccugggcaucaccgugagcagcaccuacugcagcaccaaccacgacuacaccaucuggaugcccguggaggccagacugggcaccagcugcgacaucuucaccaacagcagaggcaagaaggccagcaagggcggcagaaccugcggcuucguggacgagagaggccuguacaagagccugaagggcgccugcaagcugaagcugugcggcgugcccggccugagacugauggacggcaccugggugagcauccagaccagcgacgacaucaaguggugcccccccgaccagcuggugaaccugcacgacuuccacagcgacgagaucgagcaccuggugguggaggagcugaucaagaagagagagggcugccuggacgcccuggagagcaucaugaccaccaagagcgugagcuucagaagacugagccaccugagaaagcuggugcccggcuucggcaaggccuacaccaucuucaacaacacccugauggaggccgacgcccacuacaagagcgugagaaccuggaacgaggugauccccagcaagggcugccugaaggugggcggcagaugccacccccccgugaacggcguguucuucaacggcaucauccugggccccgacggcaacgugcugauccccgagaugcagagcagccugcugcagcagcacauggagcugcuggagagcagcgugaucccccugaugcaccccagcgccgaccccagcaccguguucaaggacggcgacgaggccgaggacuucguggaggugcaccugcccgacgugcacaagcaggugagcgacguggaccugggccugcccagcuggggcaaguaccugcugaugagcgccggcgcccuggccacccugauccuggccaucuuccugaucaccugcugcagaagagccaacagaaccgagagcacccagagaggccacagagagagcggcggcaaggugagcguggccccccagaacggcaagaucaucagcagcugggagcuguacaagagcgagagcgagaccggcauguga

SEQ ID NO: 191460 - RNA, 1575 nt, Artificial Sequence; identical to SEQ ID NO: 191339
  derived and/or modified CDS sequence (opt4) from glycoprotein__RABV__JX871846.1

SEQ ID NO: 191461 - RNA, 1575 nt, Artificial Sequence
  derived and/or modified CDS sequence (opt4) from glycoprotein__RABV__JX871847.1
augaucccccaggcccugcuguucgugccccugcugauccccagccugugccugggcgaguuccccaucuacaccauccccgacaagcugggccccuggacccccaucgacauccaccaccugagcugccccaacaaccugguggccgagaacgacggcugcaccagccugagcggcuucagcuacauggagcugaaggugggcuacaucagcgccaucaaggugaacggcuucaccugcaccggcguggugaccgaggccgagaccuacaccaacuuccugggcuacgugaccaccaccuucaagagaaagcacuucagacccaugcccgacgccugcagagccgcccacgacuggaagauggccggcgaccccagauacgaggacagccugcagaaccccuaccccgacuaccacuggcugagaaccgugaagaccaccaaggagagccuggugaucaucagccccagcguggccgaccuggaccccuacgacaagagccugcacagcagaguguuccccagcggcaagugccugggcaucaccgugagcagcaccuacugcagcaccaaccacgacuacaccaucuggaugcccguggagcccagacugggcaccagcugcgacaucuucaccaacagcagaggcaagagagccagcaagggcggcagagugugcggcuucguggacgagagaggccuguacaagagccugaagggcgccugcaagcugaagcugugcggcgugcccggcaucagacugauggacggcaccugggugagcauccagaccagcgaggacaucaaguggugcccccccgacagacuggugaaccugcacgacuuccacagcgacgagcuggagcaccuggugguggaggagcugaucaagagaagagagaacugccuggacgcccuggagagcaucaugaccaccaagagcgugagcuucagaagacugagccaccugagaaagcuggugcccggcuucggcaaggccuacaccaucuucaacaagacccugauggaggccgacgcccacuacaagagcgugaagaccuggaacgaggugauccccagcaagggcugccuggaggugggcggcaagugccacccccccgugaacggcguguucuucaacggcaucauccugggccccgacggcaacgugcugauccccgagaugcagagcagccugcugcagcagcacauggagcugcuggagagcagcgugaucccccugaugcacccccuggccgaccccagcaccguguucaaggagggcgacgaggccgaggacuucguggaggugcaccugcccgacgugcacaagcaggugagcgacguggaccugggccugcccagcuggggcaaguaccugcugaugagcgccggcgcccuggccauccugauccuggccaucgugcugaucaucugcugcggcagagugaacaagaccggcagcacccagagaggccacagagagagcagaggcaagaugagcguggccccccagaacggcaagaucaucagcagcugggagcuguacaagagcgagagcgagaccggccuguga

SEQ ID NO: 191462 - RNA, 1575 nt, Artificial Sequence
  derived and/or modified CDS sequence (opt4) from glycoprotein__RABV__JX871848.1
augaucccccaggcccugcuguucgugccccugcugaucagcagccugugccugggcgaguuccccaucuacaccauccccgagaagcugggccccuggagccccaucgacauccaccaccugagcugccccaacaaccuggugguggaggacgagggcugcaacagccugagcggcuucagcuacauggagcugaaggugggcuacaucagcagcaucaaggugaacggcuucaccugcaccggcguggugaccgaggccgagaccuacaccaacuucgugggcuacgugaccaccaccuucaagagaaagcacuucagacccaugcccgacgccugcagagccgccuacaacuggaagaugagcggcgaccccagauacgaggagagccugcacaaccccuaccccgacuaccacuggcugagaaccgugaagaccaccaaggagagccuggugaucaucagccccagcguggccgaccuggaccccuacgacaagagccugcacagcagaguguucagcggcggcaagugccugggcaucaccgugagcagcaccuacugcagcaccaaccacgacuacaccaucuggaugcccgaggaggccagacugggcaccagcugcgacaucuucaccaacagcaagggcaagagagccagcaagggcggcaagaccugcggcuucguggacgagagaggccuguacaagagccugaagggcgccugcaagcugaagcugugcggcgugcccggccugagacugauggacggcaccugggugagcauccagaccagcgacgagaccaaguggugcccccccgaccagcuggugaacauccacgacuucagaagcgacgagaucgagcaccuggugguggaggagcuggugaagaagagagaggagugccuggacgcccuggagagcaucaugaccaccaagagcgugagcuucagaagacugagccaccugagaaagcuggugcccggcuucggcaaggccuacaccaucuucaacaagacccugauggaggccgacgcccacuacaagagcgugagaaccuggaacgaggugauccccagcaagggcugccugagcgugggcggcagaugccacccccacguggacggcguguucuucaacggcaucauccugggccccgacggcagcgugcugauccccgagaugcagagcagccugcugcagcagcacauggagcugcuggagagcagcgugaucccccugaugcacccccuggccaaccccagcaccguguucaaggacggcgacgaggccgaggacuucguggaggugcaccugcccgacgugcaggagcaggugagcggcguggaccugggccugcccaacuggggcaaguacgugcugaugagcgccggcgcccuggccgugcugcugcugaccaucuuccugaugaccugcagaagaagagccaacagaaccaacagcauccagcagggccccggcgagagcggcagaaagaucagcgugcccccccagaacggcaaggugaucagcagcugggagagcuucaagagcggcggcgagaccggccuguga

SEQ ID NO: 191463 - RNA, 1575 nt, Artificial Sequence
  derived and/or modified CDS sequence (opt4) from glycoprotein__RABV__JX871849.1
augaucccccaggcccugcugagcgugccccugcugaucagcagccugugcuucggcaaguuccccaucuacaccauccccgagaagcugggccccuggagccccaucgacauccaccaccugagcugccccaacaaccuggugguggaggacgagggcugcaacagccugagcggcuucagcuacauggagcugaaggugggcuacaucagcgccaucaaggugaacggcuucaccugcaccggcguggugaccgaggccgagaccuacaccaacuucgugggcuacgugaccaccaccuucaagagaaagcacuucagacccaugagcgacgccugcagagccgccuacaacuggaagaccgccggcgaccccagauacgaggagagccugcacaaccccuaccccgacuaccacuggcugagaaccgugaagaccaccaaggagagccugaucaucaucagccccagcguggccgaccuggaccccuacgacaagagccugcacagcagaaucuuccccggcggcaagugccugggcaucaccaucagcagcaccuacugcagcaccaaccacgacuacaccaucuggaugcccgaggaggccagacugggcaccagcugcgacaucuucaccaacagcaagggcaagagagccagcaagggcggcagaaccugcggcuucguggacgagagaggccuguacaagagccugaagggcgccugcaagcugaagcugugcggcgugcccggccugagacugauggacggcaccuggguggccauccagacccccaacgagaccaaguggugcagccccgaccagcuggugaacgugcacgacuucagaagcgacgagaucgagcaccuggugguggaggagcugaucagaaagagagaggagugccuggacgcccuggagagcaucaugaccaccaagagcgugagcuucagaagacugagcaaccugagaaagcuggugcccggcuucggcaaggccuacaccaucuucaacaagacccugauggaggccgacgcccacuacaagagcgugagaaccuggaacgagaucauccccagcagaggcugccugaaggugggcggcagaugccacccccacgugaacggcguguucuucaacggcaucauccugggccccgacggccacauccugauccccgagaugcagagcagccugcugcagcagcacauggagcugcuggagagcagcgugaucccccugauccacccccuggccgaccccagcaccguguucaaggacggcgacgaggccgaggacuucguggaggugcaccugcccgacgugcaccagcaggugagcggcguggaccugggccugcccgacuggggcaaguacgugcugaugagcgccggcgcccuggccaccgugaugcugaccaucuuccugaucaccugcugcagaagagugaagagaaccgagagcauccagcagggccugggcgagagcggcagaaaggugagcgugaccccccagaacggcaaggugaugagcagcugggaguacuacaagagcggcggcggcaccagacuguga

SEQ ID NO: 191464 - RNA, 1575 nt, Artificial Sequence
  derived and/or modified CDS sequence (opt4) from glycoprotein__RABV__JX871853.1
augaucagccaggcccugcuguucgugccccugcugauccccagccugugccugggcaaguuccccaucuacaccauccccgacaagcugggccccuggagccccaucgacauccaccaccugagcugccccaacaaccuggugguggaggacgagggcugcaccagccugagcggcuucagcuacauggagcugaaggugggcuacaucagcgccaucaaggugaacggcuucaccugcaccggcguggugaccgaggccgagaccuacaccaacuucgugggcuacgugaccaccaccuucaagagaaagcacuucagacccaugcccgacgccugcagagccgcccacgacuggaagaucgccggcgaccccagauacgaggacagccugcagacccccuaccccgacuaccacuggcugagaaccgugaagaccaccaaggagagccuggugaucaucagccccagcguggccgaccuggaccccuacgacaagagccugcacagcagaguguuccccagcggcaagugccugggcaucaccgugagcagcaccuacugcagcaccaaccacgacuacaccaucuggaugcccguggaggccagacugggcaccagcugcgacaucuucaccaacagcagaggcaagaaggccagcaagggcggcagaaccugcggcuucguggacgagagaggccuguacaagagccugaagggcgccugcaagcugaagcugugcggcgugcccggccugagacugauggacggcaccugggugagcauccagaccagcgacgacaucaaguggugcccccccgaccagcuggugaaccugcacgacuuccacagcgacgagaucgagcaccuggugguggaggagcugaucaagaagagagagggcugccuggacgcccuggagagcaucaugaccaccaagagcgugagcuucagaagacugagccaccugagaaagcuggugcccggcuucggcaaggccuacaccaucuucaacaacacccugauggaggccgacgcccacuacaagagcgugagaaccuggaacgaggugauccccagcaagggcugccugaaggugggcggcagaugccacccccccgugaacggcguguucuucaacggcaucauccugggccccgacggcaacgugcugauccccgagaugcagagcagccugcugcagcagcacauggagcugcuggagagcagcgugaucccccugaugcacccccuggccgaccccagcaccguguucaaggacggcgacgaggccgaggacuucguggaggugcaccugcccgacgugcacaagcaggugagcgacguggaccugggccugcccagcuggggcaaguaccugcugaugagcgccggcgcccuggccacccugauccuggccaucuuccugaucaccugcugcagaagagccaacagaaccgagagcacccagagaggccacagagagagcggcggcaaggugagcguggccccccagaacggcaagaucaucagcagcugggagcuguacaagagcgagagcgagaccggcauguga

SEQ ID NO: 191465 - RNA, 1575 nt, Artificial Sequence
  derived and/or modified CDS sequence (opt4) from glycoprotein__RABV__JX871854.1
augaucccccaggcccugcuguucgugcccuuccuguuccccagccugugccugggcaaguuccccaucuacaccauccccgagaagcugggccccuggagccccaucgacauccaccaccugagcugccccaacaaccuggugguggaggacgagggcugcgacagccugagcggcuucagcuacauggagcugaaggugggcuacaucagcgccaucaaggugaacggcuucaccugcaccggcguggugaccgaggccgagaccuacaccaacuucgugggcuacgugaccaccaccuucaagagaaagcacuucagacccaugcccgacgccugcagagccgccuacaacuggaagaccgccggcgaccccagauacgaggagagccugcacaaccccuaccccgacuaccacuggcugagaaccgugaagaccaccaaggagagccugaucaucaucagccccagcguggccgaccuggaccccuacgacaagagccugcacagcagaguguuccccggcggcaagugccugggcaucaccaucagcagcaccuacugcagcaccaaccacgacuacaccaucuggaugcccgaggaggccagacugggcaccagcugcgacaucuucaccaacagcaagggcaagagagccagcaagggcggcagaaccugcggcuucguggacgagagaggccuguacaagagccugaagggcgccugcaagcugaagcugugcggcgugcccggccugagacugauggacggcaccuggguggccauccagacccccggcgagaccaaguggugcagccccgaccagcuggugaaccugcacgacuucagaagcgacgagaucgagcaccuggugguggaggagcugaucaagaagagagaggagugccuggacgcccuggagagcaucaugaccaccaagagcgugagcuucagaagacugagcaaccugagaaagcuggugcccggcuucggcaaggccuacaccaucuucaacaagacccugauggaggccgacgcccacuacaagagcaucagaaccugggacgagaucauccccagcaagggcugccugagagugggcggcagaugccacccccacgugaacggcguguucuucaacggcaucauccugggccccgacggccacgugcugauccccgagaugcagagcagccugcugcagcagcacauggagcugcuggagagcagcgugaucccccugauccacccccuggccgaccccagcaccguguucaaggacggcgacgaggccgaggacuucguggaggugcaccugcccgacgugcacgagcaggugagcggcguggaccugggccugcccaacuggggcaaguacgugcugaucagcgccggcgugcuggccaccgugauccugaccaucuuccugcugaccugcugcagaagagugaacagaaccaagcccaagcagcagagccugggcgagagcggcagaaaggugagcgugaccccccagaacggcaaggugaugagcagcugggaguacuacaagagcgagggcagaaccagccuguga

SEQ ID NO: 191466 - RNA, 1575 nt, Artificial Sequence; identical to SEQ ID NO: 191309
  derived and/or modified CDS sequence (opt4) from glycoprotein__RABV__JX871855.1

SEQ ID NO: 191467 - RNA, 1575 nt, Artificial Sequence
  derived and/or modified CDS sequence (opt4) from glycoprotein__RABV__JX871856.1
augaucccccaggcccugcuguucgugcccuuccuguuccccagccugugccugggcaaguuccccaucuacaccauccccgagaagcugggccccuggagccccaucgacauccaccaccugagcugccccaacaaccuggugguggaggacgagggcugcgacagccugagcggcuucagcuacauggagcugaaggugggcuacaucagcgccaucaaggugaacggcuucaccugcaccggcguggugaccgaggccgagaccuacaccaacuucgugggcuacgugaccaccaccuucaagagaaagcacuucagacccaugcccgacgccugcagagccgccuacaacuggaagaccgccggcgaccccagauacgaggagagccugcacaaccccuaccccgacuaccacuggcugagaaccgugaagaccaccaaggagagccugaucaucaucagccccagcguggccgaccuggaccccuacgacaagagccugcacagcagaguguuccccggcggcaagugccugggcaucaccgugagcagcaccuacugcagcaccaaccacgacuacaccaucuggaugcccgaggaggccagacugggcaccagcugcgacaucuucaccaacagcaagggcaagagagccagcaagggcggcagaaccugcggcuucguggacgagagaggccuguacaagagccugaagggcgccugcaagcugaagcugugcggcgugcccggccugagacugauggacggcaccuggguggccauccagacccccggcgagaccaaguggugcagccccgaccagcuggugaaccugcacgacuucagaagcgacgagaucgagcaccuggugguggaggagcugaucaagaagagagaggagugccuggacgcccuggagagcaucaugaccaccaagagcgugagcuucagaagacugagcaaccugagaaagcuggugcccggcuucggcaaggccuacaccaucuucaacaagacccugauggaggccgacgcccacuacaagagcgugagaaccugggacgagaucauccccagcaagggcugccugagagugggcggcagaugccacccccacgugaacggcguguucuucaacggcaucauccugggccccgacggccacgugcugauccccgagaugcagagcagccugcugcagcagcacauggagcugcuggagagcagcgugaucccccugauccacccccuggccgaccccagcaccguguucaaggacggcgacgaggccgaggacuucguggaggugcaccugcccgacgugcacaagcaggugagcggcguggaccugggccugcccaacuggggcaaguacgugcugaugagcgccggcgugcuggccaccgugauccugaccaucuuccugcugaccugcugcagaagagugaacagaaccaagcccaagcagcagagccugggcgagagcggcagaaaggugagcgugaccccccagaacggcaaggugaugagcagcugggaguacuacaagagcgagggcagaaccagccuguga

SEQ ID NO: 191468 - RNA, 1575 nt, Artificial Sequence; identical to SEQ ID NO: 191309
  derived and/or modified CDS sequence (opt4) from glycoprotein__RABV__JX871857.1

SEQ ID NO: 191469 - RNA, 1575 nt, Artificial Sequence
  derived and/or modified CDS sequence (opt4) from glycoprotein__RABV__JX871858.1
augaucccccaggcccugcuguucgugccccugcugauccccagccugugccugggcaaguuccccaucuacaccauccccgacaagcugggccccuggagccccaucgacauccaccaccugagcugccccaacaaccuggugguggaggacgagggcugcaccagccugagcggcuucagcuacauggagcugaaggugggcuacaucagcgccaucaaggugaacggcuucaccugcaccggcguggugaccgaggccgagaccuacaccaacuucgugggcuacgugaccaccaccuucaagagaaagcacuucagacccaugcccgacgccugcagagccgcccacgacuggaagaucgccggcgaccccagauacgaggacagccugcagaaccccuaccccgacuaccacuggcugagaaccgugaagaccaccaaggagagccuggugaucaucagccccagcguggccgagcuggaccccuacgacaagagccugcacagcagaguguuccccggcggcaagugccugggcaucaccgugagcagcaccuacugcagcaccaaccacgacuacaccaucuggaugcccguggaggccagacugggcaccagcugcgacaucuucaccaacagcagaggcaagaaggccagcaagggcggcagaaccugcggcuucguggacgagagaggccuguacaagagccugaagggcgccugcaagcugaagcugugcggcgugcccggccugagacugauggacggcaccugggugagcauccagaccagcgacgacaucaaguggugcccccccgaccagcuggugaaccugcacgacuuccacagcgacgagaucgagcaccuggugguggaggagcugaucaagaagagagagggcugccuggacgcccuggagagcaucaugaccaccaagagcgugagcuucagaagacugagccaccugagaaagcuggugcccggcuucggcaaggccuacaccaucuucaacaacacccugauggaggccgacgcccacuacaagagcgugagaaccuggaacgaggugauccccagcaagggcugccugaaggugggcggcagaugccacccccccgugaacggcguguucuucaacggcaucauccugggccccgacggcaacgugcugauccccgagaugcagagcagccugcugcagcagcacauggagcugcuggagagcagcgugaucccccugaugcacccccuggccgaccccagcaccguguucaaggacggcgacgaggccgaggacuucguggaggugcaccugcccgacgugcacaagcaggugagcgacguggaccugggccugcccagcuggggcaaguaccugcugaugagcgccggcgcccuggccacccugauccuggccaucuuccugaucaccugcugcagaagagccaacagaaccgagagcacccagagaggccacagagagagcggcggcaaggugagcguggccccccagaacggcaagaucaucagcagcugggagcuguacaagagcgagagcgagaccggcauguga

SEQ ID NO: 191470 - RNA, 1575 nt, Artificial Sequence
  derived and/or modified CDS sequence (opt4) from glycoprotein__RABV__JX871859.1
augaucccccaggcccugcugagcgugccccugcugaucagcagccugugcuucggcaaguuccccaucuacaccauccccgagaagcugggccccuggagccccaucgacauccaccaccugagcugccccaacaaccuggugguggaggacgagggcugcaacagccugagcggcuucagcuacauggagcugaaggugggcuacaucagcgccaucaaggugaacggcuucaccugcaccggcguggugaccgaggccgagaccuacaccaacuucgugggcuacgugaccaccaccuucaagagaaagcacuucagacccaugcccgacgccugcagagccgccuacaacuggaagaccgccggcgaccccagauacgaggagagccugcacaaccccuaccccgacuaccacuggcugagaaccgugaagaccaccaaggagagccugaucaucaucagccccagcguggccgaccuggaccccuacgacaagagccugcacagcagaaucuuccccggcggcaagugccugggcaucaccaucagcagcaccuacugcagcaccaaccacgacuacaccaucuggaugcccgaggaggccagacugggcaccagcugcgacaucuucaccaacagcaagggcaagagagccagcaagggcggcagaaccugcggcuucguggacgagagaggccuguacaagagccugaagggcgccugcaagcugaagcugugcggcgugcccggccugagacugauggacggcaccuggguggccauccagacccccaacgagaccaaguggugcagccccgaccagcuggugaacgugcacgacuucagaagcgacgagaucgagcaccuggugguggaggagcugaucagaaagagagaggagugccuggacgcccuggagagcaucaugaccaccaagagcgugagcuucagaagacugagcaaccugagaaagcuggugcccggcuucggcaaggccuacaccaucuucaacaagacccugauggaggccgacgcccacuacaagagcgugagaaccuggaacgagaucauccccagcagaggcugccugaaggugggcggcagaugccacccccacgugaacggcguguucuucaacggcaucauccugggccccgacggccacauccugauccccgagaugcagagcagccugcugcagcagcacauggagcugcuggagagcagcgugaucccccugauccacccccuggccgaccccagcaccguguucaaggacggcgacgaggccgaggacuucguggaggugcaccugcccgacgugcaccagcaggugagcggcguggaccugggccugcccgacuggggcaaguacgugcugaugagcgccggcgcccuggccaccgugaugcugaccaucuuccugaucaccugcugcagaagagugaagagaaccgagagcauccagcagggccugggcgagagcggcagaaaggugagcgugaccccccagaacggcaaggugaugagcagcugggaguacuacaagagcggcggcggcaccagacuguga

SEQ ID NO: 191471 - RNA, 1575 nt, Artificial Sequence; identical to SEQ ID NO: 191417
  derived and/or modified CDS sequence (opt4) from glycoprotein__RABV__JX871860.1

SEQ ID NO: 191472 - RNA, 1575 nt, Artificial Sequence; identical to SEQ ID NO: 191332
  derived and/or modified CDS sequence (opt4) from glycoprotein__RABV__JX871862.1

SEQ ID NO: 191473 - RNA, 1575 nt, Artificial Sequence
  derived and/or modified CDS sequence (opt4) from glycoprotein__RABV__JX871863.1
augaucccccaggcccugcuguucgugccccugcugaucagcagccugugcuucggcaaguuccccaucuacaccauccccgagaagcugggccccuggagccccaucgacauccaccaccugagcugccccaacaaccugguggccgaggacgagggcugcaacagccugagcggcuucagcuacauggagcugaaggugggcuacaucagcgccaucaaggugaacggcuucaccugcaccggcguggugaccgaggccgagaccuacaccaacuucgugggcuacgugaccaccaccuucaagagaaagcacuucagacccacccccgacgccugcagagccgccuacaacuggaagauggccggcgaccccagauacgaggagagccugcacaaccccuaccccgacuaccacuggcugagaaccgugaagaccaccaaggagagccuggugaucaucagccccagcguggccgaccuggaccccuacgacaagagccugcacagcagaguguuccccgacggcaagugccugggcaucaccaucagcagcaccuacugcagcaccaaccacgacuacaccaucuggaugcccgaggaggccagacugggcaccagcugcgacaucuucaccaccagcaagggcaagagagccagcaagggcgacaagaucugcggcuucguggacgagagaggccuguacaagagccugaagggcgccugcaagcugaagcugugcggcgugcugggccugagacugauggacggcaccugggugagcauccagacccccggcgagaccaaguggugcagccccgaccagcuggugaaccugcacgacuuccacagcgacgagaucgagcaccugguggccgaggagcuggugaagaagagagaggagugccuggacgcccuggagagcaucaugaccaccaagagcgugagcuucagaagacugagccaccugagaaagcuggugcccggcuucggcaaggccuacaccaucuucaacaagacccugauggaggccgacgcccacuacaagagcgugagaaccuggaacgaggugauccccagcaagggcugccugagcgugggcggcagaugccacccccacgugaacggcguguucuucaacggcaucauccugggccccgacggcagcgugcugauccccgagaugcagagcagccugcugcagcagcacauggagcugcuggagagcagcgugaucccccugaugcacccccuggccgaccccagcaccguguucaaggacgacgacgaggccgagaacuucguggaggugcaccugcccgacgugcacaagcaggugagcggcguggaccugggccugcccaacuggggcaaguaccugcugaugaucgccggcgcccuggccacccugaugcugaccaucuuccugaugaccugcugcagaagaaccaagagaaccgagagcauccagcagggccugggcgagagcggcagaaaggugagcgugaccccccagagcggcaaggugaucagcagcugggagagcuacaagagcggcggcgagaccagacuguga

SEQ ID NO: 191474 - RNA, 1575 nt, Artificial Sequence
  derived and/or modified CDS sequence (opt4) from glycoprotein__RABV__JX871864.1
augaucccccaggcccugcuguucgugccccugcugauccccagccugugccugggcgaguuccccaucuacaccauccccgacaagcugggccccuggagccccaucgacauccaccaccugagcugccccaacaaccugguggccgagaacgacggcugcaccagccugagcggcuucagcuacauggagcugaaggugggcuacaucagcgccaucaaggugaacggcuucaccugcaccggcguggugaccgaggccgagaccuacaccaacuucgugggcuacgugaccaccaccuucaagagaaagcacuucagacccacccccgacgccugcagagccgcccacgacuggaagauggccggcgaccccagauacgaggccagccugcagaaccccuaccccgacuaccacuggcugagaaccgugaagaccaccaaggagagccuggugaucaucagccccagcguggccgaccuggaccccuacgacaagagccugcacagcagaguguuccccagcggcaagugccugggcaucaccgugagcagcaccuacugcagcaccaaccacgacuacaccaucuggaugcccguggagcccagacugggcaccagcugcgacaucuucaccaacagcagaggcaagagagccagcaagggcggcagagugugcggcuucguggacgagagaggccuguacaagagccugaagggcgccugcagacugaagcugugcggcgugcccggcaucagacugcuggacggcaccugggugagcauccagaccagcgaggacaucaaguggugcccccccgacagacuggugaaccugcacgacuuccacagcgacgagaucgagcaccuggugguggccgagcugaucaagagaagagagaacugccuggacgcccuggagagcaucaugaccaccaagagcgugagcuucagaagacugagccaccugagaaagcuggugcccggcuucggcaaggccuacaccaucuucaacaagacccugauggaggccgacgcccacuacaagcuggugaagaccuggaacgaguucauccccagcaagggcugccuggaggugggcggcagaugccacccccacgugaacggcguguucuucaacggcaucauccugggccccgacggcaacgugcugauccccgagaugcagagcagccugcugcagcagcacauggagcugcuggagagcagcgugaucccccugaugcacccccuggccgaccccagcaccguguucaaggagggcgacgaggccgaggacuucguggaggugcaccugcccgacgugcacaagcaggugagcgacguggaccugggccugcccagcuggggcaaguaccugcugaucagcgccggcgcccuggccauccugauccuggccaucgugcugaucaucugcugcagaagagugaacaagaccggcagcacccagagaggccacagagagagcggcggcaagaugagcguggugccccagaacggcaagaucaucagcagcugggagcuguacaagagcgagagcgagaccggccuguga

SEQ ID NO: 191475 - RNA, 1575 nt, Artificial Sequence
  derived and/or modified CDS sequence (opt4) from glycoprotein__RABV__JX871865.1
augaucccccaggcccugcugagcgugccccugcugaucagcagccugugcuucggcaaguuccccaucuacaccauccccgagaagcugggccccuggagccccaucgacauccaccaccugagcugccccaacaaccuggugguggaggacgagggcugcaacagccugagcggcuucagcuacauggagcugaaggugggcuacaucagcgccaucaaggugaacggcuucaccugcaccggcguggugaccgaggccgagaccuacaccaacuucgugggcuacgugaccaccaccuucaagagaaagcacuucagacccauggccgacgccugcagagccgccuacaacuggaagaccgccggcgaccccagauacgaggagagccugcacaaccccuaccccgacuaccacuggcugagaaccgugaagaccaccaaggagagccugaucaucaucagccccagcguggccgaccuggaccccuacgacaagagccugcacagcagaaucuuccccggcggcaagugccugggcaucaccaucagcagcaccuacugcagcaccaaccacgacuacaccaucuggaugcccgaggaggccagacugggcaccagcugcgacaucuucaccaacagcaagggcaagagagccagcaagggcggcagaaccugcggcuucguggacgagagaggccuguacaagagccugaagggcgccugcaagcugaagcugugcggcgugcccggccugagacugauggacggcaccuggguggccauccagacccccaacgagaccaaguggugcagccccgaccagcuggugaacgugcacgacuucagaagcgacgagaucgagcaccuggugguggaggagcugaucagaaagagagaggagugccuggacgcccuggagagcaucaugaccaccaagagcgugagcuucagaagacugagcaaccugagaaagcuggugcccggcuucggcaaggccuacaccaucuucaacaagacccugauggaggccgacgcccacuacaagagcgugagaaccuggaacgagaucauccccagcagaggcugccugaaggugggcggcagaugccacccccacgugaacggcguguucuucaacggcaucauccugggccccgacggccacauccugauccccgagaugcagagcagccugcugcagcagcacauggagcugcuggagagcagcgugaucccccugauccacccccuggccgaccccagcaccguguucaaggacggcgacgaggccgaggacuucguggaggugcaccugcccgacgugcaccagcaggugagcggcguggaccugggccugcccgacuggggcaaguacgugcugaugagcgccggcgcccuggccaccgugaugcugaccaucuuccugaucaccugcugcagaagagugaagagaaccgagagcauccagcagggccccggcgagagcggcagaaaggugagcgugaccccccagaacggcaaggugaugagcagcugggaguacuacaagagcggcggcggcaccagacuguga

SEQ ID NO: 191476 - RNA, 1575 nt, Artificial Sequence
  derived and/or modified CDS sequence (opt4) from glycoprotein__RABV__JX871866.1
augaucccccaggccauccuguucgugccccugcugauccccagccugugccugggcgaguuccccaucuacaccauccccgacaagcugggccccuggagccccaucgacauccaccaccugagcugccccaacaaccugguggccgagaacgacggcugcaccagccugagcggcuucagcuacauggagcugaaggugggcuacaucagcgccaucaaggugaacggcuucaccugcaccggcguggugaccgaggccgagaccuacaccaacuucgugggcuacgugaccaccaccuucaagagaaagcacuucagacccacccccgacgccugcagagccgcccacgacuggaagauggccggcgaccccagauacgaggccagccugcagaaccccuaccccgacuaccacuggcugagaaccgugaagaccaccaaggagagccuggugaucaucagccccagcguggccgaccuggaccccuacgacaagagccugcacagcagaguguuccccagcggcaagugccugggcaucaccgugagcagcaccuacugcagcaccaaccacgacuacaccaucuggaugcccguggagcccagacugggcaccagcugcgacaucuucaccaacagcagaggcaagagagccagcaagggcggcagagugugcggcuucguggacgagagaggccuguacaagagccugaagggcgccugcagacugaagcugugcggcgugcccggcaucagacugcuggacggcaccugggugagcauccagaccagcgaggacaucaaguggugcccccccgacagacuggugaaccugcacgacuuccacagcgacgagaucgagcaccuggugguggccgagcugaucaagagaagagagaacugccuggacgcccuggagagcaucaugaccaccaagagcgugagcuucagaagacugagccaccugagaaagcuggugcccggcuucggcaaggccuacaccaucuucaacaagacccugauggaggccgacgcccacuacaagagcgugaagaccuggaacgaggugauccccagcaagggcugccuggaggugggcggcagaugccacccccacgugaacggcguguucuucaacggcaucauccugggccccgacggcaacgugcugauccccgagaugcagagcagccugcugcagcagcacauggagcugcuggagagcagcgugaucccccugaugcacccccuggccgaccccagcaccguguucaaggagggcgacgaggccgaggacuucguggaggugcaccugcccgacgugcacaagcaggugagcgacguggaccugggccugcccagcuggggcaaguaccugcugaucagcgccggcgcccuggccauccugauccuggccaucgugcugaucaucugcugcagaagagugaacaagaccggcagcacccagagaggccacagagagagcggcggcaagaugagcguggugccccagaacggcaagaucaucagcagcugggagcuguacaagagcgagagcgagaccggccuguga

SEQ ID NO: 191477 - RNA, 1575 nt, Artificial Sequence; identical to SEQ ID NO: 191309
  derived and/or modified CDS sequence (opt4) from glycoprotein__RABV__JX871867.1

SEQ ID NO: 191478 - RNA, 1575 nt, Artificial Sequence
  derived and/or modified CDS sequence (opt4) from glycoprotein__RABV__JX871868.1
augaucccccaggccuuccuguucgugccccugcugauccccagccugugccugggcaaguuccccaucuacaccauccccgacaagcugggccccuggagccccaucgacauccaccaccugagcugccccaacaaccuggugguggaggacgagggcugcaccagccugagcggcuucagcuacauggagcugaaggugggcuacaucagcgccaucaaggugaacggcuucaccugcaccggcguggugaccgaggccgagaccuacaccaacuucgugggcuacgugaccaccaccuucaagagaaagcacuucagacccaugcccgacgccugcagagccgcccacgacuggaagaucgccggcgaccccagauacgaggacagccugcagaaccccuaccccgacuaccacuggcugagaaccgugaagaccaccaaggagagccuggugaucaucagccccagcguggccgaccuggaccccuacgacaagagccugcacagcagaguguuccccagcggcaagugccugggcaucaccgugagcagcaccuacugccccaccaaccacgacuacaccaucuggaugcccguggaggccagacugggcaccagcugcgacaucuucaccaacagcagaggcaagaaggccagcaagggcggcagaaccugcggcuucguggacgagagaggccuguacaagagccugaagggcgccugcaagcugaagcugugcggcgugcccggccugagacugauggacggcaccugggugagcauccagaccagcgacgacgugaaguggugcccccccgaccagcuggugaaccugcacgacuuccacagcgacgagaucgagcaccuggugguggaggagcugaucaagaagagagagggcugccuggacgcccuggagagcaucaugaccaccaagagcgugagcuucagaagacugagccaccugagaaagcuggugcccggcuucggcaaggccuacaccaucuucaacaacacccugauggaggccgacgcccacuacaagagcgugagaaccuggaacgaggugauccccagcaagggcugccugaaggugggcggcagaugccacccccccgugaacggcguguucuucaacggcaucauccugggccccgacggcaacgugcugauccccgagaugcagagcagccugcugcagcagcacauggagcugcuggagagcagcgugaucccccugaugcacccccuggccgaccccagcaccguguucaaggacggcgacgaggccgaggacuucguggaggugcaccugcccgacgugcacaagcaggugagcgacguggaccugggccugcccagcuggggcaaguaccugcugaugagcgccggcgcccuggccacccugauccuggccaucuuccugaucaccugcugcagaagagccaacagaaccaagagcacccagagaggccacagagagagcggcggcaaggugagcguggccccccagaacggcaagaucaucagcagcugggagcuguacaagagcgagagcgagaccggcauguga

SEQ ID NO: 191479 - RNA, 1575 nt, Artificial Sequence; identical to SEQ ID NO: 191470
  derived and/or modified CDS sequence (opt4) from glycoprotein__RABV__JX871869.1

SEQ ID NO: 191480 - RNA, 1575 nt, Artificial Sequence
  derived and/or modified CDS sequence (opt4) from glycoprotein__RABV__JX871870.1
augaucuuccaggcccugcuguucgugccccugcugaucagcagccugugccugggcaaguuccccaucuacaccauccccgacaagcugggccccuggagccccaucgacauccaccaccugagcugccccaacaaccuggugguggaggacgagggcugcaccagccugagcggcuucagcuacauggagcugaaggugggcuacaucagcgccaucaaggugaacggcuucaccugcaccggcguggugaccgaggccgagaccuacaccaacuucgugggcuacgugaccaccaccuucaagagaaagcacuucagacccauccccgacgccugcagagccgccuacaacuggaagaucgccggcgaccccagauacgaggagagccugcagaaccccuaccccgacuaccacuggcugagaaccgugaagaccaccaaggagagccugaucaucaucagccccagcguggccgaccuggaccccuacgacaagagccugcacagcagacuguuccccggcggcaagugccugggcaucaccaucagcagcaccuacugcagcaccaaccacgacuacaccaucuggaugcccgaggagcccagacugggcaccagcugcgacaucuucaccaacagcaagggcaagaaggccagcaagggcggcaaggugugcggcuucguggacgagagaggccuguacaagagccugaagggcgccugcaagcugaagcugugcggcgugagcggccugagacugauggacggcaccugggugaccauccagaccagcgacgagaucaaguggugcccccccgaccagcuggugaaccugcacgacuuccacagcgacgagaucgagcaccuggugguggaggagcuggugaagaagagagaggagugccuggacgcccuggagagcaucaugaccaccaagagcgugagcuucagaagacugagcuaccugagaaagcuggugcccggcuucggcaaggccuacaccaucuucaacaagacccugauggaggccgacgcccacuacaagagcgugagaaccuggaacgagaucauccccagcaagggcugccugaaggugagcgacagaugccacccccacguggacggcguguucuucaacggcaucauccugggccccgacggcaacgugcugauccccgagaugcagagcagccugcugcagcagcacauggagcugcuggagagcagcgugaucccccugaugcacccccuggccgaccccagcaccguguucaaggacggcgacgaggccgaggacuucguggaggugcaccugcccgacgugcacaagcagaucagcggcguggaccugggccugcccagcuggggcaaguaccugcugaugaucgccggcggccuggccacccuggugcugaucaucuuccugauggccugcugcagaagaaccaagagaaccgagagcagaagaagaggcagcggcgagagcggcgagaaggugcuggccaccccccagcccaagaagguggugagcagcugggagcuguacaagagagagggcgacgccagacuguga

SEQ ID NO: 191481 - RNA, 1575 nt, Artificial Sequence
  derived and/or modified CDS sequence (opt4) from glycoprotein__RABV__JX871871.1
augaucccccaggcccugcuguucgugccccugcugauccccagccugugccugggcgaguuccccaucuacaccauccccgacaagcugggccccuggagccccaucgacauccaccaccugagcugccccaacaaccugguggccgagaacgacggcugcaccagccugagcggcuucagcuacauggagcugaaggugggcuacaucagcgccaucaaggugaacggcuucaccugcaccggcguggugaccgaggccgagaccuacaccaacuucgugggcuacgugaccaccaccuucaagagaaagcacuucagacccacccccgacgccugcagagccgcccacgacuggaagauggccggcgaccccagauacgaggccagccugcagaaccccuaccccgacuaccacuggcugagaaccgugaagaccaccaaggagagccuggugaucaucagccccagcguggccgaccuggaccccuacgacaagagccugcacagcagaguguuccccagcggcaagugccugggcaucaccgugagcagcaccuacugcagcaccaaccacgacuacaccaucuggaugcccguggagcccagacugggcaccagcugcgacaucuucaccaacagcagaggcaagagagccagcaagggcggcagagugugcggcuucguggacgagagaggccuguacaagagccugaagggcgccugcagacugaagcugugcggcgugcccggcaucagacugcuggacggcaccugggugagcauccagaccagcgaggacaucaaguggugcccccccgacagacuggugaaccugcacgacuuccacagcgacgagaucgagcaccuggugguggccgagcugaucaagagaagagagaacugccuggacgcccuggagagcaucaugaccaccaagagcgugagcuucagaagacugagccaccugagaaagcuggugcccggcuucggcaaggccuacaccaucuucaacaagacccugauggaggccgacgcccacuacaagagcgugaagaccuggaacgaggugauccccagcaagggcugccuggaggugggcggcagaugccacccccacgugaacggcguguucuucaacggcaucauccugggccccgacggcaacgugcugauccccgagaugcagagcagccugcugcagcagcacauggagcugcuggagagcagcgugaucccccugaugcacccccuggccgaccccagcaccguguucaaggagggcgacgaggccgaggacuucguggaggugcaccugcccgacgugcacaagcaggugagcgacguggaccugggccugcccagcuggggcaaguaccugcugaucagcgccggcgcccuggccauccugauccuggccaucgugcugaucaucugcugcagaagagugaacaagaccagaagcacccagagaggccacagagagagcggcggcaagaugagcguggugccccagaacggcaagaucaucagcagcugggagcuguacaagagcgagagcgagaccggccuguga

SEQ ID NO: 191482 - RNA, 1575 nt, Artificial Sequence; identical to SEQ ID NO: 191309
  derived and/or modified CDS sequence (opt4) from glycoprotein__RABV__JX871872.1

SEQ ID NO: 191483 - RNA, 1575 nt, Artificial Sequence; identical to SEQ ID NO: 191481
  derived and/or modified CDS sequence (opt4) from glycoprotein__RABV__JX871873.1

SEQ ID NO: 191484 - RNA, 1575 nt, Artificial Sequence
  derived and/or modified CDS sequence (opt4) from glycoprotein__RABV__JX871874.1
augauccugcaggcccugcuguucgugcccuuccuguuccccagccugugccugggcaaguuccccaucuacaccauccccgagaagcugggccccuggagccccaucgacauccaccaccugagcugccccaacaaccuggugguggaggacgagggcugcgacagccugagcggcuucagcuacauggagcugaaggugggcuacaucagcgccaucaaggugaacggcuucaccugcaccggcguggugaccgaggccgagaccuacaccaacuucgugggcuacgugaccaccaccuucaagagaaagcacuucagacccaugcccgacgccugcagagccgccuacaacuggaagaccgccggcgaccccagauacgaggagagccugcacaaccccuaccccgacuaccacuggcugagaaccgugaagaccaccaaggagagccugaucaucaucagccccagcguggccgaccuggaccccuacgacaagagccugcacagcagaguguuccccggcggcaagugccugggcaucaccgugagcagcaccuacugcagcaccaaccacgacuacaccaucuggaugcccgaggaggccagacugggcaccagcugcgacaucuucaccaacagcaagggcaagagagccagcaagggcggcagaaccugcggcuucguggacgagagaggccuguacaagagccugaagggcgccugcaagcugaagcugugcggcgugcccggccugagacugauggacggcaccuggguggccauccagacccccggcgagaccaaguggugcagccccgaccagcuggugaaccugcacgacuucagaagcgacgagaucgagcaccuggugguggaggagcugaucaagaagagagaggagugccuggacgcccuggagagcaucaugaccaccaagagcgugagcuucagaagacugagcaaccugagaaagcuggugcccggcuucggcaaggccuacaccaucuucaacaagacccugauggaggccgacgcccacuacaagagcgugagaaccugggacgagaucauccccagcaagggcugccugagagugggcggcagaugccacccccacgugaacggcguguucuucaacggcaucauccugggccccgacggccacgugcugauccccgagaugcagagcagccugcugcagcagcacauggagcugcuggagagcagcgugaucccccugauccacccccuggccgaccccagcaccguguucaaggacggcgacgaggccgaggacuucguggaggugcaccugcccgacgugcacaagcaggugagcggcguggaccugggccugcccaacuggggcaaguacgugcugaugggcgccggcgugcuggccaccgugauccugaccaucuuccugcugaccugcugcagaagagugaacagaaccaagcccaaccagcagagccugggcgagagcggcagaaaggugagcgugaccccccagaacggcaaggugaugagcagcugggaguacuacaagagcgagggcagaaccagccuguga

SEQ ID NO: 191485 - RNA, 1575 nt, Artificial Sequence
  derived and/or modified CDS sequence (opt4) from glycoprotein__RABV__JX871875.1
augaucccccaggcccugcuguacgugccccugcugauccccagccugugcuucggcggcuuccccaucuacaccauccccgacaagcugggccccuggagccccaucgacauccaccaccugagcugccccaacaaccuggugguggaggacgagggcugcaccagccugagcggcuucagcuacauggagcugaaggugggcuacaucagcgccaucaaggugaacggcuucaccugcaccggcguggugaccgaggccgagaccuacaccaacuucgugggcuacgugaccaccaccuucaagagaaagcacuucagacccaugcccgacgccugcagagccgccuacaacuggaagauggccggcgaccccagauacgaggagagccugcagaaccccuaccccgacuacagcuggcugagaaccgugaagaccaccaaggagagccugaucaucaucagccccagcguggccgaccuggaccccuacgacaagagccugcacagcagaguguuccccggcggcaagugccugggcaucaccaucagcagcaccuacugcagcaccaaccacgacuacaccaucuggaugcccgaggaggccagacugggcaccagcugcgacaucuucaccaacagcagaggcaagagagccagcaagggcggcaagaccugcggcuucauggacgagagaggccuguacaagagccugaagggcgccugcaagcugaagcugugcggcgugcccggccugagacugauggacggcaccugggugaccauccagaccagcgacgagaccaaguggugccccagcgaccagcuggugaaccugcacgacuuccacagcgacgagaucgagcaccuggugguggaggagcuggugaagaagagagaggagugccuggacgcccuggagagcaucaugaccaccaagagcgugagcuucagaagacugagccaccugagaaagcuggugcccggcuucggcaaggccuacaccaucuucaacaagacccugauggaggccgacgcccacuacaagagcaucagaaccuggaacgagaucauccccagcaagggcugccugaaggugggcggcagaugccacccccacguggacggcguguucuucaacggcaucauccugggccccgacggcaacgugcugauccccgagaugcagagcagccugcugcagcagcacguggagcugcuggagagcagcgugaucccccugaugcacccccuggccgaccccagcaccguguucaaggacggcgacgaggccgaggacuucguggaggugcaccugcccgacauccacaagcaggugagcggcguggaccugggccugcccaacuggggcaaguaccugcugaugagcgccggcgcccuggccacccugaugcugaucauccugcugaugaccugcugcagaagagccaacagaaccgagagcauccagagagaccccggcgagagcggcagaaaggugagcaucaccagccccgacggcaaggugaucagcagcugggagcuguacaagagcggcggcgagaccagacuguga

SEQ ID NO: 191486 - RNA, 1575 nt, Artificial Sequence; identical to SEQ ID NO: 191328
  derived and/or modified CDS sequence (opt4) from glycoprotein__RABV__JX871876.1

SEQ ID NO: 191487 - RNA, 1575 nt, Artificial Sequence; identical to SEQ ID NO: 191480
  derived and/or modified CDS sequence (opt4) from glycoprotein__RABV__JX871877.1

SEQ ID NO: 191488 - RNA, 1575 nt, Artificial Sequence; identical to SEQ ID NO: 191309
  derived and/or modified CDS sequence (opt4) from glycoprotein__RABV__JX871879.1

SEQ ID NO: 191489 - RNA, 1575 nt, Artificial Sequence
  derived and/or modified CDS sequence (opt4) from glycoprotein__RABV__JX871880.1
augaucccccaggcccugcuguucgugcccuuccuguuccccagccugugccugggcaaguuccccaucuacaccauccccgagaagcugggccccuggagccccaucgacauccaccaccugagcugccccaacaaccuggugguggaggacgagggcugcgacagccugagcggcuucagcuacauggagcugaaggugggcuacaucagcgccaucaaggugaacggcuucaccugcaccggcguggugaccgaggccgagaccuacaccaacuucgugggcuacgugaccaccaccuucaagagaaagcacuucagacccaugcccgacgccugcagagccgccuacaacuggaagaccgccggcgaccccagauacgaggagagccugcacaaccccuaccccgacuaccacuggcugagaaccgugaagaccaccaaggagagccugaucaucaucagccccagcguggccgaccuggaccccuacgacaagagccugcacagcagaguguuccccggcggcaagugccugggcaucaccaucagcagcaccuacugcagcaccaaccacgacuacaccaucuggaugcccgaggaggccagacugggcaccagcugcgacaucuucaccaacagcaagggcaagagagccagcaagggcggcagaaccugcggcuucguggacgagagaggccuguacaagagccugaagggcgccugcaagcugaagcugugcggcgugcccggccugagacugauggacggcaccuggguggccauccagacccccggcgagaccaaguggugcagccccgaccagcuggugaaccugcacgacuucagaagcgacgagaucgagcaccuggugguggaggagcugaucaagaagagagaggagugccuggacgcccuggagagcaucaugaccaccaagagcgugagcuucagaagacugagcaaccugagaaagcuggugcccggcuucggcaaggccuacaccaucuucaacaagacccugauggaggccgacgcccacuacaagagcaucagaaccugggacgagaucauccccagcaagggcugccugagagugggcggcagaugccacccccacgugaacggcguguucuucaacggcaucauccugggccccgacggccacgugcugauccccgagaugcagagcagccugcugcagcagcacauggagcugcuggagagcagcgugaucccccugauccacccccuggccgaccccagcaccguguucaaggacggcgacgaggccgaggacuucguggaggugcaccugcccgacgugcacgagcagaucagcggcguggaccugggccugcccaacuggggcaaguacgugcugaugagcgccggcgugcuggccaccgugauccugaccaucuuccugcugaccugcugcagaagagugaacagaaccaagcccaagcagcagagccugggcgagagcggcagaaaggugagcgugaccccccagaacggcaaggugaugagcagcugggaguacuacaagagcgagggcagaaccagccuguga

SEQ ID NO: 191490 - RNA, 1575 nt, Artificial Sequence
  derived and/or modified CDS sequence (opt4) from glycoprotein__RABV__JX871881.1
augaucccccaggcccugcugagcgugccccugcugaucagcagccugugcuucggcaaguuccccaucuacaccauccccgagaagcugggccccuggagccccaucgacauccaccaccugagcugccccaacaaccuggugguggaggacgagggcugcaacagccugagcggcuucagcuacauggagcugaaggugggcuacaucagcgccaucaaggugaacggcuucaccugcaccggcguggugaccgaggccgagaccuacaccaacuucgugggcuacgugaccaccaccuucaagagaaagcacuucagacccaugcccgacgccugcagagccgccuacaacuggaagaccgccggcgaccccagauacgaggagagccugcacaaccccuaccccgacuaccacuggcugagaaccgugaagaccaccaaggagagccugaucaucaucagccccagcguggccgaccuggaccccuacgacaagagccugcacagcagaaucuuccccggcggcaagugccugggcaucaccaucagcagcaccuacugcagcaccaaccacgacuacaccaucuggaugcccgaggaggccagacugggcaccagcugcgacaucuucaccaacagcaagggcaagagagccagcaagggcggcagaaccugcggcuucguggacgagagaggccuguacaagagccugaagggcgccugcaagcugaagcugugcggcgugcccggccugagacugauggacggcaccuggguggccauccagacccccaacgagaccaaguggugcagccccgaccagcuggugaacgugcacgacuucagaagcgacgagaucgagcaccuggugguggaggagcugaucagaaagagagaggagugccuggacgcccuggagagcaucaugaccaccaagagcgugagcuucagaagacugagcaaccugagaaagcuggugcccggcuucggcaaggccuacaccaucuucaacaagacccugauggaggccgacgcccacuacaagagcgugagaaccuggaacgagaucauccccagcagaggcugccugaaggugggcggcagaugccacccccacgugaacggcguguucuucaacggcaucauccugggccccgacggccacauccugauccccgagaugcagagcagccugcugcagcagcacauggagcugcuggagagcagcgugaucccccugauccacccccuggccgaccccagcaccguguucaaggacggcgacgaggccgaggacuucguggaggugcaccugcccgacgugcaccagcaggugagcggcguggaccugggccugcccgacuggggcaaguacgugcugaugagcgccggcgcccuggccaccgugaugcugaccaucuuccugaucaccugcugcagaagagugaagagaaccgagagcauccagcaggaccugggcgagagcggcagaaaggugagcgugaccccccagaacggcaaggugaugagcagcugggaguacuacaagagcggcggcggcaccagacuguga

SEQ ID NO: 191491 - RNA, 1575 nt, Artificial Sequence
  derived and/or modified CDS sequence (opt4) from glycoprotein__RABV__JX944575.1
auggugccccaggcccugcuguucgugccccugcugguguucccccugugcuucggcaaguuccccaucuacaccauccccgacaagcugggccccuggagccccaucgacauccaccaccugagcugccccaacaaccuggugguggaggacgagggcugcaccaaccugagcggcuucagcuacauggagcugaaggugggcuacaucagcgccaucaagaugaacggcuucaccugcaccggcguggugaccgaggccgagaccuacaccaacuucgugggcuacgugaccaccaccuucaagagaaagcacuucagacccacccccgacgccugcagagccgccuacaacuggaagauggccggcgaccccagauacgaggagagccugcacaaccccuaccccgacuaccacuggcugagaaccgugaagaccaccaaggagagccuggugaucaucagccccagcguggccgaccuggaccccuacgacagaagccugcacagcagaguguuccccggcggcaacugcagcggcguggccgugagcagcaccuacugcagcaccaaccacgacuacaccaucuggaugcccgagaaccccagacugggcaugagcugcgacaucuucaccaacagcagaggcaagagagccagcaagggcagcgagaccugcggcuucguggacgagagaggccuguacaagagccugaagggcgccugcaagcugaagcugugcggcgugcugggccugagacugauggacggcaccuggguggccaugcagaccagcaacgagaccaaguggugcccccccggccagcuggugaaccugcacgacuucagaagcgacgagaucgagcaccuggugguggaggagcuggugaagaagagagaggagugccuggacgcccuggagagcaucaugaccaccaagagcgugagcuucagaagacugagccaccugagaaagcuggugcccggcuucggcaaggccuacaccaucuucaacaagacccugauggaggccgacgcccacuacaagagcgugagaaccuggaacgagaucauccccagcaagggcugccugagagugggcggcagaugccacccccacgugaacggcguguucuucaacggcaucauccugggccccgacggcaacgugcugauccccgagaugcagagcagccugcugcagcagcacauggagcugcuggugagcagcgugaucccccugaugcacccccuggccgaccccagcaccguguucaagaacggcgacgaggccgaggacuucguggaggugcaccugcccgacgugcacgagagaaucagcggcguggaccugggccugcccaacuggggcaaguacgugcugcugagcgccggcgcccugaccgcccugaugcugaucaucuuccugaugaccugcuggagaagagugaacagaagcgagcccacccagcacaaccugagaggcaccggcagagaggugagcgugaccccccagagcggcaagaucaucagcagcugggagagcuacaagagcggcggcgagaccggccuguga

SEQ ID NO: 191492 - RNA, 1575 nt, Artificial Sequence
  derived and/or modified CDS sequence (opt4) from glycoprotein__RABV__JX944576.1
auggugcaccaggugcugcuguucgugccccugcugguguucagccugugcuucggcaaguuccccaucuacaccauccccgacaagcugggccccuggagccccaucgacauccaccaccugagcugccccaacaaccuggugguggaggacgagggcugcaccaaccugagcggcuucagcuacauggagcugaaggugggcuacaucagcgccaucaaggugaacggcuucaccugcaccggcguggugaccgaggccgagaccuacaccaacuucgugggcuacgugaccaccaccuucagaagaaagcacuucagacccacccccgacgccugcagagccgccuacaacuggaagcuggccggcgaccccagauacgaggagagccugcacaaccccuaccccgacuaccacuggcugagaaccgugaagaccaccaaggagagccuggugaucaucagccccagcguggccgaccuggaccccuacgacaagagccugcacagcagaguguuccccggcggcaagugcagcggcaucaccgugagcagcaccuacugcagcaccaaccacgacuacaccaucuggaugcccgagaaccccagacugggcaccagcugcgacaucuucgugaacagcagaggcaagagagccagcaagggcggcaagaccugcggcuucguggacgagagaggccuguacaagagccugaagggcgccugcaagcugaagcugugcggcgugcccggccugagacugauggacggcaccugggccgccauccagaccagcgacgagaccaaguggugcccccccgaccagcuggugaaccugcacgacuacagaagcgacgagaucgagcaccuggugguggaggagcuggugaagaagagagaggagugccuggacgcccuggagagcaucaugaccaccaagagcgugagcuucagaagacugagccaccugagaaagcuggugcccggcuucggcaaggccuacaccaucuucaacaagacccugauggaggccgacgcccacuacaagagcgugagaaccuggaacgagaucauccccagcaagggcugccugagagugggcggcagaugccacccccacgugaacggcguguucuucaacggcaucauccugggccccgacggccacgugcugauccccgagaugcagagcagccugcugcagcagcacauggagcugcuggagagcagcgugaucccccugaugcacccccuggccgaccccagcaccguguucaaggacggcgacgaggccgaggacuucguggaggugcaccugcccgacgugcacaagcugaucagcggcguggaccugggccugcccagcuggggcaaguacgugcugaugagcgccugcgugcugaccgcccugaugcugaugaucuuccugaugaccugcugcagaagaggcaaccaggccggcagcaagcagcacggccuggagggcaccggcagaaaggugagcgugaccagccagaacggcaaggugaucagcagcugggagagcuacaagagcggcggcgagaccagacuguga

SEQ ID NO: 191493 - RNA, 1575 nt, Artificial Sequence; identical to SEQ ID NO: 190959
  derived and/or modified CDS sequence (opt4) from glycoprotein__RABV__JX944577.1

SEQ ID NO: 191494 - RNA, 1575 nt, Artificial Sequence
  derived and/or modified CDS sequence (opt4) from glycoprotein__RABV__JX944578.1
auggugccccaggugcugcuguucgugccccugcugguguucagccugugcuucggcaaguuccccaucuacaccauccccgacaagcugggccccuggagccccaucgacauccaccaccugagcugccccaacaaccuggugguggaggacgagggcugcaccaaccugagcggcuucagcuacauggagcugaaggugggcuacaucagcgccaucaaggugaacggcuucaccugcaccggcguggugaccgaggccgagaccuacaccaacuucgugggcuacgugaccaccaccuucagaagaaagcacuucagacccacccccgacgccugcagagccgccuacaacuggaagcuggccggcgaccccagauacgaggagagccugcacaaccccuaccccgacuaccacuggcugagaaccgugaagaccaccaaggagagccuggugaucaucagccccagcguggccgaccuggaccccuacgacaagagccugcacagcagaguguuccccggcggcaagugcagcggcaucaccaucagcagcaccuacugcagcaccaaccacgacuacaccaucuggaugcccgagaaccccagacugggcaccagcugcgacaucuucgugaacagcagaggcaagagagccagcaagggcggcaagaccugcggcuucguggacgagagaggccuguacaagagccugaagggcgccugcaagcugaagcugugcggcgugcccggccugagacugauggacggcaccugggccgccauccagaccagcgacgagaccaaguggugcccccccgaccagcuggugaaccugcacgacuucagaagcgacgagaucgagcaccuggugguggaggagcuggugaagaagagagaggagugccuggacgcccuggagagcaucaugaccaccaagagcgugagcuucagaagacugagccaccugagaaagcuggugcccggcuucggcaaggccuacaccaucuucaacaagacccugauggaggccgacgcccacuacaagagcgugagaaccuggaacgagaucauccccagcaagggcugccugagagugggcggcagaugccacccccacgugaacggcguguucuucaacggcaucauccugggccccgacggccacgugcugauccccgagaugcagagcagccugcugcagcagcacauggagcugcuggagagcagcgugaucccccugaugcacccccuggccgaccccagcaccguguucaaggacggcgacgaggccgaggacuucguggaggugcaccugcccgacgugcacaagcugaucagcggcguggaccugggccugcccagcuggggcaaguacgugcugaugagcgccggcgugcugaccgcccugaugcugaugaucuuccugaugaccugcugcagaagaggcaaccaggccggcagcaagcagcacggccuggagggcaccggcagaaaggugagcgugaccagccagaacggcaaggugaucagcagcugggagagcuacaagagcggcggcgagaccagacuguga

SEQ ID NO: 191495 - RNA, 1575 nt, Artificial Sequence; identical to SEQ ID NO: 190959
  derived and/or modified CDS sequence (opt4) from glycoprotein__RABV__JX944579.1

SEQ ID NO: 191496 - RNA, 1575 nt, Artificial Sequence; identical to SEQ ID NO: 190959
  derived and/or modified CDS sequence (opt4) from glycoprotein__RABV__JX944580.1

SEQ ID NO: 191497 - RNA, 1575 nt, Artificial Sequence; identical to SEQ ID NO: 190959
  derived and/or modified CDS sequence (opt4) from glycoprotein__RABV__JX944581.1

SEQ ID NO: 191498 - RNA, 1575 nt, Artificial Sequence
  derived and/or modified CDS sequence (opt4) from glycoprotein__RABV__JX944582.1
auggugccccaggugcugugguucgugccccugcugguguucagcaugugcuucggcaaguuccccaucuacaccauccccgacaagcugggccccuggagccccaucgacauccaccaccugagcugccccaacaaccuggugguggaggacgagggcugcaccaaccugagcggcuucagcuacauggagcugaaggugggcuacaucagcgccaucaaggugaacggcuucaccugcaccggcguggugaccgaggccgagaccuacaccaaccuggugggcuacgugaccaccaccuucaagagaaagcacuucagacccacccccgacgccugcagagccgccuacaacuggaagauggccggcgaccccagauacgaggagagccugcacaaccccuaccccgacuaccacuggcugagaaccgugaagaccaccaaggagagccuggugaucaucagccccagcguggccgaccuggaccccuacgacaagagccugcacagcagaguguuccccagcggcaagugcagcggcaucaccaucagcagcaccuacugcagcaccaaccacgacuacaccaucuggaugcccgagaaccccagacugggcaccagcugcgacaucuucaccaacagcagaggcaagagagccagcaagggcagcaagaccugcggcuucguggacgagagaggccuguacaagagccugaagggcgccugcaagcugaagcugugcggcgugcugggccugagacugauggacggcaccuggguggccaugcagaccagcgacgagaccaaguggugcccccccgaccagcuggugaaccugcacgacuucagaagcgacgagaucgagcaccuggugguggaggagcuggugaagaagagagaggagugccuggacgcccuggagagcaucaugaccaccaagagcgugagcuucagaagacugagccaccugagaaagcuggugcccggcuucggcaaggccuacaccaucuucaacaagacccugauggaggccgacgcccacuacaagagcgugagaaccuggaacgagaucauccccagcaagggcugccugagagugggcggcagaugccacccccacgugaacggcguguucuucaacggcaucauccugggccccgacggccacgugcugauccccgagaugcagagcagccugcugcagcagcacauggagcugcuggagagcagcgugaucccccugaugcacccccuggccgaccccagcaccguguucaaggacggcgacgaggccgaggacuucguggaggugcaccugcccgacgugcacaagcagaucagcggcguggaccugggccugcccaacuggggcaaguacgugcuggugagcgccggcgugcugguggugcugaugcuggccauccugaucaugaccugcugcggcagagugaacagacccaagagcacccagcacagccuggagggcaccggcagaaaggugagcgugaccagccagagcggcaaggugaucagcagcugggagagcuacaagagcggcggcgagaccagacuguga

SEQ ID NO: 191499 - RNA, 1575 nt, Artificial Sequence
  derived and/or modified CDS sequence (opt4) from glycoprotein__RABV__JX944583.1
augaucccccaggugcugugguucgugccccugcugguguucagcaugugcuucggcaaguuccccaucuacaccauccccgacaagcugggccccuggagccccaucgacauccaccaccugagcugccccaacaaccuggugguggaggacgagggcugcaccaaccugagcggcuucagcuacauggagcugaaggugggcuacaucagcgccaucaaggugaacggcuucaccugcaccggcguggugaccgaggccgagaccuacaccaacuucgugggcuacgugaccaccaccuucaagagaaagcacuucagacccacccccgacgccugcagagccgccuacaacuggaagauggccggcgaccccagauacgaggagagccugcacaaccccuaccccgacuaccacuggcugagaaccgugaagaccaccaaggagagccuggugaucaucagccccagcguggccgaccuggaccccuacgacaagagccugcacagcagaguguuccccagcggcaagugcagcggcaucaccaucagcagcaccuacugcagcaccaaccacgacuacaccaucuggaugcccgagaaccccagacugggcaccagcugcgacaucuucaccaacagcagaggcaagagagccagcaagggcagcaagaccugcggcuucguggacgagagaggccuguacaagagccugaagggcgccugcaagcugaagcugugcggcgugcugggccugagacugauggacggcaccuggguggccaugcagaccagcgacgagaccaaguggugcccccccgaccagcuggugaaccugcacgacuucagaagcgacgagaucgagcaccuggugguggaggagcuggugaagaagagagaggagugccuggacgcccuggagagcaucaugaccaccaagagcgugagcuucagaagacugagccaccugagaaagcuggugcccggcuucggcaaggccuacaccaucuucaacaagacccugauggaggccgacgcccacuacaagagcgugagaaccuggaacgagaucauccccagcaagggcugccugagagugggcggcagaugccacccccacgugaacggcguguucuucaacggcaucauccugggccccgacggccacgugcugauccccgagaugcagagcagccugcugcagcagcacauggagcugcuggagagcagcgugaucccccugaugcacccccuggccgaccccagcaccguguucaaggacggcgacgaggccgaggacuucguggaggugcaccugcccgacgugcacaagcagaucagcggcguggaccugggccugcccaacuggggcaaguacgugcuggugagcgccggcgugcugguggugcugaugcuggccaucuucaucaugaccugcugcggcagagugaacagacccaagagcacccagcacagccuggagggcaccggcagaaaggugagcgugaccagccagagcggcaaggugaucagcagcugggagagcuacaagagcggcggcgagaccagacuguga

SEQ ID NO: 191500 - RNA, 1575 nt, Artificial Sequence; identical to SEQ ID NO: 190959
  derived and/or modified CDS sequence (opt4) from glycoprotein__RABV__JX944584.1

SEQ ID NO: 191501 - RNA, 1575 nt, Artificial Sequence
  derived and/or modified CDS sequence (opt4) from glycoprotein__RABV__JX944586.1
auggugccccaggugcugcuguucgugccccugcugguguucagcaugugcuucggcaaguuccccaucuacaccauccccgacaagcugggccccuggagccccaucgacauccaccaccugagcugccccaacaaccuggugguggaggacgagggcugcaccaaccugagcggcuucagcuacauggagcugaaggugggcuacaucagcgccaucaaggugaacggcuucaccugcaccggcguggugaccgaggccgagaccuacaccaacuucgugggcuacgugaccaccaccuucaagagaaagcacuucagacccacccccgacgccugcagagccgccuacaacuggaagauggccggcgaccccagauacgaggagagccugcacaaccccuaccccgacuaccacuggcugagaaccgugaagaccaccaaggagagccuggugaucaucagccccagcguggccgaccuggaccccuacgacaagagccugcacagcagaguguuccccagcggcaagugcagcggcaucaccaucagcagcaccuacugcagcaccaaccacgacuacaccaucuggaugcccgagaaccccagacugggcaccagcugcgacaucuucaccaacagcagaggcaagagagccagcaagggcggcaagaccugcggcuucguggacgagagaggccuguacaagagccugaagggcgccugcaagcugaagcugugcggcgugcugggccugagacugauggacggcaccuggguggccaugcagaccagcgacgagaccaaguggugcccccccgaccagcuggugaaccugcacgacuucagaagcgacgagaucgagcaccuggugguggaggagcuggugaagaagagagaggagugccuggacgcccuggagagcaucaugaccaccaagagcgugagcuucagaagacugagccaccugagaaagcuggugcccggcuucggcaaggccuacaccaucuucaacaagacccugauggaggccgacgcccacuacaagagcaucagaaccuggaacgagaucauccccagcaagggcugccugagagugggcggcagaugccacccccacgugaacggcguguucuucaacggcaucauccugggccccgacggccacgugcugauccccgagaugcagagcagccugcugcagcagcacauggagcugcuggagagcagcgugaucccccugaugcacccccuggccgaccccagcaccguguucaaggacggcgacgaggccgaggacuucguggaggugcaccugcccgacgugcacaagcagaucagcggcguggaccugggccugcccagcuggggcaaguacgugcuggugagcgccggcgugcugguggugcugaugcugaccaucuucaucaugaccugcugcggcagagugagaagacccaagagcacccagcacagccugggcgagaccggcagaaaggugagcgugaccagccagagcggcaaggugaucagcagcugggagagcuacaagagcggcggcgagaccagacuguga

SEQ ID NO: 191502 - RNA, 1575 nt, Artificial Sequence; identical to SEQ ID NO: 190959
  derived and/or modified CDS sequence (opt4) from glycoprotein__RABV__JX944587.1

SEQ ID NO: 191503 - RNA, 1575 nt, Artificial Sequence
  derived and/or modified CDS sequence (opt4) from glycoprotein__RABV__JX944588.1
auggugccccaggugcugcuguucgugccccugcugguguucagccugugcuucggcaaguuccccaucuacaccauccccgacaagcugggccccuggagccccaucgacauccaccaccugagcugccccaacaaccuggugguggaggacgagggcugcaccaaccugagcggcuucagcuacauggagcugaaggugggcuacaucagcgccaucaaggugaacggcuucaccugcaccggcguggugaccgaggccgagaccuacaccaacuucgugggcuacgugaccaccaccuucagaagaaagcacuucagacccacccccgacgccugcagagccgccuacaacuggaagcuggccggcgaccccagauacgaggagagccugcacaaccccuaccccgacuaccacuggcugagaaccgugaagaccaccaaggagagccuggugaucaucagccccagcguggccgaccuggaccccuacgacaagagccugcacagcagaguguuccccggcggcaagugcagcggcaucaccaucagcagcaccuacugcagcaccaaccacgacuacaccaucuggaugcccgagaaccccagacugggcaccagcugcgacaucuucgugaacagcagaggcaagagagccagcaagggcggcaagaccugcggcuucguggacgagagaggccuguacaagagccugaagggcgccugcaagcugaagcugugcggcgugcccggccugagacugauggacggcaccugggccgccauccagaccagcgacgagaccaaguggugcccccccaaccagcuggugaaccugcacgacuucagaagcgacgagaucgagcaccuggugguggaggagcuggugaagaagagagaggagugccuggacgcccuggagagcaucaugaccaccaagagcgugagcuucagaagacugagccaccugagaaagcuggugcccggcuucggcaaggccuacaccaucuucaacaagacccugauggaggccgacgcccacuacaagagcgugagaaccuggaacgagaucauccccagcaagggcugccugagagugggcggcagaugccacccccacgugaacggcguguucuucaacggcaucauccugggccccgacggccacgugcugauccccgagaugcagagcagccugcugcagcagcacauggagcugcuggagagcagcgugaucccccugaugcacccccuggccgaccccagcaccguguucaaggacggcgacgaggccgaggacuucguggaggugcaccugcccgacgugcacaagcugaucagcggcguggaccugggccugcccagcuggggcaaguacgugcugaugagcgccggcgugcugaccgcccugaugcugaugaucuuccugaugaccugcugcagaagaggcaaccaggccggcagcaagcagcacggccuggagggcaccggcagaaaggugagcgugaccagccagaacggcaaggugaucagcagcugggagagcuacaagagcggcggcgagaccagacuguga

SEQ ID NO: 191504 - RNA, 1575 nt, Artificial Sequence
  derived and/or modified CDS sequence (opt4) from glycoprotein__RABV__JX944593.1
auggugccccaggugcugcuguucgugccccugcuggccuucagcaugugcuucggcaaguuccccaucuacaccauccccgacaagcugggccccuggagccccaucgacauccaccaccugagcugccccaacaaccuggugguggaggacgagggcugcaccaaccugagcggcuucagcuacauggagcugaaggugggcuacaucagcgccaucaaggugaacggcuucaccugcaccggcguggugaccgaggccgagaccuacaccaacuucgugggcuacgugaccaccaccuucaagagaaagcacuucagacccacccccgacgccugcagagccgccuacaacuggaagauggccggcgaccccagauacgaggagagccugcacaaccccuaccccgacuaccacuggcugagaaccgugaagaccaccaaggagagccuggugaucaucagccccagcguggccgaccuggaccccuacgacaagagccugcacagcagaguguuccccagcggcaagugcagcggcaucaccaucagcagcaccuacugcagcaccaaccacgacuacaccaucuggaugcccgagaaccccagacugggcaccagcugcgacaucuucaccaacagcagaggcaagagagccagcaagggcggcaagaccugcggcuucguggacgagagaggccuguacaagagccugaagggcgccugcaagcugaagcugugcggcgugcugggccugagacugauggacggcaccuggguggccaugcagaccagcgacgagaccaaguggugcccccccgaccagcuggugaaccugcacgacuucagaagcgacgagaucgagcaccuggugguggaggagcuggugaagaagagagaggagugccuggacgcccuggagagcaucaugaccaccaagagcgugagcuucagaagacugagccaccugagaaagcuggugcccggcuucggcaaggccuacaccaucuucaacaagacccugauggaggccgacgcccacuacaagagcgugagaaccuggaacgagaucauccccagcaagggcugccugagagugggcggcagaugccacccccacgugaagggcguguucuucaacggcaucauccugggccccgacggccacgugcugauccccgagaugcagagcagccugcugcagcagcacauggagcugcuggagagcagcgugaucccccugaugcacccccuggccgaccccagcaccguguucaaggacggcgacgaggccgaggacuucguggaggugcaccugcccgacgugcacaagcagaucagcggcguggaccugggccugcccagcuggggcaaguacgugcuggugagcgccggcgugcugguggugcugaugcugaccaucuucaucaucaccugcugcggcagagugcacagacccaagagcacccagcacggccugggcggcaccggcagaaaggugagcgugaccagccagagcggcaaggugaucagcagcugggagagcuacaagagcggcggcgagaccagacuguga

SEQ ID NO: 191505 - RNA, 1575 nt, Artificial Sequence
  derived and/or modified CDS sequence (opt4) from glycoprotein__RABV__JX987718.1
auggugccccaggugcugcuguucgugccccugcugguguucagcaugugcuucggcaaguuccccaucuacaccauccccgacaagcugggccccuggagccccaucgacauccaccaccugagcugccccaacaaccuggugguggaggacgagggcugcaccaaccugagcggcuucagcuacauggagcugaaggugggcuacaucagcgccaucaaggugaacggcuucaccugcaccggcguggugaccgaggccgagaccuacaccaacuucgugggcuacgugaccaccaccuucaagagaaagcacuucagacccacccccgacgccugcagagccgccuacaacuggaagauggccggcgaccccagauacgaggagagccugcacaaccccuaccccgacuaccacuggcugagaaccgugaagaccaccaaggagagccuggugaucaucagccccagcguggccgaccuggaccccuacgacaagagccugcacagcagaguguuccccagcggcaagugccugggcaucaccaucagcagcaccuacugcagcaccaaccacgacuacaccaucuggaugcccgagaaccccagacugggcaccagcugcgacaucuucaccaacagcagaggcaagagagccagcaagggcagcaagaccugcggcuucguggacgagagaggccuguacaagagccugaagggcgccugcaagcugaagcugugcggcgugcugggccugagacugauggacggcaccuggguggccaugcagaccagcgacgagaccaaguggugcccccccgaccagcuggugaaccugcacgacuucagaagcgacgagaucgagcaccuggugguggaggagcuggugaagaagagagaggagugccuggacgcccuggagagcaucaugaccaccaagagcgugagcuucagaagacugagccaccugagaaagcuggugcccggcuucggcaaggccuacaccaucuucaacaagacccugauggaggccgacgcccacuacaagagcgugagaaccuggaacgagaucauccccagcaagggcugccugagagugggcggcagaugccacccccacgugaacggcguguucuucaacggcaucauccugggccccgacggccacgugcugauccccgagaugcagagcagccugcugcagcagcacauggagcugcuggagagcagcgugaucccccugaugcacccccuggccgaccccagcaccguguucaaggagggcgacgaggccgaggacuucguggaggugcaccugcccgacgugcacaagcagaucagcggcguggaccugggccugcccagcuggggcaaguacgugcuggugagcgccggcgugcugguggugcugaugcugaccaucuucaucaugaccugcugcggcagagugcacagacccaagagcacccagcacagccugggcggcaccggcagaaaggugagcgugaccagccagagcggcaaggugaucagcagcugggagagcuacaagagcggcggcgagaccagacuguga

SEQ ID NO: 191506 - RNA, 1575 nt, Artificial Sequence
  derived and/or modified CDS sequence (opt4) from glycoprotein__RABV__JX987719.1
auggugccccaggugcugcuguucgugccccugcugguguucagcaugugcuucggcaaguuccccaucuacaccauccccgacaagcugggccccuggagccccaucgacauccaccaccugagcugccccaacaaccuggugguggaggacgagggcugcaccaaccugagcggcuucagcuacauggagcugaaggugggcuacaucagcgccaucaaggugaacggcuucaccugcaccggcguggugaccgaggccgagaccuacaccaacuucgugggcuacgugaccaccaccuucaagagaaagcacuucagacccacccccgacgccugcagagccgccuacaacuggaagcuggccggcgaccccagauacgaggagagccugcacaaccccuaccccgacuaccacuggcugagaaccgugaagaccaccaaggagagccuggugaucaucagccccagcguggccgaccuggaccccuacgacaagagccugcacagcagaguguuccccagcggcaagugccugggcaucaccaucagcagcaccuacugcagcaccaaccacgacuacaccaucuggaugcccgagaaccccagacugggcaccagcugcgacaucuucaccaacagcagaggcaagagagccagcaagggcagcaagaccugcggcuucguggacgagagaggccuguacaagagccugaagggcgccugcaagcugaagcugugcggcgugcugggccugagacugauggacggcaccuggguggccaugcagaccagcgacgagaccaaguggugcccccccgaccagcuggugaaccugcacgacuucagaagcgacgagaucgagcaccuggugguggaggagcuggugaagaagagagaggagugccuggacgcccuggagagcaucaugaccaccaagagcgugagcuucagaagacugagccaccugagaaagcuggugcccggcuucggcaaggccuacaccaucuucaacaagacccugauggaggccgacgcccacuacaagagcaucagaaccuggaacgagaucauccccagcaagggcugccugagagugggcggcagaugccacccccacgugaacggcguguucuucaacggcaucauccugggccccgacggccacgugcugauccccgagaugcagagcagccugcugcagcagcacauggagcugcuggagagcagcgugaucccccugaugcacccccuggccgaccccagcaccguguucaaggacggcgacgaggccgaggacuucguggaggugcaccugcccgacgugcacaagcagaucagcggcguggaccugggccugcccagcuggggcaaguacgugcuggugagcgccggcgugcugguggugcugaugcugaccaucuucaucaugaccugcugcggcagagugagaagacccaagagcacccagcacagccugggcggcaccggcagaaaggugagcgugaccagccagagcggcaaggugaucagcagcugggagagcuacaagagcggcggcgagaccagacuguga

SEQ ID NO: 191507 - RNA, 1575 nt, Artificial Sequence; identical to SEQ ID NO: 191505
  derived and/or modified CDS sequence (opt4) from glycoprotein__RABV__JX987720.1

SEQ ID NO: 191508 - RNA, 1575 nt, Artificial Sequence
  derived and/or modified CDS sequence (opt4) from glycoprotein__RABV__JX987721.1
auggugccccaggugcugcuguucgugccccugcugguguucagccugugcuucggcaaguuccccaucuacaccauccccgacaagcugggccccuggagccccaucgacauccaccaccugagcugccccaacaaccuggugguggaggacgagggcugcaccaaccugagcggcuucagcuacauggagcugaaggugggcuacaucagcgccaucaaggugaacggcuucaccugcaccggcguggugaccgaggccgagaccuacaccaacuucgugggcuacgugaccaccaccuucagaagaagacacuucagacccacccccgacaccugcagagccgccuacaacuggaagcuggccggcgaccccagauacgaggagagccugcacaaccccuaccccgacuaccacuggcugagaaccgugaagaccaccaaggagagccuggugaucaucagccccagcguggccgaccuggaccccuacgacaagagccugcacagcagaguguuccccggcggcaagugcagcggcaucaccgugagcagcaccuacugcagcaccaaccacgacuacaccaucuggaugcccgagaaccccagacugggcaccagcugcgacaucuucgugaacagcagaggcaagagagccagcaagggcggcaagaccugcggcuucguggacgagagaggccuguacaagagccugaagggcgccugcaagcugaagcugugcggcgugcccggccugagacugauggacggcaccugggccgccauccagaccagcgacgagaccaaguggugcccccccgaccagcuggugaaccugcacgacuucagaagcgacgagaucgagcaccuggugguggaggagcuggugaagaagagagaggagugccuggacgcccuggagagcaucaugaccaccaagagcgugagcuucagaagacugagccaccugagaaagcuggugcccggcuucggcaaggccuacaccaucuucaacaagacccugauggaggccgacgcccacuacaagagcgugagaaccuggaacgagaucauccccagcaagggcugccugagagugggcggcagaugccacccccacgugaacggcguguucuucaacggcaucauccugggccccgacggccacgugcugauccccgagaugcagagcagccugcugcagcagcacauggagcugcuggagagcagcgugaucccccugaugcacccccuggccgaccccagcaccguguucaaggacggcggcgaggccgaggacuucguggaggugcaccugcccgacgugcacaagcugaucagcggcguggaccugggccugcccagcuggggcaaguacgugcugaugagcgccggcgugcugaccgcccugaugcugaugaucuuccugaugaccugcugcagaagaggcaaccaggccggcagcaagcagcacggccuggagggcaccggcagaaaggugagcgugaccagccagaacggcaaggugaucagcagcugggagagcuacaagagcggcggcgagaccagacuguga

SEQ ID NO: 191509 - RNA, 1575 nt, Artificial Sequence; identical to SEQ ID NO: 191505
  derived and/or modified CDS sequence (opt4) from glycoprotein__RABV__JX987723.1

SEQ ID NO: 191510 - RNA, 1575 nt, Artificial Sequence
  derived and/or modified CDS sequence (opt4) from glycoprotein__RABV__JX987724.1
auggugccccaggugcugcuguucgugccccugcugguguucagccugugcuucggcaaguuccccaucuacaccauccccgacaagcugggccccuggagccccaucgacauccaccaccugagcugccccaacaaccuggugguggaggacgagggcugcaccaaccugagcggcuucagcuacauggagcugaaggugggcuacaucagcgccaucaaggugaacggcuucaccugcaccggcguggugaccgaggccgagaccuacaccaacuucgugggcuacgugaccaccaccuucagaagaaagcacuucagacccacccccgacgccugcagagccgccuacaacuggaagcuggccggcgaccccagauacgaggagagccugcacaaccccuaccccgacuaccacuggcugagaaccgugaagaccaccaaggagagccuggugaucaucagccccagcguggccgaccuggaccccuacgacaagagccugcacagcagaguguuccccggcggcaagugcagcggcaucaccgugagcagcaccuacugcagcaccaaccacgacuacaccaucuggaugcccgagaaccccagacugggcaccagcugcgacaucuucgugaacagcagaggcaagagagccagcaagggcggcaagaccugcggcuucguggacgagagaggccuguacaagagccugaagggcgccugcaagcugaagcugugcggcgugcccggccugagacugauggacggcaccugggccgccauccagaccagcgacgagaccaaguggugcccccccgaccagcuggugaaccugcacgacuucagaagcgacgagaucgagcaccuggugguggaggagcuggugaagaagagagaggagugccuggacgcccuggagagcaucaugaccaccaagagcgugagcuucagaagacugagccaccugagaaagcuggugcccggcuucggcaaggccuacaccaucuucaacaagacccugauggaggccgacgcccacuacaagagcgugagaaccuggaacgagaucauccccagcaagggcugccugagagugggcggcagaugccacccccacgugaacggcguguucuucaacggcaucauccugggccccgacggccacgugcugauccccgagaugcagagcagccugcugcagcagcacauggagcugcuggagagcagcgugaucccccugaugcacccccuggccgaccccagcaccguguucaaggacggcgacgaggccgaggacuucguggaggugcaccugcccgacgugcacaagcugaucagcggcguggaccugggccugcccagcuggggcaaguacgugcugaugagcgccggcgugcugaccgcccugaugcugaugaucuuccugaugaccugcugcagaagaggcaaccaggccggcagcaagcagcacggccuggagagaaccggcagaaaggugagcgugaccagccagaacggcaaggugaucagcagcugggagagcuacaagagcggcggcgagaccagacuguga

SEQ ID NO: 191511 - RNA, 1575 nt, Artificial Sequence
  derived and/or modified CDS sequence (opt4) from glycoprotein__RABV__JX987725.1
auggugccccaggugcugugguucgugccccugcugguguucagcaugugcuucggcaaguuccccaucuacaccauccccgacaagcugggccccuggagccccaucgaccugcaccaccugagcugccccaacaaccuggugguggaggacgagggcugcaccaaccugagcggcuucagcuacauggagcugaaggugggcuacaucagcgccaucaaggugaacggcuucaccugcaccggcguggugaccgaggccgagaccuacaccaacuucgugggcuacgugaccaccaccuucaagagaaagcacuucagacccacccccgacgccugcagagccgccuacaacuggaagauggccggcgaccccagauacgaggagagccugcacaaccccuaccccgacuaccacuggcugagaaccgugaagaccaccaaggagagccuggugaucaucagccccagcguggccgaccuggaccccuacgacaagagccugcacagcagaguguuccccagcggcaagugcagcggcaucaccaucagcagcaccuacugcagcaccaaccacgacuacaccaucuggaugcccgagaaccccagacugggcaccagcugcgacaucuucaccaacagcagaggcaagagagccagcaagggcagcaagaccugcggcuucguggacgagagaggccuguacaagagccugaagggcgccugcaagcugaagcugugcggcgugcugggccugagacugauggacggcaccuggguggccaugcagaccagcgacgagaccaaguggugcccccccgaccagcuggugaaccugcacgacuucagaagcgacgagaucgagcaccuggugguggaggagcuggugaagaagagagaggagugccuggacgcccuggagagcaucaugaccaccaagagcgugagcuucagaagacugagccaccugagaaagcuggugcccggcuucggcaaggccuacaccaucuucaacaagacccugauggaggccgacgcccacuacaagagcgugagaaccuggaacgagaucauccccagcaagggcugccugagagugggcggcagaugccacccccacgugaacggcguguucuucaacggcaucauccugggccccgacggccacgugcugauccccgagaugcagagcagccugcugcagcagcacauggagcugcuggagagcagcgugaucccccugaugcacccccuggccgaccccagcaccguguucaaggacggcgacgaggccgaggacuucguggaggugcaccugcccgacgugcacaagcagaucagcggcguggaccugggccugcccaacuggggcaaguacgugcuggugagcgccggcgugcugguggugcugaugcuggccaucuucaucaugaccugcugcggcagagugaacagacccaagagcacccagcacagccuggagggcaccggcagaaaggugagcgugaccagccagagcggcaaggugaucagcagcugggagagcuacaagagcggcggcgagaccagacuguga

SEQ ID NO: 191512 - RNA, 1575 nt, Artificial Sequence; identical to SEQ ID NO: 190959
  derived and/or modified CDS sequence (opt4) from glycoprotein__RABV__JX987727.1

SEQ ID NO: 191513 - RNA, 1575 nt, Artificial Sequence
  derived and/or modified CDS sequence (opt4) from glycoprotein__RABV__JX987728.1
auggugccccaggcccugcuguucgugccccugcugguguucagccugugcuucggcaaguuccccaucuacaccauccccgacaagcugggccccuggagccccaucgacauccaccaccugagcugccccaacaaccuggugguggaggacgagggcugcaccaaccugagcggcuucagcuacauggagcugaaggugggcuacaucagcgccaucaaggugaacggcuucaccugcaccggcguggugaccgaggccgagaccuacaccaacuucgugggcuacgugaccaccaccuucaagagaaagcacuucagacccacccccgacgccugcagagccgccuacaacuggaagauggccggcgaccccagauacgaggagagccugcacaaccccuaccccgacuaccacuggcugagaaccgugaagaccaccaaggagagccuggugaucaucagccccagcguggccgaccuggaccccuacgacaagagccugcacagcagaguguuccccagcggcaagugcagcggcaucaccgugagcagcaccuacugcagcaccaaccacgacuacaccaucuggaugcccgagaaccccagacugggcaccagcugcgacaucuucaccaacagcagaggcaagagagccagcaagggcagcaagaccugcggcuucguggacgagagaggccuguacaagagccugaagggcgccugcaagcugaagcugugcggcgugcugggccugagacugauggacggcaccuggguggccaugcagaccagcgacgagaccaaguggugcccccccgaccagcuggugaaccugcacgacuucagaagcgacgagaucgagcaccuggugguggaggagcuggugaagaagagagaggagugccuggacgcccuggagagcaucaugaccaccaagagcgugagcuucagaagacugagccaccugagaaagcuggugcccggcuucggcaaggccuacaccaucuucaacaagacccugauggaggccgacgcccacuacaagagcgugagaaccuggaacgagaucauccccagcaagggcugccugagagugggcggcagaugccacccccacgugaacggcguguucuucaacggcaucauccugggccccgacggccacgugcugauccccgagaugcagagcagccugcugcagcagcacauggagcugcuggagagcagcgugaucccccugaugcacccccuggccgaccccagcaccguguucaaggacggcgacgaggccgaggacuucguggaggugcaccugcccgacgugcacaagcaggugagcggcguggaccugggccugcccaacuggggcaaguacgugcugcugagcgccggcgcccugaucgcccugaugcugaugaucuuccugaugaccugcugcagaagagugaacagacccgagagcacccagcccagccugggcggcaccggcagaaaggugagcaucaccagccagagcggcaaggugaucagcagcugggagagcuacaagagcggcggcgagaccagacuguga

SEQ ID NO: 191514 - RNA, 1575 nt, Artificial Sequence
  derived and/or modified CDS sequence (opt4) from glycoprotein__RABV__JX987729.1
auggugccccaggugcugcuguucgugccccugcugguguucccccugugcagcggcaaguuccccaucuacaccauccccgacaagcugggccccuggagccccaucgacauccaccaccugagcugccccaacaaccuggugguggaggacgagggcugcaccaaccugagcggcuucagcuacauggagcugaaggugggcuacaucagcgccaucaaggugaacggcuucaccugcaccggcguggugaccgaggccgagaccuacaccaacuucgugggcuacgugaccaccaccuucagaagaaagcacuucagacccacccccgacgccugcagagccgccuacaacuggaagauggccggcgaccccagauacgaggagagccugcacaaccccuaccccgacuaccacuggcugagaaccgugaagaccaccaaggagagccuggugaucaucagccccagcguggccgaccuggaccccuacgacaagagccugcacagcagaguguuccccagcggcaagugcagcggcaucaccgugagcagcaccuacugcagcaccaaccacgacuacaccaucuggaugcccgagaaccccagacugggcaccagcugcgacaucuucaccaacagcagaggcaagagagccagcaagggcagcaagaccugcggcuucguggacgagagaggccuguacaagagccugaagggcgccugcaagcugaagcugugcggcgugcugggccugagacugauggacggcaccuggaucgccaugcagaccagcgacgagaccaaguggugcccccccgaccagcuggugaaccugcacgacuucagaagcgacgagaucgagcaccuggugguggaggagcuggugaagaagagagaggagugccuggacgcccuggagagcaucaugaccaccaagagcgugagcuucagaagacugagccaccugagaaagcuggugcccggcuucggcaaggccuacaccaucuucaacaagacccugauggaggccgacgcccacuacaagagcgugagaaccuggaacgagaucauccccagcaagggcugccugagagugggcggcagaugccacccccacgugaacggcguguucuucaacggcaucauccugggccccgacggccacgugcugauccccgagaugcagagcagccugcugcagcagcacauggagcugcuggagagcagcgugaucccccugaugcacccccuggccgaccccagcaccguguucaaggacggcgacgaggccgaggacuucguggaggugcaccugcccgacgugcacaagcaggugagcggcguggaccugggccugcccaacuggggcaaguacgugcugcugagcgccggcgcccugaucgcccugaugcugaugaucuuccugaugaccugcugcagaaaggugaacagacccgagagcacccagagaagccugggcggcaccggcagaaaggugagcaucaccagccagagcggcaaggugaucagcagcugggagagcuacaagagcggcggcgagaccagacuguga

SEQ ID NO: 191515 - RNA, 1575 nt, Artificial Sequence
  derived and/or modified CDS sequence (opt4) from glycoprotein__RABV__JX987730.1
auggugccccaggcccugcuguucgugccccugcuggccuuccccaugugcuucggcaaguuccccaucuacaccauccccgacaagcugggccccuggagccccaucgacauccaccaccugagcugccccaacaaccuggugguggaggacgagggcugcaccaaccugagcggcuucagcuacauggagcugaaggugggcuacaucagcgccaucaaggugaacggcuucaccugcaccggcguggugaccgaggccgagaccuacaccaacuucgugggcuacgugaccaccaccuucaagagaaagcacuucagacccacccccgacgccugcagagccgccuacaacuggaagauggccggcgaccccagauacgaggagagccugcacaaccccuaccccgacuaccacuggcugagaaccgugaagaccaccaaggagagccugaucaucaucagccccagcguggccgaccuggaccccuacgacaagagccugcacagcagaguguuccccagcggcaagugccugggcaucaccaucagcagcaccuacugcagcaccaaccacgacuacaccaucuggaugcccgagaaccugagacugggcaccagcugcgacaucuucaccaacagcagaggcaagagagccagcaagggcagcaagaccugcggcuucguggacgagagaggccuguacaagagccugaagggcgccugcaagcugaagcugugcggcgugcugggccugagacugauggacggcaccuggguggccaugcccaccagcgacgagaccaaguggugcccccccgaccagcuggugaaccugcacgacuucagaagcgacgagaucgagcaccuggugguggaggagcuggugaagaagagagaggagugccuggacgcccuggagagcaucaugaccaccaagagcgugagcuucagaagacugagccaccugagaaagcuggugcccggcuucggcaaggccuacaccaucuucaacaagacccugauggaggccgacgcccacuacaagagcgugagaaccuggaacgagaucauccccagcaagggcugccugagagugggcggcagaugccacccccacgugaacggcguguucuucaacggcaucauccugggccccgacggccacgugcugauccccgagaugcagagcagccugcugcagcagcacauggagcugcuggagagcagcgugaucccccugaugcacccccuggccgaccccagcaccguguucaaggacggcgacgaggccgaggacuucguggaggugcaccugcccgacgugcacaagcagaucagcggcguggaccugggccugcccaacuggggcaaguacgugcugaucaucgccggcgugcugaucgccaugauccugaccaucuuccugaugaccugcugcggcagaggcaacagacccaagagcacccagcacagccugggcggcaucggcagaaaggugagcagcaccagccagagcggcaaggugaucagcagcugggagagcuacaagagcggcggcgagaccagacuguga

SEQ ID NO: 191516 - RNA, 1575 nt, Artificial Sequence; identical to SEQ ID NO: 191515
  derived and/or modified CDS sequence (opt4) from glycoprotein__RABV__JX987731.1

SEQ ID NO: 191517 - RNA, 1575 nt, Artificial Sequence
  derived and/or modified CDS sequence (opt4) from glycoprotein__RABV__JX987732.1
auggugccccaggcccugcuguucgugccccugcugguguucccccugugcuucggcaaguuccccaucuacaccauccccgacaagcugggccccuggagccccaucgacauccaccaccugagcugccccaacaaccuggugguggaggacgagggcugcaccaaccugagcggcuucagcuacauggagcugaaggugggcuacaucagcgccaucaaggugaacggcuucaccugcaccggcguggugaccgaggccgagaccuacaccaacuucgugggcuacgugaccaccaccuucaagagaaagcacuucagacccacccccgacgccugcagagccgccuacaacuggaagauggccggcgaccccagauacgaggagagccugcacaaccccuaccccgacuaccacuggcugagaaccgugaagaccaccaaggagagccuggugaucaucagccccagcguggccgaccuggaccccuacgacaagagccugcacagcagaguguuccccagcggcaagugcagcggcaucaccgugagcagcaccuacugcagcaccaaccacgacuacaccaucuggaugcccgagaaccccagacugggcaccagcugcgacaucuucaccaacagcagaggcaagagagccagcaagggcagcaagaccugcggcuucguggacgagagaggccuguacaagagccugaagggcgccugcaagcugaagcugugcggcgugcugggccugagacugauggacggcaccuggguggccaugcagaccagcgacgagaccaaguggugcccccccgaccagcuggugaaccugcacgacuucagaagcgacgagaucgagcaccuggugguggaggagcuggugaagaagagagaggagugccuggacgcccuggagagcaucaugaccaccaagagcgugagcuucagaagacugagccaccugagaaagcuggugcccggcuucggcaaggccuacaccaucuucaacaagacccugauggaggccgacgcccacuacaagagcgugagaaccuggaacgagaucauccccagcaagggcugccugagagugggcggcagaugccacccccacgugaacggcguguucuucaacggcaucauccugggccccgacggccacgugcugauccccgagaugcagagcagccugcugcagcagcacauggagcugcuggagagcagcgugaucccccugaugcacccccuggccgaccccagcaccguguucaaggacggcgacgaggccgaggacuucguggaggugcaccugcccgacgugcacaagcaggugagcggcguggaccugggccugcccaacuggggcaaguacgugcugcugagcgccggcgcccugaucgcccugaugcugaucaucuuccugaugaccugcugcagaagagugaacagacccgagagcacccagagaagccugggcggcaccggcagaaaggugagcgugaccagccagagcggcaaggugaucagcagcugggagagcuacaagagcggcggcgagaccagacuguga

SEQ ID NO: 191518 - RNA, 1575 nt, Artificial Sequence
  derived and/or modified CDS sequence (opt4) from glycoprotein__RABV__JX987733.1
auggugccccaggcccugcuguucgugccccugcuggccuuccccaugugcuucggcaaguuccccaucuacaccauccccgacaagcugggccccuggagccccaucgacauccaccaccugagcugccccaacaaccuggugguggaggacgagggcugcaccaaccugagcggcuucagcuacauggagcugaaggugggcuacaucagcgccaucaaggugaacggcuucaccugcaccggcguggugaccgaggccgagaccuacaccaacuucgugggcuacgugaccaccaccuucaagagaaagcacuucagacccacccccgacgccugcagagccgccuacaacuggaagauggccggcgaccccagauacgaggagagccugcacaaccccuaccccgacuaccacuggcugagaaccgugaagaccaccaaggagagccugaucaucaucagccccagcguggccgaccuggaccccuacgacaagagccugcacagcagaguguuccccagcggcaagugccugggcaucaccaucagcagcaccuacugcagcaccaaccacgacuacaccaucuggaugcccgagaaccugagacugggcaccagcugcgacaucuucaccaacagcagaggcaagagagccagcaagggcagcaagaccugcggcuucguggacgagagaggccuguacaagagccugaagggcgccugcaagcugaagcugugcggcgugcugggccugagacugauggacggcaccuggguggccaugcagaccagcgacgagaccaaguggugcccccccgaccagcuggugaaccugcacgacuucagaagcgacgagaucgagcaccuggugguggaggagcuggugaagaagagagaggagugccuggacgcccuggagagcaucaugaccaccaagagcgugagcuucagaagacugagccaccugagaaagcuggugcccggcuucggcaaggccuacaccaucuucaacaagacccugauggaggccgacgcccacuacaagagcgugagaaccuggaacgagaucauccccagcaagggcugccugagagugggcggcagaugccacccccacgugaacggcguguucuucaacggcaucauccugggccccgacggccacgugcugauccccgagaugcagagcagccugcugcagcagcacauggagcugcuggagagcagcgugaucccccugaugcacccccuggccgaccccagcaccguguucaaggacggcgacgaggccgaggacuucguggaggugcaccugcccgacgugcacaagcagaucagcggcguggaccugggccugcccaacuggggcaaguacgugcugaucaucgccggcgugcugaucgccaugauccugaccaucuuccugaugaccugcugcggcagaggcaacagacccgagagcacccagcacagccugggcggcaucggcagaaaggugagcgccaccagccagagcggcaaggugaucagcagcugggagagcuacaagagcggcggcgagaccagacuguga

SEQ ID NO: 191519 - RNA, 1575 nt, Artificial Sequence
  derived and/or modified CDS sequence (opt4) from glycoprotein__RABV__JX987734.1
auggugccccaggcccugagcuucgugccccugcugguguucccccugugcuucggcaaguuccccaucuacaccauccccgacaagcugggccccuggagccccaucgacauccaccaccugagcugccccaacaaccuggugguggaggacgagggcugcaccaaccugagcggcuucagcuacauggagcugaaggugggcuacaucagcgccaucaaggugaacggcuucaccugcaccggcguggugaccgaggccgagaccuacaccaacuucgugggcuacgugaccaccaccuucaagagaaagcacuucagacccacccccgacgccugcagagccgccuacaacuggaagauggccggcgaccccagauacgaggagagccugcacaaccccuaccccgacuaccacuggcugagaaccgugaagaccaccaaggagagccuggugaucaucagccccagcguggccgaccuggaccccuacgacaagagccugcacagcagaguguuccccagcggcaagugccugggcaucaccgugagcagcaccuacugcagcaccaaccacgacuacaccaucuggaugcccgagaaccccagacugggcaccagcugcgacaucuucaccaacagcagaggcaagagagccagcaagggcagcaagaccugcggcuucguggacgagagaggccuguacaagagccugaagggcgccugcaagcugaagcugugcggcgugcugggccugagacugauggacggcaccuggguggccaugcagaccagcgacgagaccaaguggugcccccccgaccagcuggugaacauccacgacuucagaagcgacgagaucgagcaccuggugguggaggagcuggugaagaagagagaggagugccuggacgcccuggagagcaucaugaccaccaagagcgugagcuucagaagacugagccaccugagaaagcuggugcccggcuucggcaaggccuacaccaucuucaacaagacccugauggaggccgacgcccacuacaagagcgugagaaccuggaacgagaucauccccagcaagggcugccugagagugggcggcagaugccacccccacgugaacggcguguucuucaacggcaucauccugggccccgacggccacgugcugauccccgagaugcagagcagccugcugcagcagcacauggagcugcuggagagcagcgugaucccccugaugcacccccuggccgaccccagcaccguguucaaggacggcgacgaggccgaggacuucguggaggugcaccugcccaacgugcacaagcaggugagcggcguggaccugggccugcccaacuggggcaaguacgugcugcugagcgccggcgcccugaucgcccugaugcugaucaucuuccugaugaccugcugcagaagagugaacagaagcgagagcacccagagaagccugggcggcgccggcagaaaggugagcaucaccagccagggcggcaaggugaucagcagcugggagagcuacaagagcggcggcgagaccagacuguga

SEQ ID NO: 191520 - RNA, 1575 nt, Artificial Sequence; identical to SEQ ID NO: 191398
  derived and/or modified CDS sequence (opt4) from glycoprotein__RABV__JX987749.1

SEQ ID NO: 191521 - RNA, 1575 nt, Artificial Sequence
  derived and/or modified CDS sequence (opt4) from glycoprotein__RABV__KC169986.1
augaucccccaggugcugcuguucgugccccugcugguguucagcagcugcuucggcaaguuccccaucuacaccauccccgacaagcugggccccuggagccccaucgacauccaccaccugagcugccccaacaaccuggugguggaggacgagggcugcaccaaccugagcggcuucagcuacauggagcugaaggugggcuacaucagcgccaucaaggugaacggcuucaccugcaccggcguggugaccgaggccgagaccuacaccaacuucgugggcuacgugaccaccaccuucaagagaaagcacuucagacccaugcccggcgccugcagagccgccuacaacuggaagauggccggcgaccccagauacgaggagagccugcacaaccccuaccccgacuaccacuggcugagaaccgugaagaccaccaaggagagccuggugaucaucagccagagcguggccgaccuggaccccuacgacaagagccugcacagcagaguguuccccggcggcaagugcagcggcaucaccgugagcagcaccugcugcagcaccaaccacgacuacaccaucuggaugcccgagaaccccagacugggcaccagcugcgacaucuucaccaacagcagaggcaagagagccagcaagggcggcaagaccugcggcuucguggacgagagaggccuguacaagagccugaagggcgccugcaagcugaagcugugcggcgugcugggccugagacugauggacggcaccuggguggccauccagaccagcgacgagaucaaguggugcagccccgaccagcuggugaaccugcacgacuuccacagcgacgagaucgagcaccuggugguggaggagcuggugaagaagagagaggagugccuggacgcccuggagaccaucaugaccaccaagagcgugagcuucagaagacugagccaccugagaaagcuggugcccggcuucggcaaggccuacaccaucuucaacaagacccugauggaggccgacgcccacuacaagagcaucagaaccugggacgagaucauccccagcaagggcugccugagagugggcggcagaugccacccccacgugaacggcguguucuucaacggcaucauccugggccccgacggccacgugcugauccccgagaugcagagcagccugcugcaccagcacauggagcugcuggagagcagcgugaucccccugaugcacccccuggccgaccccagcgccguguucaaggacggcgacgaggccgaggacuucguggaggugcaccugcccgacgugcacaagcagaucagcggcguggaccugggccugcccaacuggggcaaguacgugcugaucagcgccggcgcccugaccgccagcaugcugaugaucuuccugaugaccugcugcagaaaggccaacagagccgagagcauccagcacaaccccggcgagaccggcagaaaggugagcgugaccagccacaacggcagagugaucagcagcugggagagcuacaagagcggcggcgagaccaagcuguga

SEQ ID NO: 191522 - RNA, 1575 nt, Artificial Sequence
  derived and/or modified CDS sequence (opt4) from glycoprotein__RABV__KC171643.1
auggugccccaggcccugcuguucgugccccugcugguguucagcaugugcuucggcaaguuccccaucuacaccauccccgacaagcugggccccuggagccccaucgacauccaccaccugagcugccccaacaaccuggugguggaggacgagggcugcaccaaccugagcggcuucagcuacauggagcugaaggugggcuacaucagcgccaucaaggugaacggcuucaccugcaccggcguggugaccgaggccgagaccuacaccaacuucgugggcuacgugaccaccaccuucaagagaaagcacuucagacccacccccgacgccugcagagccgccuacaacuggaagauggccggcgaccccagauacgaggagagccugcacaaccccuaccccgacuaccacuggcugagaaccgugaagaccaccaaggagagccuggugaucaucagccccagcguggccgaccuggaccccuacgacaagagccugcacagcagaguguuccccaacggcaagugcagcggcaucaccaucagcagcaccuacugccccaccaaccacgacuacaccaucuggcugcccgagaaccccagacugggcaccagcugcgacaucuucaccaacagcagaggcaagagagccagcaagggcagcaagaccugcggcuucguggacgagagaggccuguacaagagccugaagggcgccugcaagcugaagcugugcggcgugcugggccugagacugauggacggcaccuggguggccaugcaggccagcgacgagaccaaguggugcccccccgaccagcuggugaaccugcacgacuucagaagcgacgagaucgagcaccuggugguggaggagcuggugaagaagagagaggagugccuggacgcccuggagagcaucaugaccaccaagagcgugagcuucagaagacugagccaccugagaaagcuggugcccggcuucggcaaggccuacaccaucuucaacaagacccugauggaggccgacgcccacuacaagagcgugagaaccuggaacgagaucauccccagcaagggcugccugagagugggcggcagaugccacccccacgugaacggcguguucuucaacggcaucauccugggccccgacggccacgugcugauccccgagaugcagagcagccugcugcagcagcacauggagcugcuggagagcagcguggugccccugaugcacccccuggccgaccccagcaccgugcugaaggacggcgacgaggccgagaacuucguggaggugcaccugcccgacgugcacaagcagaucagcggcguggaccugggccugcccaacuggggcaaguacgugcuggugagcgccggcgugcugaucgcccugaugcugaucaucuuccugaugaccugcugcggcagagugaacagacccaagagcacccagcacaaccugggcggcaccggcagaaaggugagcgugaccccccagagcggcaaggugaucagcagcugggagagcuacaagagcggcggcggcaccagacuguga

SEQ ID NO: 191523 - RNA, 1575 nt, Artificial Sequence; identical to SEQ ID NO: 190874
  derived and/or modified CDS sequence (opt4) from glycoprotein__RABV__KC171644.1

SEQ ID NO: 191524 - RNA, 1575 nt, Artificial Sequence; identical to SEQ ID NO: 190879
  derived and/or modified CDS sequence (opt4) from glycoprotein__RABV__KC171645.1

SEQ ID NO: 191525 - RNA, 1575 nt, Artificial Sequence
  derived and/or modified CDS sequence (opt4) from glycoprotein__RABV__KC252633.1
auggugccccuggugcugcuguucgugccccugcugguguucccccugugcagcggcaaguuccccaucuacaccauccccgacaagcugggccccuggagccccaucgacauccaccaccugagcugccccaacaaccuggugguggaggacgagggcugcgccaaccugagcggcuucagcuacauggagcugaaggugggcuacaucagcgccaucaaggugaacggcuucaccugcaccggcguggugaccgaggccgagaccuacaccaacuucgugggcuacgugaccaccaccuucagaagaaagcacuucagacccacccccgacgccugcagagccgccuacaacuggaagauggccggcgaccccagauacgaggagagccugcacaaccccuaccccgacuaccacuggcugagaaccgugaagaccaccaaggagagccuggugaucaucagccccagcguggccgaccuggaccccuacgacaagagccugcacagcagaguguuccccagcggcaagugcagcggcaucaccgugagcagcaccuacugcagcaccaaccacgacuacaccaucuggaugcccgagaaccugagacugggcaccagcugcgacaucuucaccaacagcagaggcaagagagccagcaagggcagcaagaccugcggcuucguggacgagagaggccuguacaagagccugaagggcgccugcaagcugaagcugugcggcgugcugggccugagacugauggacggcaccuggguggccaugcagaccagcggcgagaccaaguggugcccccccgaccagcuggugaaccugcacgacuucagaagcgacgagaucgagcaccuggugguggaggagcuggugaagaagagagaggagugccuggacgcccuggagagcaucaugaccaccaagagcgugagcuucagaagacugagccaccugagaaagcuggugcccggcuucggcaaggccuacaccaucuucaacaagacccugauggaggccgacgcccacuacaagagcgugagaaccuggaacgagaucauccccagcaagggcugccugagagugggcggcagaugccacccccacgugaacggcguguucuucaacggcaucauccugggccccgacggccacgugcugauccccgagaugcagagcagccugcugcagcagcacauggagcugcuggagagcagcgugaucccccugaugcacccccuggccgaccccagcaccguguucaaggacggcgacgaggccgaggacuucguggaggugcaccugcccgacgugcacaagcaggugagcggcguggaccugggccugcccaacuggggcaaguacauccugcugagcgccggcgcccugaucgcccugaugcugaugaucuuccugaugaccugcugcagaaaguucaacagacccgagagcacccagagaagccugggcggcaccggcagaaaggugagcaucaccagccagggcggcaaggugaucagcagcugggagagcuacaagagcggcggcgagaccagacuguga

SEQ ID NO: 191526 - RNA, 1575 nt, Artificial Sequence
  derived and/or modified CDS sequence (opt4) from glycoprotein__RABV__KC737850.1
auggugccccaggcccugcuguucgugccccugcuggccgugagcuucugcuucggcaaguuccccaucuacaccauccccgacaagcugggccccuggagccccaucgacauccaccaccugagcugccccaacaaccuggugguggaggacgagggcugcaccaaccugagcggcuucagcuacauggagcugaaggugggcuacaucagcgccaucaaggugaacggcuucaccugcaccggcguggugaccgaggccgagaccuacaccaacuucgugggcuacgugaccaccaccuucaagagaaagcacuucagacccacccccgacgccugcagaagcgccuacaacuggaagauggccggcgaccccagauacgaggagagccugcacaaccccuaccccgacuaccacuggcugagaaccgugaagaccaccaaggagagccuggugaucaucagccccagcguggccgaccuggaccccuacgacaagagccugcacagcagaguguuccccagcggcaagugcagcggcaucaccgugagcagcaccuacugcagcaccaaccacgacuacaccaucuggcugcccgagaaccccagacugggcaccagcugcgacaucuucaccaacagcagaggcaagagagccagcaagggcagcaagaccugcggcuucguggacgagagaggccuguacaagagccugaagggcgccugcaagcugaagcugugcggcgugcugggccugagacugauggacggcaccuggguggccaugcagaccagcgacgagaccaaguggugcccccccgaccagcuggugaaccugcacgacuucagaagcgacgagaucgagcaccuggugguggaggagcuggugaagaagagagaggagugccuggacgcccuggagagcaucaugaccaccaagagcgugagcuucagaagacugagccaccugagaaagcuggugcccggcuucggcaaggccuacaccaucuucaacaagacccugauggaggccgacgcccacuacaagagcgugagaaccuggaacgagaucauccccagcaagggcugccugagagugggcggcagaugccacccccacgugaacggcguguucuucaacggcaucauccugggccccgacggccacgugcugauccccgagaugcagagcagccugcugcagcagcacauggagcugcuggagagcagcgugaucccccugaugcacccccuggccgaccccagcaccguguucaaggacggcgacgaggccgaggacuucguggaggugcaccugcccgacgugcacaagcaggugagcggcguggaccugggccugcccaacuggggcaaguacgugcugaccagcgccggcgugcugaucgcccugaugcugaucaucuuccugaugaccugcugcagaagagugaacagaagcgacagcacccagagaagccugggcagaaccggcagaaaggugagcgugaccagccagagcggcaaggugaucagcagcugggagagcuacaagagcggcggcgagaccagacuguga

SEQ ID NO: 191527 - RNA, 1575 nt, Artificial Sequence
  derived and/or modified CDS sequence (opt4) from glycoprotein__RABV__KC762941.1
augauccugcagauccugcuguucgugccccugcugguguucagcagcugcuucggcaaguuccccaucuacaccauccccgacaagcugggccccuggagccccaucgacauccaccaccugagcugccccaacaaccuggugguggaggacgagggcugcaccaaccugagcggcuucagcuacauggagcugaaggugggcuacaucagcgccaucaaggugaacggcuucaccugcaccggcguggugaccgaggccgagaccuacaccaacuucgugggcuacgugaccaccaccuucaagagaaagcacuuccaccccaugcccgacgccugcagagccgccuacaacuggaagauggccggcgaccccagauacgaggagagccugcacaaccccuaccccgacuaccacuggcugagaaccgugaagaccaccaaggagagccuggugaucaucagccccagcguggccgaccuggaccccuacgacaagagccugcacagcagaguguuccccggcggcaagugcagcggcaucaccgugagcagcaccugcugcagcaccaaccacgacuacaccaucuggaugcccgagaaccccagacugggcaccagcugcgacaucuucaccaacagcagaggcaagagagccagcaagggcggcaagaccugcggcuucguggacgagagaggccuguacaagagccugaagggcgccugcaagaugaagcugugcggcgugcugggccugagacugauggacggcaccuggguggccauccagaccagcgacgaggugaaguggugcagccccgaccagcuggugaaccugcacgacuuccacagcgacgagaucgagcaccuggugguggaggagcuggugaagaagagagaggagugccuggacgcccuggagaccaucaugaccaccaagagcgugagcuucagaagacugagccaccugagaaagcuggugcccggcuucggcaaggccuacaccaucuucaacaagacccugauggaggccgacgcccacuacaagagcauccagaccuggaacgagaucauccccagcaagggcugccugagagugggcggcagaugccacccccacgugaacggcguguucuucaacggcaucauccugggccccgacggccacgugcugauccccgagaugcagagcagccugcugcaccagcacauggagcugcuggagagcagcgugaucccccugaugcacccccuggccgaccccagcaccguguucaaggacggcgacgaggccgaggacuucguggaggugcaccugcccgaggugcacaagcagaucagcggcguggaccugggccugcccaacuggggcaaguacgugcugaucagcgccggcgcccugaccgcccugaugcugaugaucuuccugaugaccugcugcagaaagaccaacagacccgagagcauccagcacagccccggcgagaccgagagaaaggugagcgugaccagccacaacggcagagugaucagcagcugggagagcuacaagagcggcggcgagaccaagcuguga

SEQ ID NO: 191528 - RNA, 1575 nt, Artificial Sequence
  derived and/or modified CDS sequence (opt4) from glycoprotein__RABV__KC792172.1
auggugccccaggcccugcuguucgugccccugcuggccuuccccaugugcuucggcaaguuccccaucuacaccauccccgacaagcugggccccuggagccccaucgacauccaccaccugagcugccccaacaaccuggugguggaggacgagggcugcaccaaccugagcggcuucagcuacauggagcugaaggugggcuacaucagcgccaucaaggugaacggcuucaccugcaccggcguggugaccgaggccgagaccuacaccaacuucgugggcuacgugaccaccaccuucaagagaaagcacuucagacccacccccgacgccugcagagccgccuacaacuggaagauggccggcgaccccagauacgaggagagccugcacaaccccuaccccgacuaccacuggcugagaaccgugaagaccaccaaggagagccugaucaucaucagccccagcguggccgaccuggaccccuacgacaagagccugcacagcagaguguuccccagcggcaagugccugggcaucaccaucagcagcaccuacugcagcaccaaccacgacuacaccaucuggaugcccgagaacgugagacugggcaccagcugcgacaucuucaccaacagcagaggcaagaaggccagcaagggcagcaagaccugcggcuucguggacgagagaggccuguacaagagccugaagggcgccugcaagcugaagcugugcggcgugcugggccugagacugauggacggcaccuggguggccaugcccaccagcgacgagaccaaguggugcccccccgaccagcuggugaaccugcacgacuucagaagcgacgagaucgagcaccuggugguggaggagcuggugagaaagagagaggagugccuggacgcccuggagagcaucaugaccaccaagagcgugagcuucagaagacugagccaccugagaaagcuggugcccggcuucggcaaggccuacaccaucuucaacaagacccugauggaggccgacgcccacuacaagagcgugagaaccuggaacgagaucauccccagcaagggcugccugagagugggcggcagaugccacccccacgugaacggcguguucuucaacggcaucauccugggccccgacggccacgugcugauccccgagaugcagagcagccugcugcagcagcacauggagcugcuggagagcagcgugaucccccugaugcacccccuggccgaccccagcaccguguucaaggacggcgacgaggccgaggacuucguggaggugcaccugcccgacgugcacaagcagaucagcggcguggaccugggccugcccaacuggggcaaguacgugcugaucaucgccggcgugcugaucgccaugauccugaccaucuuccugaugaccugcugcggcagaggcaacagacccaagagcacccagcacagccugggcggcaucggcagaaaggugagcagcaccagccagagcggcaaggugaucagcagcugggagagcuacaagagcggcggcgagaccagacuguga

SEQ ID NO: 191529 - RNA, 1575 nt, Artificial Sequence
  derived and/or modified CDS sequence (opt4) from glycoprotein__RABV__KC792173.1
auggugccccaggcccugcuguucgugccccugcuggccuuccccaugugcuucggcaaguuccccaucuacaccauccccgacaagcugggccccuggagccccaucgacauccaccaccugagcugccccaacaaccuggugguggaggacgagggcugcaccaaccugagcggcuucagcuacauggagcugaaggugggcuacaucagcgccaucaaggugaacggcuucaccugcaccggcguggugaccgaggccgagaccuacaccaacuucgugggcuacgugaccaccaccuucaagagaaagcacuucagacccacccccgacgccugcagagccgccuacaacuggaagauggccggcgaccccagauacgaggagagccugcacaaccccuaccccgacuaccacuggcugagaaccgugaagaccaccaaggagagccugaucaucaucagccccagcguggccgaccuggaccccuacgacaagagccugcacagcagaguguuccccagcggcaagugccugggcaucaccaucagcagcaccuacugcagcaccaaccacgacuacaccaucuggaugcccgagaaccugagacugggcaccagcugcgacaucuucaccaacagcagaggcaagagagccagcaagggcagcaagaccugcggcuucguggacgagagaggccuguacaagagccugaagggcagcugcaagcugaagcugugcggcgugcugggccugagacugauggacggcaccuggguggccaugcagaccagcgacgagaccaaguggugcccccccgaccagcuggugaaccugcacgacuucagaagcgacgagaucgagcaccuggugguggaggagcuggugaagaagagagaggagugccuggacgcccuggagagcaucaugaccaccaagagcgugagcuucagaagacugagccaccugagaaagcuggugcccggcuucggcaaggccuacaccaucuucaacaagacccugauggaggccgacgcccacuacaagagcgugagaaccuggaacgagaucauccccagcaagggcugccugagagugggcggcagaugccacccccacgugaacggcguguucuucaacggcaucauccugggccccgacggccacgugcugauccccgagaugcagagcagccugcugcagcagcacauggagcugcuggagagcagcgugaucccccugaugcacccccuggccgaccccagcaccguguucaaggacggcgacgaggccgaggacuucguggaggugcaccugcccgacgugcacaagcagaucagcggcguggaccugggccugcccaacuggggcaaguacgugcugaucaucgccggcgugcugaucgccaugauccugaccauccugcugaugaccugcugcggcagaggcaacagacccaagagcacccagcacagccugggcggcaucggcagaaaggugagcgccaccagccagagcggcaaggugaucagcagcugggagagcuacaagagcggcggcgagaccagacuguga

SEQ ID NO: 191530 - RNA, 1575 nt, Artificial Sequence
  derived and/or modified CDS sequence (opt4) from glycoprotein__RABV__KC792174.1
auggugccccaggcccugcuguucgugccccugcuggccuuccccaugugcuucggcaaguuccccaucuacaccauccccgacaagcugggccccuggagccccaucgacauccaccaccugagcugccccaacaaccuggugguggaggacgagggcugcaccaaccugagcggcuucagcuacauggagcugaaggugggcuacaucagcgccaucaaggugaacggcuucaccugcaccggcguggugaccgaggccgagaccuacaccaacuucgugggcuacgugaccaccaccuucaagagaaagcacuucagacccacccccgacgccugcagagccgccuacaacuggaagauggccggcgaccccagauacgaggagagccugcacaaccccuaccccgacuaccacuggcugagaaccgugaagaccaccaaggagagccugaucaucaucagccccagcguggccgaccuggaccccuacgacaagagccugcacagcagaguguuccccagcggcaagugccugggcaucaccaucagcagcaccuacugcagcaccaaccacgacuacaccaucuggaugcccgagaaccugagacugggcaccagcugcgacaucuucaccaacagcagaggcaagagagccagcaagggcagcaagaccugcggcuucguggacgagagaggccuguacaagagccugaagggcagcugcaagcugaagcugugcggcgugcugggccugagacugauggacggcaccuggguggccaugcagaccagcgacgagaccaaguggugcccccccgaccagcuggugaaccugcacgacuucagaagcgacgagaucgagcaccuggugguggaggagcuggugagaaagagagaggagugccuggacgcccuggagagcaucaugaccaccaagagcgugagcuucagaagacugagccaccugagaaagcuggugcccggcuucggcaaggccuacaccaucuucaacaagacccugauggaggccgacgcccacuacaagagcgugagaaccuggaacgagaucauccccagcaagggcugccugagagugggcggcagaugccacccccacgugaacggcguguucuucaacggcaucauccugggccccgacggccacgugcugauccccgagaugcagagcagccugcugcagcagcacauggagcugcuggagagcagcgugaucccccugaugcacccccuggccgaccccagcaccguguucaaggacggcgacgaggccgaggacuucguggaggugcaccugcccgacgugcacaagcagaucagcggcguggaccugggccugcccaacuggggcaaguacgugcugaucaucgccggcgugcugaucgccaugauccugaccaucuuccugaugaccugcugcggcagaggcaacagacccaagagcacccagcacagccugggcggcaucggcagaaaggugagcgccaccagccagagcggcaaggugaucagcagcugggagagcuacaagagcggcggcgagaccagacuguga

SEQ ID NO: 191531 - RNA, 1575 nt, Artificial Sequence
  derived and/or modified CDS sequence (opt4) from glycoprotein__RABV__KC792175.1
auggugccccaggcccugcuguucgugccccugcuggccuuccccaugugcuucggcaaguuccccaucuacaccauccccgacaagcugggccccuggagccccaucgacauccaccaccugagcugccccaacaaccuggugguggaggacgagggcugcaccaaccugagcggcuucagcuacauggagcugaaggugggcuacaucagcgccaucaaggugaacggcuucaccugcaccggcguggugaccgaggccgagaccuacaccaacuucgugggcuacgugaccaccaccuucaagagaaagcacuucagacccacccccgacgccugcagagccgccuacaacuggaagauggccggcgaccccagauacgaggagagccugcacaaccccuaccccgacuaccacuggcugagaaccgugaagaccaccaaggagagccugaucaucaucagccccagcguggccgaccuggaccccuacgacaagagccugcacagcagaguguuccccagcggcaagugccugggcaucaccaucagcagcaccuacugcagcaccaaccacgacuacaccaucuggaugcccgagaaccugagacugggcaccagcugcgacaucuucaccaacagcagaggcaagagagccagcaagggcagcaagaccugcggcuucguggacgagagaggccuguacaagagccugaagggcagcugcaagcugaagcugugcggcgugcugggccugagacugauggacggcaccuggguggccaugcagaccagcgacgagaccaaguggugcccccccgaccagcuggugaaccugcacgacuucagaagcgacgagaucgagcaccuggugguggaggagcuggugaagaagagagaggagugccuggacgcccuggagagcaucaugaccaccaagagcgugagcuucagaagacugagccaccugagaaagcuggugcccggcuucggcaaggccuacaccaucuucaacaagacccugauggaggccgacgcccacuacaagagcgugagaaccuggaacgagaucauccccagcaagggcugccugagagugggcggcagaugccacccccacgugaacggcguguucuucaacggcaucauccugggccccgacggccacgugcugauccccgagaugcagagcagccugcugcagcagcacauggagcugcuggagagcagcgugaucccccugaugcacccccuggccgaccccagcaccguguucaaggacggcgacgaggccgaggacuucguggaggugcaccugcccgacgugcacaagcagaucagcggcguggaccugggccugcccaacuggggcaaguacgugcugaucaucgccggcgugcugaucgccaugauccugaccaucuuccugaugaccugcugcagaagaggcaacagacccaagagcacccagcacagccugggcggcaucggcagaaaggugagcgccaccagccagagcggcaaggugaucagcagcugggagagcuacaagagcggcggcgagaccagacuguga

SEQ ID NO: 191532 - RNA, 1575 nt, Artificial Sequence
  derived and/or modified CDS sequence (opt4) from glycoprotein__RABV__KC792176.1
auggugccccaggcccugcuguucgugccccugcuggccuuccccaugugcuucggcaaguuccccaucuacaccauccccgacaagcugggccccuggagccccaucgacauccaccaccugagcugccccaacaaccuggugguggaggacgagggcugcaccaaccugagcggcuucagcuacauggagcugaaggugggcuacaucagcgccaucaaggugaacggcuucaccugcaccggcguggugaccgaggccgagaccuacaccaacuucgugggcuacgugaccaccaccuucaagagaaagcacuucagacccacccccgacgccugcagagccgccuacaacuggaagauggccggcgaccccagauacgaggagagccugcacaaccccuaccccgacuaccacuggcugagaaccgugaagaccaccaaggagagccugaucaucaucagccccagcguggccgaccuggaccccuacgacaagagccugcacagcaagguguuccccagcggcaagugccugggcaucaccaucagcagcaccuacugcagcaccaaccacgacuacaccaucuggaugcccgagaacgugagacugggcaccagcugcgacaucuucaccaacagcagaggcaagagagccagcaagggcagcaagaccugcggcuucguggacgagagaggccuguacaagagccugaagggcgccugcaagcugaagcugugcggcgugcugggccugagacugauggacggcaccuggguggccaugcccaccagcgacgagaccaaguggugcccccccgaccagcuggugaaccugcacgacuucagaagcgacgagaucgagcacaucgugguggaggagcuggugagaaagagagaggagugccuggacgcccuggagagcaucaugaccaccaagagcgugagcuucagaagacugagccaccugagaaagcuggugcccggcuucggcaaggccuacaccaucuucaacaagacccugauggaggccgacgcccacuacaagagcgugagaaccuggaacgagaucauccccagcaagggcugccugagagugggcggcagaugccacccccacgugaacggcguguucuucaacggcaucauccugggccccgacggccacgugcugauccccgagaugcagagcagccugcugcagcagcacauggagcugcuggagagcagcgugaucccccugaugcacccccuggccgaccccagcaccguguucaaggacggcgacgaggccgaggacuucguggaggugcaccugcccgacgugcacaagcagaucagcggcguggaccugggccugcccaacuggggcaaguacgugcugaucaucgccggcgugcugaucgccaugauccugaccaucuuccugaugaccugcugcggcagaggcaacagacccaagagcacccagcacagccugggcggcaucggcagaaaggugagcagcaccagccagagcggcaaggugaucagcagcugggagagcuacaagagcggcggcgagaccagacuguga

SEQ ID NO: 191533 - RNA, 1575 nt, Artificial Sequence
  derived and/or modified CDS sequence (opt4) from glycoprotein__RABV__KC792177.1
auggugccccaggcccugcuguucgugccccugcuggccuuccccaugugcuucggcaaguuccccaucuacaccauccccgacaagcugggccccuggagccccaucgacauccaccaccugagcugccccaacaaccuggugguggaggacgagggcugcaccaaccugagcggcuucagcuacauggagcugaaggugggcuacaucagcgccaucaaggugaacggcuucaccugcaccggcguggugaccgaggccgagaccuacaccaacuucgugggcuacgugaccaccaccuucaagagaaagcacuucagacccacccccgacgccugcagagccgccuacaacuggaagauggccggcgaccccagauacgaggagagccugcacaaccccuaccccgacuaccacuggcugagaaccgugaagaccaccaaggagagccugaucaucaucagccccagcguggccgaccuggaccccuacgacaagagccugcacagcagaguguuccccagcggcaagugccugggcaucaccaucagcagcaccuacugcagcaccaaccacgacuacaccaucuggaugcccgagaacgugagacugggcaccagcugcgacaucuucaccaacagcagaggcaagagagccagcaagggcagcaagaccugcggcuucguggacgagagaggccuguacaagagccugaagggcgccugcaagcugaagcugugcggcgugcugggccugagacugauggacggcaccuggguggccaugcccaccagcgacgagaccaaguggugcccccccgaccagcuggugaaccugcacgacuucagaagcgacgagaucgagcaccuggugguggaggagcuggugagaaagagagaggagugccuggacgcccuggagagcaucaugaccaccaagagcgugagcuucagaagacugagccaccugagaaagcuggugcccggcuucggcaaggccuacaccaucuucaacaagacccugauggaggccgacgcccacuacaagagcgugagaaccuggaacgagaucauccccagcaagggcugccugagagugggcggcagaugccacccccacgugaacggcguguucuucaacggcaucauccugggccccgacggccacgugcugauccccgagaugcagagcagccugcugcagcagcacauggagcugcuggagagcagcgugaucccccugaugcacccccuggccgaccccagcaccguguucaaggacggcgacgaggccgaggacuucguggaggugcaccugcccgacgugcacaagcagaucagcggcguggaccugggccugcccaacuggggcaaguacgugcugaucaucgccggcgugcugaucgccaugauccugaccaucuuccugaugaccugcugcggcagaggcaaccagcccagaagcacccagcacagccugggcggcaucggcagaaaggugagcagcaccagccagagcggcaaggugaucagcagcugggagagcuacaagagcggcggcgagaccagacuguga

SEQ ID NO: 191534 - RNA, 1575 nt, Artificial Sequence
  derived and/or modified CDS sequence (opt4) from glycoprotein__RABV__KC792178.1
auggugccccaggcccugcuguucgugccccugcuggccuuccccaugugcuucggcaaguuccccaucuacaccauccccgacaagcugggccccuggagccccaucgacauccaccaccugagcugccccaacaaccuggugguggaggacgagggcugcaccaaccugagcggcuucagcuacauggagcugaaggugggcuacaucagcgccaucaaggugaacggcuucaccugcaccggcguggugaccgaggccgagaccuacaccaacuucgugggcuacgugaccaccaccuucaagagaaagcacuucagacccacccccgacgccugcagagccgccuacaacuggaagauggccggcgaccccagauacgaggagagccugcacaaccccuaccccgacuaccacuggcugagaaccgugaagaccaccaaggagagccugaucaucaucagccccagcguggccgaccuggaccccuacgacaagagccugcacagcagaguguuccccagcggcaagugccugggcaucaccaucagcagcaccuacugcagcaccaaccacgacuacaccaucuggaugcccgagaacgugagacugggcaccagcugcgacaucuucaccaacagcagaggcaagagagccagcaagggcagcaagaccugcggcuucguggacgagagaggccuguacaagagccugaagggcgccugcaagcugaagcugugcggcgugcugggccugagacugauggacggcaccuggguggccaugcccaccagcgacgagaccaaguggugcccccccgaccagcuggugaaccugcacgacuucagaagcgacgagaucgagcaccuggugguggaggagcuggugagaaagagagaggagugccuggacgcccuggagagcaucaugaccaccaagagcgugagcuucagaagacugagccaccugagaaagcuggugcccggcuucggcaaggccuacaccaucuucaacaagacccugauggaggccgacgcccacuacaagagcgugagaaccuggaacgagaucauccccagcaagggcugccugagagugggcggcagaugccacccccacgugaacggcguguucuucaacggcaucauccugggccccgacggccacgugcugauccccgagaugcagagcagccugcugcagcagcacauggagcugcuggagagcagcgugaucccccugaugcacccccuggccgaccccagcaccguguucaaggacggcgacgaggccgaggacuucguggaggugcaccugcccgacgugcacaagcagaucagcggcguggaccugggccugcccaacuggggcaaguacgugcugaucaucgccggcgugcugaucgccaugauccugaccaucuuccugaugaccugcugcggcagaggcaacagacccaagagcacccagcacagccugggcggcaucggcagaaaggugagcagcaccagccagagcggcaaggugaucagcagcugggagagcuacaagagcggcggcgagaccagacuguga

SEQ ID NO: 191535 - RNA, 1575 nt, Artificial Sequence
  derived and/or modified CDS sequence (opt4) from glycoprotein__RABV__KC792179.1
auggugccccaggcccugcuguucgugccccugcuggccuuccccaugugcuucggcaaguuccccaucuacaccauccccgacaagcugggccccuggagccccaucgacauccaccaccugagcugccccaacaaccuggugguggaggacgagggcugcaccaaccugagcggcuucagcuacauggagcugaaggugggcuacaucagcgccaucaaggugaacggcuucaccugcaccggcguggugaccgaggccgagaccuacaccaacuucgugggcuacgugaccaccaccuucagaagaaagcacuucagacccacccccgacgccugcagagccgccuacaacuggaagaucgccggcgaccccagauacgaggagagccugcacaaccccuaccccgacuaccacuggcugagaaccgugaagaccaccaaggagagccugaucaucaucagccccagcguggccgaccuggaccccuacgacaagagccugcacagcagaguguuccccagcggcaagugccugggcaucaccaucagcagcaccuacugcagcaccaaccacgacuacaccaucuggaugcccgagaaccugagacugggcaccagcugcgacaucuucaccaacagcagaggcaagagagccagcaagggcagcagaaccugcggcuucguggacgagagaggccuguacaagagccugaagggcgccugcaagcugaagcugugcggcgugcugggccugagacugauggacggcaccuggguggccaugcagaccagcgacgagaccaaguggugcccccccgaccagcuggugaaccugcacgacuucagaagcgacgagaucgagcaccuggugguggaggagcuggugaagaagagagaggagugccuggacgcccuggagagcaucaugaccaccaagagcgugagcuucagaagacugagccaccugagaaagcuggugcccggcuucggcaaggccuacaccaucuucaacaagacccugauggaggccgacgcccacuacaagagcgugagaaccuggaacgagaucauccccagcaagggcugccugagagugggcggcagaugccacccccacgugaacggcguguucuucaacggcaucauccugggccccgacggccacgugcugauccccgagaugcagagcagccugcugcagcagcacauggagcugcuggagagcagcgugaucccccugaugcacccccuggccgaccccagcaccguguucaaggacggcgacgaggccgaggacuucguggaggugcaccugcccgacgugcacaagcagaucagcggcguggaccugggccugcccaacuggggcaaguacgugcugaucaucgccggcgugcugaucgccaugauccugaccaucuuccugaugaccugcugcggcagaggcaacagacccaagagcacccagcacagccugggcggcaucggcagaaaggugagcgccaccagccagagcggcaaggugaucagcagcugggagagcuacaagaacggcggcgagaccagacuguga

SEQ ID NO: 191536 - RNA, 1575 nt, Artificial Sequence; identical to SEQ ID NO: 191532
  derived and/or modified CDS sequence (opt4) from glycoprotein__RABV__KC792180.1

SEQ ID NO: 191537 - RNA, 1575 nt, Artificial Sequence; identical to SEQ ID NO: 191534
  derived and/or modified CDS sequence (opt4) from glycoprotein__RABV__KC792181.1

SEQ ID NO: 191538 - RNA, 1575 nt, Artificial Sequence; identical to SEQ ID NO: 191535
  derived and/or modified CDS sequence (opt4) from glycoprotein__RABV__KC792182.1

SEQ ID NO: 191539 - RNA, 1575 nt, Artificial Sequence; identical to SEQ ID NO: 191534
  derived and/or modified CDS sequence (opt4) from glycoprotein__RABV__KC792183.1

SEQ ID NO: 191540 - RNA, 1575 nt, Artificial Sequence; identical to SEQ ID NO: 191529
  derived and/or modified CDS sequence (opt4) from glycoprotein__RABV__KC792184.1

SEQ ID NO: 191541 - RNA, 1575 nt, Artificial Sequence
  derived and/or modified CDS sequence (opt4) from glycoprotein__RABV__KC792185.1
auggugccccaggcccugcuguucgugccccugcuggccuuccccaugugcuucggcaaguuccccaucuacaccauccccgacaagcugggccccuggagccccaucgacauccaccaccugagcugccccaacaaccuggugguggaggacgagggcugcaccaaccugagcggcuucagcuacauggagcugaaggugggcuacaucagcgccaucaaggugaacggcuucaccugcaccggcguggugaccgaggccgagaccuacaccaacuucgugggcuacgugaccaccaccuucaagagaaagcacuucagacccacccccgacgccugcagagccgccuacaacuggaagauggccggcgaccccagauacgaggagagccugcacaaccccuaccccgacuaccacuggcugagaaccgugaagaccaccaaggagagccugaucaucaucagccccagcguggccgaccuggaccccuacgacaagagccugcacagcagaguguuccccagcggcaagugccugggcaucaccaucagcagcaccuacugcagcaccaaccacgacuacaccaucuggaugcccgagaaccugagacugggcaccagcugcgacaucuucaccaacagcagaggcaagagagccagcaagggcagcaagaccugcggcuucguggacgagagaggccuguacaagagccugaagggcagcugcaagcugaagcugugcggcgugcugggccugagacugauggacggcaccuggguggccaugcagaccagcgacgagaccaaguggugcccccccgaccagcuggugaaccugcacgacuucagaagcgacgagaucgagcaccuggugguggaggagcuggugaagaagagagaggagugccuggacgcccuggagagcaucaugaccaccaagagcgugagcuucagaagacugagccaccugagaaagcuggugcccggcuucggcaaggccuacaccaucuucaacaagacccugauggaggccgacgcccacuacaagagcgugagaaccuggaacgagaucauccccagcaagggcugccugagagugggcggcagaugccacccccacgugaacggcguguucuucaacggcaucauccugggccccgacggccacgugcugauccccgagaugcagagcagccugcugcagcagcacauggagcugcuggagagcagcgugaucccccugaugcacccccuggccgaccccagcaccguguucaaggacggcgacgaggccgaggacuucguggaggugcaccugcccgacgugcacaagcagaucagcggcguggaccugggccugcccaacuggggcaaguacgugcugaucaucgccggcgugcugaucgccaugauccugaccaucuuccugaugaccugcugcggcagaggcaacagacccaagagcacccagcacagccugggcggcaucggcagaaaggugagcgccaccagccagagcggcaaggugaucagcagcugggagagcuacaagagcggcggcgagaccagacuguga

SEQ ID NO: 191542 - RNA, 1575 nt, Artificial Sequence; identical to SEQ ID NO: 191534
  derived and/or modified CDS sequence (opt4) from glycoprotein__RABV__KC792186.1

SEQ ID NO: 191543 - RNA, 1575 nt, Artificial Sequence; identical to SEQ ID NO: 191535
  derived and/or modified CDS sequence (opt4) from glycoprotein__RABV__KC792187.1

SEQ ID NO: 191544 - RNA, 1575 nt, Artificial Sequence
  derived and/or modified CDS sequence (opt4) from glycoprotein__RABV__KC792188.1
auggugccccaggcccugcuguucgugccccugcuggccuuccccaugugcuucggcaaguuccccaucuacaccauccccgacaagcugggccccuggagccccaucgacauccaccaccugagcugccccaacaaccuggugguggaggacgagggcugcaccaaccugagcggcuucagcuacauggagcugaaggugggcuacaucagcgccaucaaggugaacggcuucaccugcaccggcguggugaccgaggccgagaccuacaccaacuucgugggcuacgugaccaccaccuucaagagaaagcacuucagacccacccccgacgccugcagagccgccuacaacuggaagauggccggcgaccccagauacgaggagagccugcacaaccccuaccccgacuaccacuggcugagaaccgugaagaccaccaaggagagccugaucaucaucagccccagcguggccgaccuggaccccuacgacaagagccugcacagcagaguguuccccagcggcaagugccugggcaucaccaucagcagcaccuacugcagcaccaaccacgacuacaccaucuggaugcccgagaacgugagacugggcaccagcugcgacaucuucaccaacagcagaggcaagagagccagcaagggcagcaagaccugcggcuucguggacgagagaggccuguacaagagccugaagggcgccugcaagcugaagcugugcggcgugcugggccugagacugauggacggcaccuggguggccaugcccaccagcgacgagaccaaguggugcccccccgaccagcuggugaaccugcacgacuucagaagcgacgagaucgagcaccuggugguggaggagcuggugagaaagagagaggagugccuggacgcccuggagagcaucaugaccaccaagagcgugagcuucagaagacugagccaccugagaaagcuggugcccggcuucggcaaggccuacaccaucuucaacaagacccugauggaggccgacgcccacuacaagagcgugagaaccuggagcgagaucauccccagcaagggcugccugagagugggcggcagaugccacccccacgugaacggcguguucuucaacggcaucauccugggccccgacggccacgugcugauccccgagaugcagagcagccugcugcagcagcacauggagcugcuggagagcagcgugaucccccugaugcacccccuggccgaccccagcaccguguucaaggacggcgacgaggccgaggacuucguggaggugcaccugcccgacgugcacaagcagaucagcggcguggaccugggccugcccaacuggggcaaguacgugcugaucaucgccggcgugcugaucgccaugauccugaccaucuuccugaugaccugcugcggcagaggcaacagacccaagagcacccagcacagccugggcggcaucggcagaaaggugagcagcaccagccagagcggcaaggugaucagcagcugggagagcuacaagagcggcggcgagaccagacuguga

SEQ ID NO: 191545 - RNA, 1575 nt, Artificial Sequence
  derived and/or modified CDS sequence (opt4) from glycoprotein__RABV__KC977995.1
augaucccccaggugcugcuguucgugccccugcugguguucagcagcugcuucggcaaguuccccaucuacaccauccccgacaagcugggccccuggagccccaucgacauccaccaccugagcugccccaacaaccuggugguggaggacgagggcugcaccaaccugagcggcuucagcuacauggagcugaaggugggcuacaucagcgccaucaaggugaacggcuucaccugcaccggcguggugaccgaggccgagaccuacaccaacuucgugggcuacgugaccaccaccuucaagagaaagcacuucagacccaugcccgacgccugcagagccgccuacaacuggaagauggccggcgaccccagauacgaggagagccugcacaaccccuaccccgacuaccacuggcugagaaccgugaagaccaccaaggagagccuggugaucaucagccccagcguggccgaccuggaccccuacgacaagagccugcacagcagaguguuccccggcggcaagugcagcggcaucaccgugagcagcaccugcugcagcaccaaccacgacuacaccaucuggaugcccgagaaccccagacugggcaccagcugcgacaucuucaccaacagcagaggcaagagagccagcaagggcggcaagaccugcggcuucguggacgagagaggccuguacaagagccugagaggcgccugcaagcugaagcugugcggcgugcugggccugagacugauggacggcaccuggguggccauccagaccagcgacgagaucaaguggugcagccccgaccagcuggugaaccugcacgacuuccacagcgacgagaucgagcaccuggugguggaggagcuggugaagaagagagaggagugccuggacgcccuggagaccaucaugaccaccaagagcgugagcuucagaagacugagccaccugagaaagcuggugcccggcuucggcaaggccuacaccaucuucaacaagacccugauggaggccgacgcccacuacaagagcaucagaaccuggaacgagaucauccccagcaagggcugccugagagugggcggcagaugccacccccacgugaacggcguguucuucaacggcaucauccugggccccgacggccacgugcugauccccgagaugcagagcagccugcugcaccagcacauggagcugcuggagagcagcgugaucccccugaugcacccccuggccgaccccagcaccguguucaaggacggcgacgaggccgaggacuucguggaggugcaccugcccgacgugcacaagcagaucagcggcguggaccugggccugcccaacuggggcaaguacgugcugaucagcgccggcgcccugaccgcccugaugcugaugaucuuccugaugaccugcugcagaaagaccaacagagccgagagcauccagcacagccccggcgagaccggcagaaaggugagcgugaccagccacaacggcagagugaccagcagcugggagagcuacaagagcggcagcgagaccaagcuguga

SEQ ID NO: 191546 - RNA, 1575 nt, Artificial Sequence
  derived and/or modified CDS sequence (opt4) from glycoprotein__RABV__KF154996.1
auggugccccaggugcugcuguucgugccccugcugguguucagcaugugcuucggcaaguuccccaucuacaccauccccgacaagcugggccccuggagccccaucgacauccaccaccugagcugccccaacaaccuggugguggaggacgagggcugcaccaaccugagcggcuucagcuacauggagcugaaggugggcuacaccagcgccaucaaggugaacggcuucaccugcaccggcguggugaccgaggccgagaccuacaccaacuucgugggcuacgugaccaccaccuucaagagaaagcacuucagacccacccccgacgccugcagagccgccuacaacuggaagauggccggcgaccccagauacgaggagagccugcacaaccccuaccccgacuaccacuggcugagaaccgugaagaccaccaaggagagccuggugaucaucagccccagcguggccgaccuggaccccuacgacaagagccugcacagcagaguguuccccagcggcaagugcagcggcaucaccaucagcagcaccuacugcagcaccaaccacgacuacaccaucuggaugcccgagaaccccagacugggcaccagcugcgacaucuucaccaacagcagaggcaagagagccagcaagggcggcaagaccugcggcuucguggacgagagaggccuguacaagagccugaagggcgccugcaagcugaagcugugcggcgugcugggccugagacugauggacggcaccuggguggccaugcagaccagcgacgagaccaaguggugcccccccgaccagcuggugaaccugcacgacuucagaagcgacgagaucgagcaccuggugguggaggagcuggugaagaagagagaggagugccuggacgcccuggagagcaucaugaccaccaagagcgugagcuucagaagacugagccaccugagaaagcuggugcccggcuucggcaaggccuacaccaucuucaacaagacccugauggaggccgacgcccacuacaagagcgugagaaccuggaacgagaucauccccagcaagggcugccugagagugggcggcagaugccacccccacgugaagggcguguucuucaacggcaucauccugggccccgacggccacgugcugauccccgagaugcagagcagccugcugcagcagcacauggagcugcuggagagcagcgugaucccccugaugcacccccuggccgaccccagcaccguguucaaggacggcgacgaggccgaggacuucguggaggugcaccugcccgacgugcacaagcagaucagcggcguggaccugggccugcccagcuggggcagauacgugcuggugagcgccggcgugcugguggugcugaugcugaccauccugaucaucaccugcugcggcagagugcacagacccaagagcacccagcacggccugggcggcaccggcagaaaggugagcgugaccagccagagcggcaaggugaucagcagcugggagagcuacaagagcggcggcgagaccagacuguga

SEQ ID NO: 191547 - RNA, 1575 nt, Artificial Sequence
  derived and/or modified CDS sequence (opt4) from glycoprotein__RABV__KF154997.1
auggugccccaggcccugcugcuggugccccugcugggcuucagccugugcuucggcaaguuccccaucuacaccauccccgacaagcugggccccuggagccccaucgacauccaccaccugagcugccccaacaaccuggugguggaggacgagggcugcaccaaccugagcggcuucagcuacauggagcugaaggugggcuacaucagcagcaucaaggugaacggcuucaccugcaccggcguggugaccgaggccgagaccuacaccaacuucgugggcuacgugaccaccaccuucagaagaaagcacuucagacccacccccgacgccugcagagccgccuacaacuggaagauggccggcgaccccagauacgaggagagccugcacaaccccuaccccgacuaccacuggcugagaaccgugaagaccaccaaggagagccuggugaucaucagccccagcguggccgaccuggaccccuacgacaagagccugcacagcagaguguuccccagcggcaagugcagcggcaucaccgugagcagcaccuacugcagcaccaaccacgacuacaccaucuggaugcccgagaaccugagacugggcaccagcugcgacaucuucaccaacagcagaggcaagagagccagcaagggcagcaagaccugcggcuucguggacgagagaggccuguacaagagccugaagggcgccugcaagcugaagcugugcggcgugcugggccugagacugauggacggcaccuggguggccaugcagaccagcgacgagaccaaguggugcccccccgaccagcuggugaaccugcacgacuucagaagcgacgagaucgagcaccuggugguggaggagcuggugaagaagagagaggagugccuggacgcccuggagagcaucaugaccaccaagagcgugagcuucagaagacugagccaccugagaaagcuggugcccggcuucggcaaggccuacaccaucuucaacaagacccugauggaggccgacgcccacuacaagagcgugagaaccuggaacgaggugauccccagcagaggcugccugagagugggcggcagaugccacccccacgugaacggcguguucuucaacggcaucauccugggccccgacggccacgugcugauccccgagaugcagagcagccugcugcagcagcacaucgagcugcuggagagcagcgugaucccccugaugcacccccuggccgaccccagcaccguguucaaggacggcgacgaggccgaggacuucguggaggugcaccugcccgacgugcacaagcaggugagcggcguggaccugggccugcccaacuggggcaaguacgugcugcugagcgccggcgcccugaucgcccugaugcugaucguguuccugaucaccugcugcagaagagugaacagacccgagagcacccagagaagccugagaggcgccggcagaaaggugagcaucaccagccagagcggcaaggugaucagcagcugggagagcuacaagagcggcggcgagaccagacuguga

SEQ ID NO: 191548 - RNA, 1575 nt, Artificial Sequence
  derived and/or modified CDS sequence (opt4) from glycoprotein__RABV__KF154998.1
auggugccccaggcccugcuguucgugccccugcuggccuucagccugugcuucggcaaguuccccaucuacaccauccccgacaagcugggccccuggagccccaucgacauccaccaccugagcugccccaacaaccuggugguggaggacgagggcugcaccaaccugagcgaguucagcuacauggagcugaagaugggcuacaucagcgccaucaaggugaacggcuucaccugcaccggcguggugaccgaggccgagaccuacaccaacuucgugggcuacgugaccaccaccuucaagagaaagcacuucagacccacccccgacgccugcagagccgccuacaacuggaagauggccggcgaccccagauacgaggagagccugcacaaccccuaccccgacuaccacuggcugagaaccgugaagaccaccaaggagagccugaucaucaucagccccagcguggccgaccuggaccccuacgacaagagccugcacagcagaguguuccccagcggcaagugcagcggcaucaccgugagcagcaccuacugcagcaccaaccacgacuacaccaucuggaugcccgagaaccccagacccggcaccagcugcgacaucuucgccagcagcagaggcaagagagccagcaagggcggcaagaccugcggcuucguggacgagagaggccuguacaagagccugaagggcgccugcaagcugaagcugugcggcgugcugggccugagacugauggacggcaccuggguggccaugcagaccagcgacgagaccaaguggugcccccccgaccagcuggugaaccugcacgacuucagaagcgacgagaucgagcaccuggugguggaggagcuggugaagaagagagaggagugccuggacgcccuggagagcaucaugaccaccaagagcgugagcuucagaagacugagccaccugagaaagcuggugcccggcuucggcaaggccuacaccaucuucaacaagacccugauggaggccgacgcccacuacaagagcgugcagaccuggaacgagaucauccccagcaagggcugccugagagugggcgagagaugccacccccacgugaacggcguguucuucaacggcaucauccugggccccgacggccacgugcugauccccgagaugcagagcagccugcugcagcagcacauggagcugcuggagagcagcgugaucccccugaugcacccccuggccgaccccagcaccguguucaaggacggcgacgaggccgaggacuucguggaggugcaccugcccgacgugcacaagcaggugagcggcguggaccugggccugcccaacuggggcaaguacgugcuggugagcgccggcgcccugaucgcccugaugcugaucaucuuccugaucaccugcugcagaagagugaacagacccgaguacacccagagaagccugggcggcaccggcagaaaggugagcgugaccagccagagcggcaaggugaucagcagcugggagagcuacaagagcggcggcgagaccagacuguga

SEQ ID NO: 191549 - RNA, 1575 nt, Artificial Sequence; identical to SEQ ID NO: 190817
  derived and/or modified CDS sequence (opt4) from glycoprotein__RABV__KF154999.1

SEQ ID NO: 191550 - RNA, 1575 nt, Artificial Sequence
  derived and/or modified CDS sequence (opt4) from glycoprotein__RABV__KF155000.1
auggugccccaggcccugcuguucgugccccugcugguguucagccugugcuucggcaaguuccccaucuacaccauccccgacaagcugggccccuggagccccaucgacauccaccaccugaccugccccaacaaccuggugguggaggacgagggcugcaccaaccugagcggcuucagcuacauggagcugaaggugggcuacaucagcgccaucaaggugaacggcuucaccugcaccggcguggugaccgaggccgagaccuacaccaacuucgugggcuacgugaccaccaccuucaagagaaagcacuucagacccacccccgacgccugcagagccgccuacaacuggaagauggccggcgaccccagauacgaggagagccugcacaaccccuaccccgacuaccacuggcugagaaccgugaagaccaccaaggagagccuggugaucaucagccccagcguggccaaccuggaccccuacgacaagagccugcacagcagaguguuccccagcggcaagugcagcggcaucaccgugagcagcaccuacugcagcaccaaccacgacuacaccaucuggaugcccgagaaccccagacugggcaccagcugcgacaucuucaccaacagcagaggcaagagagccagcaagggcagcaagaccugcggcuucguggacgagagaggccuguacaagagccugaagggcgccugcaagcugaagcugugcggcgugcugggccugagacugauggacggcaccuggguggccaugcagaccagcgacgagaccaaguggugcccccccgaccagcuggugaaccugcacgacuucagaagcgacgagaucgagcaccuggugguggaggagcuggugaagaagagagaggagugccuggacgcccuggagagcaucaugaccaccaagagcgugagcuucagaagacugagccaccugagaaagcuggugcccggcuucggcaaggccuacaccaucuucaacaagacccugauggaggccgacgcccacuacaagagcgugagaaccuggaacgagaucauccccagcaagggcugccugagagugggcggcagaugccacccccacgugaacggcguguucuucaacggcaucauccugggccccgacggccacgugcugauccccgagaugcagagcagccugcugcagcagcacauggagcugcuggagagcagcgugaucccccugaugcacccccuggccgaccccagcaccguguucaaggacggcgacgaggccgaggacuucguggaggugcaccugcccgacgugcacaagcaggugagcggcguggaccugggccugcccaacuggggcaaguacgugcugcugagcgccggcgcccugaucgcccugaugcugaucaucuuccugaugaccugcugcagaagagugaacagacccgagagcacccagagaagccugggcggcaccggcagaaaggugagcgugaccagccagagcggcaaggugaucagcagcugggagagcuacaagagcggcggcgagaccagacuguga

SEQ ID NO: 191551 - RNA, 1575 nt, Artificial Sequence
  derived and/or modified CDS sequence (opt4) from glycoprotein__RABV__KF155001.1
auggugccccaggcccugcuguucgugccccugcugguguucagccugugcuucggcaaguuccccaucuacaccauccccgacaagcugggccccuggagccccaucgacauccaccaccugagcugccccaacaaccuggugguggaggacgagggcugcaccaaccugagcggcuucagcuacauggagcugaaggugggcuacaucagcgccaucaaggugaacggcuucaccugcaccggcguggugaccgaggccgagaccuacaccaacuucgugggcuacgugaccaccaccuucaagagaaagcacuucagacccacccccgacgccugcagagccgccuacaacuggaagauggccggcgaccccagauacgaggagagccugcacaaccccuaccccgacuaccacuggcugagaaccgugaagaccaccaaggagagccuggugaucaucagccccagcguggccgaccuggaccccuacgacaagagccugcacagcagaguguuccccagcggcaagugcagcggcaucaccgugagcagcaccuacugcagcaccaaccacgacuacaccaucuggaugcccgagaaccccagacugggcaccagcugcgacaucuucaccaacagcagaggcaagagagccagcaagggcagcaagaccugcggcuucguggacgagagaggccuguacaagagccugaagggcgccugcaagcugaagcugugcggcgugcugggccugagacugauggacggcaccuggguggccaugcagaccagcgacgagaccaaguggugcccccccgaccagcuggugaaccugcacgacuucagaagcgacgagaucgagcaccuggugguggaggagcuggugaagaagagagaggagugccuggacgcccuggagagcaucaugaccaccaagagcgugagcuucagaagacugagccaccugagaaagcuggugcccggcuucggcaaggccuacaccaucuucaacaagacccugauggaggccgacgcccacuacaagagcgugagaaccuggaacgagaucauccccagcaagggcugccugagagugggcggcagaugccacccccacgugaacggcguguucuucaacggcaucauccugggccccgacggccacgugcugauccccgagaugcagagcagccugcugcagcagcacauggagcugcuggagagcagcgugaucccccugaugcacccccuggccgaccccagcaccguguucaaggacggcgacgaggccgaggacuucguggaggugcaccugcccgacgugcacaagcaggugagcggcguggaccugggccugcccaacuggggcaaguacgugcugcugagcgccggcacccugaucgcccugaugcugaucaucuuccugaugaccugcugcagaagagugaacagacccaagagcaugcagagaagccugggcgagaccggcagaaaggugagcgugaccagccagagcggcaaggugaucagcagcugggagagcuacaagagcggcggcgagaccagacuguga

SEQ ID NO: 191552 - RNA, 1575 nt, Artificial Sequence
  derived and/or modified CDS sequence (opt4) from glycoprotein__RABV__KF155002.1
auggugccccaggccagacuguucgugccccugcugguguucccccugugcuucggcaaguuccccaucuacaccauccccgacaagcugggccccuggagccccaucgacauccaccaccugagcugccccaacaaccuggugguggaggacgagggcugcaccaaccugagcggcuucagcuacauggagcugaaggugggcuacaucagcgccaucaaggugaacggcuucaccugcaccggcguggugaccgaggccgagaccuacaccaacuucgugggcuacgugaccaccaccuucaagagaaagcacuucagacccauccccgacgccugcagagccgccuacaacuggaagauggccggcgaccccagauacgaggagagccugcacaaccccuaccccgacuaccacuggcugagaaccgugaagaccaccaaggagagccuggugaucaucagccccagcguggccgaccuggaccccuacgacagaagccugcacagcagaguguucaccggcggcaagugcagcggcaucaccgugagcagcaccuacugcagcaccaaccacgacuacaccaucuggaugcccgagaaccccagacugggcaccagcugcaacaucuucgccaacagcaagggcaagagagccagcaagggcggcaagaccugcggcuucguggacgagagaggccuguacaagagccugaagggcgccugcaagcugaagcugugcggcgugcugggccugagacugauggacggcaccuggguggccaugcagaccagcgacgagaccaaguggugcccccccgaccagcuggugaacaugcacgacuucagaagcgacgagaucgagcaccuggugguggaggagcuggugaagaagagagaggagugccuggacgcccuggagagcaucaugaccaccaagagcgugagcuucagaagacugagccaccugagaaagcuggugcccggcuucggcaaggccuacaccaucuucaacaagacccugauggaggccgacgcccacuacaagagcgugagaaccuggaacgagaucauccccagcaagggcugccugagagugggcggcagaugccacccccacgugaacggcguguucuucaacggcaucauccugggccccgacggccacgugcugauccccgagaugcagagcagccugcugcagcagcacauggagcugcuggagagcagcgugaucccccugaugcacccccuggccgaccccagcaccguguucaaggacggcgacgaggccgaggacuucguggaggugcaccugcccgacgugcacaagcaggugagcggcguggaccugggccugcccaacuggggcaaguacgugcugcugagcgccggcacccugaucgcccugaugcugaucaucuuccugaugaccugcugcagaagagugagcagacccgagagcacccagagaagccugggcagaaccggcagaaaggugagcgugaccagccagagcggcaaggugaucagcagcugggagagcuacaagagcggcggcgagaccagacuguga

SEQ ID NO: 191553 - RNA, 1575 nt, Artificial Sequence
  derived and/or modified CDS sequence (opt4) from glycoprotein__RABV__KF437644.1
auggugccccaggcccugcuguucgugccccugcugguguucagcaugugcuucggcaaguuccccaucuacaccauccccgacaagcugggccccuggagccccaucgacauccaccaccugagcugccccaacaaccuggugguggaggacgagggcugcaccaaccugagcggcuucagcuacauggagcugaaggugggcuacaucagcgccaucaaggugaacggcuucaccugcaccggcguggugaccgaggccgagaccuacaccaacuucgugggcuacgugaccaccaccuucaagagaaagcacuucagacccacccccgacgccugcagagccgccuacaacuggaagauggccggcgaccccagauacgaggagagccugcacaaccccuaccccgacuaccacuggcugagaaccgugaagaccaccaaggagagccuggugaucaucagccccagcguggccgaccuggaccccuacgacaagagccugcacagcagaguguuccccaacggcaagugcagcggcaucaccaucagcagcaccuacugccccaccaaccacgacuacaccaucuggcugcccgagaaccccagacugggcaccagcugcgacaucuucaccaacagcagaggcaagagagccagcaagggcagcaagaccugcggcuucguggacgagagaggccuguacaagagccugaagggcgccugcaagcugaagcugugcggcgugcugggccugagacugauggacggcaccuggguggccaugcaggccagcgacgagaccaaguggugcccccccgaccagcuggugaaccugcacgacuucagaagcgacgagaucgagcaccuggugguggaggagcuggugaagaagagagaggagugccuggacgcccuggagagcaucaugaccaccaagagcgugagcuucagaagacugagccaccugagaaagcuggugcccggcuucggcaaggccuacaccaucuucaacaagacccugauggaggccgacgcccacuacaagagcgugagaaccuggaacgagaucauccccagcaagggcugccugagagugggcggcagaugccacccccacgugaacggcguguucuucaacggcaucauccugggccccgacggccacgugcugauccccgagaugcagagcagccugcugcagcagcacauggagcugcuggagagcagcgugaucccccugaugcacccccuggccgaccccagcaccguguucaaggacggcgacgaggccgagaacuucguggaggugcaccugcccgacgugcacaagcagaucagcggcguggaccugggccugcccaacuggggcaaguacgugcuggugagcgccggcgugcugaucgcccugaugcugaucaucuuccugaugaccugcugcggcagagugaacagacccgagagcacccagcacaaccugggcggcaccggcagagaggugagcgugaccccccagagcggcaaggugaucagcagcugggagagcuacaagagcggcggcggcaccagacuguga

SEQ ID NO: 191554 - RNA, 1575 nt, Artificial Sequence; identical to SEQ ID NO: 191553
  derived and/or modified CDS sequence (opt4) from glycoprotein__RABV__KF437645.1

SEQ ID NO: 191555 - RNA, 1575 nt, Artificial Sequence; identical to SEQ ID NO: 191553
  derived and/or modified CDS sequence (opt4) from glycoprotein__RABV__KF437646.1

SEQ ID NO: 191556 - RNA, 1575 nt, Artificial Sequence
  derived and/or modified CDS sequence (opt4) from glycoprotein__RABV__KF437648.1
auggugccccaggcccugcuguucgugccccugcugguguucagcaugugcuucggcaaguuccccaucuacaccauccccgacaagcugggccccuggagccccaucgacauccaccaccugagcugccccaacaaccuggugguggaggacgagggcugcaccaaccugagcggcuucagcuacauggagcugaaggugggcuacaucagcgccaucaaggugaacggcuucaccugcaccggcguggugaccgaggccgagaccuacaccaacuucgugggcuacgugaccaccaccuucaagagaaagcacuucagacccacccccgacgccugcagagccgccuacaacuggaagauggccggcgaccccagauacgaggagagccugcacaaccccuaccccgacuaccacuggcugagaaccgugaagaccaccaaggagagccuggugaucaucagccccagcguggccgaccuggaccccuacgacaagagccugcacagcagagugcugcccaacggcaagugcagcggcaccaccaccagcagcaccuacugccccaccaaccacgacuacaccaucuggcugcccgagaaccccagacugggcaccagcugcgacaucuucaccaacagcagaggcaagagagccagcaagggcggcaagaccugcggcuucguggacgagagaggccuguacaagagccugaagggcgccugcaagcugaagcugugcggcgugcugggccugagacugauggacggcaccuggguggccaugcaggccagcgacgagaccaaguggugcccccccgaccagcuggugaaccugcacgacuucagaagcgacgagaucgagcaccuggugguggaggagcuggugaagaagagagaggagugccuggacgcccuggagagcaucaugaccaccaagagcgugagcuucagaagacugagccaccugagaaagcuggugcccggcuucggcaaggccuacaccaucuucaacaagacccugauggaggccgacgcccacuacaagagcgugagaaccuggaacgagaucauccccagcaagggcugccugagagugggcggcagaugccacccccacgugaacggcguguucuucaacggcaucauccugggccccgacggccacgugcugauccccgagaugcagagcagccugcugcagcagcacauggagcugcuggagagcagcgugaucccccugaugcacccccuggccgaccccagcaccguguucaaggacggcgacgaggccgagaacuucguggaggugcaccugcccgacgugcacaagcagaucagcggcguggaccugggccugcccaacuggggcaaguacgugcuggugagcgccggcgugcugaucgcccugaugcugaucaucuuccugaugaccugcugcggcagagugaacagacccgagagcacccagcacaaccugggcggcaccggcagagaggugagcgugaccccccagagcggcaaggugaucagcagcugggagagcuacaagagcggcggcgagaccagacuguga

SEQ ID NO: 191557 - RNA, 1575 nt, Artificial Sequence
  derived and/or modified CDS sequence (opt4) from glycoprotein__RABV__KF437649.1
auggugccccaggcccugcuguucgugccccugcugguguucagcaugugcuucggcaaguuccccaucuacaccauccccgacaagcugggccccuggagccccaucgacauccaccaccugagcugccccaacaaccuggugguggaggacgagggcugcaccaaccugagcggcuucagcuacauggagcugaaggugggcuacaucagcgccaucaaggugaacggcuucaccugcaccggcguggugaccgaggccgagaccuacaccaacuucgugggcuacgugaccaccaccuucaagagaaagcacuucagacccacccccgacgccugcagagccgccuacaacuggaagauggccggcgaccccagauacgaggagagccugcacaaccccuaccccgacuaccacuggcugagaaccgugaagaccaccaaggagagccuggugaucaucagccccagcguggccgaccuggaccccuacgacaagagccugcacagcagaguguuccccaacggcaagugcagcggcaucaccaucagcagcaccuacugccccaccaaccacgacuacaccaucuggcugcccgagaaccccagacugggcaccagcugcgacaucuucaccaacagcagaggcaagagagccagcaagggcagcaagaccugcggcuucguggacgagagaggccuguacaagagccugaagggcgccugcaagcugaagcugugcggcgugcugggccugagacugauggacggcaccuggguggccaugcaggccagcgacgagaccaaguggugcccccccgaccagcuggugaaccugcacgacuucagaagcgacgagaucgagcaccuggugguggaggagcuggugaagaagagagaggagugccuggacgcccuggagagcaucaugaccaccaagagcgugagcuucagaagacugagccaccugagaaagcuggugcccggcuucggcaaggccuacaccaucuucaacaagacccugauggaggccgacgcccacuacaagagcgugagaaccuggaacgagaucauccccagcaagggcugccugagagugggcggcagaugccacccccacgugaacggcguguucuucaacggcaucauccugggccccgacggccacgugcugauccccgagaugcagagcagccugcugcagcagcacauggagcugcuggagagcagcgugaucccccugaugcacccccuggccgaccccagcaccguguucaaggacggcgacgaggccgagaacuucguggaggugcaccugcccgacgugcacaagcagaucagcggcguggaccugggccugcccaacuggggcaaguacgugcuggugagcgccggcgugcugaucgcccugaugcugaucaucuuccugaugaccugcugcggcagagugaacagacccgagagcacccagcacaaccugggcggcaccggcagagaggugagcgugaccccccagagcggcaaggugaucagcagcugggagagcugcaagagcggcggcggcaccagacuguga

SEQ ID NO: 191558 - RNA, 1575 nt, Artificial Sequence; identical to SEQ ID NO: 191553
  derived and/or modified CDS sequence (opt4) from glycoprotein__RABV__KF437650.1

SEQ ID NO: 191559 - RNA, 1575 nt, Artificial Sequence
  derived and/or modified CDS sequence (opt4) from glycoprotein__RABV__KF437652.1
auggugccccaggcccugcuguucgugccccugcugguguucagcaugugcuucggcaaguuccccaucuacaccauccccgacaagcugggccccuggagccccaucgacauccaccaccugagcugccccaacaaccuggugguggaggacgagggcugcaccaaccugagcggcuucagcuacauggagcugaaggugggcuacaucagcgccaucaaggugaacggcuucaccugcaccggcguggugaccgaggccgagaccuacaccaacuucgugggcuacgugaccaccaccuucaagagaaagcacuucagacccacccccgacgccugcagagccgccuacaacuggaagauggccggcgaccccagauacgaggagagccugcacaaccccuaccccgacuaccacuggcugagaaccgugaagaccaccaaggagagccuggugaucaucagccccagcguggccgaccuggaccccuacgacaagagccugcacagcagaguguuccccaacggcaagugcagcggcaucaccaucagcagcaccuacugccccaccaaccacgacuacaccaucuggcugcccgagaaccccagacugggcaccagcugcgacaucuucaccaacagcagaggcaagagagccagcaagggcagcaagaccugcggcuucguggacgagagaggccuguacaagagccugaagggcgccugcaagcugaagcugugcggcgugcugggccugagacugauggacggcaccuggguggccaugcaggccagcgacgagaccaaguggugcccccccgaccagcuggugaaccugcacgacuucagaagcgacgagaucgagcaccuggugguggaggagcuggugaagaagagagagaagugccuggacgcccuggagagcaucaugaccaccaagagcgugagcuucagaagacugagccaccugagaaagcuggugcccggcuucggcaaggccuacaccaucuucaacaagacccugauggaggccgacgcccacuacaagagcgugagaaccuggaacgagaucauccccagcaagggcugccugagagugggcggcagaugccacccccacgugaacggcguguucuucaacggcaucauccugggccccgacggccacgugcugauccccgagaugcagagcagccugcugcagcagcacauggagcugcuggagagcagcgugaucccccugaugcacccccuggccgaccccagcaccguguucaaggacggcgacgaggccgagaacuucguggaggugcaccugcccgacgugcacaagcagaucagcggcguggaccugggccugcccaacuggggcaaguacgugcuggugagcgccggcgugcugaucgcccugaugcugaucaucuuccugaugaccugcugcggcagagugaacagacccgagagcacccagcacaaccugggcggcaccggcagagaggugagcgugaccccccagagcggcaaggugaucagcagcugggagagcuacaagagcggcggcggcaccagacuguga

SEQ ID NO: 191560 - RNA, 1575 nt, Artificial Sequence
  derived and/or modified CDS sequence (opt4) from glycoprotein__RABV__KF437653.1
auggugccccaggcccugcuguucgugccccugcugguguucagcaugugcuucggcaaguuccccaucuacaccauccccgacaagcugggccccuggagccccaucgacauccaccaccugagcugccccaacaaccuggugguggaggacgagggcugcaccaaccugagcggcuucagcuacauggagcugaaggugggcuacaucagcgccaucaaggugaacggcuucaccugcaccggcguggugaccgaggccgagaccuacaccaacuucgugggcuacgugaccaccaccuucaagggcaagcacuucagacccacccccgacgccugcagagccgccuacaacuggaagauggccggcgaccccagauacgaggagagccugcacaaccccuaccccgacuaccacuggcugagaaccgugaagaccaccaaggagagccuggugaucaucagccccagcguggccgaccuggaccccuacgacaagagccugcacagcagaguguuccccaacggcaagugcagcggcaucaccaucagcagcaccuacugccccaccaaccacgacuacaccaucuggcugcccgagaaccccagacugggcaccagcugcgacaucuucaccaacagcagaggcaagagagccagcaagggcagcaagaccugcggcuucguggacgagagaggccuguacaagagccugaagggcgccugcaagcugaagcugugcggcgugcugggccugagacugaccgacggcaccuggguggccaugcaggccagcgacgagaccaaguggugcccccccgaccagcuggugaaccugcacgacuucagaagcgacgagaucgagcaccuggugguggaggagcuggugaagaagagagaggagugccuggacgcccuggagagcaucaugaccaccaagagcgugagcuucagaagacugagccaccugagaaagcuggugcccggcuucggcaaggccuacaccaucuucaacaagacccugauggaggccgacgcccacuacaagagcgugagaaccuggaacgagaucauccccagcaagggcugccugagagugggcggcagaugccacccccacgugaacggcguguucuucaacggcaucauccugggccccgacggccacgugcugauccccgagaugcagagcagccugcugcagcagcacauggagcugcuggagagcagcgugaucccccugaugcacccccuggccgaccccagcaccguguucaaggacggcgacgaggccgagaacuucguggaggugcaccugcccgacgugcacaagcagaucagcggcguggaccugggccugcccaacuggggcaaguacgugcuggugagcgccggcgugcugaucgcccugaugcugaucaucuuccugaugaccugcugcggcagagugaacagacccgagagcacccagcacaaccugggcggcaccggcagagaggugagcgugaccccccagagcggcaaggugaucagcagcugggagagcuacaagagcggcggcggcaccagacuguga

SEQ ID NO: 191561 - RNA, 1575 nt, Artificial Sequence
  derived and/or modified CDS sequence (opt4) from glycoprotein__RABV__KF437654.1
auggugccccaggcccugcuguucgugccccugcugguguucagcaugugcagcggcaaguuccccaucuacaccauccccgacaagcugggccccuggagccccaucgacauccaccaccugagcugccccaacaaccuggugguggaggacgagggcugcaccaaccugagcggcuucagcuacauggagcugaaggugggcuacaucagcgccaucaaggugaacggcuucaccugcaccggcguggugaccgaggccgagaccuacaccaacuucgugggcuacgugaccaccaccuucaagagaaagcacuucagacccacccccgacgccugcagagccgccuacaacuggaagauggccggcgaccccagauacgaggagagccugcacaaccccuaccccgacuaccacuggcugagaaccgugaaggccaccaaggagagccuggugaucaucagccccagcguggccgaccuggaccccuacgacaagagccugcacagcagaguguuccccaacggcaagugcagcggcaucaccaucagcagcaccugcugccccaccaaccacgacuacaccaucuggcugcccgagaaccccagacugggcaccagcugcgacaucuucaccaacagcagaggcaagagagccagcaagggcagcaagaccugcggcuucguggacgagagaggccuguacaagagccugaagggcgccugcaagcugaagcugugcggcgugcugggccugagacugauggacggcgccuggguggccaugcaggccagcgacgagaccaaguggugcccccccgaccagcuggugaaccugcacgacuucagaagcgacgagaucgagcaccuggugguggaggagcuggugaagaagagagaggagugccuggacgcccuggagagcaucaugaccaccaagagcgugagcuucagaagacugagccaccugagaaagcuggugcccggcuucggcaaggccuacaccaucuucaacaagacccugauggaggccgacgcccacuacaagagcgugagaaccuggaacgagaucauccccagcaagggcugccugagagugggcggcagaugccacccccacgugaacggcguguucuucaacggcaucauccugggccccgacggccacgugcugauccccgagaugcagagcagccugcugcagcagcacauggagcugcuggagagcagcgugaucccccugaugcacccccuggccgaccccagcaccguguucaaggacggcgacgaggccgagaacuucguggaggugcaccugcccgacgugcacaagcagaucagcggcguggaccugggccugcccaacuggggcaaguacgugcuggugagcgccggcgugcugaucgcccugaugcugaucaucuuccugaugaccugcugcggcagagugaacagacccgagagcacccagcacaaccugggcggcaccggcagagaggugagcgugaccccccagagcggcaaggugaucagcagcugggagagcuacaagagcggcggcggcaccagacuguga

SEQ ID NO: 191562 - RNA, 1575 nt, Artificial Sequence
  derived and/or modified CDS sequence (opt4) from glycoprotein__RABV__KF484518.1
auggugcugcaggcccugcuguucgcccccuuccugaucagcagccugugcuucggcaaguuccccaucuacaccauccccgacaagcugggccccuggagccccaucgacauccaccaccugagcugccccaacaaccuggugguggaggacgagggcugcaacagccugagcggcuucagcuacauggagcugaaggugggcuacaucagcgccaucaaggugaacggcuucaccugcaccggcguggugaccgaggccgagaccuacaccaacuucgugggcuacgugaccaccaccuucaagagaaagcacuucagacccaugcccgacgccugcagaagcgccuacaacuggaagguggccggcgaccccagauacgaggagagccugcacaaccccuaccccgacuaccacuggcugagaaccgugaagaccaccaaggagagccugaucaucaucagccccagcguggccgaccuggaccccuacgacaagagccugcacagcagaaucuuccccggcggcaagugcagcggcaugaccaucagcagcaccuacugcagcaccaaccacgacuacaccaucuggaugcccgagaagaccggccugggcaccagcugcgacaucuucaucaccagcaagggcaagagagccagcaagggcggcagaaccugcggcuucguggacgagagaggccuguacaagagccugaagggcgccugcaagcugaagcugugcggcgugagcggccugagacugauggacggcaccugggccgccauccagaccagcgacgagaccaaguggugcagccccgaccagcuggugaaccugcacgaccugcacagcgacgagaucgagcaccuggugguggaggagcuggugagaagaagagaggagugccuggacgcccuggagagcaucaugaccaccaagagcgugagcuucagaagacugagccaccugagaaagcuggugcccggcuucggcaaggccuacaccaucuucaacaagacccugauggaggccgacgcccacuacaagagcgugagaaccuggaacgagaucauccccagcaagggcugccugagagugggcggcaagugccacccccacgugaacggcguguucuucaacggcaucauccugggccccgacggccacgugcugauccccgagaugcagagcagccugcugcagcagcacauggagcugcuggagagcagcgugaucccccugaugcacccccuggccgaccugagcaccguguucaaggacggcgacgaggccgaggacuucguggaggugcaccugcccgacgugcacaagcacgugagcggcguggaccugggccugcccagcuggggcaaguacaugcugaugagcgccggcgcccuggccacccugaugcuggugaucccccugaugaagugcugcagaagagugaacagaaccaagagcauccagcagggccccagagagagcgacagaaaggugagcgugaccccccagaacggcaaggugaucagcagcugggagagcuacaagagcggcggcggcaccggccuguga

SEQ ID NO: 191563 - RNA, 1575 nt, Artificial Sequence
  derived and/or modified CDS sequence (opt4) from glycoprotein__RABV__KF484519.1
auggugcugcaggcccugcuguucgcccccuuccugaucagcagccugugccugggcaaguuccccaucuacaccauccccgacaagcugggccccuggagccccaucgacauccaccaccugagcugccccaacaaccuggugaucgaggacgagggcugcaacagccugagcggcuucagcuacauggagcugaaggugggcuacaucagcgccaucaaggugaacggcuucaccugcaccggcguggugaccgaggccgagaccuacaccaacuucgugggcuacgugaccaccaccuucaagagaaagcacuucagacccaugcccgacgccugcagaagcgccuacaacuggaagcuggccggcgaccccagauacgaggagagccugcacaaccccuaccccgaguaccacuggcugagaaccgugaagaccaccaaggagagccugaucgugaucagccccagcguggccgaccuggaccccuacgacaagagccugcacagcagaaucuuccccagcggcaagugcagcggcaugaccgugagcagcaccuacugcagcaccaaccacgaguacaccaucuggaugcccgagaaggugggccugggcaccagcugcgacaucuucaucaccagcaagggcaagagagccagcaagggcggcaagaccugcggcuucguggacgagagaggccuguacaagagccugaagggcgccugcaagcugaagcugugcggcgugagcggccugagacugauggacggcaccuggguggccauccagaccagcgacgagaccaaguggugcagccccgaccagcuggugaaccugcacgaccugcacagcgacgagaucgagcaccuggugguggaggagcuggugagaaagagagaggagugccuggacgcccuggagagcaucaugaccaccaagagcgugagcuucagaagacugagccaccugagaaagcuggugcccggcuucggcaaggccuacaccaucuucaacaagacccugauggaggccgacgcccacuacaagagcgugagaaccuggaacgagaucauccccagcaagggcugccugagagugggcggcaagugccacccccacgugaacggcguguucuucaacggcaucauccugggccccgacggccacgugcugauccccgagaugcagagcagccugcugcagcagcacaucgagcugcuggagagcagcgugaucccccugaugcacccccuggccgaccugagcaccguguucaaggacggcgacgaggccgaggacuucguggaggugcaccugcccgacgugcacaagcagaucagcggcguggaccugggccugcccagcuggggcaaguacgugcugaugagcgccggcgcccuggccacccugauccuggugaccagccugaugaagugcugcagaugggugaacagaaccaagagcauccagcagggccccagagagagcgagagaaaggugagcgugaccccccagagcggcaaggugaucagcagcugggagagcuacaagaucggcggcgagaccggccuguga

SEQ ID NO: 191564 - RNA, 1575 nt, Artificial Sequence
  derived and/or modified CDS sequence (opt4) from glycoprotein__RABV__KF484520.1
auggugcugcaggcccugcuguucgcccccuuccugaucagcagccugugccugggcaaguuccccaucuacaccauccccgacaagcugggccccuggagccccaucgacauccaccaccugagcugccccaacaaccuggugguggaggacgagggcugcaacagccugagcggcaucagcuacauggagcugaaggugggcuacaucagcgccaucaaggugaacggcuucaccugcaccggcguggugaccgaggccgagaccuacaccaacuucgugggcuacgugaccaccaccuucaagagaaagcacuuccaccccaugcccgacgccugcagaagcgccuacaacuggaagcuggccggcgaccccagauacgaggagagccugcacaaccccuaccccgacuaccacuggcugagaaccgugaagaccaccaaggagagccugaucaucaucagccccagcguggccgaccuggaccccuacgacaagagccugcacagcagaaucuuccccagcggcaagugcagcggcaugaccaucagcagcaccuacugcagcaccaaccacgaguacaccaucuggaugcccgagaaggccggccugggcaccagcugcgacaucuucaccaccagcaagggcaagagagccagcaagggcggcaagaccugcggcuucguggacgagagaggccuguacaagagccugaagggcgccugcaagcugaagcugugcggcgugagcggccugagacugauggacggcaccuggguggccauccagaccagcgaggagaccaaguggugcccccccgaccagcuggugaaccugcacgaccugcacagcgacgagaucgagcaccuggugguggaggagcuggugaagaagagagaggagugccuggacgcccuggagagcaucaugaccaccaagagcgugagcuucagaagacugagccaccugagaaagcuggugcccggcuucggcaaggccuacaccaucuucaacaagacccugauggaggccgacgcccacuacaagagcaucagaaccuggaacgagaucauccccagcaagggcugccugagagugggcggcaagugccacccccacgugaacggcguguucuucaacggcaucauccugggccccgacggccacgugcugauccccgagaugcagagcagccugcugcagcagcacauggagcugcuggagagcagcgugaucccccugaugcacccccuggccgaccugagcaccguguucaaggacggcgacgaggccgaggacuucguggaggugcaccugcccgacgugcacaagcagaucagcggcguggaccugggccugcccagcuggggcaaguacgugcugaugagcgccggcgcccuggccauccugaugcuggugaucagccugaugaagugcuucuggggcgugaacagaaccaagcccauccagcagggccccagagagagcgagagaaaggugagcaucgccccccagagcagaaaggugaucagcagcugggagagcuacaagagcggcggcgagaccgagcuguga

SEQ ID NO: 191565 - RNA, 1575 nt, Artificial Sequence
  derived and/or modified CDS sequence (opt4) from glycoprotein__RABV__KF484521.1
auggugcugcaggcccugcuguucgcccccuuccugaucagcagccugugccugggcaaguuccccaucuacaccauccccgacaagcugggccccuggagccccaucgacauccaccaccugagcugccccaacaaccuggugguggaggacgagggcugcaacagccugagcggcuucagcuacauggagcugaaggugggcuacaucagcgccaucaaggugaacggcuucaccugcaccggcguggugaccgaggccgagaccuacaccaacuucgugggcuacgugaccaccaccuucaagagaaagcacuucagacccaugcccgacgccugcagaagcgccuacaacuggaagcuggccggcgaccccagauacgaggagagccugcacaaccccuaccccgacuaccacuggcugagaaccgugaagaccaccaaggagagccugaucgugaucagccccagcguggccgaccuggaccccuacgacaagagccugcacagcagaaucuuccccggcggcaagugcagcggcaugaccgugagcagcaccuacugcagcaccaaccacgaguacaccaucuggaugcccgagaaggccggccugggcaccagcugcgacaucuucaccaccagcaagggcaagagagccaccaagggcggcaagaccugcggcuucguggacgagagaggccuguacaagagccugaagggcgccugcaagcugaagcugugcggcgugagcggccugagacugauggacggcaccuggguggccauccagaccagcgacgagaccaaguggugcagccccgaccagcuggugaaccugcacgaccugcacagcgacgagaucgagcaccuggugguggaggagcuggugagaaagagagaggagugccuggacgcccuggagagcaucaugaccaccaagagcgugagcuucagaagacugagccaccugagaaagcuggugcccggcuucggcaaggccuacaccaucuucaacaagacccugauggaggccgacgcccacuacaagagcgugagaaccuggaacgagaucauccccagcaagggcugccugagagugggcggcaagugccacccccacgugaacggcguguucuucaacggcaucauccugggccccgacggccacgugcugauccccgagaugcagagcagccugcugcagcagcacauggagcugcuggagagcagcgugaucccccugaugcacccccuggccgaccccagcaccguguucaaggacgacgacgaggccgaggacuucguggaggugcaccugcccgacgugcacaagcaggugagcggcguggaccugggccugcccagcuggggcagauacgugcugaugagcgccggcgcccuggccacccugaugcuggugaucagccugaugaagugcugcaagggcgugaacagaaccaagagcaucaagcagggcagcagagagagcgagagaaaggugagcaucaccccccagagcggcaaggugaucagcagcugggagagcuacaagagcggcggcgagaccggccuguga

SEQ ID NO: 191566 - RNA, 1575 nt, Artificial Sequence
  derived and/or modified CDS sequence (opt4) from glycoprotein__RABV__KF484522.1
auggugcugcaggcccugcuguucgcccccuuccugaucagcagccugugccugggcaaguuccccaucuacaccauccccgacaagcugggccccuggagccccaucgacauccaccaccugagcugccccaacaaccuggugaucgaggacgagggcugcaacagccugagcggcuucagcuacauggagcugaaggugggcuacaucagcgccaucaaggugaacggcuucaccugcaccggcguggugaccgaggccgagaccuacaccaacuucgugggcuacgugaccaccaccuucaagagaaagcacuucagacccaugcccgacgccugcagaagcgccuacaacuggaagcuggccggcgaccccagauacgaggagagccugcacaaccccuaccccgaguaccacuggcugagaaccgugaagaccaccaaggagagccugaucgugaucagccccagcguggccgaccuggaccccuacgacaagagccugcacagcagaaucuuccccagcggcaagugcagcggcaugaccgugagcagcaccuacugcagcaccaaccacgaguacaccaucuggaugcccgagaaggugggccugggcaccagcugcgacaucuucaucaccagcaagggcaagagagccagcaagggcggcaagaccugcggcuucguggacgagagaggccuguacaagagccugaagggcgccugcaagcugaagcugugcggcgugagcggccugagacugauggacggcaccuggguggccauccagaccagcgacgagaccaaguggugcagccccgaccagcuggugaaccugcacgaccugcacagcgacgagaucgagcaccuggugguggaggagcuggugagaaagagagaggagugccuggacgcccuggagagcaucaugaccaccaagagcgugagcuucagaagacugagccaccugagaaagcuggugcccggcuucggcaaggccuacaccaucuucaacaagacccugauggaggccgacgcccacuacaagagcgugagaaccuggaacgagaucauccccagcaagggcugccugagagugggcggcaagugccacccccacgugaacggcguguucuucaacggcaucauccugggccccgacggccacgugcugauccccgagaugcagagcagccugcugcagcagcacaucgagcugcuggagagcagcgugaucccccugaugcacccccuggccgaccugagcaccguguucaaggacggcgacgaggccgaggacuucguggaggugcaccugcccgacgugcacaagcagaucagcggcguggaccugggccugcccagcuggggcaaguacgugcugaugagcgccggcgcccuggccacccugauccuggugaucagccugaugaagugcugcagaugggugaacagaaccaagagcauccagcagggccccagagagagcgagagaaaggugagcgugaccccccagagcggcaaggugaucagcagcugggagagcuacaagaucggcggcgagaccggccuguga

SEQ ID NO: 191567 - RNA, 1575 nt, Artificial Sequence
  derived and/or modified CDS sequence (opt4) from glycoprotein__RABV__KF484523.1
augauccugcacgcccugcuguucgcccccuuccugaucagcccccugugccugggcaaguuccccaucuacaccauccccgacaagcugggccccuggagccccaucgacauccaccaccugagcugccccaacaaccuggugguggaggacgagggcugcaacagccugagcggcuucagcuacauggagcugaaggugggcuacaucagcgccaucaaggugaacggcuucaccugcaccggcguggugaccgaggccgagaccuacaccaacuucgugggcuacgugaccaccaccuucaagagaaagcacuucagacccaugcccgacgccugcagaagcgccuacaacuggaagcuggccggcgaccccagauacgaggagagccugcacaaccccuaccccgaguaccacuggcugagaaccgugaagaccaccaaggagagccugaucgugaucagccccagcguggccgaccuggaccccuacgacaagagccugcacagcagaaucuuccccagcggcaagugcagcggcaugaccgugagcagcaccuacugcagcaccaaccacgaguacaccaucuggaugcccgagaaggugggccugggcaccagcugcgacaucuucaccaccagcaagggcaagagagccagcaagggcggcagaaucugcggcuucguggacgagagaggccuguacaagagccugaagggcgccugcaagcugaagcugugcggcgugagcggccugagacugauggacggcaccggcuucgccauccagaccagcgacgagaccaaguggugcagccccgaccagcuggugaaccugcacgaccugcacagcgacgagaucgagcaccuggugguggaggagcuggugagaaagagagaggagugccuggacgcccuggagagcaucaugaccaccaagagcgugagcuucagaagacugagccaccugagaaagcuggugcccggcuucggcaaggccuacaccaucuucaacaagacccugauggaggccgacgcccacuacaagagcgugagaaccuggaacgagaucauccccagcaagggcugccugagagugggcggcaagugccacccccacgugaacggcguguucuucaacggcaucauccugggccccgacggccacgugcugauccccgagaugcagagcagccugcugcagcagcacauggagcugcuggagagcagcgugaucccccugaugcacccccuggccgaccugagcaccguguucaaggacgacggcgaggccgaggacuucguggaggugcaccugcccgacgugcacaagcagaucagcggcguggaccugggccugcccagcuggggcaaguacgcccugaugagcgccggcgcccuggccacccugauccugaugaucuuccugaugaagugcugcagaugggugaacagaaccgagagcauccagcagggccccagagagagcgagagaaaggugagcgugaccccccagaacggcaaggugaucagcagcugggagagcuacaagaucggcggcgagaccggccuguga

SEQ ID NO: 191568 - RNA, 1575 nt, Artificial Sequence
  derived and/or modified CDS sequence (opt4) from glycoprotein__RABV__KF484524.1
auggugcugcaggcccugcuguucgcccccuuccugaucagcagccugugccugggcaaguuccccaucuacaccauccccgacaagcugggccccuggagccccaucgacauccaccaccugagcugccccaacaaccuggugaucgaggacgagggcugcaacagccugagcggcuucagcuacauggagcugaaggugggcuacaucagcgccaucaaggugaacggcuucaccugcaccggcguggugaccgaggccgagaccuacaccaacuucgugggcuacgugaccaccaccuucaagagaaagcacuucagacccaugcccgacgccugcagaagcgccuacaacuggaagcuggccggcgaccccagauacgaggagagccugcacaaccccuaccccgaguaccacuggcugagaaccgugaagaccaccaaggagagccugaucgugaucagccccagcguggccgaccuggaccccuacgacaagagccugcacagcagaaucuuccccagcggcaagugcagcggcaugaccgugagcagcaccuacugcagcaccaaccacgaguacaccaucuggaugcccgagaaggugggccugggcaccagcugcgacaucuucaucaccagcaagggcaagagagccagcaagggcggcaagaccugcggcuucguggacgagagaggccuguacaagagccugaagggcgccugcaagcugaagcugugcggcgugagcggccugagacugauggacggcaccuggguggccauccagaccagcgacgagaccaaguggugcagccccgaccagcuggugaaccugcacgaccugcacagcgacgagaucgagcaccuggugguggaggagcuggugagaaagagagaggagugccuggacgcccuggagagcaucaugaccaccaagagcgugagcuucagaagacugagccaccugagaaagcuggugcccggcuucggcaaggccuacaccaucuucaacaagacccugauggaggccgacgcccacuacaagagcgugagaaccuggaacgagaucauccccagcaagggcugccugagagugggcggcaagugccacccccacgugaacggcguguucuucaacggcaucauccugggccccgacggccacgugcugauccccgagaugcagagcagccugcugcagcagcacauggagcugcuggagagcagcgugaucccccugaugcacccccuggccgaccugagcaccguguucaaggagggcgacgaggccgaggacuucguggaggugcaccugcccgacgugcacaagcagaucagcggcguggaccugggccugcccagcuggggcaaguacgugcugaugagcgccggcgcccuggccacccugauccuggugaucagccugaugaagugcugcagaugggugaacagaaccaagagcauccagcagggccccagagagagcgagagaaaggugagcgugaccccccagagcggcaaggugaucagcagcugggagcccuacaagaucggcggcgagaccggccuguga

SEQ ID NO: 191569 - RNA, 1575 nt, Artificial Sequence
  derived and/or modified CDS sequence (opt4) from glycoprotein__RABV__KF484525.1
auggugcugcaggcccugcuguucgcccccuuccugaucagcagccugugccugggcaaguuccccaucuacaccauccccgacaagcugggccccuggagccccaucgacauccaccaccugagcugccccaacaaccuggugguggaggacgagggcugcaacagccugagcggcaucagcuacauggagcugaaggugggcuacaucagcgccaucaaggugaacggcuucaccugcaccggcguggugaccgaggccgagaccuacaccaacuucgugggcuacgugaccaccaccuucaagagaaagcacuuccaccccaugcccgacgccugcagaagcgccuacaacuggaagcuggccggcgaccccagauacgaggagagccugcacaaccccuaccccgacuaccacuggcugagaaccgugaagaccaccaaggagagccugaucaucaucagccccagcguggccgaccuggaccccuacgacaagagccugcacagcagaaucuuccccagcggcaagugcagcggcaugaccaucagcagcaccuacugcagcaccaaccacgaguacaccaucuggaugcccgagaaggccggccugggcaccagcugcgacaucuucaccaccagcaagggcaagagagccagcaagggcggcaagaccugcggcuucguggacgagagaggccuguacaagagccugaagggcgccugcaagcugaagcugugcggcgugagcggccugagacugauggacggcaccuggguggccauccagaccagcgaggagaccaaguggugcccccccgaccagcuggugaaccugcacgaccugcacagcgacgagaucgagcaccuggugguggaggagcuggugaagaagagagaggagugccuggacgcccuggagagcaucaugaccaccaagagcgugagcuucagaagacugagccaccugagaaagcuggugcccggcuucggcaaggccuacaccaucuucaacaagacccugauggaggccgacgcccacuacaagagcaucagaaccuggaacgagaucauccccagcaagggcugccugagagugggcggcaagugccacccccacguggacggcguguucuucaacggcaucauccugggccccgacggccacgugcugauccccgagaugcagagcagccugcugcagcagcacauggagcugcuggagagcagcgugaucccccugaugcacccccuggccgaccugagcaccguguucaaggacggcgacgaggccgaggacuucguggaggugcaccugcccgacgugcacaagcagaucagcggcguggaccugggccugcccagcuggggcaaguacgugcugaugagcgccggcgcccuggccauccugaugcuggugaucagccugaugaagugcuucuggggcgugaacagaaccaagcccauccagcagggccccagagagagcgagagaaaggugagcaucgccccccagagcagaaaggugaucagcagcugggagagcuacaagaacggcggcgagaccgagcuguga

SEQ ID NO: 191570 - RNA, 1575 nt, Artificial Sequence
  derived and/or modified CDS sequence (opt4) from glycoprotein__RABV__KF484526.1
auggugcugcaggcccugcuguucgcccccuuccugaucagcagccugugccugggcaaguuccccaucuacaccauccccgacaagcugggccccuggagccccaucgacauccaccaccugagcugccccaacaaccuggugguggaggacgagggcugcaacagccugagcggcuucagcuacauggagcugaaggugggcuacaucagcgccaucaaggugaacggcuucaccugcaccggcguggugaccgaggccgagaccuacaccaacuucgugggcuacgugaccaccaccuucaagagaaagcacuucagacccaugcccgacgccugcagaagcgccuacaacuggaagcuggccggcgaccccagauacgaggagagccugcacaaccccuaccccgaguaccacuggcugagaaccgugaagaccaccaaggagagccugaucaucaucagccccagcguggccgaccuggaccccuacgacaagagccugcacagcagaaucuuccccggcggcaagugcagcggcaugaccgugagcagcaccuacugcagcaccaaccacgaguacaccaucuggaugcccgagaaggugggccugggcaccagcugcgacaucuucaccaccagcaagggcaagagagccagcaagggcggcaagaccugcggcuucguggacgagagaggccuguacaagagccugaagggcgccugcaagcugaagcugugcggcgugagcggccugagacugauggacggcaccuggguggccaugcagaccagcgacgagaccaaguggugcagccccgaccagcuggugaaccugcacgaccugcacagcgacgagaucgagcaccuggugguggaggagcuggugagaaagagagaggagugccuggacgcccuggagagcaucaugaccaccaagagcgugagcuucagaagacugagccaccugagaaagcuggugcccggcuucggcaaggccuacaccaucuucaacaagacccugauggaggccgacgcccacuacaagagcgugagaaccuggaacgagaucauccccagcaagggcugccugagagugggcggcaagugccacccccacgugaacggcguguucuucaacggcaucauccugggccccgacggccacgugcugauccccgagaugcagagcagccugcugcagcagcacauggagcugcuggagagcagcgugaucccccugaugcacccccuggccgaccugagcgccguguucaaggagggcgacgaggccgaggacuucguggaggugcaccugcccgacgugcacaagcagaucagcgagguggaccugggccugcccagcuggggcaaguacgugcugaugagcgccggcgcccuggccacccugauccuggugaucagccugaugaagugcugcagaugggugaacagaaccaagagcauccagcagggccccagagagagcgagagaaaggugagcgugaccccccagaacggcaaggugaucagcagcugggagagcuacaagaucagaggcgagaccggccuguga

SEQ ID NO: 191571 - RNA, 1575 nt, Artificial Sequence
  derived and/or modified CDS sequence (opt4) from glycoprotein__RABV__KF484527.1
auggugcugcaggcccugcuguucgcccccuuccugaucagcagccugugccugggcaaguuccccaucuacaccauccccgacaagcugggccccuggagccccaucgacauccaccaccugagcugccccaacaaccuggugguggaggacgagggcugcaacagccugagcggcuucagcuacauggagcugaaggugggcuacaucagcgccaucaaggugaacggcuucaccugcaccggcguggugaccgaggccgagaccuacaccaacuucgugggcuacgugaccaccaccuucaagagaaagcacuucagacccaugcccgacgccugcagaagcgccuacaacuggaagcuggccggcgaccccagauacgaggagagccugcacaaccccuaccccgaguaccacuggcugagaaccgugaagaccaccaaggagagccugaucgugaucagccccagcguggccgaccuggaccccuacgacaagagccugcacagcagaaucuuccccggcggcaagugcagcggcaugaccgugagcagcaccuacugcagcaccaaccacgaguacaccaucuggaugcccgagaaggugggccugggcaccagcugcgacaucuucaccaccagcaagggcaagagagccagcaagggcggcagaaccugcggcuucguggacgagagaggccuguacaagagccugaagggcgccugcaagcugaagcugugcggcgugagcggccugagacugauggacggcaccuggguggccaugcagaccagcgacgagaccaaguggugcagccccgaccagcuggugaaccugcacgaccugcacagcgacgagaucgagcaccuggugguggaggagcuggugagaaagagagaggagugccuggacgcccuggagagcaucaugaccaccaagagcgugagcuucagaagacugagccaccugagaaagcuggugcccggcuucggcaaggccuacaccaucuucaacaagacccugauggaggccgacgcccacuacaagagcgugagaaccuggaacgagaucauccccagcaagggcugccugagagugggcggcaagugccacccccacgugaacggcguguucuucaacggcaucauccugggccccgacggccacgugcugauccccgagaugcagagcagccugcugcagcagcacauggagcugcuggagagcagcgugaucccccugaugcacccccuggccgaccugagcaccguguucaaggagggcgacgaggccgaggacuucguggaggugcaccugcccgacgugcacaagcagaucagcggcguggaccugggccugcccagcuggggcaaguacgugcugaugggcgccggcgcccuggccacccugauccuggugaucagccugaugaagugcugcagaugggugaacagaaccaagagcauccagcagggccccagaggcagcgagagaaaggugagcgugaccccccagaacggcaaggugaucagcagcugggagagcuacaagaucggcggcgagaccggccuguga

SEQ ID NO: 191572 - RNA, 1575 nt, Artificial Sequence
  derived and/or modified CDS sequence (opt4) from glycoprotein__RABV__KF484528.1
auggugcugcaggcccugcuguucgcccccuuccugaucagcagccugugccugggcaaguuccccaucuacaccauccccgacaagcugggccccuggagccccaucgacauccaccaccugagcugccccaacaaccuggugguggaggacgagggcugcaacagccugagcggcuucagcuacauggagcugaaggugggcuacaucagcgccaucaaggugaacggcuucaccugcaccggcguggugaccgaggccgagaccuacaccaacuucgugggcuacgugaccaccaccuucaagagaaagcacuucagacccaugcccgacgccugcagaagcgccuacaacuggaagcuggccggcgaccccagauacgaggagagccugcacaaccccuaccccgaguaccacuggcugagaaccgugaagaccaccaaggagagccugaucaucaucagccccagcguggccgaccuggaccccuacgacaagagccugcacagcagaaucuuccccggcggcaagugcagcggcaugaccgugagcagcaccuacugcagcaccaaccacgaguacaccaucuggaugcccgagaaggugggccugggcaccagcugcgacaucuucaccaccagcaagggcaagagagccagcaagggcggcaagaccugcggcuucguggacgagagaggccuguacaagagccugaagggcgccugcaagcugaagcugugcggcgugagcggccugagacugauggacggcaccuggguggccaugcagaccagcgacgagaccaaguggugcagccccgaccagcuggugaaccugcacgaccugcacagcgacgagaucgagcaccuggugguggaggagcuggugagaaagagagaggagugccuggacgcccuggagagcaucaugaccaccaagagcgugagcuucagaagacugagccaccugagaaagcuggugcccggcuucggcaaggccuacaccaucuucaacaagacccugauggaggccgacgcccacuacaagagcgugagaaccuggaacgagaucauccccagcaagggcugccugagagugggcggcaagugccacccccacgugaacggcguguucuucaacggcaucauccugggccccgacggccacgugcugauccccgagaugcagagcagccugcugcagcagcacauggagcugcuggagagcagcgugaucccccugaugcacccccuggccgaccugagcaccguguucaaggagggcgacgaggccgaggacuucguggaggugcaccugcccgacgugcacaagcagaucagcgagguggaccugggccugcccagcuggggcaaguacgugcugaugagcgccggcgcccuggccacccugauccuggugaucagccugaugaagugcugcagaugggugaacagaaccaagagcauccagcagggccccagagagagcgagagaaaggugagcgugaccccccagaacggcaaggugaucagcagcugggagagcuacaagaucggcggcgagaccggccuguga

SEQ ID NO: 191573 - RNA, 1575 nt, Artificial Sequence
  derived and/or modified CDS sequence (opt4) from glycoprotein__RABV__KF484529.1
auggugcugcaggcccugcuguucgcccccuuccugaucagcagccugugccugggcaaguuccccaucuacaccauccccgacaagcugggccccuggagccccaucgacauccaccaccugagcugccccaacaaccuggugguggaggacgagggcugcaacagccugagcggcuucagcuacauggagcugaaggugggcuacaucagcgccaucaaggugaacggcuucaccugcaccggcguggugaccgaggccgagaccuacaccaacuucgugggcuacgugaccaccaccuucaagagaaagcacuucagacccaugcccgacgccugcagaagcgccuacaacuggaagcuggccggcgaccccagauacgaggagagccugcacaaccccuaccccgaguaccacuggcugagaaccgugaagaccaccaaggagagccugaucgugaucagccccagcguggccgaccuggaccccuacgacaagagccugcacagcagaaucuuccccggcggcaagugcagcggcaugaccgugagcagcaccuacugcagcaccaaccacgaguacaccaucuggaugcccgagaaggugggccugggcaccagcugcgacaucuucaccaccagcaagggcaagagagccagcaagggcggcagaaccugcggcuucguggacgagagaggccuguacaagagccugaagggcgccugcaagcugaagcugugcggcgugagcggccugagacugauggacggcaccuggguggccaugcagaccagcgacgagaccaaguggugcagccccgaccagcuggugaaccugcacgaccugcacagcgacgagaucgagcaccuggugguggaggagcuggugagaaagagagaggagugccuggacgcccuggagagcaucaugaccaccaagagcgugagcuucagaagacugagccaccugagaaagcuggugcccggcuucggcaaggccuacaccaucuucaacaagacccugauggaggccgacgcccacuacaagagcgugagaaccuggaacgagaucauccccagcaagggcugccugagagugggcggcaagugccacccccacgugaacggcguguucuucaacggcaucauccugggccccgacggccacgugcugauccccgagaugcagagcagccugcugcagcagcacauggagcugcuggagagcagcgugaucccccugaugcacccccuggccgaccugagcaccguguucaaggaggacgacgaggccgaggacuucguggaggugcaccugcccgacgugcacaagcagaucagcggcguggaccugggccugcccagcuggggcaaguacgugcugaugggcgccggcgcccuggccacccugacccuggugaucagccugaucaagugcugcagaugggugaacagaaccaagagcauccagcagggccccagagagagcgagagaaaggugagcgugaccccccagaacggcaaggugaucagcagcugggagagcuacaagaucggcggcgagaccggccuguga

SEQ ID NO: 191574 - RNA, 1575 nt, Artificial Sequence
  derived and/or modified CDS sequence (opt4) from glycoprotein__RABV__KF484530.1
auggugcugcaggcccugcuguucgcccccuuccugaucagcagccugugcuucggcaaguuccccaucuacaccauccccgacaagcugggccccuggagccccaucgacgugcaccaccugagcugccccaacaaccuggugaucgaggacgagggcugcaacagccugagcggcuucagcuacauggagcugaaggugggcuacaucagcgccaucaaggugaacggcuucaccugcaccggcguggugaccgaggccgagaccuacaccaacuucgugggcuacgugaccaccaccuucaagagaaagcacuucagacccaugcccgacgccugcagaagcgccuacaacuggaagguggccggcgaccccagauacgaggagagccugcacaaccccuaccccgacuaccacuggcugagaaccgugaagaccaccaaggagagccugaucaucaucagccccagcguggccgaccuggaccccuacgacaagagccugcacagcagaaucuuccccggcggcaagugcagcggcaugaccaucagcagcaccuacugcagcaccaaccacgacuacaccaucuggaugcccgagaagaccggccugggcaccagcugcgacaucuucaccaccagcaagggcaagagagccagcaagggcggcagaaccugcggcuucguggacgagagaggccuguacaagagccugaagggcgccugcaagcugaagcugugcggcgugagcggccugagacugauggacggcaccugggccgccauccagaccagcgacgagaccaaguggugcagccccgaccagcuggugaaccugcacgaccugcacagcgacgagaucgagcaccuggugguggaggagcuggugagaagaagagaggagugccuggacgcccuggagagcaucaugaccaccaagagcgugagcuucagaagacugagccaccugagaaagcuggugcccggcuucggcaaggccuacaccaucuucaacaagacccugauggaggccgacgcccacuacaagagcgugagaaccuggaacgagaucauccccagcaagggcugccugagagugggcggcaagugccacccccacgugaacggcguguucuucaacggcaucauccugggccccgacggccacgugcugauccccgagaugcagagcagccugcugcagcagcacauggagcugcuggagagcagcgugaucccccugaugcacccccuggccgaccugagcaccguguucaaggacggcgacgaggccgaggacuucguggaggugcaccugcccgacgugcacaagcaggugagcggcguggaccugggccugcccagcuggggcaaguacaugcugaugagcgccggcgcccuggccacccugaugcuggugaucccccugaugaagugcugcagaagagugaacagaaccaagagcacccagcagggccccagagagagcgacagaaaggugagcgugaccccccagaacggcaaggugaucagcagcugggagagcuacaagagcggcggcggcaccggccuguga

SEQ ID NO: 191575 - RNA, 1575 nt, Artificial Sequence
  derived and/or modified CDS sequence (opt4) from glycoprotein__RABV__KF484531.1
auggugcugcaggcccugcuguucgcccccuuccugaucagcagccugugccugggcaaguuccccaucuacaccauccccgacaagcugggccccuggagccccaucgacauccaccaccugagcugccccaacaaccuggugguggaggacgagggcugcaacagccugagcggcuucagcuacauggagcugaaggugggcuacaucagcgccaucaaggugaacggcuucaccugcaccggcguggugaccgaggccgagaccuacaccaacuucgugggcuacgugaccaccaccuucaagagaaagcacuucagacccaugcccgacgccugcagaagcgccuacaacuggaagcuggccggcgaccccagauacgaggagagccugcacaaccccuaccccgaguaccacuggcugagaaccgugaagaccaccaaggagagccugaucgugaucagccccagcguggccgaccuggaccccuacgacaagagccugcacagcagaaucuuccccggcggcaagugcagcggcaugaccgugagcagcaccuacugcagcaccaaccacgaguacaccaucuggaugcccgagaaggugggccugggcaccagcugcgacaucuucaccaccagcaagggcaagagagccagcaagggcggcagaaccugcggcuucguggacgagagaggccuguacaagagccugaagggcgccugcaagcugaagcugugcggcgugagcggccugagacugauggacggcaccuggguggccaugcagaccagcgacgagaccaaguggugcagccccgaccagcuggugaaccugcacgaccugcacagcgacgagaucgagcaccuggugguggaggagcuggugagaaagagagaggagugccuggacgcccuggagagcaucaugaccaccaagagcgugagcuucagaagacugagccaccugagaaagcuggugcccggcuucggcaaggccuacaccaucuucaacaagacccugauggaggccgacgcccacuacaagagcgugagaaccuggaacgagaucauccccagcaagggcugccugagagugggcggcaagugccacccccacgugaacggcguguucuucaacggcaucauccugggccccgacggccacgugcugauccccgagaugcagagcagccugcugcagcagcacauggagcugcuggagagcagcgugaucccccugaugcacccccuggccgaccugagcaccguguucaaggaggacgacgaggccgaggacuucguggaggugcaccugcccgacgugcacaagcagaucagcggcguggaccugggccugcccagcuggggcaaguacgugcugaugggcgccggcgcccuggccacccugauccuggugaucagccugaucaagugcugcagaugggugaacagaaccaagagcauccagcagggccccagagagagcgagagaaaggugagcgccaccccccagaacggcaaggugaucagcagcugggagagcuacaagaucggcggcgagaccggccuguga

SEQ ID NO: 191576 - RNA, 1575 nt, Artificial Sequence
  derived and/or modified CDS sequence (opt4) from glycoprotein__RABV__KF484532.1
augauccugcacgcccugcuguucgcccccuuccugaucagcagccugugccugggcaaguuccccaucuacaccauccccgacaagcugggccccuggagccccaucgacauccaccaccugagcugccccaacaaccuggugguggaggacgagggcugcaacagccugagcggcuucagcuacauggagcugaaggugggcuacaucagcgccaucaaggugaacggcuucaccugcaccggcguggugaccgaggccgagaccuacaccaacuucgugggcuacgugaccaccaccuucaagagaaagcacuucagacccaugcccgacgccugcagaagcgccuacaacuggaagcuggccggcgaccccagauacgaggagagccugcacaaccccuaccccgaguaccacuggcugagaaccgugaagaccaccaaggagagccugaucgugaucagccccagcguggccgaccuggaccccuacgacaagagccugcacagcagaaucuuccccagcggcaagugcagcggcaugaccgugagcagcaccuacugcagcaccaaccacgaguacaccaucuggaugcccgagaaggugggccugggcaccagcugcgacaucuucaccaccagcaagggcaagagagccagcaagggcggcagaaucugcggcuucguggacgagagaggccuguacaagagccugaagggcgccugcaagcugaagcugugcggcgugagcggccugagacugauggacggcaccuggguggccauccagaccagcgacgagaccaaguggugcagccccgaccagcuggugaaccugcacgaccugcacagcgacgagaucgagcaccuggugguggaggagcuggugagaaagagagaggagugccuggacgcccuggagagcaucaugaccaccaagagcgugagcuucagaagacugagccaccugagaaagcuggugcccggcuucggcaaggccuacaccaucuucaacaagacccugauggaggccgacgcccacuacaagagcgugagaaccuggaacgagaucauccccagcaagggcugccugagagugggcggcaagugccacccccacgugaacggcguguucugcaacggcaucauccugggccccgacggccacgugcugauccccgagaugcagagcagccugcugcagcagcacauggagcugcuggagagcagcgugaucccccugaugcacccccuggccgaccugagcaccguguucaaggacgacggcgaggccgaggacuucguggaggugcaccugcccgacgugcacaagcagaucagcggcguggaccugggccugcccagcuggggcaaguacgcccugaugagcgccggcgcccuggccacccugauccugaugaucagccugaugaagugcugcagaugggugaacagaaccgagagcaucagacagggccccagagagagcgagagaaaggugagcgugaccccccagaacggcaaggugaucagcagcugggagagcuacaagaucggcggcgagaccggccuguga

SEQ ID NO: 191577 - RNA, 1575 nt, Artificial Sequence
  derived and/or modified CDS sequence (opt4) from glycoprotein__RABV__KF484533.1
auggugcugaaggcccugcuguucgcccccuuccugaucagcagccugugccugggcaaguuccccaucuacaccauccccgacaagcugggccccuggagccccaucgacauccaccaccugagcugccccaacaaccuggugguggaggacgagggcugcaacagccugagcggcuucagcuacauggagcugaaggugggcuacaucagcgccaucaaggugaacggcuucaccugcaccggcguggugaccgaggccgagaccuacaccaacuucgugggcuacgugaccaccaccuucaagagaaagcacuucagacccaugcccgacgccugcagaagcgccuacaacuggaagcuggccggcgaccccagauacgaggagagccugcacaaccccuaccccgacuaccacuggcugagaaccgugagaaccaccaaggagagccugaucgugaucagccccagcguggccgaccuggaccccuacgacaagagccugcacagcagaaucuuccccggcggcaagugcagcggcaugaccgugagcagcaccuacugcagcaccaaccacgaguacaccaucuggaugcccgagaaggccggccugggcaccagcugcgacaucuucaccaccagcaagggcaagagagccagcaagggcggcagaaccugcggcuucguggacgagagaggccuguacaagagccugaagggcgccugcaagcugaagcugugcggcgugagcggccugagacugauggacggcaccuggguggccauccagaccagcgacgagaccaaguggugcagccccgaccagcuggugaaccugcacgaccugcacagcgacgagaucgagcaccuggugguggaggagcuggugagaaagagagaggagugccuggacgcccuggagagcaucaugaccaccaagagcgugagcuucagaagacugagccaccugagaaagcuggugcccggcuucggcaaggccuacaccaucuucaacaagacccugauggaggccgacgcccacuacaagagcgugagaaccuggaacgagaucauccccagcaagggcugccugagagugggcggcaagugccacccccacgugagcggcguguucuucaacggcaucauccugggccccgacggccacgugcugauccccgagaugcagagcagccugcugcagcagcacauggagcugcuggagagcagcgugaucccccugaugcacccccuggccgaccccagcaccguguucaaggacgacgacgaggccgaggacuucguggaggugcaccugcccgacgugcacaagcaggugagcggcguggaccugggccugcccagcuggggcaaguacgugcugaugagcgccggcgcccuggccacccugaugcuggugaucagccugaugaagugcugcagaggcuucaacagaaccaagagcaucagacagggcagcagagagagcgagcagaaggugagcgugaccccccagaacggcaaggugaucagcagcugggagagcuacaagagcggcggcgagaccggccuguga

SEQ ID NO: 191578 - RNA, 1575 nt, Artificial Sequence
  derived and/or modified CDS sequence (opt4) from glycoprotein__RABV__KF484534.1
auggugcugcaggcccugcuguucgcccccuuccugaucagcagccugugccugggcaaguuccccaucuacaccauccccgacaagcugggccccuggagccccaucgacauccaccaccugagcugccccaacaaccuggugguggaggacgagggcugcaacagccugagcggcaucagcuacauggagcugaaggugggcuacaucagcgccaucaaggugaacggcuucaccugcaccggcguggugaccgaggccgagaccuacaccaacuucgugggcuacgugaccaccaccuucaagagaaagcacuucagacccauggccgacgccugcagaagcgccuacaacuggaagcugaccggcgaccccagauacgaggagagccugcacaaccccuaccccgacuaccacuggcugagaaccgugaagaccaccaaggagagccugaucgugaucagccccagcguggccgaccuggaccccuacgacaagagccugcacagcagaaucuuccccagcggcaagugcagcggcaugaccaucagcagcaccuacugcagcaccaaccacgaguacaccaucuggaugcccgagaaggccggccugggcaccagcugcgacaucuucaccaccagcaagggcaagagagccagcaagggcggcaagaccugcggcuucguggacgagagaggccuguacaagagccugaagggcgccugcaagcugaagcugugcggcgugagcggccugagacugauggacggcaccuggguggccauccagaccagcgacgagaccaaguggugcagccccgaccagcuggugaaccugcacgaccugcacagcgacgagaucgagcaccuggugguggaggagcuggugaagaagagagaggagugccuggacgcccuggagagcaucaugaccaccaagagcgugagcuucagaagacugagccaccugagaaagcuggugcccggcuucggcaaggccuacaccaucuucaacaagacccugauggaggccgacgcccacuacaagagcaucagaaccuggaacgagaucauccccagcaagggcugccugagagugggcggcaagugccacccccacgugaacggcguguucuucaacggcaucauccugggccccgacggccacgugcugauccccgagaugcagagcagccugcugcagcagcacauggagcugcuggagagcagcgugaucccccugaugcacccccuggccgaccugagcaccguguucaaggacggcgacgaggccgaggacuucguggaggugcaccugcccgacauccacaagcagaucagcggcguggaccugggccugcccagcuggggcaaguacgugcugaugagcgccggcgcccuggccauccugaugcugguguucagccugaugaagugcuucuggggcgugaacagaaccaagcccauccagagaagccccagagagagcgagagaaaggugagcguggccccccagagcggcaaggugaucagcagcugggagagcuacaagagcggcggcgagaccggccuguga

SEQ ID NO: 191579 - RNA, 1575 nt, Artificial Sequence
  derived and/or modified CDS sequence (opt4) from glycoprotein__RABV__KF484535.1
auggugcugcaggcccugcuguucgcccccuuccugaucagcagccugugccugggcaaguuccccaucuacaccauccccgacaagcugggccccuggagccccaucgacauccaccaccugagcugccccaacaaccuggugguggaggacgagggcugcaacagccugagcggcaucagcuacauggagcugaaggugggcuacaucagcgccaucaaggugaacggcuucaccugcaccggcguggugaccgaggccgagaccuacaccaacuucgugggcuacgugaccaccaccuucaagagaaagcacuuccaccccaugcccgacgccugcagaagcgccuacaacuggaagcuggccggcgaccccagauacgaggagagccugcacaaccccuaccccgacuaccacuggcugagaaccgugaagaccaccaaggagagccugaucaucaucagccccagcguggccgaccuggaccccuacgacaagagccugcacagcagaaucuuccccagcggcaagugcagcggcaugaccaucagcagcaccuacugcagcaccaaccacgaguacaccaucuggaugcccgagaaggccggccugggcaccagcugcgacaucuucaccaccagcaagggcaagagagccagcaagggcggcaagaccugcggcuucguggacgagagaggccuguacaagagccugaagggcgccugcaagcugaagcugugcggcgugagcggccugagacugauggacggcaccuggguggccauccagaccagcgacgagaccaaguggugcccccccgaccagcuggugaaccugcacgaccugcacagcgacgagaucgagcaccuggugguggaggagcuggugaagaagagagaggagugccuggacgcccuggagagcaucaugaccaccaagagcgugagcuucagaagacugagccaccugagaaagcuggugcccggcuucggcaaggccuacaccaucuucaacaagacccugauggaggccgacgcccacuacaagagcaucagaaccuggaacgagaucauccccagcaagggcugccugagagugggcggcaagugccacccccacgugaacggcguguucuucaacggcaucauccugggccccgacggccacgugcugauccccgagaugcagagcagccugcugcagcagcacauggagcugcuggagagcagcgugaucccccugaugcacccccuggccgaccugagcaccguguucaaggacggcgacgaggccgaggacuucguggaggugcaccugcccgacgugcacaagcagaucagcggcguggaccugggccugcccagcuggggcaaguacgugcugaugagcgccggcgcccuggccauccugaugcuggugaucagccugaugaagugcuucuggggcgugaacagaaccaagcccauccagcagggccccagagagagcgagagaaaggugagcaucgccccccagagcagaaaggugaucagcagcugggagagcuacaagagcggcggcgagaccgagcuguga

SEQ ID NO: 191580 - RNA, 1575 nt, Artificial Sequence
  derived and/or modified CDS sequence (opt4) from glycoprotein__RABV__KF484536.1
auggugcugcaggcccugcuguucgcccccuuccugaucagcagccugugccugggcaaguuccccaucuacaccauccccgacaagcugggccccuggagccccaucgacauccaccaccugagcugccccaacaaccuggugguggaggacgagggcugcaacagccugagcggcuucagcuacauggagcugaaggugggcuacaucagcgccaucagagugaacggcuucaccugcaccggcguggugaccgaggccgagaccuacaccaacuucgugggcuacgugaccaccaccuucaagagaaagcacuucagacccaugcccgacgccugcagaagcgccuacaacuggaagcuggccggcgaccccagauacgaggagagccugcacaaccccuaccccgacuaccacuggcugagaaccgugaagaccaccaaggagagccugaucgugaucagccccagcguggccgaccuggaccccuacgacaagagccugcacagcagaaucuuccccggcggcaagugcagcggcaucaccgugagcagcaccuacugcagcaccaaccacgaguacaccaucuggaugcccgagaaggccggccugggcaccagcugcgacaucuucaccaccagcaagggcaagagagccagcaagggcggcagaaccugcggcuucguggacgagagaggccuguacaagagccugaagggcgccugcaagcugaagcugugcggcgugagcggccugagacugauggacggcaccuggguggccauccagacccccgacgagaccaaguggugcagccccgaccagcuggugaaccugcacgaccugcacagcgacgagaucgagcaccugguggccgaggagcuggugagaaagagagaggagugccuggacgcccuggagagcaucaugaccaccaagagcgugagcuucagaagacugagccaccugagaaagcuggugcccggcuucggcaaggccuacaccaucuucaacaagacccugauggaggccgacgcccacuacaagagcgugagaaccuggaacgagaucauccccagcaagggcugccugagagugggcggcaagugccacccccacgugaacggcguguucuucaacggcaucauccugggccccgacggccacgugcugauccccgagaugcagagcagccugcugcagcagcacauggagcugcuggagagcagccugaucccccugaugcacccccuggccgaccugagcaccguguucaaggacggcgacgaggccgaggacuucguggaggugcaccugcccgacgugcacaagcaggugagcggcguggaccugggccugcccagcuggggcaaguacgugcugaugagcgccggcgcccuggccacccugaugcuggugaucagccugaucaagugcugcagaggcgugaacagaaccagaagcauccagagaggccccagagagagcgagagaaaggugagcgugaccccccagaacggcaaggugaucagcagcugggagagcuacaagagcggcggcgagaccagacuguga

SEQ ID NO: 191581 - RNA, 1575 nt, Artificial Sequence
  derived and/or modified CDS sequence (opt4) from glycoprotein__RABV__KF484537.1
auggugcugcaggcccugcuguucgcccccuuccugaucagcagccugugccugggcaaguuccccaucuacaccauccccgacaagcugggccccuggagccccaucgacauccaccaccugagcugccccaacaaccuggugguggaggacgagggcugcaacagccugagcggcuucagcuacauggagcugaaggugggcuacaucagcgccaucagagugaacggcuucaccugcaccggcguggugaccgaggccgagaccuacaccaacuucgugggcuacgugaccaccaccuucaagagaaagcacuucagacccaugcccgacgccugcagaagcgccuacaacuggaagcuggccggcgaccccagauacgaggagagccugcacaaccccuaccccgacuaccacuggcugagaaccgugaagaccaccaaggagagccugaucgugaucagccccagcguggccgaccuggaccccuacgacaagagccugcacagcagaaucuuccccggcggcaagugcagcggcaucaccgugagcagcaccuacugcagcaccaaccacgaguacaccaucuggaugcccgagaaggccggccugggcaccagcugcgacaucuucaccaccagcaagggcaagagagccagcaagggcggcagaaccugcggcuucguggacgagagaggccuguacaagagccugaagggcgccugcaagcugaagcugugcggcgugagcggccugagacugauggacggcaccuggguggccauccagacccccgacgagaccaaguggugcagccccgacagacuggugaaccugcacgaccugcacagcgacgagaucgagcaccugguggccgaggagcuggugagaaagagagaggagugccuggacgcccuggagagcaucaugaccaccaagagcgugagcuucagaagacugagccaccugagaaagcuggugcccggcuucggcaaggccuacaccaucuucaacaagacccugauggaggccgacgcccacuacaagagcgugagaaccuggaacgagaucauccccagcaagggcugccugagagugggcggcaagugccacccccacgugaacggcguguucuucaacggcaucauccugggccccgacggccacgugcugauccccgagaugcagagcagccugcugcagcagcacauggagcugcuggagagcagcgugaucccccugaugcacccccuggccgaccugagcaccguguucaaggacggcgacgaggccgaggacuucguggaggugcaccugcccgacgugcacaagcaggugagcggcguggaccugggccugcccagcuggggcaaguacgugcugaugagcgccggcgcccuggccacccugaugcuggugaucagccugaucaagugcugcagaggcgugaacagaaccagaagcauccagagaggccccagagagagcgagagaaaggugagcgugaccccccagaacggcaaggugaucagcagcugggagagcuacaagagcggcggcgagaccagacuguga

SEQ ID NO: 191582 - RNA, 1575 nt, Artificial Sequence
  derived and/or modified CDS sequence (opt4) from glycoprotein__RABV__KF484538.1
auggugcugcaggcccugcuguucgcccccuuccugaucagcagccugugcuucggcaaguuccccaucuacaccauccccgacaagcugggccccuggagccccaucgacauccaccaccugagcugccccaacaaccuggugguggaggacgagggcugcaacagccugagcggcuucagcuacauggagcugaaggugggcuacaucagcgccaucaaggugaacggcuucaccugcaccggcguggugaccgaggccgagaccuacaccaacuucgugggcuacgugaccaccaccuucaagagaaagcacuucagacccaugcccgacgccugcagaagcgccuacaacuggaagcuggccggcgaccccagauacgaggagagccugcacaaccccuaccccgaguaccacuggcugagaaccgugaagaccaccaaggagagccugaucgugaucagccccagcguggccgaccuggaccccuacgacaagagccugcacagcagaaucuuccccaacggcaagugcagcggcaugaccgugagcagcaccuacugcagcaccaaccacgaguacaccaucuggaugcccgagaaggugggccugggcaccagcugcgacaucuucaccaccagcaagggcaagagagccagcaagggcggcagaaccugcggcuucguggacgagagaggccuguacaagagccugaagggcgccugcaagcugaagcugugcggcgugagcggccugagacugauggacggcaccuggguggccauccagaccagcgacgagaccaaguggugcagccccgaccagcuggugaaccugcacgaccugcacagcgacgagaucgagcaccuggugguggaggagcuggugagaaagagagaggagugccuggacgcccuggagagcaucaugaccaccaagagcgugagcuucagaagacugagccaccugagaaagcuggugcccggcuucggcaaggccuacaccaucuucaacaagacccugauggaggccgacgcccacuacaagagcgugagaaccuggaacgagaucauccccagcaagggcugccugagagugggcggcaagugccacccccacgugaacggcguguucuucaacggcaucauccugggccccgacggccacgugcugauccccgagaugcagagcagccugcugcagcagcacaucgagcugcuggagagcagcgugaucccccugaugcacccccuggccgaccugagcaccguguucaaggacggcgacgaggccgaggacuucguggaggugcaccugcccgacgugcacaagcagaucagcggcguggaccugggccugcccagcuggggcaaguacgugcugaugagcgccggcgcccuggccacccugauccuggugaucagccugaugaagugcugcagaugggugaacagaaccaagagcauccagcagggccccagagagagcgagagaaaggugagcgugaccccccagaacggcagagugaucagcagcugggagagcuacaagaucggcggcgagaccggccuguga

SEQ ID NO: 191583 - RNA, 1575 nt, Artificial Sequence
  derived and/or modified CDS sequence (opt4) from glycoprotein__RABV__KF484539.1
auggugcugcaggcccugcuguucgcccccuuccugaucagcagccugugccugggcaaguuccccaucuacaccauccccgacaagcugggccccuggagccccaucgacauccaccaccugagcugccccaacaaccuggugguggaggacgagggcugcaacagccugagcggcuucagcuacauggagcugaaggugggcuacaucagcgccaucaaggugaacggcuucaccugcaccggcguggugaccgaggccgagaccuacaccaacuucgugggcuacgugaccaccaccuucaagagaaagcacuucagacccaugcccgacgccugcagaagcgccuacaacuggaagcuggccggcgaccccagauacgaggagagccugcacaaccccuaccccgacuaccacuggcugagaaccgugaagaccaccaaggagagccugaucgugaucagccccagcguggccgaccuggaccccuacgacaagagccugcacagcagaaucuuccccggcggcaagugcagcggcaugaccgugagcagcaccuacugcagcaccaaccacgaguacaccaucuggaugcccgagaaggccggccugggcaccagcugcgacaucuucaccaccagcaagggcaagagagccaccaagggcggcaagaccugcggcuucguggacgagagaggccuguacaagagccugaagggcgccugcaagcugaagcugugcggcgugagcggccugagacugauggacggcaccuggguggccauccagaccagcgacgagaccaaguggugcagccccgaccagcuggugaaccugcacgaccugcacagcgacgagaucgagcaccuggugguggaggagcuggugagaaagagagaggagugccuggacgcccuggagagcaucaugaccaccaagagcgugagcuucagaagacugagccaccugagaaagcuggugcccggcuucggcaaggccuacaccaucuucaacaagacccugauggaggccgacgcccacuacaagagcgugagaaccuggaacgagaucauccccagcaagggcugccugagagugggcggcaagugccacccccacgugaacggcguguucuucaacggcaucauccugggccccgacggccacgugcugauccccgagaugcagagcagccugcugcagcagcacauggagcugcuggagagcagcgugaucccccugaugcacccccuggccgaccccagcaccguguucaaggacgacgacgaggccgaggacuucguggaggugcaccugcccgacgugcacaagcaggugagcggcguggaccugggccugcccagcuggggcagauacgugcugaugagcgccggcgcccuggccauccugaugcuggugaucagccugaugaagugcugcaccggcgugaacagaaccaagagcaucaagcagggcagcagagagagcgagagaaaggugagcaucaccccccagaacggcaaggugaucagcagcugggagagcuacaagagcggcggcgagaccggccuguga

SEQ ID NO: 191584 - RNA, 1575 nt, Artificial Sequence
  derived and/or modified CDS sequence (opt4) from glycoprotein__RABV__KF484540.1
auggugcugcaggcccugcuguucgcccccuuccugaucagcagccugugccugggcaaguuccccaucuacaccauccccgacaagcugggccccuggagccccaucgacauccaccaccugagcugccccaacaaccuggugguggaggacgagggcugcaacagccugagcggcuucagcuacauggagcugaaggugggcuacaucagcgccaucagagugaacggcuucaccugcaccggcguggugaccgaggccgagaccuacaccaacuucgugggcuacgugaccaccaccuucaagagaaagcacuucagacccaugcccgacgccugcagaagcgccuacaacuggaagcuggccggcgaccccagauacgaggagagccugcacaaccccuaccccgacuaccacuggcugagaaccgugaagaccaccaaggagagccugaucgugaucagccccagcguggccgaccuggaccccuacgacaagagccugcacagcagaaucuuccccggcggcaagugcagcggcaucaccgugagcagcaccuacugcagcaccaaccacgaguacaccaucuggaugcccgagaaggccggccugggcaccagcugcgacaucuucaccaccagcaagggcaagagagccagcaagggcggcagaaccugcggcuucguggacgagagaggccuguacaagagccugaagggcgccugcaagcugaagcugugcggcgugagcggccugagacugauggacggcaccuggguggccauccagacccccgacgagaucaaguggugcagccccgaccagcuggugaaccugcacgaccugcacagcgacgagaucgagcaccugguggccgaggagcuggugagaaagagagaggagugccuggacgcccuggagagcaucaugaccaccaagagcgugagcuucagaagacugagccaccugagaaagcuggugcccggcuucggcaaggccuacaccaucuucaacaagacccugauggaggccgacgcccacuacaagagcgugagaaccuggaacgagaucauccccagcaagggcugccugagagugggcggcaagugccacccccacgugaacggcguguucuucaacggcaucauccugggccccgacggccacgugcugauccccgagaugcagagcagccugcugcagcagcacauggagcugcuggagagcagcgugaucccccugaugcacccccuggccgaccugagcaccguguucaaggacggcgacgaggccgaggacuucaucgaggugcaccugcccgacgugcacaagcaggugagcggcguggaccugggccugcccagcuggggcaaguacgugcugaugagcgccggcgcccuggccacccugaugcuggugaucagccugaucaagugcugcaagggcgugaacagaaccaagagcauccaguggggccccagagagagcgagagaaaggugagcgugaccccccagaacggcaaggugaucagcagcugggagagcuacaagagcggcggcgagaccagacuguga

SEQ ID NO: 191585 - RNA, 1575 nt, Artificial Sequence
  derived and/or modified CDS sequence (opt4) from glycoprotein__RABV__KF484541.1
augauccugaaggcccugcuguucgcccccuuccugaucagcagccugugccugggcaaguuccccaucuacaccauccccgacaagcugggccccuggagccccaucgacauccaccaccugagcugccccaacaaccuggugguggaggacgagggcugcaacagccugagcggcuucagcuacauggagcugaaggugggcuacaucagcgccaucaaggugaacggcuucaccugcaccggcguggugaccgaggccgagaccuacaccaacuucgugggcuacgugaccaccaccuucaagagaaagcacuucagacccaugcccgacgccugcagaagcgccuacaacuggaagcuggccggcgaccccagauacgaggagagccugcacaaccccuaccccgacuaccacuggcugagaaccgugaagaccaccaaggagagccugaucaucaucagccccagcguggccgaccuggaccccuacgacaagagccugcacagcagaaucuuccccggcggcaagugcagcggcaugaccgugagcagcaccuacugccccaccaaccacgaguacaccaucuggaugcccgagaaggccagccugggcaccagcugcgacaucuucaccaccagcaagggcaagagagccagcagaggcggcagaaccugcggcuucguggacgagagaggccuguacaagagccugaagggcgccugcaagcugaagcugugcggcgugagcggccugagacugauggacggcaccuggguggccauccagaccagcgacgagaccaaguggugcagccccgaccagcuggugaaccugcacgaccugcacagcgacgagaucgagcaccuggugguggaggagcuggugagaaagagagaggagugccuggacgcccuggagagcaucaugaccaccaagagcgugagcuucagaagacugagccaccugagaaagcuggugcccggcuucggcaaggccuacaccaucuucaacaagacccugauggaggccgacgcccacuacaagagcgugagaaccuggaacgagaucauccccagcaagggcugccugagagugggcggcaagugccacccccacgugaacggcguguucuucaacggcaucauccugggccccgacggccacgugcugauccccgagaugcagagcagccugcugcagcagcacauggagcugcuggagagcagcgugaucccccugaugcacccccuggccgaccccagcaccguguucaaggacgacgacgaggccgaggacuucguggaggugcaccugcccgacgugcacaagcaggugagcggcguggaccugggccugcccagcuggggcaaguacgugcugaugagcgccggcacccuggccacccugaugcuggugaucagccugaugaagugcugcagaggcuucaacagaaccaagagcaucagacaggacagcggcgagagcggcagaaaggugagcgugaccccccagaacggcaaggugaucagcagcugggagagcuacaagagcggcggcgagaccggccuguga

SEQ ID NO: 191586 - RNA, 1575 nt, Artificial Sequence
  derived and/or modified CDS sequence (opt4) from glycoprotein__RABV__KF484542.1
auggugcugcaggugcugcuguucgcccuguuccugaucagcagccugugccugggcaaguuccccaucuacaccauccccgacaagcugggccccuggagccccaucgacauccaccaccugagcugccccaacaaccuggugguggaggacgagggcugcaacagccugagcggcuucagcuacauggagcugaaggugggcuacaucagcgccaucaaggugaacggcuucaccugcaccggcguggugaccgaggccgagaccuacaccaacuucgugggcuacgugaccaccaccuucaagagaaagcacuucagacccaugcccgacgccugcagaagcgccuacaacuggaagcuggccggcgaccccagauacgaggagagccugcacaaccccuaccccgaguaccacuggcugagaaccgugaagaccaccaaggagagccugaucgugaucagccccagcguggccgaccuggaccccuacgacaagagccugcacagcagaaucuuccccagcggcaagugcagcggcaugaccgugagcagcaccuacugcagcaccaaccacgaguacaccaucuggaugcccgagaaggugagccugggcaccagcugcgacaucuucaccaccagcaagggcaagagagccagcaagggcggcagaaccugcggcuucguggacgagagaggccuguacaagagccugaagggcgccugcaagcugaagcugugcggcgugagcggccugagacugauggacggcaccuggguggccauccagaccagcgacgaggccaaguggugcagccccgaccagcuggugaaccugcacgaccugcacagcgacgagaucgagcaccuggugguggaggagcuggugagaaagagagaggagugccuggacgcccuggagagcaucaugaccaccaagagcgugagcuucagaagacugagccaccugagaaagcuggugcccggcuucggcaaggccuacaccaucuucaacaagacccugauggaggccgacgcccacuacaagagcgugagaaccuggaacgagaucauccccagcaagggcugccugagagugggcggcaagugccacccccacgugaacggcguguucuucaacggcaucauccugggccccgacggccacgugcugauccccgagaugcagagcagccugcugcagcagcacaucgagcugcuggagagcagcgugaucccccugaugcacccccuggccgaccugagcaccguguucaaggacggcgacgaggccgaggacuucguggaggugcaccugcccgacgugcacaagcagaucagcggcguggaccugggccugcccagcuggggcaaguacgugcugaugagcgccggcgcccuggccacccuggugcuggugaucagccugaugaagugcugcagaugggugaacagaaccaagagcauccagcagggccccagagagagcgagagaagagugagcgugaccccccagaacggcaaggugaucagcagcugggagagcuacaagaucggcggcgagaccggccuguga

SEQ ID NO: 191587 - RNA, 1575 nt, Artificial Sequence
  derived and/or modified CDS sequence (opt4) from glycoprotein__RABV__KF484543.1
auggugcugcaggcccugcuguucgcccccuuccugaucagcagccugugccugggcaaguuccccaucuacaccauccccgacaagcugggccccuggagccccaucgacauccaccaccugagcugccccaacaaccuggugguggaggacgagggcugcaacagccugagcggcuucagcuacauggagcugaaggugggcuacaucagcgccaucaaggugaacggcuucaccugcaccggcguggugaccgaggccgagaccuacaccaacuucgugggcuacgugaccaccaccuucaagagaaagcacuucagacccaugcccgacgccugcagaagcgccuacaacuggaagcuggccggcgaccccagauacgaggagagccugcacaaccccuaccccgaguaccacuggcugagaaccgugaagaccaccaaggagagccugaucgugaucagccccagcguggccgaccuggaccccuacgacaagagccugcacagcagaaucuuccccagcggcaagugcagcggcaugaccgugagcagcaccuacugcagcaccaaccacgaguacaccaucuggaugcccgagaaggugggccugggcaccagcugcgacaucuucaccaccagcaagggcaagagagccagcaagggcggcagaaccugcggcuucguggacgagagaggccuguacaagagccugaagggcgccugcaagcugaagcugugcggcgugagcggccugagacugauggacggcaccuggguggccaugcagaccagcgacgagaccaaguggugcagccccgaccagcuggugaaccugcacgaccugcacagcgacgagaucgagcaccuggugguggaggagcuggugagaaagagagaggagugccuggacgcccuggagagcaucaugaccaccaagagcgugagcuucagaagacugagccaccugagaaagcuggugcccggcuucggcaaggccuacaccaucuucaacaagacccugauggaggccgacgcccacuacaagagcgugagaaccuggagcgagaucauccccagcaagggcugccugagagugggcggcaagugccacccccacgugaacggcguguucuucaacggcaucauccugggccccgacggccacgugcugauccccgagaugcagagcagccugcugcagcagcacauggagcugcuggagagcagcgugaucccccugaugcacccccuggccgaccugagcaccguguucaaggacggcgacgaggccgaggacuucguggaggugcaccugcccgacgugcacaagcagaucagcggcguggaccugggccugcccagcuggggcaaguacgugcugaugagcgccggcgcccuggccacccugauccuggugaucagccugaugaagugcugcagaugggugaacaagaccaagagcauccagcagggccccagagagagcgagagaaaggugagcgugaccccccagaacggcaaggugaucagcagcugggagagcuacaagaucggcggcgagaccggccuguga

SEQ ID NO: 191588 - RNA, 1575 nt, Artificial Sequence
  derived and/or modified CDS sequence (opt4) from glycoprotein__RABV__KF484544.1
auggugcugcaggcccugcuguucgcccccuuccugaucagcagccugugccugggcaaguuccccaucuacaccauccccgacaagcugggccccuggagccccaucgacauccaccaccugagcugccccaacaaccuggugguggaggacgagggcugcaacagccugagcggcuucagcuacauggagcugaaggugggcuacaucagcgccaucaaggugaacggcuucaccugcaccggcguggugaccgaggccgagaccuacaccaacuucgugggcuacgugaccaccaccuucaagagaaagcacuucagacccaugcccgacgccugcagaagcgccuacaacuggaagcuggccggcgaccccagauacgaggagagccugcacaaccccuaccccgaguaccacuggcugagaaccgugaagaccaccaaggagagccugaucgugaucagccccagcguggccgaccuggaccccuacgacaagagccugcacagcagaaucuuccccagcggcaagugcagcggcaugaccgugagcagcaccuacugcagcaccaaccacgaguacaccaucuggaugcccgagaaggugggccugggcaccagcugcgacaucuucaccaccagcaagggcaagaaggccagcaagggcggcagaaccugcggcuucguggacgagagaggccuguacaagagccugaagggcgccugcaagcugaagcugugcggcgugagcggccugagacugauggacggcaccuggguggccaugcagaccagcgacgagaccaaguggugcagccccgaccagcuggugaaccugcacgaccugcacagcgacgagaucgagcaccuggugguggaggagcuggugagaaagagagaggagugccuggacgcccuggagagcaucaugaccaccaagagcgugagcuucagaagacugagccaccugagaaagcuggugcccggcuucggcaaggccuacaccaucuucaacaagacccugauggaggccgacgcccacuacaagagcgugagaaccuggaacgagaucauccccagcaagggcugccugagagugggcggcaagugccacccccacgugaacggcguguucuucaacggcaucauccugggccccgacggccacgugcugauccccgagaugcagagcuuccugcugcagcagcacauggagcugcuggagagcagcgugaucccccugaugcacccccuggccgaccugagcaccguguucaaggacggcgacgaggccgaggacuucguggaggugcaccugcccgacgugcacaagcagaucagcggcguggaccugggccugcccagcuggggcaaguacgugcugaugagcgccggcgcccuggccacccugauccuggugaucagccugaugaagugcugcagaugggugaacagaaccaagagcauccagcagggccccagagagagcgagagaaaggugagcgugaccccccagaacggcaaggugaucagcagcugggagagcuacaagaucggcggcgagaccggccuguga

SEQ ID NO: 191589 - RNA, 1575 nt, Artificial Sequence
  derived and/or modified CDS sequence (opt4) from glycoprotein__RABV__KF484545.1
auggugcugcaggcccugcuguucgcccccuuccugaucagcagccugugccugggcaaguuccccaucuacaccauccccgacaagcugggccccuggagccccaucgacauccaccaccugagcugccccaacaaccuggugguggaggacgagggcugcaacagccugagcggcuucagcuacauggagcugaaggugggcuacaucagcgccaucaaggugaacggcuucaccugcaccggcguggugaccgaggccgagaccuacaccaacuucgugggcuacgugaccaccaccuucaagagaaagcacuucagacccaugcccgacgccugcagaagcgccuacaacuggaagcuggccggcgaccccagauacgaggagagccugcacaaccccuaccccgaguaccacuggcugagaaccgugaagaccaccaaggagagccugaucgugaucagccccagcguggccgaccuggaccccuacgacaagagccugcacagcagaaucuuccccagcggcaagugcagcggcaugaccgugagcagcaccuacugcagcaccaaccacgaguacaccaucuggaugcccgagaaggugggccugggcaccagcugcgacaucuucaccaccagcaagggcaagaaggccagcaagggcggcagaaccugcggcuucguggacgagagaggccuguacaagagccugaagggcgccugcaagcugaagcugugcggcgugagcggccugagacugauggacggcaccuggguggccaugcagaccagcgacgagaccaaguggugcagccccgaccagcuggugaaccugcacgaccugcacagcgacgagaucgagcaccuggugguggaggagcuggugagaaagagagaggagugccuggacgcccuggagagcaucaugaccaccaagagcgugagcuucagaagacugagccaccugagaaagcuggugcccggcuucggcaaggccuacaccaucuucaacaagacccugauggaggccgacgcccacuacaagagcgugagaaccuggaacgagaucauccccagcaagggcugccugagagugggcggcaagugccacccccacgugaacggcguguucuucaacggcaucauccugggccccgacggccacgugcugauccccgagaugcagagcagccugcugcagcagcacauggagcugcuggagagcagcgugaucccccugaugcacccccuggccgaccugagcaccguguucaaggacggcgacgaggccgaggacuucguggaggugcaccugcccgacgugcacaagcagaucagcggcguggaccugggccugcccagcuggggcaaguacgugcugaugagcgccggcgcccuggccacccugauccuggugaucagccugaugaagugcugcagaugggugaacagaaccaagagcauccagcagggccccagagagagcgagagaaaggugagcgugaccccccagaacggcaaggugaucagcagcugggagagcuacaagaucggcggcgagaccggccuguga

SEQ ID NO: 191590 - RNA, 1575 nt, Artificial Sequence
  derived and/or modified CDS sequence (opt4) from glycoprotein__RABV__KF484546.1
auggugcugcaggcccugcuguucgcccccuuccugaucagcagccugugccugggcaaguuccccaucuacaccauccccgacaagcugggccccuggagccccaucgacauccaccaccugagcugccccaacaaccuggugguggaggacgagggcugcaacagccugagcggcuucagcuacauggagcugaaggugggcuacaucagcgccaucaaggugaacggcuucaccugcaccggcguggugaccgaggccgagaccuacaccaacuucgugggcuacgugaccaccaccuucaagagaaagcacuucagacccaugcccgacgccugcagaagcgccuacaacuggaagcuggccggcgaccccagauacgaggagagccugcacaaccccuaccccgaguaccacuggcugagaaccgugaagaccaccaaggagagccugaucgugaucagccccagcguggccgaccuggaccccuacgacaagagccugcacagcagaaucuuccccagcggcaagugcagcggcaugaccgugagcagcaccuacugcagcaccaaccacgaguacaccaucuggaugcccgagaaggugggccugggcaccagcugcgacaucuucaccaccagcaagggcaagagagccagcaagggcggcagaaccugcggcuucguggacgagagaggccuguacaagagccugaagggcgccugcaagcugaagcugugcggcgugagcggccugagacugauggacggcaccuggguggccaugcagaccagcgacgagaccaaguggugcagccccgaccagcuggugaaccugcacgaccugcacagcgacgagaucgagcaccuggugguggaggagcuggugagaaagagagaggagugccuggacgcccuggagagcaucaugaccaccaagagcgugagcuucagaagacugagccaccugagaaagcuggugcccggcuucggcaaggccuacaccaucuucaacaagacccugauggaggccgacgcccacuacaagagcgugagaaccuggaacgagaucauccccagcaagggcugccugagagugggcggcaagugccacccccacgugaacggcguguucuucaacggcaucauccugggccccgacggccacgugcugauccccgagaugcagagcagccugcugcagcagcacauggagcugcuggagagcagcgugaucccccugaugcacccccuggccgaccugagcaccguguucaaggacggcgacgaggccgaggacuucguggaggugcaccugcccgacgugcacaagcagaucagcggcguggaccugggccugcccagcuggggcaaguacgugcugaugagcgccggcgcccuggccacccugauccuggugaucagccugaugaagugcugcagaugggugaacagaaccaagagcauccagcagggccccagagagagcgagagaaaggugagcgugaccccccagaacggcaaggugaucagcagcugggagagcuacaagaucggcggcgagaccggccuguga

SEQ ID NO: 191591 - RNA, 1575 nt, Artificial Sequence
  derived and/or modified CDS sequence (opt4) from glycoprotein__RABV__KF484547.1
auggugcugcaggcccugcuguucgcccccuuccugaucagcagccugugccugggcaaguuccccaucuacaccauccccgacaagcugggccccuggagccccaucgacauccaccaccugagcugccccaacaaccuggugguggaggacgagggcugcaacagccugagcggcuucagcuacauggagcugaaggugggcuacaucagcgccaucaaggugaacggcuucaccugcaccggcguggugaccgaggccgagaccuacaccaacuucgugggcuacgugaccaccaccuucaagagaaagcacuucagacccaugcccgacgccugcagaagcgccuacaacuggaagcuggccggcgaccccagauacgaggagagccugcacaaccccuaccccgacuaccacuggcugagaaccgugaagaccaccaaggagagccugaucgugaucagccccagcguggccgaccuggaccccuacgacaagagccugcacagcagaaucuuccccagcggcaagugcagcggcaugaccgugagcagcaccuacugcagcaccaaccacgaguacaccaucuggaugcccgagaaggccggccugggcaccagcugcgacaucuucaccaccagcaagggcaagagagccagcaagggcggcagaaccugcggcuucguggacgagagaggccuguacaagagccugaagggcgccugcaagcugaagcugugcggcgugagcggccugagacugauggacggcaccuggguggccauccagaccagcgacgagaccaaguggugcagcagcgaccagcuggugaaccugcacgaccugcacagcgacgagaucgagcaccuggugguggaggagcuggugagaaagagagaggagugccuggacgcccuggagagcaucaugaccaccaagagcgugagcuucagaagacugagccaccugagaaagcuggugcccggcuucggcaaggccuacaccaucuucaacaagacccugauggaggccgacgcccacuacaagagcgugagaaccuggaacgaggugauccccagcaagggcugccugagagugggcggcaagugccacccccacgugaacggcguguucuucaacggcaucauccugggccccgacggccacgugcugauccccgagaugcagagcagccugcugcagcagcacauggagcugcuggagagcagcgugaucccccugaugcacccccuggccgacaucagcaccguguucaaggacggcgacgaggccgaggacuucguggaggugcaccugcccgacgugcacaagcagaucagcggcguggaccugggccugcccagcuggggcaaguacgugcugaugagcgccggcgcccuggccauccugaugcugaugaucagccugaugaagugcugcagaggcgugaacagaaccaagagcauccagcagggccccagagagagcgagagaaaggugagcgugaccccccagaacggcaaggugaucagcagcugggagagcuacaagagcggcggcgagaccggccuguga

SEQ ID NO: 191592 - RNA, 1575 nt, Artificial Sequence
  derived and/or modified CDS sequence (opt4) from glycoprotein__RABV__KF484548.1
auggugcugcaggugcugcuguucgcccuguuccugaucagcagccugugccugggcaaguuccccaucuacaccauccccgacaagcugggccccuggagccccaucgacauccaccaccugagcugccccaacaaccuggugguggaggacgagggcugcaacagccugagcggcuucagcuacauggagcugaaggugggcuacaucagcgccaucaaggugaacggcuucaccugcaccggcguggugaccgaggccgagaccuacaccaacuucgugggcuacgugaccaccaccuucaagagaaagcacuucagacccaugcccgacgccugcagaagcgccuacaacuggaagcuggccggcgaccccagauacgaggagagccugcacaaccccuaccccgaguaccacuggcugagaaccgugaagaccaccaaggagagccugaucgugaucagccccagcguggccgaccuggaccccuacgacaagagccugcacagcagaaucuuccccagcggcaagugcagcggcaugaccgugagcagcaccuacugcagcaccaaccacgaguacaccaucuggaugcccgagaaggugagccugggcaccagcugcgacaucuucaccaccagcaagggcaagagagccagcaagggcggcagaaccugcggcuucguggacgagagaggccuguacaagagccugaagggcgccugcaagcugaagcugugcggcgugagcggccugagacugauggacggcaccuggguggccauccagaccagcgacgaggccaaguggugcagccccgaccagcuggugaaccugcacgaccugcacagcgacgagaucgagcaccuggugguggaggagcuggugagaaagagagaggagugccuggacgcccuggagagcaucaugaccaccaagagcaucagcuucagaagacugagccaccugagaaagcuggugcccggcuucggcaaggccuacaccaucuucaacaagacccugauggaggccgacgcccacuacaagagcgugagaaccuggaacgagaucauccccagcaagggcugccugagagugggcggcaagugccacccccacgugaacggcguguucuucaacggcaucauccugggccccgacggccacgugcugauccccgagaugcagagcagccugcugcagcagcacaucgagcugcuggagagcagcgugaucccccugaugcacccccuggccgaccugagcaccguguucaaggacggcgacgaggccgaggacuucguggaggugcaccugcccgacgugcacaagcagaucagcggcguggaccugggccugcccagcuggggcaaguacgugcugaugagcgccggcgcccuggccacccuggugcuggugaucagccugaugaaguggugcagaugggugaacaagaccaagagcauccagcagggccccagagagagcgagagaaaggugagcgugaccccccagaacggcaaggugaucagcagcugggagagcuacaagaucggcggcgagaccggccuguga

SEQ ID NO: 191593 - RNA, 1575 nt, Artificial Sequence
  derived and/or modified CDS sequence (opt4) from glycoprotein__RABV__KF484549.1
auggugcugcaggcccugcuguucgcccccuuccugaucagcagccugugccugggcaaguuccccaucuacaccauccccgacaagcugggccccuggagccccaucgacauccaccaccugagcugccccaacaaccuggugguggaggacgagggcugcaacagccugagcggcuucagcuacauggagcugaaggugggcuacaucagcgccaucaaggugaacggcuucaccugcaccggcguggugaccgaggccgagaccuacaccaacuucgugggcuacgugaccaccaccuucaagagaaagcacuucagacccaugcccgacgccugcagaagcgccuacaacuggaagcuggccggcgaccccagauacgaggagagccugcacaaccccuaccccgacuaccacuggcugagaaccgugaagaccaccaaggagagccugaucgugaucagccccagcguggccgaccuggaccccuacgacaagagccugcacagcagaaucuuccccggcggcaagugcagcggcaugaccgugagcagcaccuacugccccaccaaccacgaguacaccaucuggaugcccgagaaggccggccugggcaccagcugcgacaucuucaccaccagcaagggcaagagagccagcaagggcggcagaaccugcggcuucguggacgagagaggccuguacaagagccugaagggcgccugcaagcugaagcugugcggcgugagcggccugagacugauggacggcaccuggguggccauccagaccagcgacgagaccaaguggugcagccccgaccagcuggugaaccugcacgaccugcacagcgacgagaucgagcaccuggugguggaggagcuggugagaaagagagaggagugccuggacgcccuggagagcaucaugaccaccaagagcgugagcuucagaagacugagccaccugagaaagcuggugcccggcuucggcaaggccuacaccaucuucaacaagacccugauggaggccgacgcccacuacaagagcgugagaaccuggaacgagaucauccccagcaagggcugccugagagugggcggcaagugccacccccacgugaacggcguguucuucaacggcaucauccugggccccgacggccacgugcugauccccgagaugcagagcagccugcugcagcagcacguggagcugcuggagagcagcgugaucccccugaugcacccccuggccgaccccagcaccguguucaaggacgacgacgaggccgaggacuucguggaggugcaccugcccgacgugcacagacaggugagcggcguggaccugggccugcccagcuggggcaaguacgugcugaugagcgccggcgcccuggccacccugaugcuggugaucagccugaugaagugcugcagaggcuucaacagaaccaagagcaccagacagggcagcagagagagcgagagaaaggugagcgugaccccccagaacggcaaggugaucagcagcugggagagcuacaagagcggcggcgagaccggccuguga

SEQ ID NO: 191594 - RNA, 1575 nt, Artificial Sequence
  derived and/or modified CDS sequence (opt4) from glycoprotein__RABV__KF484550.1
auggugcugcaggcccugcuguucgcccccuuccugaucagcagccugugcuucggcaaguuccccaucuacaccauccccgacaagcugggccccuggagccccaucgacauccaccaccugagcugccccaacaaccuggugguggaggacgagggcugcaacagccugagcggcuucagcuacauggagcugaaggugggcuacaucagcgccaucaaggugaacggcuucaccugcaccggcguggugaccgaggccgagaccuacaccaacuucgugggcuacgugaccaccaccuucaagagaaagcacuucagacccaugcccgacgccugcagaagcgccuacaacuggaagguggccggcgaccccagauacgaggagagccugcacaaccccuaccccgacuaccacuggcugagaaccgugaagaccaccaaggagagccugaucaucaucagccccagcguggccgaccuggaccccuacgacaagagccugcacagcagaaucuuccccggcggcaagugcagcggcaugaccaucagcagcaccuacugcagcaccaaccacgacuacaccaucuggaugcccgagaagaccggccugggcaccagcugcgacaucuucaccaccagcaagggcaagagagccagcaagggcggcagaaccugcggcuucguggacgagagaggccuguacaagagccugaagggcgccugcaagcugaagcugugcggcgugagcggccugagacugauggacggcaccugggccgccauccagaccagcgacgagaccaaguggugcagccccgaccagcuggugaaccugcacgaccugcacagcgacgagaucgagcaccuggugguggaggagcuggugagaagaagagaggagugccuggacgcccuggagagcaucaugaccaccaagagcgugagcuucagaagacugagccaccugagaaagcuggugcccggcuucggcaaggccuacaccaucuucaacaagacccugauggaggccgacgcccacuacaagagcgugagaaccuggaacgagaucauccccagcaagggcugccugagagugggcggcaagugccacccccacgugaacggcguguucuucaacggcaucauccugggccccgacggccacgugcugauccccgagaugcagagcagccugcugcagcagcacauggagcugcuggagagcagcgugaucccccugaugcacccccuggccgaccugagcaccguguucaaggacggcgacgaggccgaggacuucguggaggugcaccugcccgacgugcacaagcaggugagcggcguggaccugggccugcccagcuggggcaaguacaugcugaugagcgccggcgcccuggccacccugaugcugguggugccccugaugaagugcugcagaagagugaacagaaccaagagcauccagcagggccccagagagagcgacagaaaggugagcgugaccccccagagcggcaaggugaucagcagcugggagagcuacaagagcggcggcggcaccggccuguga

SEQ ID NO: 191595 - RNA, 1575 nt, Artificial Sequence
  derived and/or modified CDS sequence (opt4) from glycoprotein__RABV__KF484551.1
auggugcugcaggcccugcuguucgcccccuuccugaucagcagccugugccugggcaaguuccccaucuacaccauccccgacaagcugggccccuggagccccaucgacauccaccaccugagcugccccaacaaccuggugguggaggacgagggcugcaacagccugagcggcuucagcuacauggagcugaaggugggcuacaucagcgccaucaaggugaacggcuucaccugcaccggcguggugaccgaggccgagaccuacaccaacuucgugggcuacgugaccaccaccuucaagagaaagcacuucagacccaugcccgacgccugcagaagcgccuacaacuggaagcuggccggcgaccccagauacgaggagagccugcacaaccccuaccccgaguaccacuggcugagaaccgugaagaccaccaaggagagccugaucgugaucagccccagcguggccgaccuggaccccuacgacaagagccugcacagcagaaucuuccccagcggcaagugcagcggcaugaccgugagcagcaccuacugcagcaccaaccacgaguacaccaucuggaugcccgagaaggugggccugggcaccagcugcgacaucuucaccaccagcaagggcaagagagccagcaagggcggcagaaccugcggcuucguggacgagagaggccuguacaagagccugaagggcgccugcaagcugaagcugugcggcgugagcggccugagacugauggacggcaccuggguggccaugcagaccagcgacgagaccaaguggugcagccccgaccagcuggugaaccugcacgaccugcacagcgacgagaucgagcaccuggugguggaggagcuggugagaaagagagaggagugccuggacgcccuggagagcaucaugaccaccaagagcgugagcuucagaagacugagccaccugagaaagcuggugcccggcuucggcaaggccuacaccaucuucaacaagacccugauggaggccgacgcccacuacaagagcgugagaaccuggaacgagaucauccccagcaagggcugccugagagugggcggcagaugccacccccacgugaacggcguguucuucaacggcaucauccugggccccgacggccacgugcugauccccgagaugcagagcagccugcugcagcagcacauggagcugcuggagagcagcgugaucccccugaugcacccccuggccgaccugagcaccguguucaaggacggcgacgaggccgaggacuucguggaggugcaccugcccgacgugcacaagcagaucagcggcguggaccugggccugcccagcuggggcaaguacgugcugaugagcgccggcgcccuggccacccugauccuggugaucagccugaugaagugcugcagaugggugaacagaaccaagagcauccagcagggccccagagagagcgagagaaaggugagcgugaccccccagaacggcaaggugaucagcagcugggagagcuacaagaucggcggcgagaccggccuguga

SEQ ID NO: 191596 - RNA, 1575 nt, Artificial Sequence
  derived and/or modified CDS sequence (opt4) from glycoprotein__RABV__KF484552.1
auggugcugcaggcccugcuguucgcccccuuccugaucagcagccugugccugggcaaguuccccaucuacaccauccccgacaagcugggccccuggagccccaucgacauccaccaccugagcugccccaacaaccuggugguggaggacgagggcugcaacaaccugagcggcuucagcuacauggagcugaaggugggcuacaucagcgccaucaaggugaacggcuucaccugcaccggcguggugaccgaggccgagaccuacaccaacuucgugggcuacgugaccaccaccuucaagagaaagcacuucagacccaugcccgacgccugcagaagcgccuacaacuggaagcuggccggcgaccccagauacgaggagagccugcacaaccccuaccccgaguaccacuggcugagaaccgugaagaccaccaaggagagccugaucgugaucagccccagcguggccgaccuggaccccuacgacaagagccugcacagcagaaucuuccccagcggcaagugcagcggcaugaccgugagcagcaccuacugcagcaccaaccacgaguacaccaucuggaugcccgagaaggccggccugggcaccagcugcgacaucuucaccaccagcaagggcaagagagccagcaagggcggcagaaccugcggcuucguggacgagagaggccuguacaagagccugaagggcgccugcaagcugaagcugugcggcgugagcggccugagacugauggacggcaccuggguggccauccagaccagcgacgagaccaaguggugcagccccgaccagcuggugaaccugcacgaccugcacagcgacgagaucgagcaccuggugguggaggagcuggugagaaagagagaggagugccuggacgcccuggagagcaucaugaccaccaagagcgugagcuucagaagacugagccaccugagaaagcuggugcccggcuucggcaaggccuacaccaucuucaacaagacccugauggaggccgacgcccacuacaagagcgugagaaccuggaacgagaucauccccagcaagggcugccugagagugggcggcaagugccacccccacgugaacggcguguucuucaacggcaucauccugggccccgacggccacgugcugauccccgagaugcagagcagccugcugcagcagcacauggagcugcuggagagcagcgugaucccccugaugcacccccuggccgaccugagcaccguguucaaggacggcgacgaggccgaggacuucguggaggugcaccugcccgacgugcacaagcagaucagcggcguggaccugggccugcccagcuggggcaaguacgugaugaugagcgccggcgccuucgccacccugauccuggugaucagccugaugaagugcugcagaugggugaacagaaccaagagcauccagcagggccccagagagagcgagagaaaggugagcgugaccccccagaacggcaaggugaucagcagcugggagagcuacaagaucggcggcgagaccggccuguga

SEQ ID NO: 191597 - RNA, 1575 nt, Artificial Sequence
  derived and/or modified CDS sequence (opt4) from glycoprotein__RABV__KF484553.1
auggugcugcaggcccugcuguucgcccccuuccugaucagcagccugugccugggcaaguuccccaucuacaccauccccgacaagcugggccccuggagccccaucgacauccaccaccugagcugccccaacaaccuggugguggaggacgagggcugcaacagccugagcggcuucagcuacauggagcugaaggugggcuacaucagcgccaucaaggugaacggcuucaccugcaccggcguggugaccgaggccgagaccuacaccaacuucgugggcuacgugaccaccaccuucaagagaaagcacuucagacccaugcccgacgccugcagaagcgccuacaacuggaagcuggccggcgaccccagauacgaggagagccugcacaaccccuaccccgaguaccacuggcugagaaccgugaagaccaccaaggagagccugaucgugaucagccccagcguggccgaccuggaccccuacgacaagagccugcacagcagaaucuuccccagcggcaagugcagcggcaugaccgugagcagcaccuacugcagcaccaaccacgaguacaccaucuggaugcccgagaaggugagccugggcaccagcugcgacaucuucaccaccagcaagggcaagagagccagcaagggcggcagaaccugcggcuucguggacgagagaggccuguacaagagccugaagggcgccugcaagcugaagcugugcggcgugagcggccugagacugauggacggcaccuggguggccauccagaccagcgacgagaccaaguggugcagccccgaccagcuggugaaccugcacgaccugcacagcgacgagaucgagcaccuggugguggaggagcuggugagaaagagagaggagugccuggacgcccuggagagcaucaugaccaccaagagcgugagcuucagaagacugagccaccugagaaagcuggugcccggcuucggcaaggccuacaccaucuucaacaagacccugauggaggccgacgcccacuacaagagcgugagaaccuggaacgagaucauccccagcaagggcugccugagagugggcggcaagugccacccccacgugaacggcguguucuucaacggcaucauccugggccccgacggccacgugcugauccccgagaugcagagcagccugcugcagcagcacaucgagcugcuggagagcagcgugaucccccugaugcacccccuggccgaccugagcaccguguucaaggacggcgacgaggccgaggacuucguggaggugcaccugcccgacgugcacaagcagaucagcggcguggaccugggccugcccagcuggggcaaguacgugcugaugagcgccggcgcccuggccacccuggugcuggugaucagccugaugaagugcugcagaugggugaacagaaccaagagcauccagcagggccccagagagagcgagagaaaggugagcgugaccccccagaacggcaaggugaucagcagcugggagagcuacaagaucggcggcgagaccggccuguga

SEQ ID NO: 191598 - RNA, 1575 nt, Artificial Sequence
  derived and/or modified CDS sequence (opt4) from glycoprotein__RABV__KF484554.1
auggugcugcaggcccugcuguucgcccccuuccugaucagcagccugugccugggcaaguuccccaucuacaccauccccgacaagcugggccccuggagccccaucgacauccaccaccugagcugccccaacaaccuggugguggaggacgagggcugcaacaaccugagcggcuucagcuacauggagcugaaggugggcuacaucagcgccaucaaggugaacggcuucaccugcaccggcguggugaccgaggccgagaccuacaccaacuucgugggcuacgugaccaccaccuucaagagaaagcacuucagacccaugcccgacgccugcagaagcgccuacaacuggaagcuggccggcgaccccagauacgaggagagccugcacaaccccuaccccgaguaccacuggcugagaaccgugaagaccaccaaggagagccugaucgugaucagccccagcguggccgaccuggaccccuacgacaagagccugcacagcagaaucuuccccagcggcaagugcagcggcaugaccgugagcagcaccuacugcagcaccaaccacgaguacaccaucuggaugcccgagaaggccggccugggcaccagcugcgacaucuucaccaccagcaagggcaagagagccagcaagggcggcagaaccugcggcuucguggacgagagaggccuguacaagagccugaagggcgccugcaagcugaagcugugcggcgugagcggccugagacugauggacggcaccuggguggccauccagaccagcgacgagaccaaguggugcagccccgaccagcuggugaaccugcacgaccugcacagcgacgagaucgagcaccuggugguggaggagcuggugagaaagagagaggagugccuggacgcccuggagagcaucaugaccaccaagagcgugagcuucagaagacugagcuaccugagaaagcuggugcccggcuucggcaaggccuacaccaucuucaacaagacccugauggaggccgacgcccacuacaagagcgugagaaccuggaacgagaucauccccagcaagggcugccugagagugggcggcaagugccacccccacgugaacggcguguucuucaacggcaucauccugggccccgacggccacgugcugauccccgagaugcagagcagccugcugcagcagcacauggagcugcuggagagcagcgugaucccccugaugcacccccuggccgaccugagcaccguguucaaggacggcgacgaggccgaggacuucguggaggugcaccugcccgacgugcacaagcagaucagcggcguggaccugggccugcccagcuggggcaaguacgugaugaugagcgccggcgcccuggccacccugauccuggugaucagccugaugaagugcugcagaugggugaacagaaccaagagcauccagcagggccccagagagagcgagagaaaggugagcgugaccccccagaacggcaaggugaucagcagcugggagagcuacaagaucggcggcgagaccggccuguga

SEQ ID NO: 191599 - RNA, 1575 nt, Artificial Sequence
  derived and/or modified CDS sequence (opt4) from glycoprotein__RABV__KF484555.1
auggugcugcaggcccugcuguucgccccccugcugaucagcagccugugccugggcaaguuccccaucuacaccauccccgagaagcugggccccuggagccccaucgacauccaccaccugagcugccccaacaaccuggugguggaggacgagggcugcaacagccugagcggcuucagcuacauggagcugaaggugggcuacaucagcgccaucaaggugaacggcuucaccugcaccggcguggugaccgaggccgagaccuacaccaacuucgugggcuacgugaccaccaccuucaagagaaagcacuucagccccaugcccgacgccugcagaagcgccuacaacuggaagcuggccggcgaccccagauacgaggagagccugcacaaccccuaccccgacuaccacuggcugagaaccgugaagaccaccaaggagagccugaucgugaucagccccagcguggccgaccuggaccccuacgacaagagccugcacagcagaaucuuccccggcggcaagugcagcggcaugaccgugagcagcaccuacugcagcaccaaccacgaguacaccaucuggaugcccgagaagcccggccugggcaccagcugcgacaucuucaccaccagcaagggcaagagagccagcaaggagggcagaaccugcggcuucguggacgagagaggccuguacaagagccugaagggcgccugcaagcugaagcugugcggcgugagcggccugagacugauggacggcaccuggguggccauccagaccagcgacgagaucaaguggugcagccccgaccagcuggugaaccugcacgaccugcacagcgacgagaucgagcaccuggugguggaggagcuggugagaaagagagaggagugccuggacgcccuggagagcaucaugaccaccaagagcgugagcuucagaagacugagccaccugagaaagcuggugcccggcuucggcaaggccuacaccaucuucaacaagacccugauggaggccgacgcccacuacaagagcgugagaaccuggaacgagaucauccccagcaagggcugccugagagugggcggcaagugccacccccacgugaacggcguguucuucaacggcaucauccugggccccgacggccacgugcugauccccgagaugcagagcagccugcugcagcagcacguggagcugcuggagagcagcgugaucccccugaugcacccccuggccgaccccagcaccguguucaaggacgacgacgaggccgaggacuucguggaggugcaccugcccgacgugcagaagcaggugagcggcguggaccugggccugcccagcuggggcaaguacgugcugaugagcgccggcgcccuggccacccuggugcuggugaucagccugaugaagugcugcagaggcaucaacagaaccaagcugaucaagcagggcagcagagagagcgagagaaaggugagcgugaccccccagaacggcaaggugaucagcagcugggagagcuacaagagcggcggcgagaccggccuguga

SEQ ID NO: 191600 - RNA, 1575 nt, Artificial Sequence
  derived and/or modified CDS sequence (opt4) from glycoprotein__RABV__KF484556.1
auggugcugcaggcccugcuguucgcccccuuccugaucagcagccugugccugggcaaguuccccaucuacaccauccccgacaagcugggccccuggagccccaucgacauccaccaccugagcugccccaacaaccuggugguggaggacgagggcugcaacaaccugagcggcuucagcuacauggagcugaaggugggcuacaucagcgccaucaaggugaacggcuucaccugcaccggcguggugaccgaggccgagaccuacaccaacuucgugggcuacgugaccaccaccuucagaagaaagcacuucagacccaugcccgacgccugcagaagcgccuacaacuggaagcuggccggcgaccccagauacgaggagagccugcacaaccccuaccccgaguaccacuggcugagaaccgugaagaccaccaaggagagccugaucgugaucagccccagcguggccgaccuggaccccuacgacaagagccugcacagcagaaucuuccccagcggcaagugcagcggcaugaccgugagcagcaccuacugcagcaccaaccacgaguacaccaucuggaugcccgagaaggccggccugggcaccagcugcgacaucuucaccaccagcaagggcaagagagccagcaagggcggcagaaccugcggcuucguggacgagagaggccuguacaagagccugaagggcgccugcaagcugaagcugugcggcgugagcggccugagacugauggacggcaccuggguggccauccagaccagcgacgagaccaaguggugcagccccgaccagcuggugaaccugcacgaccugcacagcgacgagaucgagcaccuggugguggaggagcuggugagaaagagagaggagugccuggacgcccuggagagcaucaugaccaccaagagcgugagcuucagaagacugagccaccugagaaagcuggugcccggcuucggcaaggccuacaccaucuucaacaagacccugauggaggccgacgcccacuacaagagcgugagaaccuggaacgagaucauccccagcaagggcugccugagagugggcggcaagugccacccccacgugaacggcguguucuucaacggcaucauccugggccccgacggccacgugcugauccccgagaugcagagcagccugcugcagcagcacauggagcugcuggagagcagcgugaucccccugaugcacccccuggccgaccugagcaccguguucaaggacggcgacgaggccgaggacuucguggaggugcaccugcccgacgugcacaagcagaucagcggcguggaccugggccugcccagcuggggcaaguacgugaugaugagcgccggcgcccuggccacccugauccuggugaucagccugaugaagugcugcagaugggugaacagaaccaagagcauccagcagggccccagagagagcgagagaaaggugagcgugaccccccagaacggcaaggugaucagcagcugggagagcuacaagaucggcggcgagaccggccuguga

SEQ ID NO: 191601 - RNA, 1575 nt, Artificial Sequence
  derived and/or modified CDS sequence (opt4) from glycoprotein__RABV__KF484557.1
auggugcugcaggcccugcuguucgcccccuuccugaucagcagccugugcuucggcaaguuccccaucuacaccauccccgacaagcugggccccuggagccccaucgacauccaccaccugagcugccccaacaaccuggugguggaggacgagggcugcaacagccugagcggcuucagcuacauggagcugaaggugggcuacaucagcgccaucaaggugaacggcuucaccugcaccggcguggugaccgaggccgagaccuacaccaacuucgugggcuacgugaccaccaccuucaagagaaagcacuucagacccaugcccgacgccugcagaagcgccuacaacuggaagguggccggcgaccccagauacgaggagagccugcacaaccccuaccccgacuaccacuggcugagaaccgugaagaccaccaaggagagccugaucaucaucagccccagcguggccgaccuggaccccuacgacaagagccugcacagcagaaucuuccccggcggcaagugcagcggcaugaccaucagcagcaccuacugcagcaccaaccacgacuacaccaucuggaugcccgagaaggccggccugggcaccagcugcgacaucuucaccaccagcaagggcaagagagccagcaagggcggcagaaccugcggcuucguggacgagagaggccuguacaagagccugaagggcgccugcaagcugaagcugugcggcgugagcggccugagacugauggacggcaccugggccgccauccagaccagcgacgagaccaaguggugcagccccgaccagcuggugaaccugcacgaccugcacagcgacgagaucgagcaccuggugguggaggagcuggugagaagaagagaggagugccuggacgcccuggagagcaucaugaccaccaagagcgugagcuucagaagacugagccaccugagaaagcuggugcccggcuucggcaaggccuacaccaucuucaacaagacccugauggaggccgacgcccacuacaagagcgugagaaccuggaacgagaucauccccagcaagggcugccugagagugggcggcaagugccacccccacgugaacggcguguucuucaacggcaucauccugggccccgacggccacgugcugauccccgagaugcagagcagccugcugcagcagcacauggagcugcuggagagcagcgugaucccccugaugcacccccuggccgaccugagcaccguguucaaggacggcgacgaggccgaggacuucguggaggugcaccugcccgacgugcacaagcaggugagcggcguggaccugggccugcccagcuggggcaaguacaugcugaugagcgccggcgcccuggccacccugaugcuggugaucccccugaugagaugcugcagaagagugaacagaaccaagagcauccagcagggccccagagagagcgacagaaaggugagcgugaccccccagaacggcaaggugaucagcagcugggagagcuacaagagcggcggcgagaccggccuguga

SEQ ID NO: 191602 - RNA, 1575 nt, Artificial Sequence
  derived and/or modified CDS sequence (opt4) from glycoprotein__RABV__KF484558.1
augauccugcacgcccugcuguucgcccccuuccugaucagcagccugugccugggcaaguuccccaucuacaccauccccgacaagcugggccccuggagccccaucgacauccaccaccugagcugccccaacaaccuggugaucgaggacgagggcugcaacagccugagcggcuucagcuacauggagcugaaggugggcuacaucagcgccaucaaggugaacggcuucaccugcaccggcguggugaccgaggccgagaccuacaccaacuucgugggcuacgugaccaccaccuucaagagaaagcacuucagacccaugcccgacgccugcagaagcgccuacaacuggaagcuggccggcgaccccagauacgaggagagccugcacaaccccuaccccgaguaccacuggcugagaaccgugaagaccaccaaggagagccugguggugaucagccccagcguggccgaccuggaccccuacgacaagagccugcacagcagaaucuuccccagcggcaagugcagcggcaugaccgugagcagcaccuacugcagcaccaaccacgaguacaccaucuggaugcccgagaaggugggccugggcaccagcugcgacaucuucaccaccagcaagggcaagagagccagcaagggcggcagaaccugcggcuucguggacgagagaggccuguacaagagccugaagggcgccugcaagcugaagcugugcggcgugagcggccugagacugauggacggcaccuggguggccauccagaccagcgacgagaccaaguggugcagccccgaccagcuggugaaccugcacgaccugcacagcgacgagaucgagcaccuggugguggaggagcuggugagaaagagagaggagugccuggacgcccuggagagcaucaugaccaccaagagcgugagcuucagaagacugagccaccugagaaagcuggugcccggcuucggcaaggccuacaccaucuucaacaagacccugauggaggccgacgcccacuacaagagcgugagaaccuggaacgagaucauccccagcaagggcugccugagagugggcggcaagugccacccccacgugaacggcguguucuucaacggcaucauccugggccccgacggccacgugcugauccccgagaugcagagcagccugcugcagcagcacauggagcugcuggagagcagcgugaucccccugaugcacccccuggccgaccugagcaccguguucaaggacggcgacgaggccgaggacuucguggaggugcaccugcccgacgugcacaagcagaucagcggcguggaccugggccugcccagcuggggcaaguacgugcugaugagcgccggcgcccuggccacccugauccuggugaucagccugaugaagugcugcagaugggugaacagaaccgagagcauccagcagggccccagagagagcgagagaaaggugagcgugaccccccagaacggcaaggugaucagcagcugggagagcuacaagaucggcggcgagaccggccuguga

SEQ ID NO: 191603 - RNA, 1575 nt, Artificial Sequence
  derived and/or modified CDS sequence (opt4) from glycoprotein__RABV__KF484559.1
auggugcugcaggcccugcuguucgcccccuuccugaucagcagccugugcuucggcaaguuccccaucuacaccauccccgacaagcugggccccuggagccccaucgacauccaccaccugagcugccccaacaaccuggugguggaggacgagggcugcaacagccugagcggcuucagcuacauggagcugaaggugggcuacaucagcgccaucaaggugaacggcuucaccugcaccggcguggugaccgaggccgagaccuacaccaacuucgugggcuacgugaccaccaccuucaagagaaagcacuucagacccaugcccgacgccugcagaagcgccuacaacuggaagguggccggcgaccccagauacgaggagagccugcacaaccccuaccccgacuaccacuggcugagaaccgugaagaccaccaaggagagccugaucaucaucagccccagcguggccgaccuggaccccuacgacaagagccugcacagcagaaucuuccccggcggcaagugcagcggcaugaccaucagcagcaccuacugcagcaccaaccacgacuacaccaucuggaugcccgagaaggccggccugggcaccagcugcgacaucuucaccaccagcaagggcaagagagccagcaagggcggcagaaccugcggcuucguggacgagagaggccuguacaagagccugaagggcgccugcaagcugaagcugugcggcgugagcggccugagacugauggacggcaccugggccgccauccagaccagcgacgagaccaaguggugcagccccgaccagcuggugaaccugcacgaccugcacagcgacgagaucgagcaccuggugguggaggagcuggugagaagaagagaggagugccuggacgcccuggagagcaucaugaccaccaagagcgugagcuucagaagacugagccaccugagaaagcuggugcccggcuucggcaaggccuacaccaucuucaacaagacccugauggaggccgacgcccacuacaagagcgugagaaccuggaacgagaucauccccagcaagggcugccugagagugggcggcaagugccacccccacgugaacggcguguucuucaacggcaucauccugggccccgacggccacgugcugauccccgagaugcagagcagccugcugcagcagcacauggagcugcuggagagcagcgugaucccccugaugcacccccuggccgaccugagcaccguguucaaggacggcgacgaggccgaggacuucguggaggugcaccugcccgacgugcacaagcaggugagcggcguggaccugggccugcccagcuggggcaaguacaugcugaugagcgccggcgcccuggccacccugaugcuggugaucccccugaugaagugcugcagaagagugaacagaaccaagagcauccagcagggccccagagagagcgacagaaaggugagcgugaccccccagaacggcaaggugaucagcagcugggagagcuacaagagcggcggcgagaccggccuguga

SEQ ID NO: 191604 - RNA, 1575 nt, Artificial Sequence
  derived and/or modified CDS sequence (opt4) from glycoprotein__RABV__KF620487.1
augaucccccaggcccugcuguucgugcccuuccugggcuucccccugugccugggcaaguuccccaucuacaccauccccgacaagcugggccccuggagccccaucgacauccaccaccugagcugccccaacaacauggugguggaggacgagggcugcaccaaccugagcggcuucagcuacauggagcugaaggugggcuacaucagcgccaucaaggugaacggcuucaccugcaccggcguggugaccgaggccgagaccuacaccaacuucgugggcuacgugaccaccaccuucaagagaaagcacuucagacccgugcccgacgccugcagagacgcccacaacuggaagauggccggcgaccccagauacgaggagagccugcacaaccccuaccccgacuaccacuggcugagaaccgugaagaccaccaaggagagccuggugaucaucagccccagcguggccgaccuggaccccuacgacaagagccugcacagcagcguguuccccggcggcaagugcagcggcaucaccgugagcagcaccuacugcagcaccaaccacgacuacaccaucuggaugcccgagaaccccagacugggcaccagcugcgacaucuucaccuacagcaagggcaagagagccagcaaggagagcaagaccugcggcuucguggacgagagaggccuguacaagagccugaagggcgccugcaagcugaagcugugcggcgugcccggccugagacugauggacggcaccuggguggccauccagaccagcgacgaggugaaguggugcccccccgaccagcuggugaaccugcacgaccugcacagcgacgagcuggagcaccuggugguggaggagcuggugaagaagagagaggagugccuggacgcccuggagagcaucaugaccaccaagagcgugagcuucagaagacugagccaccugagaaagcuggugcccggcuucggcaaggccuacaccaucuucaacaagacccugauggaggccgacgcccacuacaagagcgugagaaccuggaacgagaucauccccagcaagggcugccugagagugggcggcagaugccacccccacgugaacggcguguucuucaacggcaucauccugggccccgacggccacgugcugauccccgagaugcagagcagccugcugcagcagcacauggagcugcuggagagcagcgugaucccccugaugcacccccuggccgaccccagcgccguguucaagaccggcgacgaggccgaggacuucguggaggugcaccugcccgacgugcacaagcaggugagcggcguggaccugggccugcccagcuggggcaaguacgugcugaugagcgccggcgugcugaucgugcuggugcugaugaucuuccugaugaccugcugcaagagacccaacagagccgagcugauccaccacagccccagagagaccgagagaaaggugagcgugaccagccagggcggcagagugaucagcagcugggagagcuacaagaacggcggcgagaccaagcuguga

SEQ ID NO: 191605 - RNA, 1575 nt, Artificial Sequence
  derived and/or modified CDS sequence (opt4) from glycoprotein__RABV__KF620488.1
augaucccccaggcccugcuguucgugcccuuccugggcuucccccugugccugggcaaguuccccaucuacaccauccccgacaagcugggccccuggagccccaucgacauccaccaccugagcugccccaacaacauggugguggaggacgagggcugcaccaaccugagcggcuucagcuacauggagcugaaggugggcuacaucagcgccaucaaggugaacggcuucaccugcaccggcguggugaccgaggccgagaccuacaccaacuucgugggcuacgugaccaccaccuucaagagaaagcacuucagacccaugcccgacgccugcagagacgcccacaacuggaagauggccggcgaccccagauacgaggagagccugcacaaccccuaccccgacuaccacuggcugagaaccgugaagaccaccaaggagagccuggugaucaucagccccagcguggccgaccuggaccccuacgacaagagccugcacagcagcguguuccccggcggcaagugcagcggcaucaccgugagcagcaccuacugcagcaccaaccacgacuacaccaucuggaugcccgagaaccccagacugggcaccagcugcgacaucuucaccuacagcaagggcaagagagccagcaaggagagcaagaccugcggcuucguggacgagagaggccuguacaagagccugaagggcgccugcaagcugaagcugugcggcgugcugggccugagacugauggacggcaccuggguggccauccagaccagcgacgaggugaaguggugcccccccgaccagcuggugaaccugcacgacuucagaagcgacgagcuggagcaccuggugguggaggagcuggugaagaagagagaggagugccuggacgcccuggagagcaucaugaccaccaagagcgugagcuucagaagacugagccaccugagaaagcuggugcccggcuucggcaaggccuacaccaucuucaacaagacccugauggaggccgacgcccacuacaagagcgugagaaccuggaacgagaucauccccagcaagggcugccugaaggugggcggcagaugccacccccacgugaacggcguguucuucaacggcaucauccugggccccgacggccacgugcugauccccgagaugcagagcagccugcugcagcagcacauggagcugcuggagagcagcgugaucccccugaugcacccccuggccgaccccagcgccguguucaagaccggcgacgaggccgaggacuucguggaggugcaccugcccgacgugcacaagcaggugagcggcguggaccugggccugcccagcuggggcaaguacgugcugaugagcgccggcgugcugaucgugcuggugcugaugaucuuccugaugaugugcugcaagaagcccaacagagccgagcccauccaccacagccccagagagaccgagagaaagaugagcgugaccagccagggcggcagagugaucagcagcugggagagcuacaagaacggcggcgagaccaagcuguga

SEQ ID NO: 191606 - RNA, 1575 nt, Artificial Sequence
  derived and/or modified CDS sequence (opt4) from glycoprotein__RABV__KF620489.1
augaucccccaggcccugcuguucgugcccuuccugggcuucccccugugccugggcaaguuccccaucuacaccauccccgacaagcugggccccuggagccccaucgacauccaccaccugagcugccccaacaacauggugguggaggacgagggcugcaccaaccugagcggcuucagcuacauggagcugaaggugggcuacaucagcgccaucaaggugaacggcuucaccugcaccggcguggugaccgaggccgagaccuacaccaacuucgugggcuacgugaccaccaccuucaagagaaagcacuucagacccgugcccgacgccugcagagacgcccacaacuggaagaucgccggcgaccccagauacgaggagagccugcacaaccccuaccccgacuaccacuggcugagaaccgugaagaccaccaaggagagccuggugaucaucagccccagcguggccgaccuggaccccuacgacaagagccugcacagcagcguguuccccggcggcaagugcagcggcaucaccgugagcagcaccuacugcagcaccaaccacgacuacaccaucuggaugcccgagaaccccagacugggcaccagcugcgacaucuucaccuacagcaagggcaagagagccagcaaggagagcaagaccugcggcuucguggacgagagaggccuguacaagagccugaagggcgccugcaagcugaagcugugcggcgugcccggccugagacugauggacggcaccuggguggccauccagaccagcgacgaggugaaguggugcccccccgaccagcuggugaaccugcacgaccugcacagcgacgagcuggagcacagagugguggaggagcuggugaagaagagagaggagugccuggacgcccuggagagcaucaugaccaccaagagcgugagcuucagaagacugagccaccugagaaagcuggugcccggcuucggcaaggccuacaccaucuucaacaagacccugauggaggccgacgcccacuacaagagcgugagaaccuggaacgagaucauccccagcaagggcugccugagagugggcggcagaugccacccccacgugaacggcguguucuucaacggcaucauccugggccccgacggccacgugcugauccccgagaugcagagcagccugcugcagcagcacauggagcugcuggagagcagcgugaucccccugaugcacccccuggccgaccccagcgccguguucaagaccggcgacgaggccgaggacuucguggaggugcaccugcccgacgugcacaagcaggugagcggcguggaccugggccugcccagcuggggcaaguacgugcugaugagcgccggcgugcugaucgugcuggugcugaugaucuuccugaugaccugcugcaagagacccaacagagccgagcccauccaccacagccccagagagaccgagagaaaggugagcgugaccagccagggcggcagagugaucagcagcugggagagcuacaagaacggcggcgagaccaagcuguga

SEQ ID NO: 191607 - RNA, 1575 nt, Artificial Sequence
  derived and/or modified CDS sequence (opt4) from glycoprotein__RABV__KF656698.1
augauccugcaggugcugcaguucgugccccugcugaucagcccccugugccugggcaaguuccccaucuacaccauccccgacaagcugggccccuggagccccaucgacauccaccaccugagcugccccaacaaccuggugguggaggacgagggcugcaccaaccugagcggcuucagcuacauggagcugaaggugggcuacaucagcgccaucaaggugaacggcuucaccugcaccggcguggugaccgaggccgagaccuacaccaacuucgugggcuacgugaccaccaccuucaagagaaagcacuucagacccauccccgacgccugcagagccgccuacaacuggaagauggccggcgaccccagauacgaggagagccugcagaaccccuaccccgaguaccacuggcugagaaccgugaagaccaccaaggagagccugaucaucaucagccccagcguggccgaccuggaccccuacgacaagagccugcacagcagaguguuccccggcggcagcgcccugggcaucaccgugagcagcaccuacugcagcaccaaccacgacuacaccaucuggaugcccgaggagcccagacugggcaccagcugcgacaucuucaccagcagcaagggcaagaaggccagcaagggcggcaagaccugcggcuucguggacgagagaggccuguacaagagccugaagggcgccugcaagcugaagcugugcggcgugcugggccugagacugauggacggcaccugggugagcauccagaccagcgacaacaccaaguggugcagccccgaccagcuggugaaccugcacgacuuccacagcgacgagaucgagcaccuggugguggaggagcuggugaagaagagagaggagugccuggacgcccuggagagcaucaugaccaccaagagcgugagcuucagaagacugaccuaccugagaaagcuggugcccggcuucggcaaggccuacaccaucuucaacaagacccugauggaggccgacgcccacuacaagagcgugagaaccuggaacgagaucauccccagcaagggcugccugaaggugagagagagaugccacccccccguggacggcguguucuucaacggcaucauccugggccccgacggcaacgugcugauccccgagaugcagagcagccugcugcagcagcacauggagcugcuggagagcagcgugaucccccugaugcacccccuggccgaccccagcaccguguucaaggagggcgacgaggccgaggacuucguggaggugcaccugcccgacgugcacaagcagaucagcggcguggaccugggccugcccagcuggggcaaguaccugcugaugaucgccggcggccuggccacccuggugcugaucaucugcagcaucgccugcugcagaagagccaagagaaccgagagcagaagaagaggcagcggcgagagcggcaagaaggccaccgccacccccagaaccagaaagguggugagcagcugggagcuguacaagagagagggcgacgccagacuguga

SEQ ID NO: 191608 - RNA, 1575 nt, Artificial Sequence
  derived and/or modified CDS sequence (opt4) from glycoprotein__RABV__KF656699.1
augauccugcaggugcugcaguucgugccccugcugaucagcccccugugccugggcaaguuccccaucuacaccauccccgacaagcugggccccuggagccccaucgacauccaccaccugagcugccccaacaaccuggugguggaggacgagggcugcaccaaccugagcggcuucagcuacauggagcugaaggugggcuacaucagcgccaucaaggugaacggcuucaccugcaccggcguggugaccgaggccgagaccuacaccaacuucgugggcuacgugaccaccaccuucaagagaaagcacuucagacccauccccgacgccugcagagccgccuacaacuggaagauggccggcgaccccagauacgaggagagccugcagaaccccuaccccgaguaccacuggcugagaaccgugaagaccaccaaggagagccugaucaucaucagccccagcguggccgaccuggaccccuacgacaagagccugcacagcagaguguuccccggcggcagcgcccugggcaucaccgugagcagcaccuacugcagcaccaaccacgacuacaccaucuggaugcccgaggagcccagacugggcaccagcugcgacaucuucaccagcagcaagggcaagaaggccagcaagggcggcaagaccugcggcuucguggacgagagaggccuguacaagagccugaagggcgccugcaagcugaagcugugcggcgugcugggccugagacugauggacggcaccugggugagcauccagaccagcgacaacaccaaguggugcagccccgaccagcuggugaaccugcacgacuuccacagcgacgagaucgagcaccuggugguggaggagcuggugaagaagagagaggagugccuggacgcccuggagagcaucaugaccaccaagagcgugagcuucagaagacugagcuaccugagaaagcuggugcccggcuucggcaaggccuacaccaucuucaacaagacccugauggaggccgacgcccacuacaagagcgugagaaccuggaacgagaucauccccagcaagggcugccugaaggugagagagagaugccacccccccguggacggcguguucuucaacggcaucauccugggccccgacggcaacgugcugauccccgagaugcagagcagccugcugcagcagcacauggagcugcuggagagcagcgugaucccccugaugcacccccuggccgaccccagcaccguguucaaggagggcgacgaggccgaggacuucguggaggugcaccugcccgacgugcacaagcagaucagcggcguggaccugggccugcccagcuggggcaaguaccugcugaugaucgccggcggccuggccacccuggugcugaucaucugcagcaucgccugcugcagaagagccaagagaaccgagagcagaagaagaggcagcggcgagagcggcaagaaggccaccgccacccccagaaccagaaagguggugagcagcugggagcuguacaagagagagggcgacgccagacuguga

SEQ ID NO: 191609 - RNA, 1575 nt, Artificial Sequence
  derived and/or modified CDS sequence (opt4) from glycoprotein__RABV__KF663531.1
augaucccccaggugcugcuguucgugccccugcugguguucagcagcugcuucggcaaguuccccaucuacaccauccccgacaagcugggccccuggagccccaucgacauccaccaccugagcugccccaacaaccuggugguggaggacgagggcugcaccaaccugagcggcuucagcuacauggagcugaaggugggcuacaucagcgccaucaaggugaacggcuucaccugcaccggcguggugaccgaggccgagaccuacaccaacuucgugggcuacgugaccaccaccuucaagagaaagcacuucagacccaugcccgacgccugcagagccgccuacaacuggaagguggccggcgaccccagauacgaggagagccugcacaaccccuaccccgacuaccacuggcugagaaccgugaagaccaccaaggagagccuggugaucaucagccccagcguggccgaccuggaccccuacgacaagagccugcacagcagaguguuccccggcggcaagugcagcggcaucaccgugagcagcaccugcugcagcaccaaccacgacuacaccaucuggaugcccgagaaccccagacugggcaccagcugcgacaucuucaccaacagcagaggcaagagagccagcaagggcggcaagaccugcggcuucguggacgagagaggccugugcaagagccugaagggcgccugcaagcugaagcugugcggcgugcugggccugagacugauggacggcaccuggguggccauccagaccagcgacgagaucaaguggugcccccccgaccagcuggugaaccugcacgacuuccacagcgacgagaucgagcacuucgugguggaggagcuggugaagaagagagaggagugccuggacgcccuggagaccaucaugaccaccaagagcgugagcuucagaagacugagccaccugagaaagcuggugcccggcuucggcaaggccuacaccaucuucaacaagacccugauggaggccgacgcccacuacaagagcaucagaaccuggaacgagaucauccccagcaagggcugccugagagugggcggcagaugccacccccacgugaacggcguguucuucaacggcaucauccugggccccgacggccacgugcugauccccgagaugcagagcagccugcugcaccagcacauggagcugcuggagagcagcgugaucccccugaugcacccccuggccgaccccagcaccguguucaaggacggcgacgaggccgaggacuucguggaggugcaccugcccgacgugcacaagcagaucagcggcguggaccugggccugcccaacuggggcaaguacgugcugaucagcgccggcgcccugaccgcccugaugcugaccaucuuccugaugaccugcugcagaaagaccaacagagccggcagcauccagcacagccccggcgagaccggcagaaaggugagcgugaccagccacaacggcagagugaucagccugugggagagcuacaagagcggcagcgagaccaagcuguga

SEQ ID NO: 191610 - RNA, 1575 nt, Artificial Sequence
  derived and/or modified CDS sequence (opt4) from glycoprotein__RABV__KF663532.1
augaucccccaggugcugcuguucgugccccugcuggccuucagcagcugcuucggcaaguuccccaucuacaccauccccgacaagcugggccccuggagccccaucgacauccaccaccugagcugccccaacaaccuggugguggaggacgagggcugcaccaaccugagcggcuucagcuacauggagcugaaggugggcuacaucagcgccaucaaggugaacggcuucaccugcaccggcguggugaccgaggccgagaccuacaccaacuucgugggcuacgugaccaccaccuucaagagaaagcacuucagacccaugcccgacgccugcagagccgccuacaacuggaagguggccggcgaccccagauacgaggagagccugcacaaccccuaccccgacuaccacuggcugagaaccgugaagaccaccaaggagagccuggugaucaucagccccagcguggccgaccuggaccccuacgacaagagccugcacagcagaguguuccccggcggcaagugcagcggcaucaccgugagcagcaccugcugcagcaccaaccacgacuacaccaucuggaugcccgagaaccccagacugggcaccagcugcgacaucuucaccaacagcagaggcaagagagccagcaagggcggcaagaccugcggcuucguggacgagagaggccuguacaagagccugaagggcgccugcaagcugaagcugugcggcgugcugggccugggccugauggacggcaccuggguggccauccagaccagcgacgagaucaaguggugcccccccgaccagcuggugaaccugcacgacuuccacagcgacgagaucgagcaccuggugguggaggagcuggugaagaagagagaggagugccuggacgcccuggagaccaucaugaccaccaagagcgugagcuucagaagacugagccaccugagaaagcuggugcccggcuucggcaaggccuacaccaucuucaacaagacccugauggaggccgacgcccacuacaagagcaucagaaccuggaacgagaucauccccagcaagggcugccugagagugggcggcagaugccacccccacgugaacggcguguucuucaacggcaucauccugggccccgacggccacgugcugauccccgagaugcagagcagccugcugcaccagcacauggagcugcuggagagcagcgugaucccccugaugcacccccuggccgaccccagcaccguguucaaggacggcgacgaggccgaggacuucguggaggugcaccugcccgacgugcacaagcagaucagcggcguggaccugggccugcccaacuggggcaaguacgugcugaucagcgccggcgcccugaccgcccugaugcugaccaucuuccugaugaccugcugcagaaagaccaacagagccggcagcauccagcacagccccggcgagaccggcagaaaggugagcgugaccagccacaacggcagagugaugauccugugggagagcuacaagagcggcagcgagaccaagcuguga

SEQ ID NO: 191611 - RNA, 1575 nt, Artificial Sequence
  derived and/or modified CDS sequence (opt4) from glycoprotein__RABV__KF663533.1
augaucccccaggugcugcuguucgugccccugcuggacuucagcagcugcuucggcaaguuccccaucuacaccauccccgacaagcugggccccuggagccccaucgacauccaccaccugagcugccccaacaaccuggugguggaggacgagggcugcaccaaccugagcggcuucagcuacauggagcugaaggugggcuacaucagcgccaucaaggugaacggcuucaccugcaccggcguggugaccgaggccgagaccuacaccaacuucgugggcuacgugaccaccaccuucaagagaaagcacuucagacccaugcccgacgccugcagagccgccuacaacuggaagguggccggcgaccccagauacgaggagagccugcacaaccccuaccccgacuaccacuggcugagaaccgugaagaccaccaaggagagccuggugaucaucagccccagcguggccgaccuggaccccuacgacaagagccugcacagcagaguguuccccggcggcaagugcagcggcaucaccgugagcagcaccugcugcagcaccaaccacgacuacaccaucuggaugcccgagaaccccagacugggcaccagcugcgacaucuucaccaacagcagaggcaagagagccagcaagggcggcaagaccugcggcuucgaggacgagagaggccuguacaagagccugaucggcgccugcaagcugaagcugugcggcgugcugggccugagaagaauggacggcaccuggguggccauccagaccagcgacaagaucaagagaugcccccccgaccagcuggugaaccugcacgacuuccacagcgacgagaucgagcaccuggugguggaggagcuggugaagaagagagaggagugccuggacgcccuggagaccaucaugaccaccaagagcgugagcuucagaagacugagccaccugagaaagcuggugcccggcuucggcaaggccuacaccaucuucaacaagacccugauggaggccgacgcccacuacaagagcaucagaaccuggaacgagaucauccccagcaagggcugccugagagugggcggcagaugccacccccacgugaacggcguguucuucaacggcaucauccugggccccgacggccacgugcugauccccgagaugcagagcagccugcugcaccagcacauggagcugcuggagagcagcgugaucccccugaugcacccccuggccgaccccagcaccguguucaaggacggcgacgaggccgaggacuucguggaggugcaccugcccgacgugcacaagcagaucagcggcguggaccugggccugcccaacuggggcaaguacgugcugaucagcgccggcgcccugaccgcccugaugcugaccaucuuccugaugaccugcugcagaaagaccaacagagccggcagcauccagcacagccccggcgagaccggcagaaaggugagcgugaccagccacaacggcagagugaucagccugugggagagcuacaagagcgagagcgagaccaagcuguga

SEQ ID NO: 191612 - RNA, 1575 nt, Artificial Sequence
  derived and/or modified CDS sequence (opt4) from glycoprotein__RABV__KF663534.1
augaucccccaggugcugcuguucgugccccugcugguguucagcagcugcuucggcaaguuccccaucuacaccauccccgacaagcugggccccuggagccccaucgacauccaccaccugagcugccccaacaaccuggugguggaggacgagggcugcaccaaccugagcggcuucagcuacauggagcugaaggugggcuacaucagcgccaucaaggugaacggcuucaccugcaccggcguggugaccgaggccgagaccuacaccaacuucgugggcuacgugaccaccaccuucaagagaaagcacuucagacccaugcccgacgccugcagagccgccuacaacuggaagguggccggcgaccccagauacgaggagagccugcacaaccccuaccccgacuaccacuggcugagaaccgugaagaccaccaaggagagccuggugaucaucagccccagcguggccgaccuggaccccuacgacaagagccugcacagcagaguguuccccggcggcaagugcagcggcaucaccgugagcagcaccugcugcagcaccaaccacgacuacaccaucuggaugcccgagaaccccagacugggcaccagcugcgacaucuucaccaacagcagaggcaagagagccagcaagggcggcaagaccugcggcuucggcgacgagagaggccuguacaagagccugaacggcgccugcaagcugaagcugugcggcgugcugggccugagaagaauggacggcaccuggguggccauccagaccagcgacgagaucaaguggugcccccccgaccagcuggugaaccugcacgacuuccacagcgacgagaucgagcaccuggugguggaggagcuggugaagaagagagaggagugccuggacgcccuggagaccaucaugaccaccaagagcgugagcuucagaagacugagccaccugagaaagcuggugcccggcuucggcaaggccuacaccaucuucaacaagacccugauggaggccgacgcccacuacaagagcaucagaaccuggaacgagaucauccccagcaagggcugccugagagugggcggcagaugccacccccacgugaacggcguguucuucaacggcaucauccugggccccgacggccacgugcugauccccgagaugcagagcagccugcugcaccagcacauggagcugcuggagagcagcgugaucccccugaugcacccccuggccgaccccagcaccguguucaaggacggcgacgaggccgaggacuucguggaggugcaccugcccgacgugcacaagcagaucagcggcguggaccugggccugcccaacuggggcaaguacgugaugaucagcgccggcgcccugaccgcccugaugcugaccaucuuccugaugaccugcugcagaaagaccaacagagccggcagcauccagcacagccccggcgagaccggcagaaaggugagcgugaccagccacaacggcagagugaucagccugugggagagcuacaagagcgagagcgagaccaagcuguga

SEQ ID NO: 191613 - RNA, 1575 nt, Artificial Sequence
  derived and/or modified CDS sequence (opt4) from glycoprotein__RABV__KF663535.1
augaucccccaggugcugcuguucgugccccugcuggugaucagcagcugcuucggcaaguuccccaucuacaccauccccgacaagcugggccccuggagccccaucgacauccaccaccugagcugccccaacaaccuggugguggaggacgagggcugcaccaaccugagcggcuucagcuacauggagcugaaggugggcuacaucagcgccaucaaggugaacggcuucaccugcaccggcguggugaccgaggccgagaccuacaccaacuucgugggcuacgugaccaccaccuucaagagaaagcacuucagacccaugcccgacgccugcagagccgccuacaacuggaagguggccggcgaccccagauacgaggagagccugcacaaccccuaccccgacuaccacuggcugagaaccgugaagaccaccaaggagagccuggugaucaucagccccagcguggccgaccuggaccccuacgacaagagccugcacagcagaguguuccccggcggcaagugcagcggcaucaccgugagcagcaccugcugcagcaccaaccacgacuacaccaucuggaugcccgagaaccccagacugggcaccagcugcgacaucuucaccaacagcagaggcaagagagccagcaagggcggcaagaccugcggcuucguggacgagagaggccuguacaagagccugaagggcgccugcaagcugaagcugugcggcgugcugggccugagacugauggacggcaccuggguggccauccagaccagcgacgagaucaaguggugcccccccgaccagcuggugaaccugcacgacuuccacagcgacgagaucgagcaccuggugguggaggagcuggugaagaagagagaggagugccuggacgcccuggagaccaucaugaccaccaagagcgugagcuucagaagacugagccaccugagaaagcuggugcccggcuucggcaaggccuacaccaucuucaacaagacccugauggaggccgacgcccacuacaagagcaucagaaccuggaacgagaucauccccagcaagggcugccugagagugggcggcagaugccacccccacgugaacggcguguucuucaacggcaucauccugggccccgacggccacgugcugauccccgagaugcagagcagccugcugcaccagcacauggagcugcuggagagcagcgugaucccccugaugcacccccuggccgaccccagcaccguguucaaggacggcgacgaggccgaggacuucguggaggugcaccugcccgacgugcacaagcagaucagcggcguggaccugggccugcccaacuggggcaaguacgugcugaucagcgccggcgcccugaccgcccugaugcugaccaucuuccugaugaccugcugcagaaagaccaacagagccggcagcauccagcacagccccggcgagaccggcagaaaggugagcgugaccagccacaacggcagagugaucuuccugugggagagcuacaagagcggcagcgagaccaagcuguga

SEQ ID NO: 191614 - RNA, 1575 nt, Artificial Sequence
  derived and/or modified CDS sequence (opt4) from glycoprotein__RABV__KF663536.1
augaucccccaggugcugcuguucgugccccugcugguguucagcagcugcuucggcaaguuccccaucuacaccauccccgacaagcugggccccuggagccccaucgacauccaccaccugagcugccccaacaaccuggugguggaggacgagggcugcaccaaccugagcggcuucagcuacauggagcugaaggugggcuacaucagcgccaucaaggugaacggcuucaccugcaccggcguggugaccgaggccgagaccuacaccaacuucgugggcuacgugaccaccaccuucaagagaaagcacuucagacccaugcccgacgccugcagagccgccuacaacuggaagguggccggcgaccccagauacgaggagagccugcacaaccccuaccccgacuaccacuggcugagaaccgugaagaccaccaaggagagccuggugaucaucagccccagcguggccgaccuggaccccuacgacaagagccugcacagcagaguguuccccggcggcaagugcagcggcaucaccgugagcagcaccugcugcagcaccaaccacgacuacaccaucuggaugcccgagaaccccagacugggcaccagcugcgacaucuucaccaacagcagaggcaagagagccagcaagggcggcaagaccugcggcuucguggacgagagaggccugugcaagagccugaagggcgccugcaagcugaagcugugcggcgugcugggccugagacugauggacggcaccuggguggccauccagaccagcgacgagaucaaguggugcccccccgaccagcuggugaaccugcacgacuuccacagcgacgagaucgagcaccuggugguggaggagcuggugaagaagagagaggagugccuggacgcccuggagaccaucaugaccaccaagagcgugagcuucagaagacugagccaccugagaaagcuggugcccggcuucggcaaggccuacaccaucuucaacaagacccugauggaggccgacgcccacuacaagagcaucagaaccuggaacgagaucauccccagcaagggcugccugagagugggcggcagaugccacccccacgugaacggcguguucuucaacggcaucauccugggccccgacggccacgugcugauccccgagaugcagagcagccugcugcaccagcacauggagcugcuggagagcagcgugaucccccugaugcacccccuggccgaccccagcaccguguucaaggacggcgacgaggccgaggacuucguggaggugcaccugcccgacgugcacaagcagaucagcggcguggaccugggccugcccaacuggggcaaguacgugcugaucagcgccggcgcccugaccgcccugaugcugaccaucuuccugaugaccugcugcagaaagaccaacagagccggcagcauccagcacagccccggcgagaccggcagaaaggugagcgugaccagccacaacggcagagugaucagccugugggagagcuacaagagcggcagcgagaccaagcuguga

SEQ ID NO: 191615 - RNA, 1575 nt, Artificial Sequence
  derived and/or modified CDS sequence (opt4) from glycoprotein__RABV__KF663537.1
augaucccccaggugcugcuguucgugccccugcuggacuucagcagcugcuucggcaaguuccccaucuacaccauccccgacaagcugggccccuggagccccaucgacauccaccaccugagcugccccaacaaccuggugguggaggacgagggcugcaccaaccugagcggcuucagcuacauggagcugaaggugggcuacaucagcgccaucaaggugaacggcuucaccugcaccggcguggugaccgaggccgagaccuacaccaacuucgugggcuacgugaccaccaccuucaagagaaagcacuucagacccaugcccgacgccugcagagccgccuacaacuggaagguggccggcgaccccagauacgaggagagccugcacaaccccuaccccgacuaccacuggcugagaaccgugaagaccaccaaggagagccuggugaucaucagccccagcguggccgaccuggaccccuacgacaagagccugcacagcagaguguuccccggcggcaagugcagcggcaucaccgugagcagcaccugcugcagcaccaaccacgacuacaccaucuggaugcccgagaaccccagacugggcaccagcugcgacaucuucaccaacagcagaggcaagagagccagcaagggcggcaagaccugcggcuucguggacgagagaggccuguacaagagccugaacggcgccugcaagcugaagcugugcggcgugcugggccugagaagaauggacggcaccuggguggccauccagaccagcgacgagaucaaguggugcccccccgaccagcuggugaaccugcacgacuuccacagcgacgagaucgagcaccuggugguggaggagcuggugaagaagagagaggagugccuggacgcccuggagaccaucaugaccaccaagagcgugagcuucagaagacugagccaccugagaaagcuggugcccggcuucggcaaggccuacaccaucuucaacaagacccugauggaggccgacgcccacuacaagagcaucagaaccuggaacgagaucauccccagcaagggcugccugagagugggcggcagaugccacccccacgugaacggcguguucuucaacggcaucauccugggccccgacggccacgugcugauccccgagaugcagagcagccugcugcaccagcacauggagcugcuggagagcagcgugaucccccugaugcacccccuggccgaccccagcaccguguucaaggacggcgacgaggccgaggacuucguggaggugcaccugcccgacgugcacaagcagaucagcggcguggaccugggccugcccaacuggggcaaguacgugcugaucagcgccggcgcccugaccgcccugaugcugaccaucuuccugaugaccugcugcagaaagaccaacagagccggcagcauccagcacagccccggcgagaccggcagaaaggugagcgugaccagccacaacggcagagugaucagccugugggagagcuacaagagcgagagcgagaccaagcuguga

SEQ ID NO: 191616 - RNA, 1575 nt, Artificial Sequence
  derived and/or modified CDS sequence (opt4) from glycoprotein__RABV__KF663538.1
augaucccccaggugcugcuguucgugccccugcugguguucagcagcugcuucggcaaguuccccaucuacaccauccccgacaagcugggccccuggagccccaucgacauccaccaccugagcugccccaacaaccuggugguggaggacgagggcugcaccaaccugagcggcuucagcuacauggagcugaaggugggcuacaucagcgccaucaaggugaacggcuucaccugcaccggcguggugaccgaggccgagaccuacaccaacuucgugggcuacgugaccaccaccuucaagagaaagcacuucagacccaugcccgacgccugcagagccgccuacaacuggaagguggccggcgaccccagauacgaggagagccugcacaaccccuaccccgacuaccacuggcugagaaccgugaagaccaccaaggagagccuggugaucaucagccccagcguggccgaccuggaccccuacgacaagagccugcacagcagaguguuccccggcggcaagugcagcggcaucaccgugagcagcaccugcugcagcaccaaccacgacuacaccaucuggaugcccgagaaccccagacugggcaccagcugcgacaucuucaccaacagcagaggcaagagagccagcaagggcggcaagaccugcggcuucguggacgagagaggccuguacaagagccugaagggcgccugcaagcugaagcugugcggcgugcugggccugagacugauggacggcaccuggguggccauccagaccagcgacgagaucaucagaugcccccccgaccagcuggugaaccugcacgacuuccacagcgacgagaucgagcaccuggugguggaggagcuggugaagaagagagaggagugccuggacgcccuggagaccaucaugaccaccaagagcgugagcuucagaagacugagccaccugagaaagcuggugcccggcuucggcaaggccuacaccaucuucaacaagacccugauggaggccgacgcccacuacaagagcaucagaaccuggaacgagaucauccccagcaagggcugccugagagugggcggcagaugccacccccacgugaacggcguguucuucaacggcaucauccugggccccgacggccacgugcugauccccgagaugcagagcagccugcugcaccagcacauggagcugcuggagagcagcgugaucccccugaugcacccccuggccgaccccagcaccguguucaaggacggcgacgaggccgaggacuucguggaggugcaccugcccgacgugcacaagcagaucagcggcguggaccugggccugcccaacuggggcaaguacgugcugaucagcgccggcgcccugaccgcccugaugcugaccaucuuccugaugaccugcugcagaaagaccaacagagccggcagcauccagcacagccccggcgagaccggcagaaaggugagcgugaccagccacaacggcagagugaucagccugugggagagcuacaagagcgagagcgagaccaagcuguga

SEQ ID NO: 191617 - RNA, 1575 nt, Artificial Sequence
  derived and/or modified CDS sequence (opt4) from glycoprotein__RABV__KF663539.1
augaucccccaggugcugcuguucgugccccugcugguguucagcagcugcuucggcaaguuccccaucuacaccauccccgacaagcugggccccuggagccccaucgacauccaccaccugagcugccccaacaaccuggugguggaggacgagggcugcaccaaccugagcggcuucagcuacauggagcugaaggugggcuacaucagcgccaucaaggugaacggcuucaccugcaccggcguggugaccgaggccgagaccuacaccaacuucgugggcuacgugaccaccaccuucaagagaaagcacuucagacccaugcccgacgccugcagagccgccuacaacuggaagauggccggcgaccccagauacgaggagagccugcacaaccccuaccccgacuaccacuggcugagaaccgugaagaccaccaaggagagccuggugaucaucagccccagcguggccgaccuggaccccuacgacaagagccugcacagcagaguguuccccggcggcaagugcagcggcaucaccgugagcagcaccugcugcagcaccaaccacgacuacaccaucuggaugcccgagaaccccagacugggcaccagcugcgacaucuucaccaacagcagaggcaagagagccagcaagggcggcaagaccugcggcuucggcgacgagagaggccuguacaagagccugagaggcgccugcaagcugaagcugugcggcgugcugggccugagacugauggacggcaccuggguggugauccagaccagcgacgagaucaaguggugcagccccgaccagcuggugaaccugcacgacuuccacagcgacgagaucgagcaccuggugguggaggagcuggugaagaagagagaggagugccuggacgcccuggagaccaucaugaccaccaagagcgugagcuucagaagacugagccaccugagaaagcuggugcccggcuucggcaaggccuacaccaucuucaacaagacccugauggaggccgacgcccacuacaagagcaucagaaccuggaacgagaucauccccagcaagggcugccugagagugggcggcagaugccacccccacgugaacggcguguucuucaacggcaucauccugggccccgacggccacgugcugauccccgagaugcagagcagccugcugcaccagcacauggagcugcuggagagcagcgugaucccccugaugcacccccuggccgaccccagcaccguguucaaggacggcgacgaggccgaggacuucguggaggugcaccugcccgacgugcacaagcagaucagcggcguggaccugggccugcccaacuggggcaaguacgugcugaucagcgccggcgcccugaccgcccugaugcugaugaucuuccugaugaccugcugcagaaagaccaacagagccgagagcauccagcacagccccggcgagaccggcagaaaggugagcgugaccagccacaacggcagagugaucagcagcugggagagcuacaagagcgagagcgagaccaagcuguga

SEQ ID NO: 191618 - RNA, 1575 nt, Artificial Sequence
  derived and/or modified CDS sequence (opt4) from glycoprotein__RABV__KF663540.1
augaucccccaggugcugcuguucgugccccugcugguguucagcagcugcuucggcaaguuccccaucuacaccauccccgacaagcugggccccuggagccccaucgacauccaccaccugagcugccccaacaaccuggugguggaggacgagggcugcaccaaccugagcggcuucagcuacauggagcugaaggugggcuacaucagcgccaucaaggugaacggcuucaccugcaccggcguggugaccgaggccgagaccuacaccaacuucgugggcuacgugaccaccaccuucaagagaaagcacuucagacccaugcccgacgccugcagagccgccuacaacuggaagauggccggcgaccccagauacgaggagagccugcacaaccccuaccccgacuaccacuggcugagaaccgugaagaccaccaaggagagccuggugaucaucagccccagcguggccgaccuggaccccuacgacaagagccugcacagcagaguguuccccggcggcaagugcagcggcaucaccgugagcagcaccugcugcagcaccaaccacgacuacaccaucuggaugcccgagaaccccagacugggcaccagcugcgacaucuucaccaacagcagaggcaagagagccagcaagggcggcaagaccugcggcuucguggacgagagaggccuguacaagagccugaccggcgccugcaagcugaagcugugcggcgugcugggccugagccugauggacggcaccuggguggccauccagaccagcgacgagaucaaguggugcagccccgaccagcuggugaaccugcacgacuuccacagcgacgagaucgagcaccuggugguggaggagcuggugaagaagagagaggagugccuggacgcccuggagaccaucaugaccaccaagagcgugagcuucagaagacugagccaccugagaaagcuggugcccggcuucggcaaggccuacaccaucuucaacaagacccugauggaggccgacgcccacuacaagagcaucagaaccuggaacgagaucauccccagcaagggcugccugagagugggcggcagaugccacccccacgugaacggcguguucuucaacggcaucauccugggccccgacggccacgugcugauccccgagaugcagagcagccugcugcaccagcacauggagcugcuggagagcagcgugaucccccugaugcacccccuggccgaccccagcaccguguucaaggacggcgacgaggccgaggacuucguggaggugcaccugcccgacgugcacaagcagaucagcggcguggaccugggccugcccaacuggggcaaguacgugcugaucagcgccggcgcccugaccgcccugaugcugaugaucuuccugaugaccugcugcagaaagaccaacagagccgagagcauccagcacagccccggcgagaccggcagaaaggugagcgugaccagccacaacggcagagugaucagcagcugggagagcuacaagagcgagagcgagaccaagcuguga

SEQ ID NO: 191619 - RNA, 1575 nt, Artificial Sequence
  derived and/or modified CDS sequence (opt4) from glycoprotein__RABV__KF663541.1
augaucccccaggugcugcuguucgugccccugcugguguucagcagcugcuucggcaaguuccccaucuacaccauccccgacaagcugggccccuggagccccaucgacauccaccaccugagcugccccaacaaccuggugguggaggacgagggcugcaccaaccugagcggcuucagcuacauggagcugaaggugggcuacaucagcgccaucaaggugaacggcuucaccugcaccggcguggugaccgaggccgagaccuacaccaacuucgugggcuacgugaccaccaccuucaagagaaagcacuucagacccaugcccgacgccugcagagccgccuacaacuggaagauggccggcgaccccagauacgaggagagccugcacaaccccuaccccgacuaccacuggcugagaaccgugaagaccaccaaggagagccuggugaucaucagccccagcguggccgaccuggaccccuacgacaagagccugcacagcagaguguuccccggcggcaagugcagcggcaucaccgugagcagcaccugcugcagcaccaaccacgacuacaccaucuggaugcccgagaaccccagacugggcaccagcugcgacaucuucaccaacagcagaggcaagagagccagcaagggcggcaagaccugcggcuucguggacgagagaggccuguacaagagcagcaagggcgccugcaagcugaagcugugcggcgugcugggccugagacugauggacggcaccuggguggccauccagaccagcgacgagaucaaguggugcagccccgaccagcuggugaaccugcacgacuuccacagcgacgagaucgagcaccuggugguggaggagcuggugaagaagagagaggagugccuggacgcccuggagaccaucaugaccaccaagagcgugagcuucagaagacugagccaccugagaaagcuggugcccggcuucggcaaggccuacaccaucuucaacaagacccugauggaggccgacgcccacuacaagagcaucagaaccuggaacgagaucauccccagcaagggcugccugagagugggcggcagaugccacccccacgugaacggcguguucuucaacggcaucauccugggccccgacggccacgugcugauccccgagaugcagagcagccugcugcaccagcacauggagcugcuggagagcagcgugaucccccugaugcacccccuggccgaccccagcaccguguucaaggacggcgacgaggccgaggacuucguggaggugcaccugcccgacgugcacaagcagaucagcggcguggaccugggccugcccaacuggggcaaguacgugcugaucagcgccggcgcccugaccgcccugaugcugaugaucuuccugaugaccugcugcagaaagaccaacagagccgagagcauccagcacagccccggcgagaccggcagaaaggugagcgugaccagccacaacggcagagugaucagcagcugggagagcuacaagagcggcagcgagaccaagcuguga

SEQ ID NO: 191620 - RNA, 1575 nt, Artificial Sequence
  derived and/or modified CDS sequence (opt4) from glycoprotein__RABV__KF663542.1
auguucccccccgugcugcuguucgugccccugcugguguucagcagcugcuucggcaaguuccccaucuacaccauccccgacaagcugggccccuggagccccaucgacauccaccaccugagcugccccaacaaccuggugguggaggacgagggcugcaccaaccugagcggcuucagcuacauggagcugaaggugggcuacaucagcgccaucaaggugaacggcuucaccugcaccggcguggugaccgaggccgagaccuacaccaacuucgugggcuacgugaccaccaccuucaagagaaagcacuucagacccaugcccgacgccugcagagccgccuacaacuggaagguggccggcgaccccagauacgaggagagccugcacaaccccuaccccgacuaccacuggcugagaaccgugaagaccaccaaggagagccuggugaucaucagccccagcguggccgaccuggaccccuacgacaagagccugcacagcagaguguuccccggcggcaagugcagcggcaucaccgugagcagcaccugcugcagcaccaaccacgacuacaccaucuggaugcccgagaaccccagacugggcaccagcugcgacaucuucaccaacagcagaggcaagagagccagcaagggcggcaagaccugcggcuucagagacgagagaggccuguacaagagccugaagggcgccugcaagcugaagcugugcggcgugcugggccugagacugauggacggcaccuggguggccacccagaccagcaacgagaucaaguggugcccccccgaccagcuggugaaccugcacgacuuccacagcgacgagaucgagcaccuggugguggaggagcuggugaagaagagagaggagugccuggacgcccuggagaccaucaugaccaccaagagcgugagcuucagaagacugagccaccugagaaagcuggugcccggcuucggcaaggccuacaccaucuucaacaagacccugauggaggccgacgcccacuacaagagcaucagaaccuggaacgagaucauccccagcaagggcugccugagagugggcggcagaugccacccccacgugaacggcguguucuucaacggcaucauccugggccccgacggccacgugcugauccccgagaugcagagcagccugcugcaccagcacauggagcugcuggagagcagcgugaucccccugaugcacccccuggccgaccccagcaccguguucaaggacggcgacgaggccgaggacuucguggaggugcaccugcccgacgugcacaagcagaucagcggcguggaccugggccugcccaacuggggcaaguacgugcugaucagcgccggcgcccugaccgcccugaugcugaccaucuuccugaugaccugcugcagaaagaccaacagagccggcagcauccagcacagccccggcgagaccggcagaaaggugagcgugaccagccacaacggcagagugaucuuccugugggagagccacaucagcggcagcgagaccaagcuguga

SEQ ID NO: 191621 - RNA, 1575 nt, Artificial Sequence
  derived and/or modified CDS sequence (opt4) from glycoprotein__RABV__KF663543.1
auguucccccaggugcugcuguucgugccccugcugguguucagcagcugcuucggcaaguuccccaucuacaccauccccgacaagcugggccccuggagccccaucgacauccaccaccugagcugccccaacaaccuggugguggaggacgagggcugcaccaaccugagcggcuucagcuacauggagcugaaggugggcuacaucagcgccaucaaggugaacggcuucaccugcaccggcguggugaccgaggccgagaccuacaccaacuucgugggcuacgugaccaccaccuucaagagaaagcacuucagacccaugcccgacgccugcagagccgccuacaacuggaagguggccggcgaccccagauacgaggagagccugcacaaccccuaccccgacuaccacuggcugagaaccgugaagaccaccaaggagagccuggugaucaucagccccagcguggccgaccuggaccccuacgacaagagccugcacagcagaguguuccccggcggcaagugcagcggcaucaccgugagcagcaccugcugcagcaccaaccacgacuacaccaucuggaugcccgagaaccccagacugggcaccagcugcgacaucuucaccaacagcagaggcaagagagccagcaagggcggcaagaccugcggcuucgaggacgagagaggccuguacaagagccugaccggcgccugcaagcugaagcugugcggcgugcugggccugagacugauggacggcaccuggguggccauccagaccagcgacgagaucaaguggugcccccccgaccagcuggugaaccugcacgacuuccacagcgacgagaucgagcaccuggugguggaggagcuggugaagaagagagaggagugccuggacgcccuggagaccaucaugaccaccaagagcgugagcuucagaagacugagccaccugagaaagcuggugcccggcuucggcaaggccuacaccaucuucaacaagacccugauggaggccgacgcccacuacaagagcaucagaaccuggaacgagaucauccccagcaagggcugccugagagugggcggcagaugccacccccacgugaacggcguguucuucaacggcaucauccugggccccgacggccacgugcugauccccgagaugcagagcagccugcugcaccagcacauggagcugcuggagagcagcgugaucccccugaugcacccccuggccgaccccagcaccguguucaaggacggcgacgaggccgaggacuucguggaggugcaccugcccgacgugcacaagcagaucagcggcguggaccugggccugcccaacuggggcaaguacgugcugaucagcgccggcgcccugaccgcccugaugcugaccaucuuccugaugaccugcugcagaaagaccaacagagccggcagcauccagcacagccccggcgagaccggcagaaaggugagcgugaccagccacaacggcagagugaucagccugugggagagcuacaagagcggcagcgagaccaagcuguga

SEQ ID NO: 191622 - RNA, 1575 nt, Artificial Sequence
  derived and/or modified CDS sequence (opt4) from glycoprotein__RABV__KF663544.1
auguucccccaggugcugcuguucgugccccugcugguguucagcagcugcuucggcaaguuccccaucuacaccauccccgacaagcugggccccuggagccccaucgacauccaccaccugagcugccccaacaaccuggugguggaggacgagggcugcaccaaccugagcggcuucagcuacauggagcugaaggugggcuacaucagcgccaucaaggugaacggcuucaccugcaccggcguggugaccgaggccgagaccuacaccaacuucgugggcuacgugaccaccaccuucaagagaaagcacuucagacccaugcccgacgccugcagagccgccuacaacuggaagguggccggcgaccccagauacgaggagagccugcacaaccccuaccccgacuaccacuggcugagaaccgugaagaccaccaaggagagccuggugaucaucagccccagcguggccgaccuggaccccuacgacaagagccugcacagcagaguguuccccggcggcaagugcagcggcaucaccgugagcagcaccugcugcagcaccaaccacgacuacaccaucuggaugcccgagaaccccagacugggcaccagcugcgacaucuucaccaacagcagaggcaagagagccagcaagggcggcaagaccugcggcuucgaggacgagagaggccuguacaagagccugaagggcgccugcaagcugaagcugugcggcgugcugggccugagaagaauggacggcaccuggguggccauccagaccagcgacgagaucaaguggugcccccccgaccagcuggugaaccugcacgacuuccacagcgacgagaucgagcaccuggugguggaggagcuggugaagaagagagaggagugccuggacgcccuggagaccaucaugaccaccaagagcgugagcuucagaagacugagccaccugagaaagcuggugcccggcuucggcaaggccuacaccaucuucaacaagacccugauggaggccgacgcccacuacaagagcaucagaaccuggaacgagaucauccccagcaagggcugccugagagugggcggcagaugccacccccacgugaacggcguguucuucaacggcaucauccugggccccgacggccacgugcugauccccgagaugcagagcagccugcugcaccagcacauggagcugcuggagagcagcgugaucccccugaugcacccccuggccgaccccagcaccguguucaaggacggcgacgaggccgaggacuucguggaggugcaccugcccgacgugcacaagcagaucagcggcguggaccugggccugcccaacuggggcaaguacgugcugaucagcgccggcgcccugaccgcccugaugcugaccaucuuccugaugaccugcugcagaaagaccaacagagccggcagcauccagcacagccccggcgagaccggcagaaaggugagcgugaccagccacaacggcagagugaucagccugugggagagcuacaagagcggcagcgagaccaagcuguga

SEQ ID NO: 191623 - RNA, 1575 nt, Artificial Sequence
  derived and/or modified CDS sequence (opt4) from glycoprotein__RABV__KF663545.1
auguucccccaggugcugcuguucgugccccugcugguguucagcagcugcuucggcaaguuccccaucuacaccauccccgacaagcugggccccuggagccccaucgacauccaccaccugagcugccccaacaaccuggugguggaggacgagggcugcaccaaccugagcggcuucagcuacauggagcugaaggugggcuacaucagcgccaucaaggugaacggcuucaccugcaccggcguggugaccgaggccgagaccuacaccaacuucgugggcuacgugaccaccaccuucaagagaaagcacuucagacccaugcccgacgccugcagagccgccuacaacuggaagguggccggcgaccccagauacgaggagagccugcacaaccccuaccccgacuaccacuggcugagaaccgugaagaccaccaaggagagccuggugaucaucagccccagcguggccgaccuggaccccuacgacaagagccugcacagcagaguguuccccggcggcaagugcagcggcaucaccgugagcagcaccugcugcagcaccaaccacgacuacaccaucuggaugcccgagaaccccagacugggcaccagcugcgacaucuucaccaacagcagaggcaagagagccagcaagggcggcaagaccugcggcuucggcgacgagagaggccuguacaagagccugaagggcgccugcaagcugaagcugugcggcgugcugggccugagacugauggacggcaccuggguggccauccagaccagcgacgagaucaaguggugcccccccgaccagcuggugaaccugcacgacuuccacagcgacgagaucgagcaccuggugguggaggagcuggugaagaagagagaggagugccuggacgcccuggagaccaucaugaccaccaagagcgugagcuucagaagacugagccaccugagaaagcuggugcccggcuucggcaaggccuacaccaucuucaacaagacccugauggaggccgacgcccacuacaagagcaucagaaccuggaacgagaucauccccagcaagggcugccugagagugggcggcagaugccacccccacgugaacggcguguucuucaacggcaucauccugggccccgacggccacgugcugauccccgagaugcagagcagccugcugcaccagcacauggagcugcuggagagcagcgugaucccccugaugcacccccuggccgaccccagcaccguguucaaggacggcgacgaggccgaggacuucguggaggugcaccugcccgacgugcacaagcagaucagcggcguggaccugggccugcccaacuggggcaaguacgugcugaucagcgccggcgcccugaccgcccugaugcugaugaucuuccugaugaccugcugcagaaagaccaacagagccgagagcauccagcacagccccggcgagaccggcagaaaggugagcgugaccagccacaacggcagagugaucagcagcugggagagcuacaagagcggcagcgagaccaagcuguga

SEQ ID NO: 191624 - RNA, 1575 nt, Artificial Sequence
  derived and/or modified CDS sequence (opt4) from glycoprotein__RABV__KF663546.1
auguucccccaggugcugcuguucgugccccugcugguguucagcagcugcuucggcaaguuccccaucuacaccauccccgacaagcugggccccuggagccccaucgacauccaccaccugagcugccccaacaaccuggugguggaggacgagggcugcaccaaccugagcggcuucagcuacauggagcugaaggugggcuacaucagcgccaucaaggugaacggcuucaccugcaccggcguggugaccgaggccgagaccuacaccaacuucgugggcuacgugaccaccaccuucaagagaaagcacuucagacccaugcccgacgccugcagagccgccuacaacuggaagguggccggcgaccccagauacgaggagagccugcacaaccccuaccccgacuaccacuggcugagaaccgugaagaccaccaaggagagccuggugaucaucagccccagcguggccgaccuggaccccuacgacaagagccugcacagcagaguguuccccggcggcaagugcagcggcaucaccgugagcagcaccugcugcagcaccaaccacgacuacaccaucuggaugcccgagaaccccagacugggcaccagcugcgacaucuucaccaacagcagaggcaagagagccagcaagggcggcaagaccugcggcuucguggacgagagaggccuguacaagagccugaagggcgccugcaagcugaagcugugcggcgugcugggccugagacugauggacggcaccuggguggccauccagaccagcgacgagaucaaguggugcccccccgaccagcuggugaaccugcacgacuuccacagcgacgagaucgagcaccuggugguggaggagcuggugaagaagagagaggagugccuggacgcccuggagaccaucaugaccaccaagagcgugagcuucagaagacugagccaccugagaaagcuggugcccggcuucggcaaggccuacaccaucuucaacaagacccugauggaggccgacgcccacuacaagagcaucagaaccuggaacgagaucauccccagcaagggcugccugagagugggcggcagaugccacccccacgugaacggcguguucuucaacggcaucauccugggccccgacggccacgugcugauccccgagaugcagagcagccugcugcaccagcacauggagcugcuggagagcagcgugaucccccugaugcacccccuggccgaccccagcaccguguucaaggacggcgacgaggccgaggacuucguggaggugcaccugcccgacgugcacaagcagaucagcggcguggaccugggccugcccaacuggggcaaguacgugcugaucagcgccggcgcccugaccgcccugaugcugcccaucuuccugaugaccugcugcagaaagaccaacagagccggcagcauccagcccagccccggcgagaccggcagaaaggugagcgugaccagccacaacggcagagugaucagccugugggagagcuacaagagcggcagcgagaccaagcuguga

SEQ ID NO: 191625 - RNA, 1575 nt, Artificial Sequence
  derived and/or modified CDS sequence (opt4) from glycoprotein__RABV__KF709069.1
auggugccccaggcccugcuguucgugccccugcugguguucagcaugugcuucggcaaguuccccaucuacaccauccccgacaagcugggccccuggagccccaucgacauccaccaccugagcugccccaacaaccuggugguggaggacgagggcugcaccaaccugagcggcuucagcuacauggagcugaaggugggcuacaucagcgccaucaaggugaacggcuucaccugcaccggcguggugaccgaggccgagaccuacaccaacuucgugggcuacgugaccaccauguucaagagaaagcacuucagacccacccccgacgccugcagagccgccuacaacuggaagauggccggcgaccccagauacgaggagagccugcacaaccccuaccccgacuaccacuggcugagaaccgugaagaccaccaaggagagccuggugaucaucagccccagcguggccgaccuggaccccuacgacaagagccugcacagcagaguguuccccaacggcaagugcagcggcaucaccaucagcagcaccuacugccccaccaaccacgacuacaccaucuggcugcccgagaaccccagacugggcaccagcugcgacaucuucaccaacagcagaggcaagagagccagcaagggcagcaagaccugcggcuucguggacgagagaggccuguacaagagccugaagggcgccugcaagcugaagcugugcggcgugcugggccugagacugauggacggcaccuggguggccaugcaggccagcgacgagaccaaguggugcccccccgaccagcuggugaaccugcacgacuucagaagcgacgagaucgagcacuucgugguggaggagcuggugaagaagagagaggagugccuggacgcccuggagagcaucaugaccaccaagagcgugagcuucagaagacugagccaccugagaaagcuggugcccggcuucggcaaggccuacaccaucuucaacaagacccugauggaggccgacgcccacuacaagagcgugagaaccuggaacgagaucauccccagcaagggcugccugagagugggcggcagaugccacccccacgugaacggcguguucuucaacggcaucauccugggccccgacggccacgugcugauccccgagaugcagagcagccugcugcagcagcacauggagcugcuggagagcagcgugaucccccugaugcacccccuggccgaccccagcaccguguucaaggacggcgacgaggccgagaacuucguggaggugcaccugcccgacgugcacaagcagaucagcggcguggaccugggccugcccaacuggggcaaguacgugcuggugagcgccggcgugcugaucgcccugaugcugaucaucuuccugaugaccugcugcggcagagugaacagacccaagagcacccagcacaaccugggcggcaccggcagagaggugagcgugaccccccagagcggcaaggugaucagcagcugggagagcuacaagagcggcggcgagaccagacuguga

SEQ ID NO: 191626 - RNA, 1575 nt, Artificial Sequence
  derived and/or modified CDS sequence (opt4) from glycoprotein__RABV__KF709070.1
auggugccccaggcccugcuguucgugccccugcugguguucagcaugugcuucggcaaguuccccaucuacaccauccccgacaagcugggccccuggagccccaucgacauccaccaccugagcugccccaacaaccuggugguggaggacgagggcugcaccaaccugagcggcuucagcuacauggagcugaaggugggcuacaucagcgccaucaaggugaacggcuucaccugcaccggcguggugaccgaggccgagaccuacaccaacuucgugggcuacgugaccaccauguucaagagaaagcacuucagacccacccccgacgccugcagagccgccuacaacuggaagauggccggcgaccccagauacgaggagagccugcacaaccccuaccccgacuaccacuggcugagaaccgugaagaccaccaaggagagccuggugaucaucagccccagcguggccgaccuggaccccuacgacaagagccugcacagcagaguguuccccaacggcaagugcagcggcaucaccaucagcagcaccuacugccccaccaaccacgacuacaccaucuggcugcccgagaaccccagacugggcaccagcugcgacaucuucaccaacagcagaggcaagagagccagcaagggcagcaagaccugcggcuucguggacgagagaggccuguacaagagccugaagggcgccugcaagcugaagcugugcggcgugcugggccugagacugauggacggcaccuggguggccaugcaggccagcgacgagaccaaguggugcccccccgaccagcuggugaaccugcacgacuucagaagcgacgagaucgagcaccuggugguggaggagcuggugaagaagagagaggagugccuggacgcccuggagagcaucaugaccaccaagagcgugagcuucagaagacugagccaccugagaaagcuggugcccggcuucggcaaggccuacaccaucuucaacaagacccugauggaggccgacgcccacuacaagagcgugagaaccuggaacgagaucauccccagcaagggcugccugagagugggcggcagaugccacccccacgugaacggcguguucuucaacggcaucauccugggccccgacggccacgugcugauccccgagaugcagagcagccugcugcagcagcacauggagcugcuggagagcagcgugaucccccugaugcacccccuggccgaccccagcaccguguucaaggacggcgacgaggccgagaacuucguggaggugcaccugcccgacgugcacaagcagaucagcggcguggaccugggccugcccaacuggggcaaguacgugcuggugagcgccggcgugcugaucgcccugaugcugaucaucuuccugaugaccugcugcggcagagugaacagacccaagagcacccagcacaaccugggcggcaccggcagagaggugagcgugaccccccagagcggcaaggugaucagcagcugggagagcuacaagagcggcggcgagaccagacuguga

SEQ ID NO: 191627 - RNA, 1575 nt, Artificial Sequence; identical to SEQ ID NO: 191167
  derived and/or modified CDS sequence (opt4) from glycoprotein__RABV__KF709071.1

SEQ ID NO: 191628 - RNA, 1575 nt, Artificial Sequence; identical to SEQ ID NO: 191167
  derived and/or modified CDS sequence (opt4) from glycoprotein__RABV__KF709072.1

SEQ ID NO: 191629 - RNA, 1575 nt, Artificial Sequence
  derived and/or modified CDS sequence (opt4) from glycoprotein__RABV__KF709074.1
auggugccccaggcccugcuguucgugccccugcugguguuccccaugugcuucggcaaguuccccaucuacaccauccccgacaagcugggccccuggagccccaucgacauccaccaccugagcugccccaacaaccuggugguggaggacgagggcugcaccaaccugagcggcuucagcuacauggagcugaaggugggcuacaucagcgccaucaaggugaacggcuucaccugcaccggcguggugaccgaggccgagaccuacaccaacuucgugggcuacgugaccaccaccuucaagagaaagcacuucagacccacccccgacgccugcagagccgccuacaacuggaagauggccggcgaccccagauacgaggagagccugcacaaccccuaccccgacuaccacuggcugagaaccgugaagaccaccaaggagagccuggugaucaucagccccagcguggccgaccuggaccccuacgacaagagccugcacagcagaguguuccccaacggcaagugcagcggcaucaccaucagcagcaccuacugccccaccaaccacgacuacaccaucuggcugcccgagaaccccagacugggcaccagcugcgacaucuucaccaacagcagaggcaagagagccagcaagggcagcaagaccugcggcuucguggacgagagaggccuguacaagagccugaagggcgccugcaagcugaagcugugcggcgugcugggccugagacugauggacggcaccuggguggccaugcaggccagcgacgagaccaaguggugcccccccgaccagcuggugaaccugcacgacuucagaagcgacgagaucgagcaccuggugguggaggagcuggugaagaagagagaggagugccuggacgcccuggagagcaucaugaccaccaagagcgugagcuucagaagacugagccaccugagaaagcuggugcccggcuucggcaaggccuacaccaucuucaacaagacccugauggaggccgacgcccacuacaagagcgugagaaccuggaacgagaucauccccagcaagggcugccugagagugggcggcagaugcuacccccacgugaacggcguguucuucaacggcaucauccugggccccgacggccacgugcugauccccgagaugcagagcagccugcugcagcagcacauggagcugcuggagagcagcgugaucccccugaugcacccccuggccgaccccagcaccguguucaaggacggcgacgaggccgagaacuucguggaggugcaccugcccgacgugcacaagcagaucagcggcguggaccugggccugcccaacuggggcaaguacgugcuggugagcgccggcgugcugaucgcccugaugcugaucaucuuccugaugaccugcugcggcagagugaacagacccaagagcacccagcacaaccugggcggcaccggcagagaggugagcgugaccccccagagcggcaaggugaucagcagcugggagagcuacaagagcggcggcgagaccagacuguga

SEQ ID NO: 191630 - RNA, 1575 nt, Artificial Sequence
  derived and/or modified CDS sequence (opt4) from glycoprotein__RABV__KF709075.1
auggugccccaggcccugcuguucgugccccugcugguguucagcaugugcuucggcaaguuccccaucuacaccauccccgacaagcugggccccuggagccccaucgacauccaccaccugagcugccccaacaaccuggugguggaggacgagggcugcaccaaccugagcggcuucagcuacauggagcugaaggugggcuacaucagcgccaucaaggugaacggcuucaccugcaccggcguggugaccgaggccgagaccuacaccaacuucgugggcuacgugaccaccaccuucaagagaaagcacuucagacccacccccgacgccugcagagccgccuacaacuggaagauggccggcgaccccagauacgaggagagccugcacaaccccuaccccgacuaccacuggcugagaaccgugaagaccaccaaggagagccuggugaucaucagccccagcguggccgaccuggaccccuacgacaagagccugcacagcagaguguuccccaacggcaagugcagcggcaucaccaucagcagcaccuacugccccaccaaccacgacuacaccaucuggcugcccgagaaccccagacugggcaccagcugcgacaucuucaccaacagcagaggcaagagagccagcaagggcagcaagaccugcggcuucguggacgagagaggccuguacaagagccugaagggcgccugcaagcugaagcugugcggcgugcugggccugagacugauggacggcaccuggguggccaugcaggccagcgacgagaccaaguggugcccccccgaccagcuggugaaccugcacgacuucagaagcgacgagaucgagcaccuggugguggaggagcuggugaagaagagagaggagugccuggacgcccuggagagcaucaugaccaccaagagcgugagcuucagaagacugagccaccugagaaagcuggugcccggcuucggcaaggccuacaccaucuucaacaagacccugauggaggccgacgcccacuacaagagcgugagaaccuggaacgagaucauccccagcaagggcugccugagagugggcggcagaugccacccccacgugaacggcguguucuucaacggcaucauccugggccccgacggccacgugcugauccccgagaugcagagcagccugcugcagcagcacauggagcugcuggagagcagcgugaucccccugaugcacccccuggccgaccccagcaccguguucaaggacggcgacgaggccgagaacuucguggaggugcaccugcccgacgugcacaagcagaucagcggcguggaccugggccugcccaacuggggcaaguacgugcuggugagcgccggcgugcugaucgcccugaugcugaucaucuuccugaugaccugcugcggcagagugaacagacccgagagcacccagcacaaccugggcggcaccggcagagaggugagcgugaccccccagagcggcaaggugaucagcagcugggagagcuacaagagcggcggcgagaccagacuguga

SEQ ID NO: 191631 - RNA, 1575 nt, Artificial Sequence; identical to SEQ ID NO: 191630
  derived and/or modified CDS sequence (opt4) from glycoprotein__RABV__KF709076.1

SEQ ID NO: 191632 - RNA, 1575 nt, Artificial Sequence
  derived and/or modified CDS sequence (opt4) from glycoprotein__RABV__KF709077.1
auggugccccaggcccugcuguucgugccccugcugguguucagcaugugcuucggcaaguuccccaucuacaccauccccgacaagcccggccccuggagccccaucgacauccaccaccugagcugccccaacaaccuggugguggaggacgagggcugcaccaaccugagcggcuucagcuacauggagcugaaggugggcuacaucagcgccaucaaggugaacggcuucaccugcaccggcguggugaccgaggccgagaccuacaccaacuucgugggcuacgugaccaccaccuucaagagaaagcacuucagacccacccccgacgccugcagagccgccuacaacuggaagauggccggcgaccccagauacgaggagagccugcacaaccccuaccccgacuaccacuggcugagaaccgugaagaccaccaaggagagccuggugaucaucagccccagcguggccgaccuggaccccuacgacaagagccugcacagcagaguguuccccaacgagaagugcagcggcaucaccaucagcagcaccuacugccccaccaaccacgacuacaccaucuggcugcccgagaaccccagacugggcaccagcugcgacaucuucaccaacagcagaggcaagagagccagcaagggcagcaagaccugcggcuucguggacgagagaggccuguacaagagccugaagggcgccugcaagcugaagcugugcggcgugcugggccugagacugauggacggcaccuggguggccaugcaggccagcgacgagaccaaguggugcccccccgaccagcuggugaaccugcacgacuucagaagcgacgagaucgagcaccuggugguggaggagcuggugaagaagagagaggagugccuggacgcccuggagagcaucaugaccaccaagagcgugagcuucagaagacugagccaccugagaaagcuggugcccggcuucggcaaggccuacaccaucuucaacaagacccugauggaggccgacgcccacuacaagagcgugagaaccuggaacgagaucauccccagcaagggcugccugagagugggcggcagaugccacccccacgugaacggcguguucuucaacggcaucauccugggccccgacggccacgugcugauccccgagaugcagagcagccugcugcagcagcacauggagcugcuggagagcagcgugaucccccugaugcacccccuggccgaccccagcaccguguucaaggacggcgacgaggccgagaacuucguggaggugcaccugcccgacgugcacaagcagaucagcggcguggaccugggccugcccaacuggggcaaguacgugcuggugagcgccggcgugcugaucgcccugaugcugaucaucuuccugaugaccugcugcggcagagugaacagacccgagagcacccagcacaaccugggcggcaccggcagagaggugagcgugaccccccagagcggcaaggugaucagcagcugggagagcuacaagagcggcggcgagaccagacuguga

SEQ ID NO: 191633 - RNA, 1575 nt, Artificial Sequence
  derived and/or modified CDS sequence (opt4) from glycoprotein__RABV__KF709078.1
auggugccccaggcccugcuguucgugccccugcugguguucagcaugugcuucggcaaguuccccaucuacaccauccccgacaagcugggccccuggagccccaucgacauccaccaccugagcugccccaacaaccuggugguggaggacgagggcugcaccaaccugagcggcuucagcuacauggagcugaaggugggcuacaucagcgccaucaaggugaacggcuucaccugcaccggcguggugaccgaggccgagaccuacaccaacuucgugggcuacgugaccaccaccuucaagagaaagcacuucagacccacccccgacgccugcagagccgccuacaacuggaagauggccggcgaccccagauacgaggagagccugcacaaccccuaccccgacuaccacuggcugagaaccgugaagaccaccaaggagagccuggugaucaucagccccagcguggccgaccuggaccccuacgacaagagccugcacagcagagugcugcccaacggcaagugcagcggcaccaccaccagcagcaccuacugccccaccaaccacgacuacaccaucuggcugcccgagaaccccagacugggcaccagcugcgacaucuucaccaacagcagaggcaagagagccagcaagggcagcaagaccugcggcuucguggacgagagaggccuguacaagagccugaagggcgccugcaagcugaagcugugcggcgugcugggccugagacugauggacggcaccuggguggccaugcaggccagcgacgagaccaaguggugcccccccgaccagcuggugaaccugcacgacuucagaagcgacgagaucgagcaccuggugguggaggagcuggugaagaagagagaggagugccuggacgcccuggagagcaucaugaccaccaagagcgugagcuucagaagacugagccaccugagaaagcuggugcccggcuucggcaaggccuacaccaucuucaacaagacccugauggaggccgacgcccacuacaagagcgugagaaccuggaacgagaucauccccagcaagggcugccugagagugggcggcagaugccacccccacgugaacggcguguucuucaacggcaucauccugggccccgacggccacgugcugauccccgagaugcagagcagccugcugcagcagcacauggagcugcuggagagcagcgugaucccccugaugcacccccuggccgaccccagcaccguguucaaggacggcgacgaggccgagaacuucguggaggugcaccugcccgacgugcacaagcagaucagcggcguggaccugggccugcccaacuggggcaaguacgugcuggugagcgccggcgugcugaucgcccugaugcugaucaucuuccugaugaccugcugcggcagagugaacagacccgagagcacccagcacaaccugggcggcaccggcagagaggugagcgugaccccccagagcggcaaggugaucagcagcugggagagcuacaagagcggcggcgagaccagacuguga

SEQ ID NO: 191634 - RNA, 1575 nt, Artificial Sequence
  derived and/or modified CDS sequence (opt4) from glycoprotein__RABV__KF709080.1
auggugccccaggcccugcuguucgugccccugcugguguucagcaugugcuucggcaaguuccccaucuacaccauccccgacaagcugggccccuggagccccaucgacauccaccaccugagcugccccaacaaccuggugguggaggacgagggcugcaccaaccugagcggcuucagcuacauggagcugaaggugggcuacaucagcgccaucaaggugaacggcuucaccugcaccggcguggugaccgaggccgagaccuacaccaacuucgugggcuacgugaccaccaccuucaagagaaagcacuucagacccacccccgacgccugcagagccgccuacaacuggaagauggccggcgaccccagauacgaggagagccugcacaaccccuaccccgacuaccacuggcugagaaccgugaagaccaccaaggagagccuggugaucaucagccccagcguggccgaccuggaccccuacgacaagagccugcacagcagaguguuccccaacggcaagugcagcggcaucaccaucagcagcaccuacugccccaccaaccacgacuacaccaucuggcugcccgagaaccccagacugggcaccagcugcgacaucuucaccaacagcagaggcaagagagccagcaagggcagcaagaccugcggcuucguggacgagagaggccuguacaagagccugaagggcgccugcaagcugaagcugugcggcgugcugggccugagacugauggacggcaccuggguggccaugcaggccagcgacgagaccaaguggugcccccccgaccagcuggugaaccugcacgacuucagaagcgacgagaucgagcaccuggccguggaggagcuggugaagaagagagaggagugccuggacgcccuggagagcaucaugaccaccaagagcgugagcuucagaagacugagccaccugagaaagcuggugcccggcuucggcaaggccuacaccaucuucaacaagacccugauggaggccgacgcccacuacaagagcgugagaaccuggaacgagaucauccccagcaagggcugccugagagugggcggcagaugccacccccacgugaacggcguguucuucaacggcaucauccugggccccgacggccacgugcugauccccgagaugcagagcagccugcugcagcagcacauggagcugcuggagagcagcgugaucccccugaugcacccccuggccgaccccagcaccguguucaaggacggcgacgaggccgagaacuucguggaggugcaccugcccgacgugcacaagcagaucagcggcguggaccugggccugcccaacuggggcaaguacgugcuggugagcgccggcgugcugaucgcccugaugcugaucaucuuccugaugaccugcugcggcagagugaacagacccgagagcacccagcacaaccugggcggcaccggcagagaggugagcgugaccccccagagcggcaaggugaucagcagcugggagagcuacaagagcggcggcgagaccagacuguga

SEQ ID NO: 191635 - RNA, 1575 nt, Artificial Sequence; identical to SEQ ID NO: 191446
  derived and/or modified CDS sequence (opt4) from glycoprotein__RABV__KF726852.1

SEQ ID NO: 191636 - RNA, 1575 nt, Artificial Sequence
  derived and/or modified CDS sequence (opt4) from glycoprotein__RABV__KF726853.1
augaucagccaggccuuccuguucgugccccugcuggccuucagccccugcuucggcaaguuccccaucuacaccauccccgacaagcugggccccuggagccccaucgacauccaccaccugagcugccccaacaaccuggugguggaggacgagggcugcaccaaccugagcggcuucagcuacauggagcugaaggugggcuacaucagcgccaucaaggugaacggcuucaccugcaccggcguggugaccgaggccgagaccuacaccaacuucgugggcuacgugaccaccaccuucaagagaaagcacuucagacccaugcccgacgccugcagaaccgccuacagcuggaagauggccggcgaccccagauacgaggagagccugcacaaccccuaccccgacuaccacuggcugagaaccgugaagaccaccaaggagagccuggugaucaucagccccagcguggccgaccuggaccccuacgacaagagccugcacagcagaguguuccccggcggcaagugcagcggccugaccgugagcagcaccugcugcagcaccaaccacgacuacaccaucuggaugcccgagaaccccagacugggcaccagcugcgacaucuucaccaacagcagaggcaagagagccagcaagggcggcaagaccugcggcuucguggacgagagaggccuguacaagagccugaagggcgccugcaagcugaagcugugcggcgugagcggccugagacugauggacggcaccuggguggccauccagaccagcgacgagaucaaguggugcagccccgaccagcuggugaaccugcacgaccugcacagcgacgagaucgagcaccuggugguggaggagcuggugaagaagagagaggagugccuggacgcccuggagagcaucaugaccaccaagagcgugagcuucagaagacugagccaccugagaaagcuggugcccggcuucggcaaggccuacaccaucuucaacaagacccugauggaggccgacgcccacuacaagagcaucagaaccuggaacgagaucauccccagcaagggcugccugagagugggcggcagaugccacccccacgugaacggcguguucuucaacggcaucauccugggccccgacggccacgugcugauccccgagaugcagagcagccugcugcaccagcacauggagcugcuggagagcagcgugaucccccugaugcacccccuggccgaccccagcaccguguucaaggacggcgacgaggccgaggacuucguggaggugcaccugcccgacgcccacaagcagaucagcggcguggaccugggccugcccaacuggggcaaguacgugcugaugagcgccggcgcccugaccgcccugaugcugaugaucuuccugaugaccugcugcagaaagaccaacagagccgagagcaugccccacagccccggcgagaccggcagaaaggugagccugaccagccacaacggcagagugaucagcagcugggagagcuacaagagcggcggcgagaccaagcuguga

SEQ ID NO: 191637 - RNA, 1575 nt, Artificial Sequence
  derived and/or modified CDS sequence (opt4) from glycoprotein__RABV__KJ004416.1
augaucccccaggugcugcuguucgugccccugcugguguucagcagcugcuucggcaaguuccccaucuacaccauccccgacaagcugggccccuggagccccaucgacauccaccaccugagcugccccaacaaccuggugguggaggacgagggcugcaccaaccugagcggcuucagcuacauggagcugaaggugggcuacaucagcgccaucaaggugaacggcuucaccugcaccggcguggugaccgaggccgagaccuacaccaacuucgugggcuacgugaccaccaccuucaagagaaagcacuucagacccaugcccgacgccugcagagccgccuacaacuggaagauggccggcgaccccagauacgaggagagccugcacaaccccuaccccgacuaccacuggcugagaaccgugaagaccaccaaggagagccuggugaucaucagccccagcguggccgaccuggaccccuacgacaagagccugcacagcagaguguuccccggcggcaagugcagcggcaucaccgugagcagcaccugcugcagcaccaaccacgacuacaccaucuggaugcccgagaaccccagacugggcaccagcugcgacaucuucaccaacagcagaggcaagagagccagcaagggcggcaagaccugcggcuucguggacgagagaggccuguacaagagccugaagggcgccugcaagcugaagcugugcggcgugcugggccugagacugauggacggcaccuggguggccauccagaccagcgacgagaccaaguggugcagccccgaccagcuggugaaccugcacgacuuccacagcgacgagaucgagcaccuggugguggaggagcuggugaagaagagagaggagugccuggacgcccuggagaccaucaugaccaccaagagcgugagcuucagaagacugagccaccugagaaagcuggugcccggcuucggcaaggccuacaccaucuucaacaagacccugauggaggccgacgcccacuacaagagcaucagaaccuggaacgagaucauccccagcaagggcugccugagagugggcggcagaugccacccccacgugaacggcguguucuucaacggcaucauccugggccccgacggccacgugcugauccccgagaugcagagcagccugcugcaccagcacauggagcugcuggagagcagcgugaucccccugaugcacccccuggccgaccccagcaccguguucaaggacggcgacgaggccgaggacuucguggaggugcaccugcccgacgugcacaagcagaucagcggcguggaccugggccugcccaacuggggcaaguacgugcugaucagcgccggcgcccugaccgcccugauguucaccaucuuccugaugaccugcugcagaaagaccaacagagccggcagcauccagcugagccccggcgagaccggcagaaaggugagcgugaccagccacaacggcagagugaucagcagcugggagagcuacaagagcggcagcgagaccaagcuguga

SEQ ID NO: 191638 - RNA, 1575 nt, Artificial Sequence
  derived and/or modified CDS sequence (opt4) from glycoprotein__RABV__KJ174608.1
augaucccccaggcccugcugagcgugccccugcugaucagcagccugugcuucggcaaguuccccaucuacaccauccccgagaagcugggccccuggagccccaucgacauccaccaccugagcugccccaacaaccuggugguggaggacgagggcugcaacagccugagcggcuucagcuacauggagcugaaggugggcuacaucagcgccaucaaggugaacggcuucaccugcaccggcguggugaccgaggccgagaccuacaccaacuucgugggcuacgugaccaccaccuucaagagaaagcacuucagacccaugcccgacgccugcagagccgccuacaacuggaagaccgccggcgaccccagauacgaggagagccugcacaaccccuaccccgacuaccacuggcugagaaccgugaagaccaccaaggagagccugaucaucaucagccccagcguggccgaccuggaccccuacgacaagagccugcacagcagaaucuuccccggcggcaagugccugggcaucaccaucagcagcaccuacugcagcaccaaccacgacuacaccaucuggaugcccgaggaggccagacugggcaccagcugcgacaucuucaccaacagcaagggcaagagagccagcaagggcggcagaaccugcggcuucguggacgagagaggccuguacaagagccugaagggcgccugcaagcugaagcugugcggcgugcccggccugagacugauggacggcaccuggguggccauccagacccccaacgagaccaaguggugcagccccgaccagcuggugaacgugcacgacuucagaagcgacgagaucgagcaccuggugguggaggagcugaucagaaagagagaggagugccuggacgcccuggagagcaucaugaccaccaagagcgugagcuucagaagacugagcaaccugagaaagcuggugcccggcuucggcaaggccuacaccaucuucaacaagacccugauggaggccgacgcccacuacaagagcgugagaaccuggaacgagaucauccccagcagaggcugccugaaggugggcggcagaugccacccccacgugaacggcguguucuucaacggcaucauccugggccccgacggccacauccugauccccgagaugcagagcagccugcugcagcagcacauggagcugcuggagagcagcgugaucccccugauccacccccuggccgaccccagcaccguguucaaggacggcgacgaggccgaggacuucguggaggugcaccugcccgacgugcaccagcaggugagcggcguggaccugggccugcccgacuggggcaaguacgugcugaugagcgccggcgcccuggccaccgugaugcugaccaucuuccugaucaccugcugcagaagagugaagagaaccgagagcauccagcagagccugggcgagagcggcagaaaggugagcgugaccccccagaacggcaaggugaugagcagcugggaguacuacaagagcggcggcggcaccagacuguga

SEQ ID NO: 191639 - RNA, 1575 nt, Artificial Sequence; identical to SEQ ID NO: 191475
  derived and/or modified CDS sequence (opt4) from glycoprotein__RABV__KJ174609.1

SEQ ID NO: 191640 - RNA, 1575 nt, Artificial Sequence
  derived and/or modified CDS sequence (opt4) from glycoprotein__RABV__KJ174615.1
augaucccccaggcccugcugagcgugccccugcugaucagcagccugugcuucggcaaguuccccaucuacaccauccccgagaagcugggccccuggagccccaucgacauccaccaccugagcugccccaacaaccuggugguggaggacgagggcugcaacagccugagcggcuucagcuacauggagcugaaggugggcuacaucagcgccaucaaggugaacggcuucaccugcaccggcguggugaccgaggccgagaccuacaccaacuucgugggcuacgugaccaccaccuucaagagaaagcacuucagacccauggccgacgccugcagagccgccuacaacuggaagaccgccggcgaccccagauacgaggagagccugcacaaccccuaccccgacuaccacuggcugagaaccgugaagaccaccaaggagagccugaucaucaucagccccagcguggccgaccuggaccccuacgacaagagccugcacagcagaaucuuccccggcggcaagugccugggcaucaccaucagcagcaccuacugcagcaccaaccacgacuacaccaucuggaugcccgaggaggccagacugggcaccagcugcgacaucuucaccaacagcaagggcaagagagccagcaagggcggcagaaccugcggcuucguggacgagagaggccuguacaagagccugaagggcgccugcaagcugaagcugugcggcgugcccggccugagacugauggacggcaccuggguggccauccagacccccaacgagaccaaguggugcagccccgaccagcuggugaacgugcacgacuucagaagcgacgagaucgagcaccuggugguggaggagcugaucagaaagagagaggagugccuggacgcccuggagagcaucaugaccaccaagagcgugagcuucagaagacugagcaaccugagaaagcuggugcccggcuucggcaaggccuacaccaucuucaacaagacccugauggaggccgacgcccacuacaagagcgugagaaccuggaacgagaucauccccagcagaggcugccugaaggugggcggcagaugccacccccacgugaacggcguguucuucaacggcaucauccugggccccgacggccacauccugauccccgagaugcagagcagccugcugcagcagcacauggagcugcuggagagcagcgugaucccccugauccacccccuggccgaccccagcaccguguucaaggacggcgacgaggccgaggacuucguggaggugcaccugcccgacgugcaccagcaggugagcggcguggaccugggccugcccgacuggggcaaguacgugcugaugagcgccggcgcccuggccaccgugaugcugaccaucuuccugaucaccugcugcagaagagugaagagaaccgagagcauccagcagggccccggcgagagcggcagaaagcugagcgugaccccccagaacggcaaggugaugagcagcugggaguacuacaagagcggcggcggcaccagacuguga

SEQ ID NO: 191641 - RNA, 1575 nt, Artificial Sequence
  derived and/or modified CDS sequence (opt4) from glycoprotein__RABV__KJ174616.1
augaucccccaggcccugcugagcgugccccugcugaucagcagccugugcuucggcaaguuccccaucuacaccauccccgagaagcugggccccuggagccccaucgacauccaccaccugagcugccccaacaaccuggugguggaggacgagggcugcaacagccugagcggcuucagcuacauggagcugaaggugggcuacaucagcgccaucaaggugaacggcuucaccugcaccggcguggugaccgaggccgagaccuacaccaacuucgugggcuacgugaccaccaccuucaagagaaagcacuucagacccaugcccgacgccugcagagccgccuacaacuggaagaccgccggcgaccccagauacgaggagagccugcacaaccccuaccccgacuaccacuggcugagaaccgugaagaccaccaaggagagccugaucaucaucagccccagcguggccgaccuggaccccuacgacaagagccugcacagcagaaucuuccccggcggcaagugccugggcaucaccaucagcagcaccuacugcagcaccaaccacgacuacaccaucuggaugcccgaggaggccagacugggcaccagcugcgacaucuucaccaacagcaagggcaagagagccagcaagggcggcagaaccugcggcuucguggacgagagaggccuguacaagagccugaagggcgccugcaagcugaagcugugcggcgugcccggccugagacugauggacggcaccuggguggccauccagacccccaacgagaccaaguggugcagccccgaccagcuggugaacgugcacgacuucagaagcgacgagaucgagcaccuggugguggaggagcugaucagaaagagagaggagugccuggacgcccuggagagcaucaugaccaccaagagcgugagcuucagaagacugagcaaccugagaaagcuggugcccggcuucggcaaggccuacaccaucuucaacaagacccugauggaggccgacgcccacuacaagagcgugagaaccuggaacgagaucauccccagcaagggcugccugaaggugggcggcagaugccacccccacgugaacggcguguucuucaacggcaucauccugggccccgacggccacauccugauccccgagaugcagagcagccugcugcagcagcacauggagcugcuggagagcagcgugaucccccugauccacccccuggccgaccccagcaccguguucaaggacggcgacgaggccgaggacuucguggaggugcaccugcccgacgugcaccagcaggugagcggcguggaccugggccugcccgacuggggcaaguacgugcugaugagcgccggcgcccuggccaccgugaugcugaccaucuuccugaucaccugcugcagaagagugaagagaaccgagagcgugcagcagggccugggcgagagcggcagaaaggugagcguggccccccagaacggcaaggugaugagcagcugggaguacuacaagagcggcggcggcaccagacuguga

SEQ ID NO: 191642 - RNA, 1575 nt, Artificial Sequence
  derived and/or modified CDS sequence (opt4) from glycoprotein__RABV__KJ174617.1
augaucccccaggcccugcugagcgugccccugcugaucagcagccugugcuucggcaaguuccccaucuacaccauccccgagaagcugggccccuggagccccaucgacauccaccaccugagcugccccaacaaccuggugguggaggacgagggcugcaacagccugagcggcuucagcuacauggagcugaaggugggcuacaucagcgccaucaaggugaacggcuucaccugcaccggcguggugaccgaggccgagaccuacaccaacuucgugggcuacgugaccaccaccuucaagagaaagcacuucagacccaugcccgacgccugcagagccgccuacaacuggaagaccgccggcgaccccagauacgaggagagccugcacaaccccuaccccgacuaccacuggcugagaaccgugaagaccaccaaggagagccugaucaucaucagccccagcguggccgaccuggaccccuacgacaagagccugcacagcagaaucuuccccggcggcaagugccugggcaucaccaucagcagcaccuacugcagcaccaaccacgacuacaccaucuggaugcccgaggaggccagacugggcaccagcugcgacaucuucaccaacagcaagggcaagagagccagcaagggcggcagaaccugcggcuucguggacgagagaggccuguacaagagccugaagggcgccugcaagcugaagcugugcggcgugcccggccugagacugauggacggcaccuggguggccauccagacccccaacgagaccaaguggugcagccccgaccagcuggugaacgugcacgacuucagaagcgacgagaucgagcaccuggugguggaggagcugaucagaaagagagaggagugccuggacgcccuggagagcaucaugaccaccaagagcgugagcuucagaagacugagcaaccugagaaagcuggugcccggcuucggcaaggccuacaccaucuucaacaagacccugauggaggccgacgcccacuacaagagcgugagaaccuggaacgagaucauccccagcagaggcugccugaaggugggcggcagaugccacccccacgugaacggcguguucuucaacggcaucauccugggccccgacggccacauccugauccccgagaugcagagcagccugcugcagcagcacauggagcugcuggagagcagcgugaucccccugauccacccccuggccgaccccagcaccguguucaaggacggcgacgaggccgaggacuucguggaggugcaccugcccgacgugcaccagcaggugagcggcguggaccugggccugcccgacuggggcaaguacgugcugaugagcgccggcgcccuggccaccgugaugcugaccaucuuccugaucaccugcugcagaagagugaagagaaccgagagcauccagcagggccugggcgagagcggcagaaaggugagcguggccccccagaacggcaaggugaugagcagcugggaguacuacaagagcggcggcggcaccagacuguga

SEQ ID NO: 191643 - RNA, 1575 nt, Artificial Sequence
  derived and/or modified CDS sequence (opt4) from glycoprotein__RABV__KJ174618.1
augaucccccaggcccugcuguucgugcccuuccuguuccccagccugugccugggcaaguuccccaucuacaccauccccgagaagcugggccccuggagccccaucgacauccaccaccugagcugccccaacaaccuggugguggaggacgagggcugcgacagccugagcggcuucagcuacauggagcugaaggugggcuacaucagcgccaucaaggugaacggcuucaccugcaccggcguggugaccgaggccgagaccuacaccaacuucgugggcuacgugaccaccaccuucaagagaaagcacuucagacccaugcccgacgccugcagagccgccuacaacuggaagaccgccggcgaccccagauacgaggagagccugcacaaccccuaccccgacuaccacuggcugagaaccgugaagaccaccaaggagagccugaucaucaucagccccagcguggccgaccuggaccccuacgacaagagccugcacagcagaguguuccccggcggcaagugccugggcaucaccaucagcagcaccuacugcagcaccaaccacgacuacaccaucuggaugcccgaggaggccagacugggcaccagcugcgacaucuucaccaacagcaagggcaagagagccagcaagggcggcagaaccugcggcuucguggacgagagaggccuguacaagagccugaagggcgccugcaagcugaagcugugcggcgugcccggccugagacugauggacggcaccuggguggccauccagacccccggcgagaccaaguggugcagccccgaccagcuggugaaccugcacgacuucagaagcgacgagaucgagcaccuggugguggaggagcugaucaagaagagagaggagugccuggacgcccuggagagcaucaugaccaccaagagcgugagcuucagaagacugagcaaccugagaaagcuggugcccggcuucggcaaggccuacaccaucuucaacaagacccugauggaggccgacgcccacuacaagagcaucagaaccugggacgagaucauccccagcaagggcugccugagagugggcggcagaugccacccccacgugaacggcguguucuucaacggcaucauccugggccccgacggccacgugcugauccccgagaugcagagcagccugcugcagcagcacauggagcugcuggagagcagcgugaucccccugauccacccccuggccgaccccagcaccguguucaaggacggcgacgaggccgaggacuucguggaggugcaccugcccgacgugcacgagcaggugagcggcguggaccugggccugcccaacuggggcaaguacgugcugaucagcgccggcgugcuggccaccgugauccugaccaucuuccugcugaccugcugcagaagagugaacagaaccaagcccaagcagcagagccugggcgacagcggcagaaaggugagcgugaccccccagaacggcaaggugaugagcagcugggaguacuacaagagcgagggcagaaccagccuguga

SEQ ID NO: 191644 - RNA, 1575 nt, Artificial Sequence
  derived and/or modified CDS sequence (opt4) from glycoprotein__RABV__KJ174619.1
augaucccccaggccuuccuguucgugcccuuccuguuccccagccugugccugggcaaguuccccaucuacaccauccccgagaagcugggccccuggagccccaucgacauccaccaccugagcugccccaacaaccuggugguggaggacgagggcugcgacagccugagcggcuucagcuacauggagcugaaggugggcuacaucagcgccaucaaggugaacggcuucaccugcaccggcguggugaccgaggccgagaccuacaccaacuucgugggcuacgugaccaccaccuucaagagaaagcacuucagacccaugcccgacgccugcagagccgccuacaacuggaagaccgccggcgaccccagauacgaggagagccugcacaaccccuaccccgacuaccacuggcugagaaccgugaagaccaccaaggagagccugaucaucaucagccccagcguggccgaccuggaccccuacgacaagagccugcacagcagaguguuccccggcggcaagugccugggcaucaccaucagcagcaccuacugcagcaccaaccacgacuacaccaucuggaugcccgaggaggccagacugggcaccagcugcgacaucuucaccaacagcaagggcaagagagccagcaagggcggcagaaccugcggcuucguggacgagagaggccuguacaagagccugaagggcgccugcaagcugaagcugugcggcgugcccggccugagacugauggacggcaccuggguggccauccagacccccggcgagaccaaguggugcagccccgaccagcuggugaaccugcacgacuucagaagcgacgagaucgagcaccuggugguggaggagcugaucaagaagagagaggagugccuggacgcccuggagagcaucaugaccaccaagagcgugagcuucagaagacugagcaaccugagaaagcuggugcccggcuucggcaaggccuacaccaucuucaacaagacccugauggaggccgacgcccacuacaagagcaucagaaccugggacgagaucauccccagcaagggcugccugagagugggcggcagaugccacccccacgugaacggcguguucuucaacggcaucauccugggccccgacggccacgugcugauccccgagaugcagagcagccugcugcagcagcacauggagcugcuggagagcagcgugaucccccugauccacccccuggccgaccccagcaccguguucaaggacggcgacgaggccgaggacuucguggaggugcaccugcccgacgugcacgagcaggugagcggcguggaccugggccugcccaacuggggcaaguacgugcugaucagcgccggcgugcuggccaccgugauccugaccaucuuccugcugaccugcugcagaagagugaacagaaccaagcccaagcagcagagccugggcgagagcggcagaaaggugagcgugaccccccagaacggcaaggugaugagcagcugggaguacuacaagagcgagggcagaaccagccuguga

SEQ ID NO: 191645 - RNA, 1575 nt, Artificial Sequence
  derived and/or modified CDS sequence (opt4) from glycoprotein__RABV__KJ174620.1
augaucccccaggcccugcuguucgugcccuuccuguuccccagccugugccugggcaaguuccccaucuacaccauccccgagaagcugggccccuggagccccaucgacauccaccaccugagcugccccaacaaccuggugguggaggacgagggcugcgacagccugagcggcuucagcuacauggagcugaaggugggcuacaucagcgccaucaaggugaacggcuucaccugcaccggcguggugaccgaggccgagaccuacaccaacuucgugggcuacgugaccaccaccuucaagagaaagcacuucagacccaugcccgacgccugcagagccgccuacaacuggaagaccgccggcgaccccagauacgaggagagccugcacaaccccuaccccgacuaccacuggcugagaaccgugaagaccaccaaggagagccugaucaucaucagccccagcguggccgaccuggaccccuacgacaagagccugcacagcagaguguuccccggcggcaagugccugggcaucaccaucagcagcaccuacugcagcaccaaccacgacuacaccaucuggaugcccgaggaggccagacugggcaccagcugcgacaucuucaccaacagcaagggcaagagagccagcaagggcggcaagaccugcggcuucguggacgagagaggccuguacaagagccugaagggcgccugcaagcugaagcugugcggcgugcccggccugagacugauggacggcaccuggguggccauccagacccccggcgagaccaaguggugcagccccgaccagcuggugaaccugcacgacuucagaagcgacgagaucgagcaccuggugguggaggagcugaucaagaagagagaggagugccuggacgcccuggagagcaucaugaccaccaagagcgugagcuucagaagacugagcaaccugagaaagcuggugcccggcuucggcaaggccuacaccaucuucaacaagacccugauggaggccgacgcccacuacaagagcaucagaaccugggacgagaucauccccagcaagggcugccugagagugggcggcagaugccacccccacgugaacggcguguucuucaacggcaucauccugggccccgacggccacgugcugauccccgagaugcagagcagccugcugcagcagcacauggagcugcuggagagcagcgugaucccccugauccacccccuggccgaccccagcaccguguucaaggacggcgacgaggccgaggacuucguggaggugcaccugcccgacgugcacgagcaggugagcggcguggaccugggccugcccaacuggggcaaguacgugcugaucagcgccggcgugcuggccaccgugauccugaccaucuuccugcugaccugcugcagaagagugaacagaaccaagcccaagcagcagagccugggcgagagcggcagaaaggugagcgugaccccccagaacggcaaggugaugagcagcugggaguacuacaagagcgagggcagaaccagccuguga

SEQ ID NO: 191646 - RNA, 1575 nt, Artificial Sequence
  derived and/or modified CDS sequence (opt4) from glycoprotein__RABV__KJ174622.1
augaucccccaggcccugcuguucgugcccuuccuguuccccagccugugccugggcaaguuccccaucuacaccauccccgagaagcugggccccuggagccccaucgacauccaccaccugagcugccccaacaaccuggugguggaggacgagggcugcgacagccugagcggcuucagcuacauggagcugaaggugggcuacaucagcgccaucaaggugaacggcuucaccugcaccggcguggugaccgaggccgagaccuacaccaacuucgugggcuacgugaccaccaccuucaagagaaagcacuucagacccaugcccgacgccugcagagccgccuacaacuggaagaccgccggcgaccccagauacgaggagagccugcacaaccccuaccccgacuaccacuggcugagaaccgugaagaccaccaaggagagccugaucaucaucagccccagcguggccgaccuggaccccuacgacaagagccugcacagcagaguguuccccggcggcaagugccugggcaucaccaucagcagcaccuacugcagcaccaaccacgacuacaccaucuggaugcccgaggaggccagacugggcaccagcugcgacaucuucaccaacagcaagggcaagagagccagcaagggcggcagaaccugcggcuucguggacgagagaggccuguacaagagccugaagggcgccugcaagcugaagcugugcggcgugcccggccugagacugauggacggcaccuggguggccauccagacccccggcgagaccaaguggugcagccccgaccagcuggugaaccugcacgacuucagaagcgacgagaucgagcaccuggugguggaggagcugaucaagaagagagaggagugccuggacgcccuggagagcaucaugaccaccaagagcgugagcuucagaagacugagcaaccugagaaagcuggugcccggcuucggcaaggccuacaccaucuucaacaagacccugauggaggccgacgcccacuacaagagcaucagaaccugggacgagaucauccccagcaagggcugccugagagugggcggcagaugccacccccacgugaacggcguguucuucaacggcaucauccugggccccgacggccacgugcugauccccgagaugcagagcagccugcugcagcagcacauggagcugcuggagagcagcgugaucccccugauccacccccuggccgaccccagcaccguguucaaggacggcgacgaggccgaggacuucguggaggugcaccugcccgacgugcacgagcaggugagcggcguggaccugggccugcccaacuggggcaaguacgugcugaucagcgccggcgugcuggccaccgugauccugaccguguuccugcugaccugcugcagaagagugaacagaaccaagcccaagcagcagagccugggcgagagcggcagaaaggugagcgugaccccccagaacggcaaggugaugagcagcugggaguacuacaagagcgagggcagaaccagccuguga

SEQ ID NO: 191647 - RNA, 1575 nt, Artificial Sequence
  derived and/or modified CDS sequence (opt4) from glycoprotein__RABV__KJ174623.1
augaucccccaggcccugcuguucgugcccuuccuguuccccagccugugccugggcaaguuccccaucuacaccauccccgagaagcugggccccuggagccccaucgacauccaccaccugagcugccccaacaaccuggugguggaggacgagggcugcgacagccugagcggcuucagcuacauggagcugaaggugggcuacaucagcgccaucaaggugaacggcuucaccugcaccggcguggugaccgaggccgagaccuacaccaacuucgugggcuacgugaccaccaccuucaagagaaagcacuucagacccaugcccgacgccugcagagccgccuacaacuggaagaccgccggcgaccccagauacgaggagagccugcacaaccccuaccccgacuaccacuggcugagaaccgugaagaccaccaaggagagccugaucaucaucagccccagcguggccgaccuggaccccuacgacaagagccugcacagcagaguguuccccggcggcaagugccugggcaucaccgugagcagcaccuacugcagcaccaaccacgacuacaccaucuggaugcccgaggaggccagacugggcaccagcugcgacaucuucaccaacagcaagggcaagagagccagcaagggcggcagaaccugcggcuucguggacgagagaggccuguacaagagccugaagggcgccugcaagcugaagcugugcggcgugcccggccugagacugauggacggcaccuggguggccauccagacccccggcgagaccaaguggugcagccccgaccagcuggugaaccugcacgacuucagaagcgacgagaucgagcaccuggugguggaggagcugaucaagaagagagaggagugccuggacgcccuggagagcaucaugaccaccaagagcgugagcuucagaagacugagcaaccugagaaagcuggugcccggcuucggcaaggccuacaccaucuucaacaagacccugauggaggccgacgcccacuacaagagcgugagaaccugggacgagaucauccccagcaagggcugccugagagugggcggcagaugccacccccacgugaacggcguguucuucaacggcaucauccugggccccgacggccacgugcugauccccgagaugcagagcagccugcugcagcagcacauggagcugcuggagagcagcgugaucccccugauccacccccuggccgaccccagcaccguguucaaggacggcgacgaggccgaggacuucguggaggugcaccugcccgacgugcacaagcaggugagcggcguggaccugggccugcccaacuggggcaaguacgugcugaugggcgccggcgugcuggccaccgugauccugaccaucuuccugcugaccugcugcagaagagugaacagaaccaagcccaagcagcagagccugggcgagagcggcagaaaggugagcgugaccccccagaacggcaaggugaugagcagcugggaguacuacaagagcgagggcagaaccagccuguga

SEQ ID NO: 191648 - RNA, 1575 nt, Artificial Sequence; identical to SEQ ID NO: 191467
  derived and/or modified CDS sequence (opt4) from glycoprotein__RABV__KJ174624.1

SEQ ID NO: 191649 - RNA, 1575 nt, Artificial Sequence
  derived and/or modified CDS sequence (opt4) from glycoprotein__RABV__KJ174625.1
augaucccccaggcccugcuguucgugcccuuccuguuccccagccugugccugggcaaguuccccaucuacaccauccccgagaagcugggccccuggagccccaucgacauccaccaccugagcugccccaacaaccuggugguggaggacgagggcugcgacagccugagcggcuucagcuacauggagcugaaggugggcuacaucagcgccaucaaggugaacggcuucaccugcaccggcguggugaccgaggccgagaccuacaccaacuucgugggcuacgugaccaccaccuucaagagaaagcacuucagacccaugcccgacgccugcagagccgccuacaacuggaagaccgccggcgaccccagauacgaggagagccugcacaaccccuaccccgacuaccacuggcugagaaccgugaagaccaccaaggagagccugaucaucaucagccccagcguggccgaccuggaccccuacgacaagagccugcacagcagaguguuccccggcggcaagugccugggcaucaccgugagcagcaccuacugcagcaccaaccacgacuacaccaucuggaugcccgaggaggccagacugggcaccagcugcgacaucuucaccaacagcaagggcaagagagccagcaagggcggcagaaccugcggcuucguggacgagagaggccuguacaagagccugaagggcgccugcaagcugaagcugugcggcgugcccggccugagacugauggacggcaccuggguggccauccagacccccggcgagaccaaguggugcagccccgaccagcuggugaaccugcacgacuucagaagcgacgagaucgagcaccuggugguggaggagcugaucaagaagagagaggagugccuggacgcccuggagagcaucaugaccaccaagagcgugagcuucagaagacugagcaaccugagaaagcuggugcccggcuucggcaaggccuacaccaucuucaacaagacccugauggaggccgacgcccacuacaagagcgugagaaccugggacgagaucauccccagcaagggcugccugagagugggcggcagaugccacccccacgugaacggcguguucuucaacggcaucauccugggccccgacggccacgugcugauccccgagaugcagagcagccugcugcagcagcacauggagcugcuggagagcagcgugaucccccugauccacccccuggccgaccccagcaccguguucaaggacggcgacgaggccgaggacuucguggaggugcaccugcccgacgugcacaagcaggugagcggcguggaccugggccugcccaacuggggcaaguacgugcugaugggcgccggcgugcuggccaccgugauccugaccaucuuccugcugaccugcugcagaagagugaacagaaccaagcccaagcagcagagccuggaggagagcggcagaaaggugagcgugaccccccagaacggcaaggugaugagcagcugggaguacuacaagagcgagggcagaaccagccuguga

SEQ ID NO: 191650 - RNA, 1575 nt, Artificial Sequence; identical to SEQ ID NO: 191649
  derived and/or modified CDS sequence (opt4) from glycoprotein__RABV__KJ174626.1

SEQ ID NO: 191651 - RNA, 1575 nt, Artificial Sequence; identical to SEQ ID NO: 191481
  derived and/or modified CDS sequence (opt4) from glycoprotein__RABV__KJ174627.1

SEQ ID NO: 191652 - RNA, 1575 nt, Artificial Sequence; identical to SEQ ID NO: 191309
  derived and/or modified CDS sequence (opt4) from glycoprotein__RABV__KJ174628.1

SEQ ID NO: 191653 - RNA, 1575 nt, Artificial Sequence; identical to SEQ ID NO: 191481
  derived and/or modified CDS sequence (opt4) from glycoprotein__RABV__KJ174629.1

SEQ ID NO: 191654 - RNA, 1575 nt, Artificial Sequence; identical to SEQ ID NO: 191309
  derived and/or modified CDS sequence (opt4) from glycoprotein__RABV__KJ174630.1

SEQ ID NO: 191655 - RNA, 1575 nt, Artificial Sequence
  derived and/or modified CDS sequence (opt4) from glycoprotein__RABV__KJ174631.1
augaucccccaggcccugcuguucgugccccugcugauccccagccugugccugggcgaguuccccaucuacaccauccccgacaagcugggccccuggagccccaucgacauccaccaccugagcugccccaacaaccugguggccgagaacgacggcugcaccagccugagcggcuucagcuacauggagcugaaggugggcuacaucagcgccaucaaggugaacggcuucaccugcaccggcguggugaccgaggccgagaccuacaccaacuucgugggcuacgugaccaccaccuucaagagaaagcacuucagacccacccccgacgccugcagagccgcccacgacuggaagauggccggcgaccccagauacgaggccagccugcagaaccccuaccccgacuaccacuggcugagaaccgugaagaccaccaaggagagccuggugaucaucagccccagcguggccgaccuggaccccuacgacaagagccugcacagcagaguguuccccagcggcaagugccugggcaucaccgugagcagcaccuacugcagcaccaaccacgacuacaccaucuggaugcccguggagcccagacugggcaccagcugcgacaucuucaccaacagcagaggcaagagagccagcaagggcggcagagugugcggcuucguggacgagagaggccuguacaagagccugaagggcgccugcagacugaagcugugcggcgugcccggcaucagacugcuggacggcaccugggugagcauccagaccagcgaggacaucaaguggugcccccccgacagacuggugaaccugcacgacuuccacagcgacgagaucgagcaccuggugguggccgagcugaucaagagaagagagaacugccuggacgcccuggagagcaucaugaccaccaagagcgugagcuucagaagacugagccaccugagaaagcuggugcccggcuucggcaaggccuacaccaucuucaacaagacccugauggaggccgacgcccacuacaagagcgugaagaccuggaacgaggugauccccagcaagggcugccuggaggugggcggcagaugccacccccacgugaacggcguguucuucaacggcaucauccugggccccgacggcaacgugcugauccccgagaugcagagcagccugcugcagcagcacauggagcugcuggagagcagcgugaucccccugaugcacccccuggccgaccccagcaccguguucaaggagggcgacgaggccgaggacuucguggaggugcaccugcccgacgugcacaagcaggugagcgacguggaccugggccugcccagcuggggcaaguaccugcugaucggcgccggcgcccuggccauccugauccuggccaucgugcugaucaucugcugcagaagagugaacaagaccagaagcacccagagaggccacagagagagcggcggcaagaugagcguggugccccagaacggcaagaucaucagcagcugggagcuguacaagagcgagagcgagaccggccuguga

SEQ ID NO: 191656 - RNA, 1575 nt, Artificial Sequence
  derived and/or modified CDS sequence (opt4) from glycoprotein__RABV__KJ174632.1
augaucccccaggcccugcuguucgugccccugcugauccccagccugugccugggcgaguuccccaucuacaccauccccgacaagcugggccccuggagccccaucgacauccaccaccugagcugccccaacaaccugguggccgagaacgacggcugcaccagccugagcggcuucagcuacauggagcugaaggugggcuacaucagcgccaucaaggugaacggcuucaccugcaccggcguggugaccgaggccgagaccuacaccaacuucgugggcuacgugaccaccaccuucaagagaaagcacuucagacccacccccgacgccugcagagccgcccacgacuggaagauggccggcgaccccagauacgaggccagccugcagaaccccuaccccgacuaccacuggcugagaaccgugaagaccaccaaggagagccuggugaucaucagccccagcguggccgaccuggaccccuacgacaagagccugcacagcagaguguuccccagcggcaagugccugggcaucaccgugagcagcaccuacugcagcaccaaccacgacuacaccaucuggaugcccguggagcccagacugggcaccagcugcgacaucuucaccaacagcagaggcaagagagccagcaagggcggcagagugugcggcuucguggacgagagaggccuguacaagagccugaagggcgccugcagacugaagcugugcggcgugcccggcaucagacugcuggacggcaccugggugagcauccagaccagcgaggacaucaaguggugcccccccgacagacuggugaaccugcacgacuuccacagcgacgagaucgagcaccuggugguggccgagcugaucaagagaagagagaacugccuggacgcccuggagagcaucaugaccaccaagagcgugagcuucagaagacugagccaccugagaaagcuggugcccggcuucggcaaggccuacaccaucuucaacaagacccugauggaggccgacgcccacuacaagagcgugaagaccuggaacgaggugauccccagcaagggcugccuggaggugggcggcagaugccacccccacgugaacggcguguucuucaacggcaucauccugggccccgacggcaacgugcugauccccgagaugcagagcagccugcugcagcagcacauggagcugcuggagagcagcgugaucccccugaugcacccccuggccgaccccagcaccguguucaaggagggcgacgaggccgaggacuucguggaggugcaccugcccgacgugcacaagcaggugagcgacguggaccugggccugcccagcuggggcaaguaccugcugaucagcgccggcgcccuggccauccugauccuggccaucgugcugaucaucugcugcaagagagugaagaagaccggcagcauccagagaggccacagagagagcggcggcaagaugagcguggugccccagaacggcaagaucaucagcagcugggagcuguacaagagcgagagcgagaccggccuguga

SEQ ID NO: 191657 - RNA, 1575 nt, Artificial Sequence
  derived and/or modified CDS sequence (opt4) from glycoprotein__RABV__KJ174633.1
augaucccccaggcccugcuguucgugccccugcugauccccagccugugccugggcgaguuccccaucuacaccauccccgacaagcugggccccuggagccccaucgacauccaccaccugagcugccccaacaaccugguggccgagaacgacggcugcaccagccugagcggcuucagcuacauggagcugaaggugggcuacaucagcgccaucaaggugaacggcuucaccugcaccggcguggugaccgaggccgagaccuacaccaacuucgugggcuacgugaccaccaccuucaagagaaagcacuucagacccacccccgacgccugcagagccgcccacgacuggaagauggccggcgaccccagauacgaggccagccugcagaaccccuaccccgacuaccacuggcugagaaccgugaagaccaccaaggagagccuggugaucaucagccccagcguggccgaccuggaccccuacgacaagagccugcacagcagaguguuccccagcggcaagugccugggcaucaccgugagcagcaccuacugcagcaccaaccacgacuacaccaucuggaugcccguggagcccagacugggcaccagcugcgacaucuucaccaacagcagaggcaagagagccagcaagggcggcagagugugcggcuucguggacgagagaggccuguacaagagccugaagggcgccugcagacugaagcugugcggcgugcccggcaucagacugcuggacggcaccugggugagcauccagaccagcgaggacaucaaguggugcccccccgacagacuggugaaccugcacgacuuccacagcgacgagaucgagcaccuggugguggccgagcugaucaagagaagagagaacugccuggacgcccuggagagcaucaugaccaccaagagcgugagcuucagaagacugagccaccugagaaagcuggugcccggcuucggcaaggccuacaccaucuucaacaagacccugauggaggccgacgcccacuacaagagcgugaagaccuggaacgaggugauccccagcaagggcugccuggaggugggcggcagaugccacccccacgugaacggcguguucuucaacggcaucauccugggccccgacggcaacgugcugauccccgagaugcagcccagccugcugcagcagcacauggagcugcuggagagcagcgugaucccccugaugcacccccuggccgaccccagcaccguguucaaggagggcgacgaggccgaggacuucguggaggugcaccugcccgacgugcacaagcaggugagcgacguggaccugggccugcccagcuggggcaaguaccugcugaucagcgccggcgcccuggccauccugauccuggccaucgugcugaugaucugcugcagaagagugaacaagaccggcagcacccagagaggccacagagagagcggcggcaagaugagcguggugccccagaacggcaagaucaucagcagcugggagcuguacaagagcgagagcgagaccggccuguga

SEQ ID NO: 191658 - RNA, 1575 nt, Artificial Sequence
  derived and/or modified CDS sequence (opt4) from glycoprotein__RABV__KJ174634.1
augaucccccaggccauccuguucgugccccugcugauccccagccugugccugggcgaguuccccaucuacaccauccccgacaagcugggccccuggagccccaucgacauccaccaccugagcugccccaacaaccugguggccgagaacgacggcugcaccagccugagcggcuucagcuacauggagcugaaggugggcuacaucagcgccaucaaggugaacggcuucaccugcaccggcguggugaccgaggccgagaccuacaccaacuucgugggcuacgugaccaccaccuucaagagaaagcacuucagacccacccccgacgccugcagagccgcccacgacuggaagauggccggcgaccccagauacgaggccagccugcagaaccccuaccccgacuaccacuggcugagaaccgugaagaccaccaaggagagccuggugaucaucagccccagcguggccgaccuggaccccuacgacaaguuccugcacagcagaguguuccccagcggcaagugccugggcaucaccgugagcagcaccuacugcagcaccaaccacgacuacaccaucuggaugcccguggagcccagacugggcaccagcugcgacaucuucaccaacagcagaggcaagagagccagcaagggcggcagagugugcggcuucguggacgagagaggccuguacaagagccugaagggcgccugcagacugaagcugugcggcgugcccggcaucagacugcuggacggcaccugggugagcauccagaccagcgaggacaucaaguggugcccccccgacagacuggugaaccugcacgacuuccacagcgacgagaucgagcaccuggugguggccgagcugaucaagagaagagagaacugccuggacgcccuggagagcaucaugaccaccaagagcgugagcuucagaagacugagccaccugagaaagcuggugcccggcuucggcaaggccuacaccaucuucaacaagacccugauggaggccgacgcccacuacaagagcgugaagaccuggaacgaggugauccccagcaagggcugccuggaggugggcggcagaugccacccccacgugaacggcguguucuucaacggcaucauccugggccccgacggcaacgugcugauccccgagaugcagagcagccugcugcagcagcacauggagcugcuggagagcagcgugaucccccugaugcacccccuggccgaccccagcaccguguucaaggagggcgacgaggccgaggaguucguggaggugcaccugcccgacgugcacaagcaggugagcgacguggaccugggccugcccagcuggggcaaguaccugcugaucagcgccggcgcccuggccauccugauccuggccaucgugcugaucaucugcugcagaagagugaacaagaccggcagcacccagagaggccacagagagagcggcggcaagaugagcguggugccccagaacggcaagaucaucagcagcugggagcuguacaagagcgagagcgagaccggccuguga

SEQ ID NO: 191659 - RNA, 1575 nt, Artificial Sequence
  derived and/or modified CDS sequence (opt4) from glycoprotein__RABV__KJ174635.1
augaucccccaggcccugcuguucgugccccugcugauccccagccugugccugggcgaguuccccaucuacaccauccccgacaagcugggccccuggagccccaucgacauccaccaccugagcugccccaacaaccugguggccgagaacgacggcugcaccagccugagcggcuucagcuacauggagcugaaggugggcuacaucagcgccaucaaggugaacggcuucaccugcaccggcguggugaccgaggccgagaccuacaccaacuucgugggcuacgugaccaccaccuucaagagaaagcacuucagacccacccccgacgccugcagagccgcccacgacuggaagauggccggcgaccccagauacgaggccagccugcagaaccccuaccccgacuaccacuggcugagaaccgugaagaccaccaaggagagccuggugaucaucagccccagcguggccgaccuggaccccuacgacaagagccugcacagcagaguguuccccagcggcaagugccugggcaucaccgugagcagcaccuacugcagcaccaaccacgacuacaccaucuggaugcccguggagcccagacugggcaccagcugcgacaucuucaccaacagcagaggcaagagagccagcaagggcggcagagugugcggcuucguggacgagagaggccuguacaagagccugaagggcgccugcagacugaagcugugcggcgugcccggcaucagacugcuggacggcaccugggugagcauccagaccagcgaggacaucaaguggugcccccccgacagacuggugaaccugcacgacuuccacagcgacgagaucgagcaccuggugguggccgagcugaucaagagaagagagaacugccuggacgcccuggagagcaucaugaccaccaagagcgugagcuucagaagacugagccaccugagaaagcuggugcccggcuucggcaaggccuacaccaucuucaacaagacccugauggaggccgacgcccacuacaagagcgugaagaccuggaacgaggugauccccagcaagggcugccuggaggugggcggcagaugccacccccacgugaacggcguguucuucaacggcaucauccugggccccgacggcaacgugcugauccccgagaugcagagcagccugcugcagcagcacauggagcugcuggagagcagcgugaucccccugaugcacccccuggccgaccccagcaccguguucaaggagggcgacgaggccgaggacuucguggaggugcaccugcccgacgugcacaagcaggugagcgacguggaccugggccugcccagcuggggcaaguaccugcugaucagcgccggcgcccuggccauccugauccuggccguggugcugaucaucugcugcagaagagugaacaagaccagaagcacccagagaggccacagagagagcggcggcaagaugagcguggugccccagaacggcaagaucaucagcagcugggagcuguacaagagcgagagcgagaccggccuguga

SEQ ID NO: 191660 - RNA, 1575 nt, Artificial Sequence
  derived and/or modified CDS sequence (opt4) from glycoprotein__RABV__KJ174636.1
augaucccccaggcccugcuguucgugccccugcugauccccagccugugccugggcgaguuccccaucuacaccauccccgacaagcugggccccuggagccccaucgacauccaccaccugagcugccccaacaaccugguggccgagaacgacggcugcaccagccugagcggcuucagcuacauggagcugaaggugggcuacaucagcgccaucaaggugaacggcuucaccugcaccggcguggugaccgaggccgagaccuacaccaacuucgugggcuacgugaccaccaccuucaagagaaagcacuucagacccacccccgacgccugcagagccgcccacgacuggaagauggccggcgaccccagauacgaggccagccugcagaaccccuaccccgacuaccacuggcugagaaccgugaagaccaucaaggagagccuggugaucaucagccccagcguggccgaccuggaccccuacgacaagagccugcacagcagaguguuccccagcggcaagugccugggcaucaccgugagcagcaccuacugcagcaccaaccacgacuacaccaucuggaugcccguggagcccagacugggcaccagcugcgacaucuucaccaacagcagaggcaagagagccagcaagggcggcagagugugcggcuucguggacgagagaggccuguacaagagccugaagggcgccugcagacugaagcugugcggcgugcccggcaucagacugcuggacggcaccugggugagcauccagaccagcgaggacaucaaguggugcccccccgacagacuggugaaccugcacgacuuccacagcgacgagaucgagcaccuggugguggccgagcugaucaagagaagagagaacugccuggacgcccuggagagcaucaugaccaccaagagcgugagcuucagaagacugagccaccugagaaagcuggugcccggcuucggcaaggccuacaccaucuucaacaagacccugauggaggccgacgcccacuacaagagcgugaagaccuggaacgaggugauccccagcaagggcugccuggaggugggcggcagaugccacccccacgugaacggcguguucuucaacggcaucauccugggccccgacggcaacgugcugauccccgagaugcagagcagccugcugcagcagcacauggagcugcuggagagcagcgugaucccccugaugcacccccuggccgaccccagcaccguguucaaggagggcgacgaggccgaggacuucguggaggugcaccugcccgacgugcacaagcaggugagcgacguggaccugggccugcccagcuggggcaaguaccugcugaucagcgccggcgcccugaccauccugauccuggccaucgugcugaucagaugcugcagaagagugaacaagaccagaagcacccagagaggccacagagagagcggcggcaagaugagcguggugccccagaacggcaagaucaucagcagcugggagcuguacaagagcgagagcgagaccggccuguga

SEQ ID NO: 191661 - RNA, 1575 nt, Artificial Sequence
  derived and/or modified CDS sequence (opt4) from glycoprotein__RABV__KJ174637.1
augaucccccaggcccugcuguucaugccccugcugauccccagccugugccugggcgaguuccccaucuacaccauccccgacaagcugggccccuggagccccaucgacauccaccaccugagcugccccaacaaccugguggccgagaacgacggcugcaccagccugagcggcuucagcuacauggagcugaaggugggcuacaucagcgccaucaaggugaacggcuucaccugcaccggcguggugaccgaggccgagaccuacaccaacuucgugggcuacgugaccaccaccuucaagagaaagcacuucagacccacccccgacgccugcagagccgcccacgacuggaagauggccggcgaccccagauacgaggccagccugcagaaccccuaccccgacuaccacuggcugagaaccgugaagaccaccaaggagagccuggugaucaucagccccagcguggccgaccuggaccccuacgacaagagccugcacagcagaguguuccccagcggcaagugccugggcaucaccgugagcagcaccuacugcagcaccaaccacgacuacaccaucuggaugcccguggagcccagacugggcaccagcugcgacaucuucaccaacagcagaggcaagagagccagcaagggcggcagagugugcggcuucguggacgagagaggccuguacaagagccugaagggcgccugcagacugaagcugugcggcgugcccggcaucagacugcuggacggcaccugggugagcauccagaccagcgaggacaucaaguggugcccccccgacagacuggugaaccugcacgacuuccacagcgacgagaucgagcaccuggugguggccgagcugaucaagagaagagagaacugccuggacgcccuggagagcaucaugaccaccaagagcgugagcuucagaagacugagccaccugagaaagcuggugcccggcuucggcaaggccuacaccaucuucaacaagacccugauggaggccgacgcccacuacaagagcgugaagaccuggaacgaggugauccccagcaagggcugccuggaggugggcggcagaugccacccccacgugaacggcguguucuucaacggcaucauccugggccccgacggcaacgugcugauccccgagaugcagagcagccugcugcagcagcacauggagcugcuggagagcagcgugaucccccugaugcacccccuggccgaccccagcaccguguucaaggagggcgacgaggccgaggacuucguggaggugcaccugcccgacgugcacaagcaggugagcgacguggaccugggccugcccagcuggggcaaguaccugcugaucagcgccggcgcccuggccauccugauccuggccaucgugcugaucaucugcugcagaagagugaacaagaccgugagcacccagagaggccacagagagagcggcggcaagaugagcguggugccccagaacggcaagaucaucagcagcugggagcuguacaagagcgagagcgagaccggccuguga

SEQ ID NO: 191662 - RNA, 1575 nt, Artificial Sequence
  derived and/or modified CDS sequence (opt4) from glycoprotein__RABV__KJ174638.1
augaucccccaggcccugcuguucgugccccugcugauccccagccugugccugggcgaguuccccaucuacaccauccccgacaagcugggccccuggagccccaucgacauccaccaccugagcugccccaacaaccugguggccgagaacgacggcugcaccagccugagcggcuucagcuacauggagcugaaggugggcuacaucagcgccaucaaggugaacggcuucaccugcaccggcguggugaccgaggccgagaccuacaccaacuucgugggcuacgugaccaccaccuucaagagaaagcacuucagacccacccccgacgccugcagagccgcccacgacuggaagauggccggcgaccccagauacgaggccagcgugcagaaccccuaccccgacuaccacuggcugagaaccgugaagaccaccaaggagagccuggugaucaucagccccagcguggccgaccuggaccccuacgacaagagccugcacagcagaguguuccccagcggcaagugccugggcaucaccgugagcagcaccuacugcagcaccaaccacgacuacaccaucuggaugcccguggagcccagacugggcaccagcugcgacaucuucaccaacagcagaggcaagagagccagcaagggcggcagagugugcggcuucguggacgagagaggccuguacaagagccugaagggcgccugcagacugaagcugugcggcgugcccggcaucagacugcuggacggcaccugggugagcauccagaccagcgaggacaucaaguggugcccccccgacagacuggugaaccugcacgacuuccacagcgacgagaucgagcaccuggugguggccgagcugaucaagagaagagagaacugccuggacgcccuggagagcaucaugaccaccaagagcgugagcuucagaagacugagccaccugagaaagcuggugcccggcuucggcaaggccuacaccaucuucaacaagacccugauggaggccgacgcccacuacaagagcgugaagaccuggaacgaggugauccccagcaagggcugccuggaggugggcggcagaugccacccccacgugaacggcguguucuucaacggcaucauccugggccccgacggcaacgugcugauccccgagaugcagagcagccugcugcagcagcacauggagcugcuggagagcagcgugaucccccugaugcacccccuggccgaccccagcaccguguucaaggagggcgacgaggccgaggacuucguggaggugcaccugcccgacgugcacaagcaggugagcgacguggaccugggccugcccagcuggggcaaguaccugcugaucagcgccggcgcccuggccauccugauccuggccaucgugcugaucaucugcugcagaagagugaacaagaccggcagcacccagagaggccacagagagagcggcggcaagaugagcguggugccccagaacggcaagaucaucagcagcugggagcuguacaagagcgagagcgagaccggccuguga

SEQ ID NO: 191663 - RNA, 1575 nt, Artificial Sequence; identical to SEQ ID NO: 191481
  derived and/or modified CDS sequence (opt4) from glycoprotein__RABV__KJ174639.1

SEQ ID NO: 191664 - RNA, 1575 nt, Artificial Sequence
  derived and/or modified CDS sequence (opt4) from glycoprotein__RABV__KJ174640.1
augaucccccaggcccugcuguucgugccccugcugauccccagccugugccugggcgaguuccccaucuacaccauccccgacaagcugggccccuggagccccaucgacauccaccaccugagcugccccaacaaccugguggccgagaacgacggcugcaccagccugagcggcuucagcuacauggagcugaaggugggcuacaucagcgccaucaaggugaacggcuucaccugcaccggcguggugaccgaggccgagaccuacaccaacuucgugggcuacgugaccaccaccuucaagagaaagcacuucagacccacccccgacgccugcagagccgcccacgacuggaagauggccggcgaccccagauacgaggccagccugcagaaccccuaccccgacuaccacuggcugagaaccgugaagaccaccaaggagagccuggugaucaucagccccagcguggccgaccuggaccccuacgacaagagccugcacagcagaguguuccccagcggcaagugccugggcaucaccgugagcagcaccuacugccccaccaaccacgacuacaccaucuggaugcccguggagcccagacugggcaccagcugcgacaucuucaccaacagcagaggcaagagagccagcaagggcggcagagugugcggcuucguggacgagagaggccuguacaagagccugaagggcgccugcagacugaagcugugcggcgugcccggcaucagacugcuggacggcaccugggugagcauccagaccagcgaggacaucaaguggugcccccccgacagacuggugaaccugcacgacuuccacagcgacgagaucgagcaccuggugguggccgagcugaucaagagaagagagaacugccuggacgcccuggagagcaucaugaccaccaagagcgugagcuucagaagacugagccaccugagaaagcuggugcccggcuucggcaaggccuacaccaucuucaacaagacccugauggaggccgacgcccacuacaagagcgugaagaccuggaacgaggugauccccagcaagggcugccuggaggugggcggcagaugccacccccacgugaacggcguguucuucaacggcaucauccugggccccgacggcaacgugcugauccccgagaugcagagcagccugcugcagcagcacauggagcugcuggagagcagcgugaucccccugaugcacccccuggccgaccccagcaccguguucaaggagggcgacgaggccgaggacuucguggaggugcaccugcccgacgugcacaagcagguguucggcguggaccugggccugcccagcuggggcaaguaccugcugaucagcgccggcgcccuggccauccugauccuggccaucgugcugaucaucugcugcagaagagugaacaagaccgagagcacccccagaggccacagagagagcggcggcaagaugagcguggugccccagaacggcaagaucaucagcagcugggagcuguacaagagcgagagcgagaccggccuguga

SEQ ID NO: 191665 - RNA, 1575 nt, Artificial Sequence; identical to SEQ ID NO: 191308
  derived and/or modified CDS sequence (opt4) from glycoprotein__RABV__KJ174641.1

SEQ ID NO: 191666 - RNA, 1575 nt, Artificial Sequence
  derived and/or modified CDS sequence (opt4) from glycoprotein__RABV__KJ174642.1
auggugccccaggcccugcuguucgugccccugcugauccccagccugugccugggcgaguuccccaucuacaccauccccgacaagcugggccccuggacccccaucgacauccaccaccugagcugccccaacaaccugguggccgagaacgacggcugcaccagccugagcggcuucagcuacauggagcugaaggugggcuacaucagcgccaucaaggugaacggcuucaccugcaccggcguggugaccgaggccgagaccuacaccaacuucgugggcuacgugaccaccaccuucaagagaaagcacuucagacccaugcccgacgccugcagagccgcccacgacuggaagauggccggcgaccccagauacgaggacagccugcagaaccccuaccccgacuaccacuggcugagaaccgugaagaccaccaaggagagccuggugaucaucagccccagcguggccgaccuggaccccuacgacaagagccugcacagcagaguguuccccagcggcaagugccugggcaucaccgugagcagcaccuacugcagcaccaaccacgacuacaccaucuggaugcccguggagcccagacugggcaccagcugcgacaucuucaccaacagcagaggcaagagagccagcaagggcggcagagugugcggcuucguggacgagagaggccuguacaagagccugaagggcgccugcaagcugaagcugugcggcgugcccggcaucagacugcuggacggcaccugggugagcauccagaccagcgaggacaucaaguggugcccccccgacagacuggugaaccugcacgacuuccacagcgacgagcuggagcaccuggugguggaggagcugaucaagagaagagagaacugccuggacgcccuggagagcaucaugaccaccaagagcgugagcuucagaagacugagccaccugagaaagcuggugcccggcuucggcaaggccuacaccaucuucaacaagacccugauggaggccgacgcccacuacaagagcgugaagaccuggaacgaggugauccccagcaagggcugccuggaggugggcggcaagugccacccccccgugaacggcguguucuucaacggcaucauccugggccccgacggcaacgugcugauccccgagaugcagagcagccugcugcagcagcacauggagcugcuggagagcagcgugaucccccugaugcacccccuggccgaccccagcaccguguucaaggagggcgacgaggccgaggacuucguggaggugcaccugcccgacgugcacaagcaggugagcgacguggaccugggccugcccagcuggggcaaguaccugcugaugagcgccggcgcccuggccauccugauccuggccaucgugcugaucaucugcugcagaagagugaacaagaccggcagcacccagagaggccacagagagagcagaggcaagaugagcgugagcccccagaacggcaagaucaucagcagcugggagcuguacaagagagagagcgagaccggccuguga

SEQ ID NO: 191667 - RNA, 1575 nt, Artificial Sequence
  derived and/or modified CDS sequence (opt4) from glycoprotein__RABV__KJ174643.1
augaucccccaggcccugcuguucgugccccugcugauccccagccugugccugggcgaguuccccaucuacaccauccccgacaagcugggccccuggacccccaucgacauccaccaccugagcugccccaacaaccugguggccgagaacgacggcugcaccagccugagcggcuucagcuacauggagcugaaggugggcuacaucagcgccaucaaggugaacggcuucaccugcaccggcguggugaccgaggccgagaccuacaccaacuucgugggcuacgugaccaccaccuucaagagaaagcacuucagacccaugcccgacgccugcagagccgcccacgacuggaagauggccggcgaccccagauacgaggacagccugcagaaccccuaccccgacuaccacuggcugagaaccgugaagaccaccaaggagagccuggugaucaucagccccagcguggccgaccuggaccccuacgacaagagccugcacagcagaguguuccccagcggcaagugccugggcaucaccgugagcagcaccuacugcagcaccaaccacgacuacaccaucuggaugcccguggagcccagacugggcaccagcugcgacaucuucaccaacagcagaggcaagagagccagcaagggcggcagagugugcggcuucguggacgagagaggccuguacaagagccugaagggcgccugcaagcugaagcugugcggcgugcccggcaucagacugcuggacggcaccugggugagcauccagaccagcgaggacaucaaguggugcccccccgacagacuggugaaccugcacgacuuccacagcgacgagcuggagcaccuggugguggaggagcugaucaagagaagagagaacugccuggacgcccuggagagcaucaugaccaccaagagcgugagcuucagaagacugagccaccugagaaagcuggugcccggcuucggcaaggccuacaccaucuucaacaagacccugauggaggccgacgcccacuacaagagcgugaagaccuggaacgaggugauccccagcaagggcugccuggaggugggcggcaagugccacccccccgugaacggcguguucuucaacggcaucauccugggccccgacggcaacgugcugauccccgagaugcagagcagccugcugcagcagcacauggagcugcuggagagcagcgugaucccccugaugcacccccuggccgaccccagcaccguguucaaggagggcgacgaggccgaggacuucguggaggugcaccugcccgacgugcacaagcaggugagcgacguggaccugggccugcccagcuggggcaaguaccugcugaugagcgccggcgcccuggccauccugauccuggccaucgugcugaucaucugcugcagaagagugaacaagaccggcagcacccagagaggccacagagagagcagaggcaagaugagcguggccccccagaacggcaagaucaucagcagcugggagcuguacaagagagagagcgagaccggccuguga

SEQ ID NO: 191668 - RNA, 1575 nt, Artificial Sequence; identical to SEQ ID NO: 191667
  derived and/or modified CDS sequence (opt4) from glycoprotein__RABV__KJ174644.1

SEQ ID NO: 191669 - RNA, 1575 nt, Artificial Sequence
  derived and/or modified CDS sequence (opt4) from glycoprotein__RABV__KJ174645.1
augaucccccaggcccugcugagccugcugcugcugaucagcagccugugccugggcaaguuccccaucuacaccauccccgacaagcugggccccuggagccccaucgacauccaccaccugagcugccccaacaaccuggugguggaggacgagggcugcaccagccugagcggcuucagcuacauggagcugaaggugggcuacaucagcgccaucaaggugaacggcuucaccugcaccggcguggugaccgaggccgagaccuacaccaacuucgugggcuacgugaccaccaccuucaagagaaagcacuucagacccaugcccgacgccugcagagccgcccacgaguggaagauggccggcgaccccagauacgaggacagccugcagaaccccuaccccgacuaccacuggcugagaaccgugaagaccaccaaggagagccugaucaucaucagccccagcguggccgaccuggaccccuacgacaagagccugcacagcagaguguuccccggcggcaacugccugggcaucaccaucagcagcaccuacugcagcaccaaccacgacuacaccaucuggaugcccgaggaggccagacugggcaccagcugcgacaucuucaccagcagcagaggcaagagagccagcaagggcggcaagaucugcggcuucguggacgagagaggccuguacaagagccugaagggcgccugcaagcugaagcugugcggcgugcccggccugagacugauggacggcaccugggugagcauccagaccagcgacgagaccaaguggugcccccccgaccagcuggugaacgugcacgacuuccacagcgacgagaucgagcaccugaucguggaggagcuggugaagaagagagaggagugccuggacgcccuggagagcaucaugaccaccaagagcgugagcuucagaagacugagccaccugagaaagcuggugcccggcuucggcaaggccuacaccaucuucaacaagacccugauggaggccgacgcccacuacaagagcgugagaaccuggaacgagaucauccccagcaagggcugccugaaggugggcggcaugugccacccccacgugggcggcguguucuucaacggcaucauccugggccccgacggcaccgugcugauccccgagaugcagagcagccugcugcagcagcacauggagcugcuggagagcagcgugaucccccugaugcacccccuggccgaccccagcaccguguucaaggagggcgacgaggccgaggacuucguggagauccaccugcccgacgugcacaagcagaucagcggcguggaccugggccugcccagcuggggcaaguaccugcugaucagcgccggcgcccuggccacccugauccugaccaucuuccugaucaccugcugcagaaaggugaacagaaccgagagcauccagagaggccacggcgagagcgagagaaaggugagcgugagcccccagaacggcagagugaucagcagcugggagcuguacaagagcggcggcgagaccaaccuguga

SEQ ID NO: 191670 - RNA, 1575 nt, Artificial Sequence
  derived and/or modified CDS sequence (opt4) from glycoprotein__RABV__KJ174646.1
augaucccccaggcccugcuguucgugccccugcugauccccagccugugccugggcaaguuccccaucuacaccauccccgacaagcugggccccuggagccccaucgacauccaccaccugagcugccccaacaaccugguggccgaggacgagggcugcaccagccugagcggcuucagcuacauggagcugaaggugggcuacaucagcgccaucaaggugaacggcuucaccugcaccggcguggugaccgaggccgagaccuacaccaacuucgugggcuacgugaccaccaccuucaagagaaagcacuucagacccaugcccgacgccugcagagccgcccacgacuggaagauggccggcgaccccagauacgaggacagccugcagaaccccuaccccgacuaccacuggcugagaaccgugaagaccaccaaggagagccuggugaucaucagccccagcguggccgaccuggaccccuacgacaagagccugcacagcagaguguuccccagcggcaagugccugggcaucaccgugagcagcaccuacugcagcaccaaccacgacuacaccaucuggaugcccguggaggccagacugggcaccagcugcgacaucuucaccaacagcaagggcaagaaggccagcaagggcggcagaaccugcggcuucguggacgagagaggccuguacaagagccugaagggcgccugcaagcugaagcugugcggcgugcccggccugagacugauggacggcaccugggugagcauccagaccagcgacgacaucaaguggugcccccccgaccagcuggugaaccugcacgacuuccacagcgacgagaucgagcaccuggugguggaggagcugaucaagaagagagagggcugccuggacgcccuggagagcaucaugaccaccaagagcgugagcuucagaagacugagccaccugagaaagcuggugcccggcuucggcaaggccuacaccaucuucaacaacacccugauggaggccgacgcccacuacaagagcgugagaaccuggaacgaggugauccccagcaagggcugccugaaggugggcggcagaugccacccccccgugaacggcguguucuucaacggcaucauccugggccccgacggcaacgugcugauccccgagaugcagagcagccugcugcagcagcacauggagcugcuggagagcagcgugaucccccugaugcacccccuggccgaccccagcaccguguucaaggacggcgacgaggccgaggacuucguggaggugcaccugcccgacgugcacaagcaggugagcgagaucgaccugggccugcccagcuggggcaaguaccugcugaugagcgccggcgugcuggccacccugauccuggccaucuuccugaucaccugcugcagaagagccaacagaaccgagagcacccagagaggcagaagagagagcggcggcaaggugagcguggccccccagaacggcaaggugaucagcagcugggagcuguacaagagcgagagcgagaccggccuguga

SEQ ID NO: 191671 - RNA, 1575 nt, Artificial Sequence
  derived and/or modified CDS sequence (opt4) from glycoprotein__RABV__KJ174647.1
augaucccccaggcccugcuguucgugccccugcugauccccagccugugccugggcaaguuccccaucuacaccauccccgacaagcugggccccuggagccccaucgacauccaccaccugagcugccccaacaaccugguggccgaggacgagggcugcaccagccugagcggcuucagcuacauggagcugaaggugggcuacaucagcgccaucaaggugaacggcuucaccugcaccggcguggugaccgaggccgagaccuacaccaacuucgugggcuacgugaccaccaccuucaagagaaagcacuucagacccaugcccgacgccugcagagccgcccacgacuggaagauggccggcgaccccagauacgaggacagccugcagaaccccuaccccgacuaccacuggcugagaaccgugaagaccaccaaggagagccuggugaucaucagccccagcguggccgaccuggaccccuacgacaagagccugcacagcagaguguuccccagcggcaagugccugggcaucaccgugagcagcaccuacugcagcaccaaccacgacuacaccaucuggaugcccguggaggccagacugggcaccagcugcgacaucuucaccaacagcaagggcaagaaggccagcaagggcggcagaaccugcggcuucguggacgagagaggccuguacaagagccugaagggcgccugcaagcugaagcugugcggcgugcccggccugagacugauggacggcaccugggugagcauccagaccagcgacgacaucaaguggugcccccccgaccagcuggugaaccugcacgacuuccacagcgacgagaucgagcaccuggugguggaggagcugaucaagaagagagagggcugccuggacgcccuggagagcaucaugaccaccaagagcgugagcuucagaagacugagccaccugagaaagcuggugcccggcuucggcaaggccuacaccaucuucaacaacacccugauggaggccgacgcccacuacaagagcgugagaaccuggaacgaggugauccccagcaagggcugccugaaggugggcggcagaugccacccccccgugaacggcguguucuucaacggcaucauccugggccccgacggcaacgugcugauccccgagaugcagagcagccugcugcagcagcacauggagcugcuggagagcagcgugaucccccugaugcacccccuggccgaccccagcaccguguucaaggacggcgacgaggccgaggacuucguggaggugcaccugcccgacgugcacaagcaggugagcgagaucgaccugggccugcccagcuggggcaaguaccugcugaugagcgccggcgugcuggccacccugauccuggccaucuuccugaucaccugcugcagaagaaccaacagaaccgagagcacccagagaggcagaagagagagcggcggcaaggugagcguggccccccagaacggcaagaucaucagcagcugggagcuguacaagagcgagagcgagaccggccuguga

SEQ ID NO: 191672 - RNA, 1575 nt, Artificial Sequence; identical to SEQ ID NO: 191343
  derived and/or modified CDS sequence (opt4) from glycoprotein__RABV__KJ174648.1

SEQ ID NO: 191673 - RNA, 1575 nt, Artificial Sequence; identical to SEQ ID NO: 191343
  derived and/or modified CDS sequence (opt4) from glycoprotein__RABV__KJ174649.1

SEQ ID NO: 191674 - RNA, 1575 nt, Artificial Sequence
  derived and/or modified CDS sequence (opt4) from glycoprotein__RABV__KJ174650.1
augauccugcaggcccugcuguucgugccccugcugaucagcccccugugccugggcaaguuccccaucuacaccauccccgacaagaucggccccuggagccccaucgacauccaccaccugagcugccccaacaaccuggugguggaggacgagggcugcaccacccugagcggcuucagcuacauggagcugaaggugggcuacaucagcgccaucaaggugaacggcuucaccugcaccggcguggugaccgaggccgagaccuacaccaacuucgugggcuacgugaccaccaccuucaagagaaagcacuucagacccacccccgacgccugcagagccgccuacaacuggaagaucgccggcgaccccagauacgaggacagccugcagaaccccuaccccgacuaccacuggcugagaaccgugaagaccaccaaggagagccugaucaucaucagccccagcguggccgaccuggaccccuacgacaagagccugcacagcagaguguuccccagcggcaagugccugggcaucaccaucagcagcaccuacugcagcaccaaccacgacuacaccaucuggaugcccgaggaggccagacugggcaccagcugcgacaucuucgccaacagcaagggcaagagagccagcaagggcggcaagaccugcggcuucguggacgagagaggccuguacaagagccugagaggcgccugcaagcugaagcugugcggcgugcccggccugagacugauggacggcaccugggugagcauccagaccaccgacgagaccaaguggugcccccccgaccagcuggugaaccugcacgacuuccacagcgacgagaucgagcaccuggugguggaggagcuggugaagaagagagaggagugccuggacgcccuggagagcaucaugaccaccaagagcgugagcuucagaagacugagccaccugagaaagcuggugcccggcuucggcaaggccuacaccaucuucaacaagacccugauggaggccgacgcccacuacaagagcgugcagaccuggaacgagaucauccccagcaagggcugccugaaggugggcggcagaugccacccccacguggacggcguguucuucaacggcaucauccugggccccgacggcaacgugcugauccccgagaugcagagcagccugcugcagcagcacauggagcugcuggagagcagcgugaucccccugaugcacccccuggccgaccccagcaccguguucaaggacggcgacgaggccgaggacuucguggaggugcaccugcccgacgugcacaagcaggugagcggcguggaccugggccugcccgacuggggcaaguaccugcugaugagcgccggcgcccuggccacccugcugcugaccaucuuccugaugaccugcugcagaaaggugaacaagaccgagagcacccacagagaccccggcgagagcggcagaaaggugagcguggcccccagaaacggcaaggugaucagcagcugggagcuguacaagagcggcggcgagaccagacuguga

SEQ ID NO: 191675 - RNA, 1575 nt, Artificial Sequence
  derived and/or modified CDS sequence (opt4) from glycoprotein__RABV__KJ174651.1
augauccugcaggcccugcuguucgugccccugcugaucagcccccugugccugggcaaguuccccaucuacaccauccccgacaagaucggccccuggagccccaucgacauccaccaccugagcugccccaacaaccuggugguggaggacgagggcugcaccacccugagcggcuucagcuacauggagcugaaggugggcuacaucagcgccaucaaggugaacggcuucaccugcaccggcguggugaccgaggccgagaccuacaccaacuucgugggcuacgugaccaccaccuucaagagaaagcacuucagacccacccccgacgccugcagagccgccuacaacuggaagaucgccggcgaccccagauacgaggacagccugcagaaccccuaccccgacuaccacuggcugagaaccgugaagaccaccaaggagagccugaucaucaucagccccagcguggccgaccuggaccccuacgacaagagccugcacagcagaguguuccccagcggcaagugccugggcaucaccaucagcagcaccuacugcagcaccaaccacgacuacaccaucuggaugcccgaggaggccagacugggcaccagcugcgacaucuucaccaacagcaagggcaagagagccagcaagggcggcaagaccugcggcuucguggacgagagaggccuguacaagagccugagaggcgccugcaagcugaagcugugcggcgugcccggccugagacugauggacggcaccugggugagcauccagaccaccgacgacaccaaguggugcccccccgaccagcuggugaaccugcacgacuuccacagcgacgagaucgagcaccuggugguggaggagcuggugaagaagagagaggagugccuggacgcccuggagagcaucaugaccaccaagagcgugagcuucagaagacugagccaccugagaaagcuggugcccggcuucggcaaggccuacaccaucuucaacaagacccugauggaggccgacgcccacuacaagagcgugcagaccuggaacgagaucauccccagcaagggcugccugaaggugggcggcagaugccacccccacguggacggcguguucuucaacggcaucauccugggccccgacggcaacgugcugauccccgagaugcagagcagccugcugcagcagcacauggagcugcuggagagcagcgugaucccccugaugcacccccuggccgaccccagcaccguguucaaggacggcgacgaggccgaggacuucguggagauccaccugcccgacgugcacaagcaggugagcggcguggaccugggccugcccgacuggggcaaguaccugcugaugagcgccggcgcccuggccacccugcugcugaccaucuuccugaugaccugcugcagaaaggugaacaagaccgagagcacccacagagaccccggcgagagcggcagaaaggugagcguggcccccagaaacggcaaggugaucagcagcugggagcuguacaagagcggcggcgagaccagacuguga

SEQ ID NO: 191676 - RNA, 1575 nt, Artificial Sequence
  derived and/or modified CDS sequence (opt4) from glycoprotein__RABV__KJ174653.1
augaucccccaggcccugcuguucgugccccugcugaucagcagccugugcuucggcgaguuccccaucuacaccauccccgagaagcugggccccuggagccccaucgacauccaccaccugagcugccccaacaaccuggugguggaggacgagggcugcaacagccugagcggcuucagcuacauggagcugaaggugggcuacaucagcagcaucaaggugaacggcuucaccugcaccggcguggugaccgaggccgagaccuacaccaacuucgugggcuacgugaccaccaccuucaagagaaagcacuucagacccaugcccgacgccugcagagccgccuacagcuggaagaucgccggcgaccccagauacgaggagagccugcacaaccccuaccccgacuaccacuggcugagaaccgugaagaccaccaaggagagccuggugaucaucagccccagcguggccgaccuggaccccuacgacaagagccugcacagcagaguguucagcggcggcaagugccugggcaucaccaucagcagcaccuacugcagcaccaaccacgacuacaccaucuggaugcccgaggaggccagacugggcaccagcugcgacaucuucaccaacagcaagggcaagagagccagcaagggcggcaagaccugcggcuucguggacgagagaggccuguacaagagccugaagggcgccugcaagcugaagcugugcggcgugcccggccugagacugauggacggcaccugggugagcauccagaccagcgacgagaccaaguggugcccccccgaccagcuggugaacauccacgacuucagaagcgacgagaucgagcaccuggugguggaggagcuggugaagaagagagaggagugccuggacgcccuggagagcaucaugaccaccaagagcgugagcuucagaagacugagccaccugagaaagcuggugcccggcuucggcaaggccuacaccaucuucaacaagacccugauggaggccgacgcccacuacaagagcgugagaaccuggaacgagaucauccccagcaagggcugccugagcgugggcggcagaugccacccccacgugaacggcguguucuucaacggcaucaucaugggccccgacggcagcgugcugauccccgagaugcagagcagccugcugcagcagcacauggagcugcuggagagcagcgugaucccccugaugcacccccuggccaaccccagcaccguguucaaggacggcgacgaggccgaggacuucaucgaggugcaccugcccgacgugcaggagcaggugagcggcguggaccugggccugcccaacuggggcaaguacgugcugaugagcgccggcgcccuggccauccugaugcugaccaucuuccugaugaccuucugcagaagaaccaacagaaccaagagcauccagcagggccccggcgagagcggcagaaaggugagcgugcccccccagaacggcaaggugaucagcagcugggagagcuucaagagcggcggcgagaccggccuguga

SEQ ID NO: 191677 - RNA, 1575 nt, Artificial Sequence; identical to SEQ ID NO: 191351
  derived and/or modified CDS sequence (opt4) from glycoprotein__RABV__KJ174654.1

SEQ ID NO: 191678 - RNA, 1575 nt, Artificial Sequence; identical to SEQ ID NO: 191394
  derived and/or modified CDS sequence (opt4) from glycoprotein__RABV__KJ174655.1

SEQ ID NO: 191679 - RNA, 1575 nt, Artificial Sequence
  derived and/or modified CDS sequence (opt4) from glycoprotein__RABV__KJ174656.1
augaucccccagacccugcuguucgugccccugcugauccugcccagcugccugggcaaguuccccaucuacaccauccccgacaagaucggccccuggagccccaucgacauccaccaccugagcugccccaacaaccuggugguggaggacgagggcugcaccagccugagcggcuucagcuacauggagcugaaggugggcuacaucagcgccaucaaggugaacggcuucaccugcaccggcguggugaccgaggccgagaccuacaccaacuucgugggcuacgugaccaccaccuucaagagaaagcacuucagacccacccccgacgccugcagagccgccuacaacuggaagauggccggcgaccccagauacgaggacagccugcagaaccccuaccccgacuaccacuggcugagaaccgugaagaccaccaaggagagccugaucaucaucagccccagcguggccgaccuggaccccuacgacaagagccugcacagcagaguguuccccagcggcaagugccugggcaucaccgugagcagcaccuacugcagcaccaaccacgacuacaccaucuggaugcccgaggaggccagacugggcaccagcugcgacaucuucaccaacagcaagggcaagagagccagcaagggcggcaagaccugcggcuucguggacgagagaggccuguacaagagccugagaggcgccugcaagcugaagcugugcggcgugcccggccugagacugauggacggcaccugggugagcauccagaccaccgacgagaccaaguggugccccagcgaccagcuggugaaccugcacgacuuccacagcgacgagaucgagcaccuggugguggaggagcuggugaagaagagagaggagugccuggacgcccuggagagcaucaugaccaccaagagcgugagcuucagaagacugagccaccugagaaagcuggugcccggcuucggcaaggccuacaccaucuucaacaagacccugauggaggccgacgcccacuacaagagcgugcagaccuggaacgagaucauccccagcaagggcugccugaaggugggcggcagaugccacccccacguggacggcguguucuucaacggcaucauccugggccccgacggcaacgugcugauccccgagaugcagagcagccugcugcagcagcacauggagcugcuggagagcagcgugaucccccugaugcacccccuggccgaccccagcaccguguucaaggacggcgacgaggccgaggacuucguggaggugcaccugcccgacgugcacaagcaggugagcggcguggaccugggccugcccgacuggggcaaguaccugcugaugagcgccggcgcccuggccacccugcugcugaccaucuuccugaugaccugcugcagaaaggugaacaagaccgagagcacccagagagacagcggcgagagcggcagaaaggugagcaucgcccccagaaacggcaaggugaucagcagcugggagcuguacaagagcggcggcgacaccagacuguga

SEQ ID NO: 191680 - RNA, 1575 nt, Artificial Sequence; identical to SEQ ID NO: 191679
  derived and/or modified CDS sequence (opt4) from glycoprotein__RABV__KJ174657.1

SEQ ID NO: 191681 - RNA, 1575 nt, Artificial Sequence
  derived and/or modified CDS sequence (opt4) from glycoprotein__RABV__KJ174658.1
augaucagccagacccugcuguucgugacccugcugaucagcagccugugcuucggcgaguuccccaucuacaccauccccgagaagcugggccccuggagccccaucgacauccaccaccugagcugccccaacaaccuggugguggaggacgagggcugcaacagccugagcggcuucagcuacauggagcugaaggugggcuacaucagcagcaucaaggugaacggcuucaccugcaccggcguggugaccgaggccgagaccuacaccaacuucgugggcuacgugaccaccaccuucaagagaaagcacuucagacccaugcccgacgccugcagagccgccuacaacuggaagaugagcggcgaccccagauacgaggagagccugcacaaccccuaccccgacuaccacuggcugagaaccgugaagaccaccaaggagagccuggugaucaucagccccagcguggccgaccuggaccccuacgacaagagccugcacagcagaguguucagcggcggcaagugccugggcaucaccaucagcagcaccuacugcagcaccaaccacgacuacacccuguggaugcccgaggaggccagacugggcaccagcugcgacaucuucaccaacagcaagggcaagagagccagcaagggcggcagaaccugcggcuucguggacgagagaggccuguacaagagccugaagggcgccugcaagcugaagcugugcggcgugcccggccugagacugauggacggcaccugggugagcauccagaccagcgacgagaccaaguggugcccccccgaccagcuggugaacauccacgacuucagaagcgacgagaucgagcaccuggugguggaggagcuggugaagaagagagaggagugccuggacgcccuggagagcaucaugaccaccaagagcgugagcuucagaagacugagccaccugagaaagcuggugcccggcuucggcaaggccuacaccaucuucaacaagacccugauggaggccgacgcccacuacaagagcgugagaaccuggaacgaggugauccccagcaagggcugccugagcgugggcggcagaugccacccccacguggacggcguguucuucaacggcaucauccugggccccgacggcagcgugcugauccccgagaugcagagcagccugcugcagcagcacauggagcugcuggagagcagcgugaucccccugaugcacccccuggccaaccccagcaccguguucaaggacggcgacgaggccgaggacuucguggaggugcaccugcccgacgugcaggagcaggugagcggcguggaccugggccugcccaacuggggcaaguacgugcugaugagcgccggcgcccuggccauccugcugcugaccaucuuccugaugaccugcugcagaagagccaacagaaccaagagcaucagacagggccccgaggagagcggcagaagagugagcgugcccccccagaacggcaaggugaucagcagcugggagagcuucaagagcggcggcgagaccggccuguga

SEQ ID NO: 191682 - RNA, 1575 nt, Artificial Sequence
  derived and/or modified CDS sequence (opt4) from glycoprotein__RABV__KJ174659.1
augaucagccagacccugcuguucgugccccugcugaucagcagccugugccugggcgaguuccccaucuacaccauccccgagaagcugggccccuggagccccaucgacauccaccaccugagcugccccaacaaccuggugguggaggacgagggcugcaacagccugagcggcuucagcuacauggagcugaaggugggcuacaucagcagcaucaaggugaacggcuucaccugcaccggcguggugaccgaggccgagaccuacaccaacuucgugggcuacgugaccaccaccuucaagagaaagcacuucagacccaugcccgacgccugcagagccgccuacaacuggaagaugagcggcgaccccagauacgaggagagccugcacaaccccuaccccgacuaccacuggcugagaaccgugaagaccaccaaggagagccuggugaucaucagccccagcguggccgaccuggaccccuacgacaagagccugcacagcagaguguucagcggcggcaagugccugggcaucaccaucagcagcaccuacugcagcaccaaccacgacuacacccuguggaugcccgaggaggccagacugggcaccagcugcgacaucuucaccaacagcaagggcaagagagccagcaagggcggcaagaccugcggcuucguggacgagagaggccuguacaagagccugaagggcgccugcaagcugaagcugugcggcgugcccggccugagacugauggacggcaccugggugagcauccagaccagcgacgagaccaaguggugcccccccgaccagcuggugaacauccacgacuuccacagcgacgagaucgagcaccuggugguggaggagcuggugaagaagagagaggagugccuggacgcccuggagagcaucaugaccaccaagagcgugagcuucagaagacugagccaccugagaaagcuggugcccggcuucggcaaggccuacaccaucuucaacaagacccugauggaggccgacgcccacuacaagagcgugagaaccuggaacgaggugauccccagcaagggcugccugagcgugggcggcagaugccacccccacguggacggcguguucuucaacggcaucauccugggccccgacggcagcgugcugauccccgagaugcagagcagccugcugcagcagcacauggagcugcuggagagcagcgugaucccccugaugcacccccuggccaaccccagcaccguguucaaggacggcgacgaggccgaggacuucguggaggugcaccugcccgacgugcaggagcaggugagcggcguggaccugggccugcccaacuggggcaaguacgugcugaugagcgccggcgcccuggccauccugcugcugaccaucuuccugaugaccugcugcagaagagccaacagaaccaagagcaucagaagaggccccgaggagagcggcagaaaggugagcgugcccccccagaacggcaaggugaucagcagcugggagagcuucaagagcggcggcgagaccagacuguga

SEQ ID NO: 191683 - RNA, 1575 nt, Artificial Sequence
  derived and/or modified CDS sequence (opt4) from glycoprotein__RABV__KJ174660.1
augaucccccaggcccugcuguucgugccccugcugaucagcagccugugccugggcaaguuccccaucuacaccauccccgagaagcugggccccuggagccccaucgacauccaccaccugggcugccccaacaaccuggugguggaggacgagggcugcgacagccugagcggcuucagcuacauggagcugaaggugggcuacaucagcgccaucaaggugaacggcuucaccugcaccggcguggugaccgaggccgagaccuacaccaacuucgugggcuacgugaccaccaccuucaagagaaagcacuucagacccaugcccgacgccugcagagccgccuacaacuggaagaccgccggcgaccccagauacgaggagagccugcacaaccccuaccccgacuaccacuggcugagaaccgugaagaccaccaaggagagccugaucaucaucagccccagcguggccgaccuggaccccuacgacaagagccugcacagcagaguguuccccggcggcaagugccugggcaucaccgugagcagcaccuacugcagcaccaaccacgacuacaccaucuggaugcccgaggagaccagacugggcaccagcugcgacaucuucaccaacagcagaggcaagagagccagcaagggcggcaagaccugcggcuucguggacgagagaggccuguacaagagccugaagggcgccugcaagcugaagcugugcggcgugcccggccugagacugauggacggcaccugggugagcauccagacccccgacgagaccaaguggugcagccccgaccagcuggugaaccugcacgacuuccacagcgacgagaucgagcaccuggugguggaggagcuggugaagaagagagaggagugccuggacgcccuggagagcaucaugaccaccaagagcgugagcuucagaagacugagccaccugagaaagcuggugcccggcuucggcaaggccuacaccaucuucaacaagacccugauggaggccgacgcccacuacaagagcgugagaaccugggacgagaucauccccagcaagggcugccugagagugggcggcagaugccacccccacgugaacggcguguucuucaacggcaucauccugggccccgacggccacgugcugauccccgagaugcagagcagccugcugcagcagcacauggagcugcuggagagcagcgugaucccccugaugcaccccguggccaaccccagcaccguguucaaggacggcgacgaggccgaggacuucguggaggugcaccugcccgacgugcacgagcaggugagcggcguggaccugggccugcccaacuggggcaaguacaugcugaugagcgccggcgcccuggccaccaucauccugaccaucuuccugaucgccugcugcagaagagugaacagaaaggagagcagacagcagggccugggcgagagcggcagaaaggugagcgugaccccccagaacggcaaggugcugagcagcugggagugguacaagagcggcggcgagaccagacuguga

SEQ ID NO: 191684 - RNA, 1575 nt, Artificial Sequence
  derived and/or modified CDS sequence (opt4) from glycoprotein__RABV__KJ174661.1
augaucccccaggcccugcugcugcugccccugaugaucagcagccugugccugggcaaguuccccaucuacaccauccccgacaagcugggccccuggagccccaucgacauccaccaccugagcugccccaacaaccuggugguggaggacgagggcugcaccagccugagcggcuucagcuacauggagcugaaggugggcuacaucagcgccaucaaggugaacggcuucaccugcaccggcguggugaccgaggccgagaccuacaccaacuucgugggcuacgugaccaccaccuucaagagaaagcacuucagacccaugcccgacgccugcagagccgccuacaacuggaagguggccggcgaccccagauacgaggagagccugcagaaccccuaccccgacuaccacuggcugagaaccgugaagaccaccaaggagagccugaucaucaucagccccagcguggccgaccuggaccccuacgacaagagccugagaagcagaaucuuccccggcggcaagugccugggcaucaccgugagcagcaccuacugcagcaccaaccacgacuacaccaucuggaugcccgaggaggccagacugggcaccagcugcgacaucuucaccaacagcaagggcaagagagccagcaagggcggcaagaucugcggcuucguggacgagagaggccuguacaagagccugaagggcgccugcaagcugaagcugugcggcgugagcggccugagacugauggacggcaccuggguggccauccagaccagcgaggagaccaaguggugccccagcgaccagcuggugaaccugcacgacuuccacagcgacgagaucgagcaccuggugguggaggagcuggugaagaagagagaggagugccuggacgcccuggagagcaucaugaccaccaagagcgugagcuucagaagacugagccaccugagaaagcuggugcccggcuucggcaaggccuacaccaucuucaacaagacccugauggaggccgacgcccacuacaacagcgugagaaccuggaacgagaucauccccagcaagggcugccugaaggugggcggcagaugccacccccacguggacggcguguucuucaacggcaucauccugggccccgacggcaacgugcugauccccgagaugcagagcagccugcugcagcagcacauggagcugcuggagagcagcgugaucccccugaugcacccccuggccgaccccagcaccguguucaaggagggcgacgaggccgagaacuucguggaggugcaccugcccgacauccacaagcaggugagcggcaucgaccugggccugcccaacuggggcaaguaccugcugaugagcgccggcgcccuggccgcccugauccugaccaucuuccugaucaccugcugcagaagagugaacaccaccaagagcaucaagcagggccccgaggagagcagaagaaaggugagcgugaccccccagagcggcagaguggugagcagcugggagcuguacaagaagggcggcgagaccaagcuguga

SEQ ID NO: 191685 - RNA, 1575 nt, Artificial Sequence
  derived and/or modified CDS sequence (opt4) from glycoprotein__RABV__KJ174662.1
augaucccccaggcccugcugcugcugccccugaugaucagcagccugugccugggcaaguuccccaucuacaccauccccgacaagcugggccccuggagccccaucgacauccaccaccugagcugccccaacaaccuggugguggaggacgagggcugcaccagccugagcggcuucagcuacauggagcugaaggugggcuacaucagcgccaucaaggugaacggcuucaccugcaccggcguggugaccgaggccgagaccuacaccaacuucgugggcuacgugaccaccaccuucaagagaaagcacuucagacccaugcccgacgccugcagagccgccuacaacuggaagguggccggcgaccccagauacgaggagagccugcagaaccccuaccccgacuaccacuggcugagaaccgugaagaccaccaaggagagccugaucaucaucagccccagcguggccgaccuggaccccuacgacaagagccugagaagcagaaucuuccccggcggcaagugccugggcaucaccgugagcagcaccuacugcagcaccaaccacgacuacaccaucuggaugcccgaggaggccagacugggcaccagcugcgacaucuucaccaacagcaagggcaagagagccagcaagggcggcaagaucugcggcuucguggacgagagaggccuguacaagagccugaagggcgccugcaagcugaagcugugcggcgugagcggccugagacugauggacggcaccuggguggccauccagaccagcgaggagaccaaguggugccccagcgaccagcuggugaaccugcacgacuuccacagcgacgagaucgagcaccuggugguggaggagcuggugaagaagagagaggagugccuggacgcccuggagagcaucaugaccaccaagagcgugagcuucagaagacugagccaccugagaaagcuggugcccggcuucggcaaggccuacaccaucuucaacaagacccugauggaggccgacgcccacuacaacagcgugagaaccuggaacgagaucauccccagcaagggcugccugaaggugggcggcagaugccacccccacguggacggcguguucuucaacggcaucauccugggccccgacggcaacgugcugauccccgagaugcagagcagccugcugcagcagcacauggagcugcuggagagcagcgugaucccccugaugcacccccuggccgaccccagcaccguguucaaggagggcgacgaggccgagaacuucguggaggugcaccugcccgacauccacaagcaggugagcggcaucgaccugggccugcccaacuggggcaaguaccugcugaugagcgccggcgcccuggccgcccugaugcugaccaucuuccugaucaccugcugcagaagagugaacaccaccaagagcaucaagcagggccccgaggagagcagaagaaaggugagcgugaccccccagagcggcagaguggugagcagcugggagcuguacaagaagggcggcgagaccagacuguga

SEQ ID NO: 191686 - RNA, 1575 nt, Artificial Sequence
  derived and/or modified CDS sequence (opt4) from glycoprotein__RABV__KJ174663.1
augaucccccaggccauccugagcgugccccugcugaucagcagccugugcuucggcaaguuccccaucuacaccauccccgagaagcugggccccuggagccccaucgacauccaccaccugagcugccccaacaaccuggugguggaggacgagggcugcaccacccugagcggcuucagcuacaucgagcugaaggugggcuacaucagcgccaucaaggugaacggcuucaccugcaccggcguggugaccgaggccgagaccuacaccaacuucgugggcuacgugaccaccaccuucaagagaaagcacuucagacccaugcccgacgccugcagagccgccuacaacuggaagaucgccggcgaccccagauacgaggagagccugcacaaccccuaccccgacuaccacuggcugagaaccgugaagaccaccaaggagagccuggugaucaucagccccagcguggccgaccuggaccccuacgacaagagccugcacagcagaguguuccccggcggcaagugccugggcaucaccaucagcagcaccuacugcagcaccaaccacgacuacaccaucuggaugcccgaggaggccagacugggcaccagcugcgacaucuucaccaacagcagaggcaagagagccagcaagggcggcagaaccugcggcuucguggacgagagaggccuguacaagagccugaagggcgccugcaagcugaagcugugcggcgugcccggccugagacugauggacggcaccugggugagcauccaggccagcgacgagaccaaguggugcagccccgaccagcuggugaacgugcacgacuuccacagcgacgagaucgagcaccuggugguggaggagcuggugaagagaagagaggagugccuggacgcccuggagagcaucgugaccaccaagagcaucagcuucagaagacugagccaccugagaaagcuggugcccggcuucggcaaggccuacaccaucuucaacaagacccugauggaggccgacgcccacuacaagagcgugagaaccuggaacgagaucauccccagcaagggcugccugagcgugggcggcagaugccacccccacgugaacggcguguucuucaacggcaucauccugggccccgacggcaacgugcugauccccgagaugcagagcagccugcugcagcagcacauggagcugcuggagagcagcgugaucccccugaugcacccccuggccgaccccagcaccguguucaaggacggcgacgaggccgaggacuucguggaggugcaccugcccgacgugcaggagcaggugagcggcguggaccugggccugcccaacuggggcaaguacgugcugaugagcgccggcgcccuggccauccugauccugaccaucuuccugaucaccugcugcagaagagccaacaagaccaagagcacccagcagggccugggcggcagcggcagaaaggugagcgugagcccccagaacggcaaggugaucagcagcugggagagcuacaagaacggcggcgagaccagacuguga

SEQ ID NO: 191687 - RNA, 1575 nt, Artificial Sequence
  derived and/or modified CDS sequence (opt4) from glycoprotein__RABV__KJ174664.1
augaucccccaggccauccugagcgugccccugcugaucagcagccugugcuucggcaaguuccccaucuacaccauccccgagaagcugggccccuggagccccaucgacauccaccaccugagcugccccaacaaccuggugguggaggacgagggcugcaccacccugagcggcuucagcuacaucgagcugaaggugggcuacaucagcgccaucaaggugaacggcuucaccugcaccggcguggugaccgaggccgagaccuacaccaacuucgugggcuacgugaccaccaccuucaagagaaagcacuucagacccaugcccgacgccugcagagccgccuacaacuggaagaucgccggcgaccccagauacgaggagagccugcacaaccccuaccccgacuaccacuggcugagaaccgugaagaccaccaaggagagccuggugaucaucagccccagcguggccgaccuggaccccuacgacaagagccugcacagcagaguguuccccggcggcaagugccugggcaucaccaucagcagcaccuacugcagcaccaaccacgacuacaccaucuggaugcccgaggaggccagacugggcaccagcugcgacaucuucaccaacagcagaggcaagagagccagcaagggcggcagaaccugcggcuucguggacgagagaggccuguacaagagccugaagggcgccugcaagcugaagcugugcggcgugcccggccugagacugauggacggcaccugggugagcauccaggccagcgacgagaccaaguggugcagccccgaccagcuggugaacgugcacgacuuccacagcgacgagaucgagcaccuggugguggaggagcuggugaagagaagagaggagugccuggacgcccuggagagcaucgugaccaccaagagcgugagcuucagaagacugagccaccugagaaagcuggugcccggcuucggcaaggccuacaccaucuucaacaagacccugauggaggccgacgcccacuacaagagcgugagaaccuggaacgagaucauccccagcaagggcugccugagcgugggcggcagaugccacccccacgugaacggcguguucuucaacggcaucauccugggccccgacggcaacgugcugauccccgagaugcagagcagccugcugcagcagcacauggagcugcuggagagcagcgugaucccccugaugcacccccuggccgaccccagcaccguguucaaggacggcgacgaggccgaggacuucguggaggugcaccugcccgacgugcaggagcaggugagcggcguggaccugggccugcccaacuggggcaaguacaugcugaugagcgccggcgcccuggccauccugauccugaccaucuuccugaucaccugcugcagaagagccaacaagaccaagagcacccagcagggccugggcggcagcggcagaaaggugagcgugagcccccagaacggcaaggugaucagcagcugggagagcuacaagaacggcggcgagaccagacuguga

SEQ ID NO: 191688 - RNA, 1575 nt, Artificial Sequence
  derived and/or modified CDS sequence (opt4) from glycoprotein__RABV__KJ174665.1
augaucccccaggccauccugagcgugccccugcugaucagcagccugugcuucggcaaguuccccaucuacaccauccccgagaagcugggccccuggagccccaucgacauccaccaccugagcugccccaacaaccuggugguggaggacgagggcugcaccacccugagcggcuucagcuacaucgagcugaaggugggcuacaucagcgccaucaaggugaacggcuucaccugcaccggcguggugaccgaggccgagaccuacaccaacuucgugggcuacgugaccaccaccuucaagagaaagcacuucagacccaugcccgacgccugcagagccgccuacaacuggaagaucgccggcgaccccagauacgaggagagccugcacaaccccuaccccgacuaccacuggcugagaaccgugaagaccaccaaggagagccuggugaucaucagccccagcguggccgaccuggaccccuacgacaagagccugcacagcagaguguuccccggcggcaagugccugggcaucaccaucagcagcaccuacugcagcaccaaccacgacuacaccaucuggaugcccgaggaggccagacugggcaccagcugcgacaucuucaccaacagcagaggcaagagagccagcaagggcggcagaaccugcggcuucguggacgagagaggccuguacaagagccugaagggcgccugcaagcugaagcugugcggcgugcccggccugagacugauggacggcaccugggugagcauccaggccagcgacgagaccaaguggugcagccccgaccagcuggugaacgugcacgacuuccacagcgacgagaucgagcaccuggugguggaggagcuggugaagagaagagaggagugccuggacgcccuggagagcaucgugaccaccaagagcaucagcuucagaagacugagccaccugagaaagcuggugcccggcuucggcaaggccuacaccaucuucaacaagacccugauggaggccgacgcccacuacaagagcgugagaaccuggaacgagaucauccccagcaagggcugccugagcgugggcggcagaugccacccccacgugaacggcguguucuucaacggcaucauccugggccccgacggcaacgugcugauccccgagaugcagagcagccugcugcagcagcacauggagcugcuggagagcagcgugaucccccugaugcacccccuggccgaccccagcaccguguucaaggacggcgacgaggccgaggacuucguggaggugcaccugcccgacgugcaggagcaggugagcggcguggaccugggccugcccaacuggggcaaguacgugcugaugagcgccggcgcccuggccauccugauccugaccaucuuccugaucaccugcugcagaagagccaacaagaucaagagcaccagacagggccugggcggcagcggcagaaaggugagcgugagcccccagaacggcaaggugaucagcagcugggagagcuacaagaacggcggcgagaccagacuguga

SEQ ID NO: 191689 - RNA, 1575 nt, Artificial Sequence
  derived and/or modified CDS sequence (opt4) from glycoprotein__RABV__KJ174666.1
augaucccccaggcccugcuguucgugccccugcugauccccagccugugccugggcaaguuccccaucuacaccauccccgacaagcugggccccuggagccccaucgacauccaccaccugagcugccccaacaaccuggugguggaggacgagggcugcaccagccugagcggcuucagcuacauggagcugaaggugggcuacaucagcgccaucaaggugaacggcuucaccugcaccggcguggugaccgaggccgagaccuacaccaacuucgugggcuacgugaccaccaccuucaagagaaagcacuucagacccaugcccgacgccugcagagccgcccacgacuggaagaucgccggcgaccccagauacgaggacagccugcagaaccccuaccccgacuaccacuggcugagaaccgugaagaccaccaaggagagccuggugaucaucagccccagcguggccgagcuggaccccuacgacaagagccugcacagcagaguguuccccagcggcaagugccugggcaucaccgugagcagcaccuacugcagcaccaaccacgacuacaccaucuggaugcccguggaggccagacugggcaccagcugcgacaucuucaccaacagcagaggcaagaaggccagcaagggcggcagaaccugcggcuucguggacgagagaggccuguacaagagccugaagggcgccugcaagcugaagcugugcggcgugcccggccugagacugauggacggcaccugggugagcauccagaccagcgacgacaucaaguggugcccccccgaccagcuggugaaccugcacgacuuccacagcgacgagaucgagcaccuggugguggaggagcugaucaagaagagagagggcugccuggacgcccuggagagcaucaugaccaccaagagcgugagcuucagaagacugagccaccugagaaagcuggugcccggcuucggcaaggccuacaccaucuucaacaacacccugauggaggccgacgcccacuacaagagcgugagaaccuggaacgaggugauccccagcaagggcugccugaaggugggcggcagaugccacccccccgugaacggcguguucuucaacggcaucauccugggccccgacggcaaggugcugauccccgagaugcagagcagccugcugcagcagcacauggagcugcuggagagcagcgugaucccccugaugcacccccuggccgaccccagcaccguguucaaggacggcgacgaggccgaggacuucguggaggugcaccugcccgacgugcacaagcaggugagcgacguggaccugggccugcccagcuggggcaaguaccugcugaugagcgccggcgcccuggccacccugauccuggccaucuuccugaucaccugcugcagaagagccaacagaaccgagagcacccagagaggccacagagagagcggcggcaagaugagcguggccccccagaacggcaagaucaucagcagcugggagcuguacaagagcgagagcgagaccggcauguga

SEQ ID NO: 191690 - RNA, 1575 nt, Artificial Sequence
  derived and/or modified CDS sequence (opt4) from glycoprotein__RABV__KJ174667.1
augaucuuccaggcccugcuguucgugccccugcugaucagcagccugugccugggcaaguuccccaucuacaccauccccgacaagcugggccccuggagccccaucgacauccaccaccugagcugccccaacaaccuggugguggaggacgagggcugcaccagccugagcggcuucagcuacauggagcugaaggugggcuacaucagcgccaucaaggugaacggcuucaccugcaccggcguggugaccgaggccgagaccuacaccaacuucgugggcuacgugaccaccaccuucaagagaaagcacuucagacccauccccgacgccugcagagccgccuacaacuggaagaucgccggcgaccccagauacgaggagagccugcagaaccccuaccccgacuaccacuggcugagaaccgugaagaccaccaaggagagccugaucaucaucagccccagcguggccgaccuggaccccuacgacaagagccugcacagcagacuguuccccggcggcaagugccugggcaucaccaucagcagcaccuacugcagcaccaaccacgacuacaccaucuggaugcccgaggagcccagacugggcaccagcugcgacaucuucaccaacagcaagggcaagaaggccagcaagggcggcaaggugugcggcuucguggacgagagaggccuguacaagagccugaagggcgccugcaagcugaagcugugcggcgugagcggccugagacugauggacggcaccugggugaccauccagaccagcgacgagaccaaguggugcccccccgaccagcuggugaaccugcacgacuuccacagcgacgagaucgagcaccuggugguggaggagcuggugaagaagagagaggagugccuggacgcccuggagagcaucaugaccaccaagagcgugagcuucagaagacugagcuaccugagaaagcuggugcccggcuucggcaaggccuacaccaucuucaacaagacccugauggaggccgacgcccacuacaagagcgugagaaccuggaacgagaucauccccagcaagggcugccugaaggugagcgacagaugccacccccacguggacggcguguucuucaacggcaucauccugggccccgacggcaacgugcugauccccgagaugcagagcagccugcugcagcagcacauggagcugcuggagagcagcgugaucccccugaugcacccccuggccgaccccagcaccguguucaaggacggcgacgaggccgaggacuucguggaggugcaccugcccgacgugcacaagcagaucagcggcguggaccugggccugcccagcuggggcaaguaccugcugaugaucgccggcggccuggccacccuggugcugaucaucuuccugauggccugcugcagaagaaccaagagaaccgagcccagaagaagaggcagcggcgagagcggcgagaaggugcuggccaccccccagcccaagaagguggugagcagcugggagcuguacaagagagagggcgacgccagacuguga

SEQ ID NO: 191691 - RNA, 1575 nt, Artificial Sequence
  derived and/or modified CDS sequence (opt4) from glycoprotein__RABV__KJ174668.1
augaucuuccaggcccugcuguucgugccccugcugaucagcagccugugccugggcaaguuccccaucuacaccauccccgacaagaucggccccuggagccccaucgacauccaccaccugagcugccccaacaaccuggugguggaggacgagggcugcaccagccugagcggcuucagcuacauggagcugaaggugggcuacaucagcgccaucaaggugaacggcuucaccugcaccggcguggugaccgaggccgagaccuacaccaacuucgugggcuacgugaccaccaccuucaagagaaagcacuucagacccauccccgacgccugcagagccgccuacaacuggaagaucgccggcgaccccagauacgaggagagccugcagaaccccuaccccgacuaccacuggcugagaaccgugaagaccaccaaggagagccugaucaucaucagccccagcguggccgaccuggaccccuacgacaagagccugcacagcagacuguuccccggcggcaagugccugggcaucaccaucagcagcaccuacugcagcaccaaccacgacuacaccaucuggaugcccgaggagcccagacugggcaccagcugcgacaucuucaccaacagcaagggcaagaaggccagcaagggcggcaaggugugcggcuucguggacgagagaggccuguacaagagccugaagggcgccugcaagcugaagcugugcggcgugagcggccugagacugauggacggcaccugggugaccauccagaccagcgacgagaccaaguggugcccccccgaccagcuggugaaccugcacgacuuccacagcgacgagaucgagcaccuggugguggaggagcuggugaagaagagagaggagugccuggacgcccuggagagcaucaugaccaccaagagcgugagcuucagaagacugagcuaccugagaaagcuggugcccggcuucggcaaggccuacaccaucuucaacaagacccugauggaggccgacgcccacuacaagagcgugagaaccuggaacgagaucauccccagcaagggcugccugaaggugagcgacagaugccacccccacguggacggcguguucuucaacggcaucauccugggccccgacggcaacgugcugauccccgagaugcagagcagccugcugcagcagcacauggagcugcuggagagcagcgugaucccccugaugcacccccuggccgaccccagcaccguguucaaggacggcgacgaggccgaggacuucguggaggugcaccugcccgacgugcacaagcagaucagcggcguggaccugggccugcccagcuggggcaaguaccugcugaugaucgccggcggccuggccacccuggugcugaucaucuuccugauggccugcugcagaagaaccaagagaaccgagagcagaagaagaggcagcggcgagagcggcgagaaggugcuggccaccccccagcccaagaagguggugagcagcugggagcuguacaagagagagggcgacgccagacuguga

SEQ ID NO: 191692 - RNA, 1575 nt, Artificial Sequence
  derived and/or modified CDS sequence (opt4) from glycoprotein__RABV__KJ174669.1
augaucuuccaggcccugcuguucgugccccugcugaucagcagccugugccugggcaaguuccccaucuacaccauccccgacaagaucggccccuggagccccaucgacauccaccaccugagcugccccaacaaccuggugguggaggacgagggcugcaccagccugagcggcuucagcuacauggagcugaaggugggcuacaucagcgccaucaaggugaacggcuucaccugcaccggcguggugaccgaggccgagaccuacaccaacuucgugggcuacgugaccaccaccuucaagagaaagcacuucagacccauccccgacgccugcagagccgccuacaacuggaagaucgccggcgaccccagauacgaggagagccugcagaaccccuaccccgacuaccacuggcugagaaccgugaagaccaccaaggagagccugaucaucaucagccccagcguggccgaccuggaccccuacgacaagagccugcacagcagacuguuccccggcggcaagugccugggcaucaccaucagcagcaccuacugcagcaccaaccacgacuacaccaucuggaugcccgaggagcccagacugggcaccagcugcgacaucuucaccaacagcaagggcaagaaggccagcaagggcggcaaggugugcggcuucguggacgagagaggccuguacaagagccugaagggcgccugcaagcugaagcugugcggcgugagcggccugagacugauggacggcaccugggugaccauccagaccagcgacgagaccaaguggugcccccccgaccagcuggugaaccugcacgacuuccacagcgacgagaucgagcaccuggugguggaggagcuggugaagaagagagaggagugccuggacgcccuggagagcaucaugaccaccaagagcgugagcuucagaagacugagcuaccugagaaagcuggugcccggcuucggcaaggccuacaccaucuucaacaagacccugauggaggccgacgcccacuacaagagcgugagaaccuggaacgagaucauccccagcaagggcugccugaaggugagcgacagaugccacccccacguggacggcguguucuucaacggcaucauccugggccccgacggcaacgugcugauccccgagaugcagagcagccugcugcagcagcacauggagcugcuggagagcagcgugaucccccugaugcacccccuggccgaccccagcaccguguucaaggacggcgacgaggccgaggacuucguggaggugcaccugcccgacgugcacaagcagaucagcggcguggaccugggccugcccagcuggggcaaguaccugcugaugaucgccggcggccuggccacccuggugcugaucaucuuccugauggccugcugcagaagaaccaagagagccgagagcagaagaagaggcagcggcgagagcggcgagaaggugcuggccaccccccagcccaagaagguggugagcagcugggagcuguacaagagagagggcgacgccagacuguga

SEQ ID NO: 191693 - RNA, 1575 nt, Artificial Sequence; identical to SEQ ID NO: 191691
  derived and/or modified CDS sequence (opt4) from glycoprotein__RABV__KJ174670.1

SEQ ID NO: 191694 - RNA, 1575 nt, Artificial Sequence; identical to SEQ ID NO: 191480
  derived and/or modified CDS sequence (opt4) from glycoprotein__RABV__KJ174671.1

SEQ ID NO: 191695 - RNA, 1575 nt, Artificial Sequence
  derived and/or modified CDS sequence (opt4) from glycoprotein__RABV__KJ174672.1
augaucuuccaggcccugcuguucgugccccugcugaucagcagccugugccugggcaaguuccccaucuacaccauccccgacaagcugggccccuggagccccaucgacauccaccaccugagcugccccaacaaccuggugguggaggacgagggcugcaccagccugagcggcuucagcuacauggagcugaaggugggcuacaucagcgccaucaaggugaacggcuucaccugcaccggcguggugaccgaggccgagaccuacaccaacuucgugggcuacgugaccaccaccuucaagagaaagcacuucagacccauccccgacgccugcagagccgccuacaacuggaagaccgccggcgaccccagauacgaggagagccugcagaaccccuaccccgacuaccacuggcugagaaccgugaagaccaccaaggagagccugaucaucaucagccccagcguggccgaccuggaccccuacgacaagagccugcacagcagacuguuccccggcggcaagugccugggcaucaccaucagcagcaccuacugcagcaccaaccacgacuacaccaucuggaugcccgaggagcccagacugggcaccagcugcgacaucuucaccaacagcaagggcaagaaggccagcaagggcggcaaggugugcggcuucguggacgagagaggccuguacaagagccugaagggcgccugcaagcugaagcugugcggcgugagcggccugagacugauggacggcaccugggugaccauccagaccagcgacgagaccaaguggugcccccccgaccagcuggugaaccugcacgacuuccacagcgacgagaucgagcaccuggugguggaggagcuggugaagaagagagaggagugccuggacgcccuggagagcaucaugaccaccaagagcgugagcuucagaagacugagcuaccugagaaagcuggugcccggcuucggcaaggccuacaccaucuucaacaagacccugauggaggccgacgcccacuacaagagcgugagaaccuggaacgagaucauccccagcaagggcugccugaaggugagcgacagaugccacccccacguggacggcguguucuucaacggcaucauccugggccccgacggcaacgugcugauccccgagaugcagagcagccugcugcagcagcacauggagcugcuggagagcagcgugaucccccugaugcacccccuggccgaccccagcaccguguucaaggacggcgacgaggccgaggacuucguggaggugcaccugcccgacgugcacaagcagaucagcggcguggaccugggccugcccagcuggggcaaguaccugcugaugaucgccggcggccuggccacccuggugcugaucaucuuccugauggccugcugcagaagaaccaagagaaccgagagcagaagaagaggcagcggcgagagcggcgagaaggugcuggccaccccccagcccaagaagguggugagcagcugggagcuguacaagagagagggcgacgccagacuguga

SEQ ID NO: 191696 - RNA, 1575 nt, Artificial Sequence; identical to SEQ ID NO: 191690
  derived and/or modified CDS sequence (opt4) from glycoprotein__RABV__KJ174673.1

SEQ ID NO: 191697 - RNA, 1575 nt, Artificial Sequence
  derived and/or modified CDS sequence (opt4) from glycoprotein__RABV__KJ174674.1
augaucuuccaggcccugcuguucgugccccugcugaucagcagccugugccugggcaaguuccccaucuaccccauccccgacaagcugggccccuggagccccaucgacauccaccaccugagcugccccaacaaccuggugggcgaggacgagggcugcaucagccugagcggcuucagcuacauggagcugaaggugggcuacaucagcgccaucaaggugaacggcuucaccugcaccggcguggugaccgaggccgagaccuacaccaacuucgugggcuacgugaccaccaccuucaagagaaagcacuucagacccauccccgacgccugcagagccgccuacaacuggaagaucgccggcgaccccagauacgaggagagccugcagaaccccuaccccgacuaccacuggcugagaaccgugaagaccaccaaggagagccugaucaucaucagccccagcguggccgaccuggaccccuacgacaagagccugcacagcagacuguuccccggcggcaagugccugggcaucaccaucagcagcaccuacugcagcaccaaccacgacuacaccaucuggaugcccgaggagcccagacugggcaccagcugcgacaucuucaccaacagcaagggcaagaaggccagcaagggcggcaaggugugcggcuucguggacgagagaggccuguacaagagccugaagggcgccugcaagcugaagcugugcggcgugagcggccugagacugauggacggcaccugggugaccauccagaccagcgacgagaccaaguggugcccccccgaccagcuggugaaccugcacgacuuccacagcgacgagaucgagcaccuggugguggaggagcuggugaagaagagagaggagugccuggacgcccuggagagcaucaugaccaccaagagcgugagcuucagaagacugagcuaccugagaaagcuggugcccggcuucggcaaggccuacaccaucuucaacaagacccugauggaggccgacgcccacuacaagagcgugagaaccuggaacgagaucauccccagcaagggcugccugaaggugagcgacagaugccacccccacguggacggcguguucuucaacggcaucauccugggccccgacggcaacgugcugauccccgagaugcagagcagccugcugcagcagcacauggagcugcuggagagcagcgugaucccccugaugcacccccuggccgaccccagcaccguguucaaggacggcgacgaggccgaggacuucguggaggugcaccugcccgacgugcacaagcagaucagcggcguggaccugggccugcccagcuggggcaaguaccugcugaugaucgccggcggccuggccacccuggugcugaucaucuuccugauggccugcugcagaagaaccaagagaaccgagagcagaagaagaggcagcggcgagagcggcgagaaggugcuggccaccccccagcccaagaagguggugagcagcugggagcuguacaagagagagggcgacgccagacuguga

SEQ ID NO: 191698 - RNA, 1575 nt, Artificial Sequence; identical to SEQ ID NO: 191372
  derived and/or modified CDS sequence (opt4) from glycoprotein__RABV__KJ174675.1

SEQ ID NO: 191699 - RNA, 1575 nt, Artificial Sequence
  derived and/or modified CDS sequence (opt4) from glycoprotein__RABV__KJ174676.1
augaucccccaggcccugcuguucgugccccugcugaucagcagccugugcuucggcagauuccccaucuacaccauccccgacaagcugggccccuggagccccaucgacauccaccaccugagcugccccaacaaccuggugguggaggacgagggcugcaccagccugagcggcuucagcuacauggagcugaaggugggcuacaucagcgccaucaaggugaacggcuucaccugcaccggcguggugaccgaggccgagaccuacaccaacuucgugggcuacgugaccaccaccuucaagagaaagcacuucagacccaugcccgacgccugcagaaccgccuacaacuggaagaucgccggcgaccccagauacgaggagagccugcagaaccccuaccccgacuacaacuggcugagaaccgugaagaccaccaaggagagccugaucgugaucagccccagcguggccgaccuggaccccuacgacaagagccugcacagcagaguguuccccggcggcaagugccugggcaucaccaucagcagcaccuacugcagcaccaaccacgacuacaccaucuggaugcccgaggaggccagacugggcaccagcugcgacaucuucaccaacagcagaggcaagagagccagcaagggcggcaagaccugcggcuucguggacgagagaggccuguacaagagccugaagggcgccugcaagcugaagcugugcggcgugcccggccugagacugauggacggcaccugggugaccauccagaccagcgacgagaccaaguggugccccagcgaccagcuggugaaccugcacgacuuccacagcgacgagaucgagcaccuggugguggaggagcuggugaagaagagagaggagugccuggacgcccuggagagcaucaugaccaccaagagcgugagcuucagaagacugagccaccugagaaagcuggugcccggcuucggcaaggccuacaccaucuucaacaagacccugauggaggccgacgcccacuacaagagcaucagaaccuggaacgaggugauccccagcaagggcugccugaaggugggcggcagaugccacccccacguggacggcguguucuucaacggcaucauccugggccccgacggcaacgugcugauccccgagaugcagagcagccugcugcagcagcacguggagcugcuggagagcagcgugaucccccugaugcacccccuggccgaccccagcaccguguucaaggacggcgacgaggccgaggacuucguggaggugcacuuccccgacauccacaagcaggugagcggcguggaccugggccugcccaacuggggcaaguaccugcugaugagcgccggcgcccuggccgcccugaugcuggccaucuuccugaugaccugcugcagaagagugaacagaaccgagagcauccagagaggccccggcgagagcggcagaaaggugagcaucaccagccagaacggcaaggugaucagcagcugggagcuguacaagagcggcggcgagaccggccuguga

SEQ ID NO: 191700 - RNA, 1575 nt, Artificial Sequence
  derived and/or modified CDS sequence (opt4) from glycoprotein__RABV__KJ174677.1
augaucccccaggcccugcuguucgugccccugcugaucagcagccugugcuucggcggcuuccccaucuacaccauccccgacaagcugggccccuggagccccaucgacauccaccaccugagcugccccaacaaccuggugguggaggacgagggcugcaccagccugagcggcuucagcuacauggagcugaaggugggcuacaucagcgccaucaaggugaacggcuucaccugcaccggcguggugaccgaggccgagaccuacaccaacuucgugggcuacgugaccaccaccuucaagagaaagcacuucagacccaugcccgacagcugcagagccgccuacaacuggaagaccgccggcgaccccagauacgaggagagccugcagaaccccuaccccgacuaccacuggcugagaaccgugaagaccaccaaggagagccugaucaucaucagccccagcguggccgaccuggaccccuacgacaagagccugcacagcagaguguuccccggcggcaagugccugggcaucaccgugagcagcaccuacugcagcaccaaccacgacuacaccaucuggaugcccgaggaggccagacugggcaccagcugcgacaucuucaccaacagcagaggcaagagagccagcaagggcggcagaaccugcggcuucguggacgagagaggccuguacaagagccugaagggcgccugcaagcugaagcugugcggcgugcugggccugagacugauggacggcaccugggugaccauccacaccagcaacgagaccaaguggugccccagcgaccagcuggugaaccugcacgacuuccacagcgacgagaucgagcaccuggugguggaggagcuggugaagaagagagaggagugccuggacgcccuggagagcaucaugaccaccaagagcgugagcuucagaagacugagccaccugagaaagcuggugcccggcuucggcaaggccuacaccaucuucaacaagacccugauggaggccgacgcccacuacaagagcaucagaaccuggaacgagaucauccccagcaagggcugccugaaggugggcggcagaugccacccccacguggacggcguguucuucaacggcaucauccugggccccgacggcaacgugcugauccccgagaugcagagcagccugcugcagcagcacguggagcugcuggagagcagcgugaucccccugaugcacccccuggccgaccccagcaccguguucaaggacggcgacgaggccgaggacuucguggaggugcaccugcccgacgugcacaagcaggugagcggcguggaccugggccugcccaacuggggcaaguaccugcugaugagcgccggcgugcuggccacccugaugcugaccaucuuccugaucaccugcugcagaagaguggacagaaccgagagcauccagagaggccccggcgagcugggcagagaggugagcgugaccagccagaacggcaagguggugagcagcugggagcuguacaagagcggcggcgagaccagacuguga

SEQ ID NO: 191701 - RNA, 1575 nt, Artificial Sequence
  derived and/or modified CDS sequence (opt4) from glycoprotein__RABV__KJ174678.1
augaucccccaggcccugcuguucgugccccugcugaucagcagccugugcuucggcggcuuccccaucuacaccauccccgacaagcugggccccuggagccccaucgacauccaccaccugagcugccccaacaaccuggugguggaggacgagggcugcaccagccugagcggcuucagcuacauggagcugaaggugggcuacaucagcgccaucaaggugaacggcuucaccugcaccggcguggugaccgaggccgagaccuacaccaacuucgugggcuacgugaccaccaccuucaagagaaagcacuucagacccaugcccgacgccugcagagccgccuacaacuggaagaccgccggcgaccccagauacgaggagagccugcagaaccccuaccccgacuaccacuggcugagaaccgugaagaccaccaaggagagccugaucaucaucagccccagcguggccgaccuggaccccuacgacaagagccugcacagcagaguguuccccggcggcaagugccugggcaucaccgugagcagcaccuacugcagcaccaaccacgacuacaccaucuggaugcccgacgaggccagacugggcaccagcugcgacaucuucaccaacagcagaggcaagagagccagcaagggcggcagaaccugcggcuucguggacgagagaggccuguacaagagccugaagggcgccugcaagcugaagcugugcggcgugcugggccugagacugauggacggcaccugggugaccauccagaccagcaacgagaccaaguggugccccagcgaccagcuggugaaccugcacgacuuccacagcgacgagaucgagcaccuggugguggaggagcuggugaagaagagagaggagugccuggacgcccuggagagcaucaugaccaccaagagcgugagcuucagaagacugagccaccugagaaagcuggugcccggcuucggcaaggccuacaccaucuucaacaagacccugauggaggccgacgcccacuacaagagcaucagaaccuggaacgagaucauccccagcaagggcugccugaaggugggcggcagaugccacccccacauggacggcguguucuucaacggcaucauccugggccccgacggcaacgugcugauccccgagaugcagagcagccugcugcagcagcacguggagcugcuggagagcagcgugaucccccugaugcacccccuggccgaccccagcaccguguucaaggacggcgacgaggccgaggacuucguggaggugcaccugcccgacgugcacaagcaggugagcggcguggaccugggccugcccaacuggggcaaguaccugcugaugagcgccggcgcccuggccacccugaugcugaugaucuuccugaucaccugcugcagaagaguggacagaaccgagagcauccagagaggccccggcgagcugggcagagaggugagcgugaccagccagaacggcaaggugaucagcagcugggagcuguacaagagcggcggcgagaccagacuguga

SEQ ID NO: 191702 - RNA, 1575 nt, Artificial Sequence
  derived and/or modified CDS sequence (opt4) from glycoprotein__RABV__KJ174679.1
augaucccccaggcccuguucuucgugccccugcugaucagcagccugugcgugggcggcuuccccaucuacaccauccccgacaagcugggccccuggagccccaucgacauccaccaccugagcugccccaacaaccuggugguggaggacgagggcugcaccagccugagcggcuucagcuacauggagcugaaggugggcuacaucagcgccaucaaggugaacggcuucaccugcaccggcguggugaccgaggccgagaccuacaccaacuucgugggcuacgugaccaccaccuucaagagaaagcacuucagacccaugcccgacagcugcagagccgccuacaacuggaagaccgccggcgaccccagauacgaggagagccugcagaaccccuaccccgacuaccacuggcugagaaccgugaagaccaccaaggagagccugaucaucaucagccccagcguggccgaccuggaccccuacgacaagagccugcacagcagaguguuccccggcggcaagugccugggcaucaccgugagcagcaccuacugcagcaccaaccacgacuacaccaucuggaugcccgaggaggccagacugggcaccagcugcgacaucuucaccaacagcagaggcaagagagccagcaagggcggcagaaccugcggcuucguggacgagagaggccuguacaagagccugaagggcgccugcaagcugaagcugugcggcgugcugggccugagacugauggacggcaccugggugaccauccacaccagcaacgagaccaaguggugccccagcgaccagcuggugaaccugcacgacuuccacagcgacgagaucgagcaccuggugguggaggagcuggugaagaagagagaggagugccuggacgcccuggagagcaucaugaccaccaagagcgugagcuucagaagacugagccaccugagaaagcuggugcccggcuucggcaaggccuacaccaucuucaacaagacccugauggaggccgacgcccacuacaagagcaucagaaccuggaacgagaucauccccagcaagggcugccugaaggugggcggcagaugccacccccacguggacggcguguucuucaacggcaucauccugggccccgacggcaacgugcugauccccgagaugcagagcagccugcugcagcagcacguggagcugcuggagagcagcgugaucccccugaugcacccccuggccgaccccagcaccguguucaaggacggcgacgaggccgaggacuucguggaggugcaccugcccgacgugcacaagcaggugagcggcguggaccugggccugcccaacuggggcaaguaccugcugaugagcgccggcgugcuggccacccugaugcugaccaucuuccugaucaccugcugcagaagaguggacagaaccgagagcauccagagaggccccggcgagcugggcagagaggugagcgugaccagccagaacggcaaggugaucagcagcugggagcuguacaagagcggcggcgagaccagacuguga

SEQ ID NO: 191703 - RNA, 1575 nt, Artificial Sequence
  derived and/or modified CDS sequence (opt4) from glycoprotein__RABV__KJ174680.1
augaucccccaggcccugcuguucgugccccugcugaucagcagccugugcuucggcggcuuccccaucuacaccauccccgacaagcugggccccuggagccccaucgacauccaccaccugagcugccccaacaaccuggugguggaggacgagggcugcaccagccugagcggcuucagcuacauggagcugaaggugggcuacaucagcgccaucaaggugaacggcuucaccugcaccggcguggugaccgaggccgagaccuacaccaacuucgugggcuacgugaccaccaccuucaagagaaagcacuucagacccaugcccgacgccugcagagccgccuacaacuggaagaccgccggcgaccccagauacgaggagagccugcagaaccccuaccccgacuaccacuggcugagaaccgugaagaccaccaaggagagccugaucaucaucagccccagcguggccgaccuggaccccuacgacaagagccugcacagcagaguguuccccggcggcaagugccugggcaucaccgugagcagcaccuacugcagcaccaaccacgacuacaccaucuggaugcccgaggaggccagacugggcaccagcugcgacaucuucaccaacagcagaggcaagagagccagcaagggcggcagaaccugcggcuucguggacgagagaggccuguacaagagccugaagggcgccugcaagcugaagcugugcggcgugcugggccugagacugauggacggcaccugggugaccauccagaccagcaacgagaccaaguggugccccagcgaccagcuggugaaccugcacgacuuccacagcgacgagaucgagcaccuggugguggaggagcuggugaagaagagagaggagugccuggacgcccuggagagcaucaugaccaccaagagcgugagcuucagaagacugagccaccugagaaagcuggugcccggcuucggcaaggccuacaccaucuucaacaagacccugauggaggccgacgcccacuacaagagcaucagaaccuggaacgagaucauccccagcaagggcugccugaaggugggcggcagaugccacccccacguggacggcguguucuucaacggcaucauccugggccccgacggcaacgugcugauccccgagaugcagagcagccugcugcagcagcacguggagcugcuggagagcagcgugaucccccugaugcacccccuggccgaccccagcaccguguucaaggacggcgacgaggccgaggacuucguggaggugcaccugcccgacgugcacaagcaggugagcggcguggaccugggccugcccaacuggggcaaguaccugcugaugagcgccggcgcccuggccacccugaugcugaugaucuuccugaucaccugcugcagaagaguggacagaaccgagagcauccagagaggccccggcgagcugggcagagaggugagcgugaccagccagaacggcaaggugaucagcagcugggagcuguacaagagcggcggcgagaccagacuguga

SEQ ID NO: 191704 - RNA, 1575 nt, Artificial Sequence
  derived and/or modified CDS sequence (opt4) from glycoprotein__RABV__KJ174681.1
augaucccccaggcccugcuguucgugccccugcugaucagcagccugugcuucggcggcuuccccaucuacaccauccccgacaagcugggccccuggagccccaucgacauccaccaccugagcugccccaacaaccuggugguggaggacgagggcugcaccagccugagcggcuucagcuacauggagcugaaggugggcuacaucagcgccaucaaggugaacggcuucaccugcaccggcguggugaccgaggccgagaccuacaccaacuucgugggcuacgugaccaccaccuucaagagaaagcacuucagacccaugcccgacagcugcagagccgccuacaacuggaagaccgccggcgaccccagauacgaggagagccugcagaaccccuaccccgacuaccacuggcugagaaccgugaagaccaccaaggagagccugaucaucaucagccccagcguggccgaccuggaccccuacgacaagagccugcacagcagaguguuccccggcggcaagugccugggcaucaccgugagcagcaccuacugcagcaccaaccacgacuacaccaucuggaugcccgaggaggccagacugggcaccagcugcgacaucuucaccaacagcagaggcaagagagccagcaagggcggcagaaccugcggcuucguggacgagagaggccuguacaagagccugaagggcgccugcaagcugaagcugugcggcgugcugggccugagacugauggacggcaccugggugaccauccacaccagcaacgagaccaaguggugccccagcgaccagcuggugaaccugcacgacuuccacagcgacgagaucgagcaccuggugguggaggagcuggugaagaagagagaggagugccuggacgcccuggagagcaucaugaccaccaagagcgugagcuucagaagacugagccaccugagaaagcuggugcccggcuucggcaaggccuacaccaucuucaacaagacccugauggaggccgacgcccacuacaagagcaucagaaccuggaacgagaucauccccagcaagggcugccugaaggugggcggcagaugccacccccacguggacggcguguucuucaacggcaucauccugggccccgacggcaacgugcugauccccgagaugcagagcagccugcugcagcagcacguggagcugcuggagagcagcgugaucccccugaugcacccccuggccgaccccagcaccguguucaaggacggcgacgaggccgaggacuucguggaggugcaccugcccgacgugcacaagcaggugagcggcguggaccugggccugcccaacuggggcaaguaccugcuggugagcgccggcgugcuggccacccugaugcugaccaucuuccugaucaccugcugcagaagaguggacagaaccgagagcauccagagaggccccggcgagcugggcagaaaggugagcgugaccagccagaacggcaaggugaucagcagcugggagcuguacaagagcggcggcgagaccagacuguga

SEQ ID NO: 191705 - RNA, 1575 nt, Artificial Sequence
  derived and/or modified CDS sequence (opt4) from glycoprotein__RABV__KJ174682.1
augaucgcccaggcccugcuguucgugccccugcugaucagcccccugugcuucggcaaguuccccaucuacaccauccccgacaagcugggccccuggagccccaucgacauccaccaccugagcugccccaacaaccuggugguggaggacgaggagugcaccagccugagcggcuucagcuacauggagcugaaggugggcuacaucagcgccaucaaggugaacggcuucaccugcaccggcguggugaccgaggccgagaccuacaccaacuucgugggcuacgugaccaccaccuucaagagaaagcacuucagacccacccccgacgccugcagagccgccuacaacuggaagauggccggcgaccccagauacgaggagagccugcacaaccccuaccccgacuaccacuggcugagaaccgugaagaccaccaaggagagccugaucaucaucagccccagcguggccgaccuggaccccuacgacaagagccugcacagcagaguguuccccggcggcaagugccugggcaucaccaucagcagcaccuacugcagcaccaaccacgacuacaccaucuggaugcccgaggaggccagacugggcaccagcugcgacaucuucgccaacagcagaggcaagagagccagcaagggcggcagaaccugcggcuucguggacgagagaggccuguacaagagccugaagggcgccugcaagcugaagcugugcggcgugcccggccugagacugauggacggcaccugggugaccauccagaccagcaacgagaccaaguggugcccccccgacagacuggugaaccugcacgacuuccacagcgacgagaucgagcaccuggugguggaggagcuggugaagaagagagaggagugccuggacgcccuggagagcaucaugaccaccaagagcgugagcuucagaagacugagcuaccugagaaagcuggugcccggcuucggcaaggccuacaccaucuucaacaagacccugauggaggccgacgcccacuacaagagcgugagaaccuggaacgagaucauccccagcaagggcugccugaaggugggcggcagaugccacccccacguggacggcguguucuucaacggcaucauccugggccccgacggcaacgugcugauccccgagaugcagagcagccugcugcagcagcacauggagcugcuggagagcagcgugaucccccugaugcacccccuggccgaccccagcaccguguucaaggacggcgacgaggccgaggacuucguggaggugcaccugcccgacauccacaagcaggugagcggcguggaccugggccugcccgacuggggcaaguaccugcugaugagcgccggcgcccuggccacccugaugcugaccaucuuccugaugaccugcugcagaagagccaacagaaccgagagcauccagagaggccccggcgagagcggcagaaaggugagcgugaccccccagaacggcaaggugaucagcagcugggagcuguacaagagcggcggcgagaccaagcuguga

SEQ ID NO: 191706 - RNA, 1575 nt, Artificial Sequence
  derived and/or modified CDS sequence (opt4) from glycoprotein__RABV__KJ174683.1
augaucgcccaggcccugcuguucgugccccugcugaucagcccccugugccugggcaaguuccccaucuacaccauccccgacaagcugggccccuggagccccaucgacauccaccaccugagcugccccaacaaccuggugguggaggacgaggagugcaccagccugagcggcuucagcuacauggagcugaaggugggcuacaucagcgccaucaaggugaacggcuucaccugcaccggcguggugaccgaggccgagaccuacaccaacuucgugggcuacgugaccaccaccuucaagagaaagcacuucagacccacccccgacgccugcagagccgccuacaacuggaagauggccggcgaccccagauacgaggagagccugcacaaccccuaccccgacuaccacuggcugagaaccgugaagaccaccaaggagagccugaucaucaucagccccagcguggccgaccuggaccccuacgacaagagccugcacagcagaguguuccccggcggcaagugccugggcaucaccaucagcagcaccuacugcagcaccaaccacgacuacaccaucuggaugcccgaggaggccagacugggcaccagcugcgacaucuucgccaacagcagaggcaagagagccagcaagggcggcagaaccugcggcuucguggacgagagaggccuguacaagagccugaagggcgccugcaagcugaagcugugcggcgugcccggccugagacugauggacggcaccugggugaccauccagaccagcaacgagaccaaguggugcccccccgacagacuggugaaccugcacgacuuccacagcgacgagaucgagcaccuggugguggaggagcuggugaagaagagagaggagugccuggacgcccuggagagcaucaugaccaccaagagcgugagcuucagaagacugagcuaccugagaaagcuggugcccggcuucggcaaggccuacaccaucuucaacaagacccugauggaggccgacgcccacuacaagagcgugagaaccuggaacgagaucauccccagcaagggcugccugaaggugggcggcagaugccacccccacguggacggcguguucuucaacggcaucauccugggccccgacggcaacgugcugauccccgagaugcagagcagccugcugcagcagcacauggagcugcuggagagcagcgugaucccccugaugcacccccuggccgaccccagcaccguguucaaggacggcgacgaggccgaggacuucguggaggugcaccugcccgacauccacaagcaggugagcggcguggaccugggccugcccgacuggggcaaguaccugcugaugagcgccggcgcccuggccacccugaugcugaccaucuuccugaugaccugcugcagaagagccaacagaaccgagagcauccagagaggccccggcgagagcggcagaaaggugagcgugaccccccagaacggcaaggugaucagcagcugggagcuguacaagagcggcggcgagaccaagcuguga

SEQ ID NO: 191707 - RNA, 1575 nt, Artificial Sequence
  derived and/or modified CDS sequence (opt4) from glycoprotein__RABV__KJ466147.1
augaucccccaggcccugcuguucgugccccugcugguguucccccugugcuucggcaaguuccccaucuacaccauccccgacaagcugggccccuggagccccaucgacauccaccaccugagcugccccaacaaccuggugguggaggacgagggcugcaccaaccugagcggcuucagcuacauggagcugaaggugggcuacaucagcgccaucaaggugaacggcuucaccugcaccggcguggugaccgaggccgagaccuacaccaacuucgugggcuacgugaccaccaccuucaagagaaagcacuucagacccacccccgacgccugcagaagcgccuacaacuggaagauggccggcgaccccagauacgaggagagccugcacaaccccuaccccgacuaccacuggcugagaaccgugaagaccaccaaggagagcguggugaucaucagccccagcguggccgaccuggaccccuacgacgagagccugcacagcagaguguuccccagaggcaagugcagcggcaucaccgugagcagcgccuacugcagcaccaaccacgacuacaccaucuggaugcccgagaaccccagacugggcaccagcugcgacaucuucaccaacagcagaggcaagagagccagcaagggcagcaagaccugcggcuucguggacgagagaggccuguacaagagccugaagggcgccugcaagcugaagcugugcggcgugcugggccugagacugauggacggcaccuggguggccauccagaccagcaacgagaccaaguggugcccccccgaccagcuggugaaccugcacgacuuccacagcgacgagaucgagcaccuggugguggaggagcuggugaagaagagagaggagugccuggacgcccuggagagcaucaugaccaccaagagcgugagcuucagaagacugagccaccugagaaagcuggugcccggcuucggcaaggccuacaccaucuucaacaagacccugauggaggccgacgcccacuacaagagcgugcagaccuggaacgagaucauccccagcaagggcugccugagagugggcggcagaugccacccccacgugaacggcguguucuucaacggcaucauccugggccccgacggccacgugcugauccccgagaugcagagcagccugcugcagcagcacauggagcugcugaagagcagcgugaucccccugaugcacccccuggccgaccccagcaccguguucaaggacggcgacgagguggaggacuucguggaggugcaccugcaggacgugcacaagcaggugagcggcguggaccugggccugcccaacuggggcaaggacgugcugaugggcgccggcgugcugaccgcccugaugcugaugaucuuccugaugaccugcugcagaagaaccaacagagccgagagcauccagcacagccugggcgagaccggcagaaaggugagcgugaccccccagagcggcagagugaucagcagcugggagagcuacaagagcggcggcgagaccaagcuguga

SEQ ID NO: 191708 - RNA, 1575 nt, Artificial Sequence
  derived and/or modified CDS sequence (opt4) from glycoprotein__RABV__KJ476819.1
auggugccccaggcccugcugcuggugccccugcugguguucagcaugugcuucggcaaguuccccaucuacaccauccccgacaagcugggccccuggagccccaucgacauccaccaccugagcugccccaacaaccuggugguggaggacgagggcugcaccaaccugagcggcuucagcuacauggagcugaaggugggccacaucagcgccaucaaggugaacggcuucaccugcaccggcguggugaccgaggccgagaccuacaccaacuucgugggcuacgugaccaccaccuucaagagaaagcacuucagacccacccccgacgccugcagagccgccuacaacuggaagauggccggcgaccccagauacgaggagagccugcacaaccccuaccccgacuaccacuggcugagaaccgugaagaccaccaaggagagccuggugaucaucagccccagcguggccgaccuggaccccuacgacaagagccugcacagcagaguguuccccaacggcaagugcagcggcaucaccaucagcagcaccuacugccccaccaaccacgacuacaccaucuggcugcccgagaaccccagacugggcaccagcugcgacaucuucaccaacagcagaggcaagagagccagcaagggcagcaagaccugcggcuucguggacgagagaggccuguacaagagccugaagggcgccugcaagcugaagcugugcggcgugcugggccugagacugauggacggcaccuggguggccaugcaggccagcgacgagaccaaguggugcccccccgaccagcuggugaaccugcacgacuucagaagcgacgagaucgagcaccuggugguggaggagcuggugaagaagagagaggagugccuggacgcccuggagagcaucaugaccaccaagagcgugagcuucagaagacugagccaccugagaaagcuggugcccggcuucggcaaggccuacaccaucuucaacaagacccugauggaggccgacgcccacuacaagagcgugagaaccuggaacgagaucauccccagcaagggcugccugagagugggcggcagaugccacccccacgugaacggcguguucuucaacggcaucauccugggccccgacggccacgugcugauccccgagaugcagagcagccugcugcagcagcacauggagcugcuggagagcagcgugaucccccugaugcacccccuggccgaccccagcaccguguucaaggacggcgacgaggccgagaacuucguggaggugcaccugcccgacgugcacaagcagaucagcggcguggaccugggccugcccaacuggggcaaguacgugcuggugagcgccggcgugcugaucgcccugaugcugaucaucuuccugaugaccugcugcggcagagugaacagacccaagagcacccagcacaaccugggcggcaccggcagagaggugagcgugaccccccagagcggcaaggugaucagcagcugggagagcuacaagagcggcggcgagaccagacuguga

SEQ ID NO: 191709 - RNA, 1575 nt, Artificial Sequence
  derived and/or modified CDS sequence (opt4) from glycoprotein__RABV__KJ476820.1
auggugccccaggcccugcuguucgugccccugcugguguucagcaugugcuucggcaaguuccccaucuacaccauccccgacaagcugggccccuggagccccaucgacauccaccaccugagcugccccaacaaccuggugguggaggacgagggcugcaccaaccugagcggcuucagcuacauggagcugaaggugggcuacaucagcgccaucaaggugaacggcuucaccugcaccggcguggugaccgaggccgagaccuacaccaacuucgugggcuacgugaccaccaccuucaagagaaagcacuucagacccacccccgacgccugcagaaccgccuacaacuggaagauggccggcgaccccagauacgaggagagccugcacaaccccuaccccgacuaccacuggcugagaaccgugaagaccaccaaggagagccuggugaucaucagccccagcguggccgaccuggaccccuacgacaagagccugcacagcagaguguuccccaacggcaagugcagcggcaucaccaucagcagcaccuacugccccaccaaccacgacuacaccaucuggcugcccgagaaccccagacugggcaccagcugcgacaucuucaccaacagcagaggcaagagagccagcaagggcagcaagaccugcggcuucguggacgagagaggccuguacaagagccugaagggcgccugcaagcugaagcugugcggcgugcugggccugagacugauggacggcaccuggguggccaugcaggccagcgacgagaccaaguggugcccccccgaccagcuggugaaccugcacgacuucagaagcgacgagaucgagcaccuggugguggaggagcuggugaagaagagagaggagugccuggacgcccuggagagcaucaugaccaccaagagcgugagcuucagaagacugagccaccugagaaagcuggugcccggcuucggcaaggccuacaccaucuucaacaagacccugauggaggccgacgcccacuacaagagcgugagaaccuggaacgagaucauccccagcaagggcugccugagagugggcggcagaugccacccccacgugaacggcguguucuucaacggcaucauccugggccccgacggccacgugcugauccccgagaugcagagcagccugcugcagcagcacauggagcugcuggagagcagcgugaucccccugaugcacccccuggccgaccccagcaccguguucaaggacggcgacgaggccgagaacuucguggaggugcaccugcccgacgugcacaagcagaucagcggcguggaccugggccugcccaacuggggcaaguacgugcuggugagcgccggcgugcugaucgcccugaugcugaucaucuuccugaugaccugcugcggcagagugaacagacccaagagcacccagcacaaccugggcggcaccggcagagaggugagcgugaccccccagagcggcaaggugaucagcagcugggagagcuacaagagcggcggcgagaccagacuguga

SEQ ID NO: 191710 - RNA, 1575 nt, Artificial Sequence
  derived and/or modified CDS sequence (opt4) from glycoprotein__RABV__KJ564280.1
auggugccccaggcccugcuguucgugccccugcugguguucagcagcugcuucggcaaguuccccaucuacaccauccccgacaagcugggccccuggagccccaucgacauccaccaccugagcugccccaacaaccuggugguggaggacgagggcugcaccaaccugagcggcuucagcuacauggagcugaaggugggcuacaucagcgccaucaaggugaacggcuucaccugcaccggcguggugaccgaggccgagaccuacaccaacuucgugggcuacgugaccaccaccuucaagagaaagcacuucagacccaugcccgacgccugcagagccgccuacaacuggaagauggccggcgaccccagauacgaggagagccugcacaaccccuaccccgacuaccacuggcugagaaccgugaagaccaccaaggagagccuggugaucaucagccccagcguggccgaccuggaccccuacgacaagagccugcacagcagaguguuccccggcggcaagugcagcggcaucaccgugagcagcaccugcugcagcaccaaccacgacuacaccaucuggaugcccgagaaccccagacugggcaccagcugcgacaucuucaccaacagcagaggcaagagagccagcaagggcggcaagaccugcggcuucguggacgagagaggccuguacaagagccugaagggcgccugcaagcugaagcugugcggcgugcugggccugagacugauggacggcaccuggguggccauccagaccagcgacgagaucaaguggugcagccccgaccagcuggugaaccugcacgacuuccacagcgacgagaucgagcaccuggugguggaggagcuggugaagaagagagaggagugccuggacgcccuggagaccaucaugaccaccaagagcgugagcuucagaagacugagccaccugagaaagcuggugcccggcuucggcaaggccuacaccaucuucaacaagacccugauggaggccgacgcccacuacaagagcaucagaaccuggaacgagaccauccccagcaagggcugccugagagugggcggcagaugccacccccacgugaacggcguguucuucaacggcaucauccugggccccgacggccacgugcugauccccgagaugcagagcagccugcugcaccagcacauggagcugcuggagagcagcgugaucccccugaugcacccccuggccgaccccagcaccguguucaaggacggcgacgaggccgaggacuucguggaggugcaccugcccgacgugcacaagcagaucagcggcguggaccugggccugcccaacuggggcaaguacgugcugaucagcgccggcgcccugaccgcccugaugcugaccaucuuccugaugaccugcugcagaaagaccaacagagccggcagcauccagcacagccccggcgagaccggcagaaaggugagcgugaccagccacaacggcagagugaucagcagcugggagagcuacaagagcggcggcgagaccggccuguga

SEQ ID NO: 191711 - RNA, 1575 nt, Artificial Sequence
  derived and/or modified CDS sequence (opt4) from glycoprotein__RABV__KM016899.1
auggugccccuggugccccuguucgugccccugcugguguucccccugugcagcggcaaguuccccaucuacaccauccccgacaagcugggccccuggagccccaucgacauccaccaccugagcugccccaacaaccuggugguggaggacgagggcugcgccaaccugagcggcuucagcuacauggagcugaaggugggcuacaucagcgccaucaaggugaacggcuucaccugcaccggcguggugaccgaggccgagaccuacaccaacuucgugggcuacgugaccaccaccuucagaagaaagcacuucagacccacccccgacgccugcagagccgccuacaacuggaagauggccggcgaccccagauacgaggagagccugcacaaccccuaccccgacuaccacuggcugagaaccgugaagaccaccaaggagagccuggugaucaucagccccagcguggccgaccuggaccccuacgacaagagccugcacagcagaguguuccccagcggcaagugcagcggcaucaccgugagcagcaccuacugcagcaccaaccacgacuacaccaucuggaugcccgagaaccugagacugggcaccagcugcgacaucuucaccaacagcagaggcaagagagccagcaagggcagcaagaccugcggcuucguggacgagagaggccuguacaagagccugaagggcgccugcaagcugaagcugugcggcgugcugggccugagacugauggacggcaccuggguggccaugcagaccagcggcgagaccaaguggugcccccccgaccagcuggugaaccugcacgacuucagaagcgacgagaucgagcaccuggugguggaggagcuggugaagaagagagaggagugccuggacgcccuggagagcaucaugaccaccaagagcgugagcuucagaagacugagccaccugagaaagcuggugcccggcuucggcaaggccuacaccaucuucaacaagacccugauggaggccgacgcccacuacaagagcgugagaaccuggaacgagaucauccccagcaagggcugccugagagugggcggcagaugccacccccacgugaacggcguguucuucaacggcaucauccugggccccgacggccacgugcugauccccgagaugcagagcagccugcugcagcagcacauggagcugcuggagagcagcgugaucccccugaugcacccccuggccgaccccagcaccguguucaaggacggcgacgaggccgaggacuucguggaggugcaccugcccgacgugcacaagcaggugagcggcguggaccugggccugcccaacuggggcaaguacauccugcugagcgccggcgcccugaucgcccugaugcugaugaucuuccugaugaccugcugcagaaaguucaacagacccgagagcacccagagaagccugggcggcaccggcagaaaggugagcaucaccagccagggcggcaaggugaucagcagcugggagagcuacaagagcggcggcgagaccagacuguga

SEQ ID NO: 191712 - RNA, 1575 nt, Artificial Sequence; identical to SEQ ID NO: 191016
  derived and/or modified CDS sequence (opt4) from glycoprotein__RABV__KM093868.1

SEQ ID NO: 191713 - RNA, 1575 nt, Artificial Sequence
  derived and/or modified CDS sequence (opt4) from glycoprotein__RABV__KM278992.1
auggugccccaggugcugcuguucgugccccugcugguguucagcaugugcuucggcaaguuccccaucuacaccauccccgacaagcugggccccuggagccccaucgacauccaccaccugagcugccccaacaaccuggugguggaggacgagggcugcaccaaccugagcggcuucagcuacauggagcugaaggugggcuacaucagcgccaucaaggugaacggcuucaccugcaccggcguggugaccgaggccgagaccuacaccaacuucgugggcuacgugaccaccaccuucaagagaaagcacuucagacccacccccgacgccugcagagccgccuacaacuggaagauggccggcgaccccagauacgaggagagccugcacaaccccuaccccgacuaccacuggcugagaaccgugaagaccaccaaggagagccuggugaucaucagccccagcgugaccgaccuggaccccuacgacaagagccugcacagcagaguguuccccagcggcaagugccugggcaucaccaucagcagcaccuacugcagcaccaaccacgacuacaccaucuggaugcccgagaaccccagacugggcaccagcugcgacaucuucaccaacagcagaggcaagagagccagcaagggcggcaagaccugcggcuucguggacgagagaggccuguacaagagccugaagggcgccugcaagcugaagcugugcggcgugcugggccugagacugauggacggcaccuggguggccaugcaggccagcgacgagaccaaguggugcccccccgaccagcuggugaaccugcacgacuucagaagcgacgagaucgagcaccuggugguggaggagcuggugaagaagagagaggagugccuggacgcccuggagagcaucaugaccaccaagagcgugagcuucagaagacugagccaccugagaaagcuggugcccggcuucggcaaggccuacaccaucuucaacaagacccugauggaggccgacgcccacuacaagagcgugagaaccuggaacgagaucauccccagcaagggcugccugagagugggcggcagaugccacccccacgugaagggcguguucuucaacggcaucauccugggccccgacggccacgugcugauccccgagaugcagagcagccugcugcagcagcacauggagcugcuggagagcagcgugaucccccugaugcacccccuggccgaccccagcaccguguucaaggacggcgacgaggccgaggacuucguggaggugcaccugcccgacgugcacaagcaggugagcggcguggaccugggccugcccagcuggggcaaguacgugcuggugagcgccggcgugcugguggugcugaugcugaccaucuucaucaucaccugcugcggcagagugcacagacccaagagcacccagcacagccugggcggcaccggcagaaaggugagcgugaccagccagagcggcaaggugaucagcagcugggagagcuacaagagcggcggcgagaccagacuguga

SEQ ID NO: 191714 - RNA, 1575 nt, Artificial Sequence; identical to SEQ ID NO: 191713
  derived and/or modified CDS sequence (opt4) from glycoprotein__RABV__KM278993.1

SEQ ID NO: 191715 - RNA, 1575 nt, Artificial Sequence
  derived and/or modified CDS sequence (opt4) from glycoprotein__RABV__KM408747.1
auggugccccaggugcugcuguucgugccccugcugguguucagcaugugcuucggcaaguuccccaucuacaccauccccgacaagcugggccccuggagccccaucgacauccaccaccugagcugccccaacaaccuggugguggaggacgagggcugcaccaaccugagcggcuucagcuacauggagcugaaggugggcuacaucagcgccaucaaggugaacggcuucaccugcaccggcguggugaccgaggccgagaccuacaccaacuucgugggcuacgugaccaccaccuucaagagaaagcacuucagacccacccccgacgccugcagagccgccuacaacuggaagauggccggcgaccccagauacgaggagagccugcacaaccccuaccccgacuaccacuggcugagaaccgugaagaccaccaaggagagccuggugaucaucagccccagcguggccgaccuggaccccuacgacaagagccugcacagcagaguguuccccagcggcaagugcagcggcaucaccaucagcagcaccuacugcagcaccaaccacgacuacaccaucuggaugcccgagaaccccagacugggcaccagcugcgacaucuucaccaacagcagaggcaagagagccagcaagggcggcaagaccugcggcuucguggacgagagaggccuguacaagagccugaagggcgccugcaagcugaagcugugcggcgugcugggccugagacugauggacggcaccuggguggccaugcagaccagcgacgagaccaaguggugcccccccgaccagcuggugaaccugcacgacuucagaagcgacgagaucgagcaccuggugguggaggagcuggugaagaagagagaggagugccuggacgcccuggagagcaucaugaccaccaagagcgugagcuucagaagacugagccaccugagaaagcuggugcccggcuucggcaaggccuacaccaucuucaacaagacccugauggaggccgacgcccacuacaagagcgugagaaccuggaacgagaucauccccagcaagggcugccugagagugggcggcagaugccacccccacgugaagggcguguucuucaacggcaucauccugggccccgacggccacgugcugauccccgagaugcagagcagccugcugcagcagcacauggagcugcuggagagcagcgugaucccccugaugcacccccuggccgaccccagcaccguguucaaggagggcgacgaggccgaggacuucguggaggugcaccugcccgacgugcacaagcagaucagcggcguggaccugggccugcccagcuggggcaaguacgugcuggugagcgccggcgugcugguggugcugaugcugaccaucuucaucaucaccugcugcggcagaauccacagacccaaguucacccagcacggccugggcggcaccggcagaaaggugagcgugaccagccagagcggcaaggugaucagcagcugggagagcuacaagagcggcggcgagaccagacuguga

SEQ ID NO: 191716 - RNA, 1575 nt, Artificial Sequence
  derived and/or modified CDS sequence (opt4) from glycoprotein__RABV__KM492745.1
auggugccccaggugcugcuguucgugccccugcugguguucagcaugugcuucggcaaguuccccaucuacaccauccccgacaagcugggccccuggagccccaucgacauccaccaccugagcugccccaacaaccuggugguggaggacgagggcugcaccaaccugagcggcuucagcuacauggagcugaaggugggcuacaucagcgccaucaaggugaacggcuucaccugcaccggcguggugaccgaggccgagaccuacaccaacuucgugggcuacgugaccaccaccuucaagagaaagcacuucagacccacccccgacgccugcagagccgccuacaacuggaagauggccggcgaccccagauacgaggagagccugcacaaccccuaccccgacuaccacuggcugagaaccgugaagaccaccaaggagagccuggugaucaucagccccagcguggccgaccuggaccccuacgacaagagccugcacagcagaguguuccccagcggcaagugcagcggcaucaccaucagcagcaccuacugcagcaccaaccacgacuacaccaucuggaugcccgagaaccccagacugggcaccagcugcgacaucuucaccaacagcagaggcaagagagccagcaagggcggcaagaccugcggcuucguggacgagagaggccuguacaagagccugaagggcgccugcaagcugaagcugugcggcgugcugggccugagacugauggacggcaccuggguggccaugcagaccagcgacgagaccaaguggugcccccccgaccagcuggugaaccugcacgacuucagaagcgacgagaucgagcaccuggugguggaggagcuggugaagaagagagaggagugccuggacgcccuggagagcaucaugaccaccaagagcgugagcuucagaagacugagccaccugagaaagcuggugcccggcuucggcaaggccuacaccaucuucaacaagacccugauggaggccgacgcccacuacaagagcgugagaaccuggaacgagaucauccccagcaagggcugccugagagugggcggcagaugccacccccacgugaagggcguguucuucaacggcaucauccugggccccgacggccacgugcugauccccgagaugcagagcagccugcugcagcagcacauggagcugcuggagagcagcgugaucccccugaugcacccccuggccgaccccagcaccguguucaaggacggcgacgaggccgaggacuucguggaggugcaccugcccgacgugcacaagcagaucagcggcguggaccugggccugcccagcuggggcaaguacgugcuggugagcgccggcgugcugguggugcugaugcugaccaccuucaucaucaccugcugcggcagaaucagaagacccaagagcacccagcacggccugggcggcaccggcagaaaggugagcgugaccagccagagcggcaaggugaucagcagcugggagagcuacaagagcggcggcgagaccagacuguga

SEQ ID NO: 191717 - RNA, 1575 nt, Artificial Sequence; identical to SEQ ID NO: 191190
  derived and/or modified CDS sequence (opt4) from glycoprotein__RABV__KM492746.1

SEQ ID NO: 191718 - RNA, 1575 nt, Artificial Sequence
  derived and/or modified CDS sequence (opt4) from glycoprotein__RABV__KM492747.1
auggugccccaggugcugcuguucgugccccugcugguguucagcaugugcuucggcaaguuccccaucuacaccauccccgacaagcugggccccuggagccccaucgacauccaccaccugagcugccccaacaaccuggugguggaggacgagggcugcaccaaccugagcggcuucagcuacauggagcugaaggugggcuacaucagcgccaucaaggugaacggcuucaccugcaccggcguggugaccgaggccgagaccuacaccaacuucgugggcuacgugaccaccaccuucaagagaaagcacuucagacccacccccgacgccugcagagccgccuacaacuggaagauggccggcgaccccagauacgaggagagccugcacaaccccuaccccgacuaccacuggcugagaaccgugaagaccaccaaggagagccuggugaucaucagccccagcguggccgaccuggaccccuacgacaagagccugcacagcagaguguuccccagcggcaagugcagcggcaucaccaucagcagcaccuacugcagcaccaaccacgacuacaccaucuggaugcccgagaaccccagacugggcaccagcugcgacaucuucaccaacagcagaggcaagagagccagcaagggcggcaagaccugcggcuucguggacgagagaggccuguacaagagccugaagggcgccugcaagcugaagcugugcggcgugcugggccugagacugauggacggcaccuggguggccaugcagaccagcgacgagaccaaguggugcccccccgaccagcuggugaaccugcacgacuucagaagcgacgagaucgagcaccuggugguggaggagcuggugaagaagagagaggagugccuggacgcccuggagagcaucaugaccaccaagagcgugagcuucagaagacugagccaccugagaaagcuggugcccggcuucggcaaggccuacaccaucuucaacaagacccugauggaggccgacgcccacuacaagagcgugagaaccuggaacgagaucauccccagcaagggcugccugagagugggcggcagaugccacccccacgugaacggcguguucuucaacggcaucauccugggccccgacggccacgugcugauccccgagaugcagagcagccugcugcagcagcacauggagcugcuggagagcagcgugaucccccugaugcacccccuggccgaccccagcaccguguucaaggacggcgacgaggccgaggacuucguggaggugcaccugcccgacgugcacaagcagaucagcggcguggaccugggccugcccagcuggggcaaguacgugcuggugagcgccggcgugcugguggugcugaugcugaccaucuucaucaugaccugcugcggcagagugagaagacccaagagcacccagcacggcuucggcggcaccggcagaaaggugagcgugaccagccagagcggcaaggugaucagcagcugggagagcuacaagagcggcggcgagaccagacuguga

SEQ ID NO: 191719 - RNA, 1575 nt, Artificial Sequence
  derived and/or modified CDS sequence (opt4) from glycoprotein__RABV__KM492748.1
auggugccccaggugcugcugcuggugccccugcugguguucagcaugugcuucggcaaguuccccaucuacaccauccccgacaagcugggccccuggagccccaucgacauccaccaccugagcugccccaacaaccuggugguggaggacgagggcugcaccaaccugagcggcuucagcuacauggagcugaaggugggcuacaucagcgccaucaaggugaacggcuucaccugcaccggcguggugaccgaggccgagaccuacaccaacuucgugggcuacgugaccaccaccuucaagagaaagcacuucagacccacccccgacgccugcagagccgccuacaacuggaagauggccggcgaccccagauacgaggagagccugcacaaccccuaccccgacuaccacuggcugagaaccgugaagaccaccaaggagagccuggugaucaucagccccagcguggccgaccuggaccccuacgacaagagccugcacagcagaguguuccccagcggcaagugcagcggcaucaccaucagcagcaccuacugcagcaccaaccacgacuacaccaucuggaugcccgagaaccccagacugggcaccagcugcgacaucuucaccaacagcagaggcaagagagccagcaagggcggcaagaccugcggcuucguggacgagagaggccuguacaagagccugaagggcgccugcaagcugaagcugugcggcgugcugggccugagacugauggacggcaccuggguggccaugcagaccagcgacgagaccaaguggugcccccccgaccagcuggugaaccugcacgacuucagaagcgacgagaucgagcaccuggugguggaggagcuggugaagaagagagaggagugccuggacgcccuggagagcaucaugaccaccaagagcgugagcuucagaagacugagccaccugagaaagcuggugcccggcuucggcaaggccuacaccaucuucaacaagacccugauggaggccgacgcccacuacaagagcgugagaaccuggaacgagaucauccccagcaagggcugccugagagugggcggcagaugccacccccacgugaacggcguguucuucaacggcaucauccugggccccgacggccacgugcugauccccgagaugcagagcagccugcugcagcagcacauggagcugcuggagagcagcgugaucccccugaugcacccccuggccgaccccagcaccguguucaaggacggcgacgaggccgaggacuucguggaggugcaccugcccgacgugcacaagcagaucagcggcguggaccugggccugcccagcuggggcaaguacgugcuggugagcgccggcgugcugguggugcugaugcugaccaucuucaugaucaccugcugcggcagaauccacagacccaagagcacccagcacggccugggcggcaccggcagaaaggugagcgugaccagccagagcggcaaggugaucagcagcugggagagcuacaagagcggcggcgagaccagacuguga

SEQ ID NO: 191720 - RNA, 1575 nt, Artificial Sequence
  derived and/or modified CDS sequence (opt4) from glycoprotein__RABV__KM492750.1
auggugccccaggugcugcuguucgugccccugcugguguucagcgugugcuucggcaaguuccccaucuacaccauccccgacaagcugggccccuggagccccaucgacauccaccaccugaucugccccaacaaccuggugguggaggacgagggcugcaccaaccugaccggcuucagcuacauggagcugaaggugggcuacaucagcgccaucaaggugaacggcuucagcugcaccggcguggugaccgaggccuacaccuaccccaacuucgugggcuacgugaccagcaccuucaagagaaagcacuucagacccacccccgacgccugcagagccgccuacaacuggaagauggccggcgaccccagauucgaggagagccugcacuaccccuaccccgacuaccacuggcugagaaccgugaagaccaccaaggagagccuggugaucaucagccccagcguggccgaccuggaccccuacgacaagagccugcacagcagaguguuccccagcggcaagugcagcggcaucaccaucagcagcaccuacugcagcaccaaccacgacuacaccaucuggaugcccgagaaccccagacugggcaccagcugcgacaucuucaccaacagcagaggcaagagagccagcaagggcggcaagaccugcggcuucguggacgagagaggccuguacaagagccugaagggcgccugcaagcugaagcugugcggcgugcugggccugagacugauggacggcaccuggguggccaugcagaccagcgacgagaccaaguggugcccccccgaccagcuggugaaccugcacgacuucagaagcgacgagaucgagcaccuggugguggaggagcuggugaagaagagagaggagugccuggacgcccuggagagcaucaugaccaccaagagcgugagcuucagaagacugagccaccugagaaagcuggugcccggcuucggcaaggccuacaccaucuucaacaagacccugauggaggccgacgcccacuacaagagcgugagaaccuggaacgagaucauccccagcaagggcugccugagagugggcggcagaugccacccccacgugaagggcguguucuucaacggcaucauccugggccccgacggccacgugcugauccccgagaugcagagcagccugcugcagcagcacauggagcugcuggagagcagcgugaucccccugaugcacccccuggccgaccccagcaccguguucaaggacggcgacgaggccgaggacuucguggaggugcaccugcccgacgugcacaagcagaucagcggcguggaccugggccugcccagcuggggcaaguacgugcuggugagcgccggcgugcugguggugcugaugcugaccaucuucaucaucaccugcugcggcagaauccacagacccaagagcacccagcacggccugggcggcaccggcagaaaggugagcgugaccagccagagcggcaaggugaucagcagcugggagagcuacaagagcggcggcgagaccagacuguga

SEQ ID NO: 191721 - RNA, 1575 nt, Artificial Sequence
  derived and/or modified CDS sequence (opt4) from glycoprotein__RABV__KM492751.1
auggugccccaggugcugcuguucgugccccugcugguguucagcaugugcuucggcaaguuccccaucuacaccauccccgacaagcugggccccuggagccccaucgacauccaccaccugagcugccccaacaaccuggugguggaggacgagggcugcaccaaccugagcggcuucagcuacauggagcugaaggugggcuacaucagcgccaucaaggugaacggcuucaccugcaccggcguggugaccgaggccgagaccuacaccaacuucgugggcuacgugaccaccaccuucaagagaaagcacuucagacccacccccgacgccugcagagccgccuacaacuggaagauggccggcgaccccagauacgaggagagccugcacaaccccuaccccgacuaccacuggcugagaaccgugaagaccaccaaggagagccuggugaucaucagccccagcguggccgaccuggaccccuacgacaagagccugcacagcagaguguuccccagcggcaagugcagcggcaucaccaucagcagcaccuacugcagcaccaaccacgacuacaccaucuggaugcccgagaaccccagacugggcaccagcugcgacaucuucaccaacagcagaggcaagagagccagcaagggcggcaagaccugcggcuucguggacgagagaggccuguacaagagccugaagggcgccugcaagcugaagcugugcggcgugcugggccugagacugauggacggcaccuggguggccaugcagaccagcgacgagaccaaguggugcccccccgaccagcuggugaaccugcacgacuucagaagcgacgagaucgagcaccuggugguggaggagcuggugaagaagagagaggagugccuggacgcccuggagagcaucaugaccaccaagagcgugagcuucagaagacugagccaccugagaaagcuggugcccggcuucggcaaggccuacaccaucuucaacaagacccugauggaggccgacgcccacuacaagagcgugagaaccuggaacgagaucauccccagcaagggcugccugagagugggcggcagaugccacccccacgugaagggcguguucuucaacggcaucauccugggccccgacggccacgugcugauccccgagaugcagagcagccugcugcagcagcacauggagcugcuggagagcagcgugaucccccugaugcacccccuggccgaccccagcaccguguucaaggacggcgacgaggccgaggacuucguggaggugcaccugcccgacgugcacaagcagaucagcggcguggaccugggccugcccagcuggggcaaguacgugcuggugagcgccggcgugcugguggugcugaugcugaccaucuucaucaucaccugcugcagaagaaucagaagacccagaagcacccagcacggccugggcggcaccggcagaaaggugagcgugaccagccagagcggcaaggugaucagcagcugggagagcuacaagagcggcggcgagaccagacuguga

SEQ ID NO: 191722 - RNA, 1575 nt, Artificial Sequence
  derived and/or modified CDS sequence (opt4) from glycoprotein__RABV__KM492752.1
auggugccccaggugcugcuguucgugccccugcugguguucagcaugugcuucggcaaguuccccaucuacaccauccccgacaagcugggccccuggagccccaucgacauccaccaccugagcugccccaacaaccuggugguggaggacgagggcugcaccaaccugagcggcuucagcuacauggagcugaaggugggcuacaucagcgccaucaaggugaacggcuucaccugcaccggcguggugaccgaggccgagaccuacaccaacuucgugggcuacgugaccaccaccuucaagagaaagcacuucagacccacccccgacgccugcagagccgccuacaacuggaagauggccggcgaccccagauacgaggagagccugcacaaccccuaccccgacuaccacuggcugagaaccgugaagaccaccaaggagagccuggugaucaucagccccagcguggccgaccuggaccccuacgacaagagccugcacagcagaguguuccccagcggcaagugcagcggcaucaccaucagcagcaccuacugcagcaccaaccacgacuacaccaucuggaugcccgagaaccccagacugggcaccagcugcgacaucuucaccaacagcagaggcaagagagccagcagaggcggcaagaccugcggcuucguggacgagagaggccuguacaagagccugaagggcgccugcaagcugaagcugugcggcgugcugggccugagacugauggacggcaccuggguggccaugcagaccagcgacgagaccaaguggugcccccccgaccagcuggugaaccugcacgacuucagaagcgacgagaucgagcaccuggugguggaggagcuggugaagaagagagaggagugccuggacgcccuggagagcaucaugaccaccaagagcgugagcuucagaagacugagccaccugagaaagcuggugcccggcuucggcaaggccuacaccaucuucaacaagacccugauggaggccgacgcccacuacaagagcgugagaaccuggaacgagaucauccccagcaagggcugccugagagugggcggcagaugccacccccacgugaagggcguguucuucaacggcaucauccugggccccgacggccacgugcugauccccgagaugcagagcagccugcugcagcagcacauggagcugcuggagagcagcgugaucccccugaugcacccccuggccgaccccagcaccguguucaaggacggcgacgaggccgaggacuucguggaggugcaccugcccgacgugcacaagcagaucagcggcguggaccugggccugcccaacuggggcaaguacgugcuggugagcgccggcgugcugguggugcugaugcugaccaucuucaucaucaccugcugcggcagaaucagaagacccagaagcacccagcacggccugggcggcaccggcagaaaggugagcgugaccagccagagcggcaaggugaucagcagcugggagagcuacaagagcggcggcgagaccagacuguga

SEQ ID NO: 191723 - RNA, 1575 nt, Artificial Sequence
  derived and/or modified CDS sequence (opt4) from glycoprotein__RABV__KM492753.1
auggugccccaggugcugcuguucgugccccugcugguguucagcaugugcuucggcaaguuccccaucuacaccauccccgacaagcugggccccuggagccccaucgacauccaccaccugagcugccccaacaaccuggugguggaggacgagggcugcaccaaccugagcggcuucagcuacauggagcugaaggugggcuacaucagcgccaucaaggugaacggcuucaccugcaccggcguggugaccgaggccgagaccuacaccaacuucgugggcuacgugaccaccaccuucaagagaaagcacuucagacccacccccgacgccugcagagccgccuacaacuggaagauggccggcgaccccagauacgaggagagccugcacaaccccuaccccgacuaccacuggcugagaaccgugaagaccaccaaggagagccuggugaucaucagccccagcguggccgaccuggaccccuacgacaagagccugcacagcagaguguuccccagcggcaagugcagcggcaucaccaucagcagcaccuacugcagcaccaaccacgacuacaccaucuggaugcccgagaaccccagacugggcaccagcugcgacaucuucaccaacagcagaggcaagagagccagcaagggcggcaagaccugcggcuucguggacgagagaggccuguacaagagccugaagggcgccugcaagcugaagcugugcggcgugcugggccugagacugauggacggcaccuggguggccaugcagaccagcgacgagaccaaguggugcccccccgaccagcuggugaaccugcacgacuucagaagcgacgagaucgagcaccuggugguggaggagcuggugaagaagagagaggagugccuggacgcccuggagagcaucaugaccaccaagagcgugagcuucagaagacugagccaccugagaaagcuggugcccggcuucggcaaggccuacaccaucuucaacaagacccugauggaggccgacgcccacuacaagagcgugagaaccuggaacgagaucauccccagcaagggcugccugagagugggcggcagaugccacccccacgugaacggcguguucuucaacggcaucauccugggccccgacggccacgugcugauccccgagaugcagagcagccugcugcagcagcacauggagcugcuggagagcagcgugaucccccugaugcacccccuggccgaccccagcaccguguucaaggacggcgacgaggccgaggacuucguggaggugcaccugcccgacgugcacaagcagaucagcggcguggaccugggccugcccagcuggggcaaguacgugcuggugagcgccggcgugcugguggugcugaugcugaccaucuucaucaugaccugcugcggcagagugcacagacccaagagcacccagcacggccugggcggcaccggcagaaaggugagcgugaccagccagagcggcaaggugaucagcagcugggagagcuacaagagcggcggcgagaccagacuguga

SEQ ID NO: 191724 - RNA, 1575 nt, Artificial Sequence
  derived and/or modified CDS sequence (opt4) from glycoprotein__RABV__KM492754.1
auggugccccaggugcugcuguucgugccccugcugguguucagcaugugcuucggcaaguuccccaucuacaccauccccgacaagcugggccccuggagccccaucgacauccaccaccugagcugccccaacaaccuggugguggaggacgagggcugcaccaaccugagcggcuucagcuacauggagcugaaggugggcuacaucagcgccaucaaggugaacggcuucaccugcaccggcguggugaccgaggccgagaccuacaccaacuucgugggcuacgugaccaccaccuucaagagaaagcacuucagacccacccccgacgccugcagagccgccuacaacuggaagauggccggcgaccccagauacgaggagagccugcacaaccccuaccccgacuaccacuggcugagaaccgugaagaccaccaaggagagccuggugaucaucagccccagcguggccgaccuggaccccuacgacaagagccugcacagcagaguguuccccagcggcaagugcagcggcaucaccaucagcagcaccuacugcagcaccaaccacgacuacaccaucuggaugcccgagaaccccagacugggcaccagcugcgacaucuucaccaacagcagaggcaagagagccagcaagggcggcaagaccugcggcuucguggacgagagaggccuguacaagagccugaagggcgccugcaagcugaagcugugcggcgugcugggccugagacugauggacggcaccuggguggccaugcagaccagcgacgagaccaaguggugcccccccgaccagcuggugaaccugcacgacuucagaagcgacgagaucgagcaccuggugguggaggagcuggugaagaagagagaggagugccuggacgcccuggagagcaucaugaccaccaagagcgugagcuucagaagacugagccaccugagaaagcuggugcccggcuucggcaaggccuacaccaucuucaacaagacccugauggaggccgacgcccacuacaagagcgugagaaccuggaacgagaucauccccagcaagggcugccugagagugggcggcagaugccacccccacgugaacggcguguucuucaacggcaucauccugggccccgacggccacgugcugauccccgagaugcagagcagccugcugcagcagcacauggagcugcuggagagcagcgugaucccccugaugcacccccuggccgaccccagcaccguguucaaggacggcgacgaggccgaggacuucguggaggugcaccugcccgacgugcacaagcagaucagcggcguggaccugggccugcccagcuggggcaaguacgugcuggugagcgccggcgugcugguggugcugaugcugaccaucuucaucaugaccugcugcggcagagugcacagaagcaagagcacccagcacggccugggcggcaccggcagaaaggugagcgugaccagccagagcggcaaggugaucagcagcugggagagcuacaagagcggcggcgagaccagacuguga

SEQ ID NO: 191725 - RNA, 1575 nt, Artificial Sequence
  derived and/or modified CDS sequence (opt4) from glycoprotein__RABV__KM492755.1
auggugccccaggugcugcuguucgugccccugcugguguucagcaugugcuucggcaaguuccccaucuacaccauccccgacaagcugggccccuggagccccaucgacauccaccaccugagcugccccaacaaccuggugguggaggacgagggcugcaccaaccugagcggcuucagcuacauggagcugaaggugggcuacaucagcgccaucaaggugaacggcuucaccugcaccggcguggugaccgaggccgagaccuacaccaacuucgugggcuacgugaccaccaccuucaagagaaagcacuucagacccacccccgacgccugcagagccgccuacaacuggaagauggccggcgaccccagauacgaggagagccugcacaaccccuaccccgacuaccacuggcugagaaccgugaagaccaccaaggagagccuggugaucaucagccccagcguggccgaccuggaccccuacgacaagagccugcacagcagaguguuccccagcggcaagugcagcggcaucaccaucagcagcaccuacugcagcaccaaccacgacuacaccaucuggaugcccgagaaccccagacugggcaccagcugcgacaucuucaccaacagcagaggcaagagagccagcaagggcggcaagaccugcggcuucguggacgagagaggccuguacaagagccugaagggcgccugcaagcugaagcugugcggcgugcugggccugagacugauggacggcaccuggguggccaugcagaccagcgacgagaccaaguggugcccccccgaccagcuggugaaccugcacgacuucagaagcgacgagaucgagcaccuggugguggaggagcuggugaagaagagagaggagugccuggacgcccuggagagcaucaugaccaccaagagcgugagcuucagaagacugagccaccugagaaagcuggugcccggcuucggcaaggccuacaccaucuucaacaagacccugauggaggccgacgcccacuacaagagcgugagaaccuggaacgagaucauccccagcaagggcugccugagagugggcggcagaugccacccccacgugaacggcguguucuucaacggcaucauccugggccccgacggccacgugcugauccccgagaugcagagcagccugcugcagcagcacauggagcugcuggagagcagcgugaucccccugaugcacccccuggccgaccccagcaccguguucaaggacggcgacgaggccgaggacuucguggaggugcaccugcccgacgugcacaagcagaucagcggcguggaccugggccugcccagcuggggcaaguacgugcuggugagcgccggcgugcugguggugcugaugcugaccaucuucaucaugaccugcugcggcagagugcacagacccaagagcacccagcacggccugggcggcaccgagagaaaggugagcgugaccagccagagcggcaaggugaucagcagcugggagagcuacaagagcggcggcgagaccagacuguga

SEQ ID NO: 191726 - RNA, 1575 nt, Artificial Sequence; identical to SEQ ID NO: 191725
  derived and/or modified CDS sequence (opt4) from glycoprotein__RABV__KM492758.1

SEQ ID NO: 191727 - RNA, 1575 nt, Artificial Sequence
  derived and/or modified CDS sequence (opt4) from glycoprotein__RABV__KM492759.1
auggugccccaggugcugcuguucgugccccugcugguguucagcaugugcuucggcaaguuccccaucuacaccauccccgacaagcugggccccuggagccccaucgacauccaccaccugagcugccccaacaaccuggugguggaggacgagggcugcaccaaccugagcggcuucagcuacauggagcugaaggugggcuacaucagcgccaucaaggugaacggcuucaccugcaccggcguggugaccgaggccgagaccuacaccaacuucgugggcuacgugaccaccaccuucaagagaaagcacuucagacccacccccgacgccugcagagccgccuacaacuggaagauggccggcgaccccagauacgaggagagccugcacaaccccuaccccgacuaccacuggcugagaaccgugaagaccaccaaggagagccuggugaucaucagccccagcguggccgaccuggaccccuacgacaagagccugcacagcagaguguuccccagcggcaagugcagcggcaucaccaucagcagcaccuacugcagcaccaaccacgacuacaccaucuggaugcccgagaaccccagacugggcaccagcugcgacaucuucaccaacagcagaggcaagagagccagcaagggcggcaagaccugcggcuucguggacgagagaggccuguacaagagccugaagggcgccugcaagcugaagcugugcggcgugcugggccugagacugauggacggcaccuggguggccaugcagaccagcgacgagaccaaguggugcccccccgaccagcuggugaaccugcacgacuucagaagcgacgagaucgagcaccuggugguggaggagcuggugaagaagagagaggagugccuggacgcccuggagagcaucaugaccaccaagagcgugagcuucagaagacugagccaccugagaaagcuggugcccggcuucggcaaggccuacaccaucuucaacaagacccugauggaggccgacgcccacuacaagagcgugagaaccuggaacgagaucauccccagcaagggcugccugagagugggcggcagaugccacccccacgugaacggcguguucuucaacggcaucauccugggccccgacggccacauccugauccccgagaugcagagcagccugcugcagcagcacauggagcugcuggagagcagcgugaucccccugaugcacccccuggccgaccccagcaccguguucaaggacggcgacgaggccgaggacuucguggaggugcaccugcccgacgugcacaagcagaucagcggcguggaccugggccugcccagcuggggcaaguacgugcuggugagcgccggcgugcugguggugcugaugcugaccaucuucaucaugaccugcugcggcagagugcacagacccaagagcacccagcacggccugggcggcaccgagagaaaggugagcgugaccagccagagcggcaaggugaucagcagcugggagagcuacaagagcggcggcgagaccagacuguga

SEQ ID NO: 191728 - RNA, 1575 nt, Artificial Sequence
  derived and/or modified CDS sequence (opt4) from glycoprotein__RABV__KM492760.1
auggugccccaggugcugcuguucgugccccugcugguguucagcaugugcuucggcaaguuccccaucuacaccauccccgacaagcugggccccuggagccccaucgacauccaccaccugagcugccccaacaaccuggugguggaggacgagggcugcaccaaccugagcggcuucagcuacauggagcugaaggugggcuacaucagcgccaucaaggugaacggcuucaccugcaccggcguggugaccgaggccgagaccuacaccaacuucgugggcuacgugaccaccaccuucaagagaaagcacuucagacccacccccgacgccugcagagccgccuacaacuggaagauggccggcgaccccagauacgaggagagccugcacaaccccuaccccgacuaccacuggcugagaaccgugaagaccaccaaggagagccuggugaucaucagccccagcguggccgaccuggaccccuacgacaagagccugcacagcagaguguuccccagcggcaagugcagcggcaucaccaucagcagcaccuacugcagcaccaaccacgacuacaccaucuggaugcccgagaaccccagacugggcaccagcugcgacaucuucaccaacagcagaggcaagagagccagcaagggcggcaagaccugcggcuucguggacgagagaggccuguacaagagccugaagggcgccugcaagcugaagcugugcggcgugcugggccugagacugauggacggcaccuggguggccaugcagaccagcgacgagaccaaguggugcccccccgaccagcuggugaaccugcacgacuucagaagcgacgagaucgagcaccuggugguggaggagcuggugaagaagagagaggagugccuggacgcccuggagagcaucaugaccaccaagagcgugagcuucagaagacugagccaccugagaaagcuggugcccggcuucggcaaggccuacaccaucuucaacaagacccugauggaggccgacgcccacuacaagagcgugagaaccuggaacgagaucauccccagcaagggcugccugagagugggcggcagaugccacccccacgugaacggcguguucuucaacggcaucauccugggccccgacggccacgugcugauccccgagaugcagagcagccugcugcagcagcacauggagcugcuggagagcagcgugaucccccugaugcacccccuggccgaccccagcaccguguucaaggacggcgacgaggccgaggacuucguggaggugcaccugcccgacgugcacaagcagaucagcggcguggaccugggccugcccagcuggggcaaguacgugcuggugagcgccggcgugcugguggugcugaugcugaccaucuucaucaugaccugcugcggcagagugcacagacccaagagcacccagcacagccugggcggcaccgagagaaaggugagcgugaccagccagagcggcaaggugaucagcagcugggagagcuacaagagcggcggcgagaccagacuguga

SEQ ID NO: 191729 - RNA, 1575 nt, Artificial Sequence
  derived and/or modified CDS sequence (opt4) from glycoprotein__RABV__KM492761.1
auggugccccaggugcugcuguucgugccccugcugguguucagcaugugcuucggcaaguuccccaucuacaccauccccgacaagcugggccccuggagccccaucgacauccaccaccugagcugccccaacaaccuggugguggaggacgagggcugcaccaaccugagcggcuucagcuacauggagcugaaggugggcuacaucagcgccaucaaggugaacggcuucaccugcaccggcguggugaccgaggccgagaccuacaccaacuucgugggcuacgugaccaccaccuucaagagaaagcacuucagacccacccccgacgccugcagagccgccuacaacuggaagauggccggcgaccccagauacgaggagagccugcacaaccccuaccccgacuaccacuggcugagaaccgugaagaccaccaaggagagccuggugaucaucagccugagcguggccgaccuggaccccuacgacaagagccugcacagcagaguguuccccagcggcaagugcagcggcaucaccaucagcagcaccuacugcagcaccaaccacgacuacaccaucuggaugcccgagaaccccagacugggcaccagcugcgacaucuucaccaacagcagaggcaagagagccagcaagggcggcaagaccugcggcuucguggacgagagaggccuguacaagagccugaagggcgccugcaagcugaagcugugcggcgugcugggccugagacugauggacggcaccuggguggccaugcagaccagcgacgagaccaaguggugcccccccgaccagcuggugaaccugcacgacuucagaagcgacgagaucgagcaccuggugguggaggagcuggugaagaagagagaggagugccuggacgcccuggagagcaucaugaccaccaagagcgugagcuucagaagacugagccaccugagaaagcuggugcccggcuucggcaaggccuacaccaucuucaacaagacccugauggaggccgacgcccacuacaagagcgugagaaccuggaacgagaucauccccagcaagggcugccugagagugggcggcagaugccacccccacgugaacggcguguucuucaacggcaucauccugggccccgacggccacgugcugauccccgagaugcagagcagccugcugcagcagcacauggagcugcuggagagcagcgugaucccccugaugcacccccuggccgaccccagcaccguguucaaggacggcgacgaggccgaggacuucguggaggugcaccugcccgacgugcacaagcagaucagcggcguggaccugggccugcccagcuggggcaaguacgugcuggugagcgccggcgugcugguggugcugaugcugaccaucuucaucaugaccugcugcggcagagugcacagacccaagagcacccagcacggccugggcggcaccggcagaaaggugagcgugaccagccagagcggcaaggugaucagcagcugggagagcuacaagagcggcggcgagaccagacuguga

SEQ ID NO: 191730 - RNA, 1575 nt, Artificial Sequence
  derived and/or modified CDS sequence (opt4) from glycoprotein__RABV__KM492762.1
auggugccccaggugcugcuguucgugccccugcugguguucagcaugugcuucggcaaguuccccaucuacaccauccccgacaagcugggccccuggagccugaucgacauccaccaccugagcugccccaacaaccuggugguggaggacgagggcugcaccaaccugagcggcuucagcuacauggagcugaaggugggcuacaucagcgccaucaaggugaacggcuucaccugcaccggcguggugaccgaggccgagaccuacaccaacuucgugggcuacgugaccaccaccuucaagagaaagcacuucagacccacccccgacgccugcagagccgccuacaacuggaagauggccggcgaccccagauacgaggagagccugcacaaccccuaccccgacuaccacuggcugagaaccgugaagaccaccaaggagagccuggugaucaucagccccagcguggccgaccuggaccccuacgacaagagccugcacagcagaguguuccccagcggcaagugcagcggcaucaccaucagcagcaccuacugcagcaccaaccacgacuacaccaucuggaugcccgagaaccccagacugggcaccagcugcgacaucuucaccaacagcagaggcaagagagccagcaagggcggcaagaccugcggcuucguggacgagagaggccuguacaagagccugaagggcgccugcaagcugaagcugugcggcgugcugggccugagacugauggacggcaccuggguggccaugcagaccagcgacgagaccaaguggugcccccccgaccagcuggugaaccugcacgacuucagaagcgacgagaucgagcaccuggugguggaggagcuggugaagaagagagaggagugccuggacgcccuggagagcaucaugaccaccaagagcgugagcuucagaagacugagccaccugagaaagcuggugcccggcuucggcaaggccuacaccaucuucaacaagacccugauggaggccgacgcccacuacaagagcgugagaaccuggaacgagaucauccccagcaagggcugccugagagugggcggcagaugccacccccacgugaacggcguguucuucaacggcaucauccugggccccgacggccacgugcugauccccgagaugcagagcagccugcugcagcagcacauggagcugcuggagagcagcgugaucccccugaugcacccccuggccgaccccagcaccguguucaaggacggcgacgaggccgaggacuucguggaggugcaccugcccgacgugcacaagcagaucagcggcguggaccugggccugcccagcuggggcaaguacgugcuggugagcgccggcgugcugguggugcugaugcugaccaucuucaucaugaccugcugcggcagagugcacagacccaagagcacccagcacggccugggcggcaccgagagaaaggugagcgugaccagccagagcggcaaggugaucagcagcugggagagcuacaagagcggcggcgagaccagacuguga

SEQ ID NO: 191731 - RNA, 1575 nt, Artificial Sequence; identical to SEQ ID NO: 191723
  derived and/or modified CDS sequence (opt4) from glycoprotein__RABV__KM492763.1

SEQ ID NO: 191732 - RNA, 1575 nt, Artificial Sequence; identical to SEQ ID NO: 191725
  derived and/or modified CDS sequence (opt4) from glycoprotein__RABV__KM492764.1

SEQ ID NO: 191733 - RNA, 1575 nt, Artificial Sequence
  derived and/or modified CDS sequence (opt4) from glycoprotein__RABV__KM492765.1
auggugccccaggugcugcuguucgugccccugcugguguucagcaugugcuucggcaaguuccccaucuacaccauccccgacaaggugggccccggcagccccaucgacauccaccaccugagcugccccaacaaccuggugaucgaggacgagggcugcaccaaccugagcggcuucagcuacauggagcugaaggugggcuacaucagcgccaucaaggugagcggcuucaccugcaccggcguggagaccgaggccgagaccuacaccaacuucgugggcuacgugaccaccaccuucaagagaaagcacuucagacccacccccaacgccugcagagccgccuacaacagaaagauggccggcgaccccagauacgaggagagccugcacaacagaugccccgaguaccacuggcugagaaccgugaagaccaccaaggagagccuggugaucaucagccccagcguggccgaccuggaccccuacgacaagagccugcacagcagaguguuccccagcggcaagugcagcggcaucaccaucagcagcaccuacugcagcaccaaccacgacuacaccaucuggaugcccgagaaccccagacugggcaccagcugcgacaucuucaccaacagcagaggcaagagagccagcaagggcggcaagaccugcggcuucguggacgagagaggccuguacaagagccugaagggcgccugcaagcugaagcugugcggcgugcugggccugagacugauggacggcaccuggguggccaugcagaccagcgacgagaccaaguggugcccccccgaccagcuggugaaccugcacgacuucagaagcgacgagaucgagcaccuggugguggaggagcuggugaagaagagagaggagugccuggacgcccuggagagcaucaugaccaccaagagcgugagcuucagaagacugagccaccugagaaagcuggugcccggcuucggcaaggccuacaccaucuucaacaagacccugauggaggccgacgcccacuacaagagcgugagaaccuggaacgagaucauccccagcaagggcugccugagagugggcggcagaugccacccccacgugaacggcguguucuucaacggcaucauccugggccccgacggccacgugcugauccccgagaugcagagcagccugcugcagcagcacauggagcugcuggagagcagcgugaucccccugaugcacccccuggccgaccccagcaccguguucaaggacggcgacgaggccgaggacuucguggaggugcaccugcccgacgugcacaagcagaucagcggcguggaccugggccugcccagcuggggcaaguacgugcuggugagcgccggcgugcugguggugcugaugcugaccaucuucaucaugaccugcugcggcagagugcacagacccaagagcacccagcacggccugggcggcaccgagagaaaggugagcgugaccagccagagcggcaaggugaucagcagcugggagagcuacaagagcggcggcgagaccagacuguga

SEQ ID NO: 191734 - RNA, 1575 nt, Artificial Sequence
  derived and/or modified CDS sequence (opt4) from glycoprotein__RABV__KM594023.1
augaucccccagaacccccugcugggccugcugcuggugagcagccugugcuucggcaaguuccccaucuacaccauccccgacaagcugggccccuggagccccaucgacauccaccaccugagcugccccaacaaccuggugguggaggacgagggcugcaccagccugagcggcuucagcuacauggagcugaaggugggcuacaucagcgccaucaaggugaacggcuucaccugcaccggcguggugaccgaggccgagaccuacaccaacuucgugggcuacgugaccaccaccuucaagagaagacacuucagacccaugcccgacgccugcagagccgcccacaacuggaagaucgccggcgaccccagauacgaggacagccugcagaaccccuaccccgacuaccacuggcugagaaccgugaagaccaccaaggagagccugaucaucaucagccccagcguggccgaccuggaccccuacgacaagagccugcacagcagaguguuccccggcggcaagugccugggcgugaccaucagcagcaccuacugcagcaccaaccacgacuacaccaucuggaugcccgaggaggccggccugggcaccagcugcgacaucuucaccaacagcagaggcaagagagccagcaagggcggcaagaccugcggcuucguggacgagagaggccuguacaagagccugaagggcagcugcaagcugaagcugugcggcgugcccggccugagacugauggacggcaccugggugagcauccagacccccgacgagaccaaguggugcccccccgaccagguggugaaccugcacgacuuccacagcgacgagaucgagcaccuggugguggaggagcugaucaagaagagagaggagugccuggacgcccuggagagcaucaugaccaccaagagcgugagcuucagaagacugagccaccugagaaagcuggugcccggcuucggcaaggccuacaccaucuacaacaagacccugauggaggccgacgcccacuacaagagcgugagaaccuggaacgagaucauccccagcaagggcugccugagagugggcggcagaugccaccccgacguggacggcguguucuucaacggcaucauccugggccccgacggcaacgugcugauccccgagaugcagagcagccugcugcagcagcacauggagcugcuggagagcagcgugaucccccugaugcacccccuggccgaccccagcaccaucuucaaggacagcgacgaggccgaggacuucguggaggugcaccugcccgacgugcacaagaagaucagcggcguggaccugggccugcccagcuggggcaaguaccugcugaugagcgccggcgcccuggccgcccugaugcugaccacccugcugaucaccugcugcagaaaggugaacagagccgagcccaagcagcagggccccagagagagcggcagaaccaucagcgugaccccccagaacggcagagugaucagcagcugggagcuguacaagagcggcagcgagaccggccuguga

SEQ ID NO: 191735 - RNA, 1575 nt, Artificial Sequence
  derived and/or modified CDS sequence (opt4) from glycoprotein__RABV__KM594024.1
augauccccagaaacccccugcugggccugcugcuggugagcagccugugcuucggcaaguuccccaucuacaccauccccgacaagcugggccccuggagccccaucgacauccaccaccugagcugccccaacaaccuggugguggaggacgagggcugcaccagccugagcggcuucagcuacauggagcugaaggugggcuacaucagcgccaucaaggugaacggcuucaccugcaccggcguggugaccgaggccgagaccuacaccaacuucgugggcuacgugaccaccaccuucaagagaagacacuucagacccaugcccgacgccugcagagccgcccacaacuggaagaucgccggcgaccccagauacgaggacagccugcagaaccccuaccccgacuaccacuggcugagaaccgugaagaccaccaaggagagccugaucaucaucagccccagcguggccgaccuggaccccuacgacaagagccugcacagcagaguguuccccggcggcaagugccugggcgugaccaucagcagcaccuacugcagcaccaaccacgacuacaccaucuggaugcccgaggaggccggccugggcaccagcugcgacaucuucaccaacagcagaggcaagagagccagcaagggcggcaagaccugcggcuucguggacgagagaggccuguacaagagccugaagggcagcugcaagcugaagcugugcggcgugcccggccugagacugaucgacggcaccugggugagcauccagacccccgacgagaccaaguggugcccccccgaccagguggugaaccugcacgacuuccacagcgacgagaucgagcaccuggugguggaggagcugaucaagaagagagaggagugccuggacgcccuggagagcaucaugaccaccaagagcgugagcuucagaagacugagccaccugagaaagcuggugcccggcuucggcaaggccuacaccauccacaacaagacccugauggaggccgacgcccacuacaagagcgugagaaccuggaacgagaucauccccagcaagggcugccugagagugggcggcagaugccaccccaacguggacggcguguucuucaacggcaucauccugggccccgacggcaacgugcugauccccgagaugcagagcagccugcugcagcagcacauggagcugcuggagagcagcgugaucccccugaugcacccccuggccgaccccagcaccaucuucaaggacagcgacgaggccgaggacuucguggacgugcaccugcccgacgugcacaagaagaucagcggcguggaccugggccugcccagcuggggcaaguaccugcugaugagcgccggcgcccuggccgcccugaugcugaccacccugcugaucaccugcugcagaaaggugaacagagccgagcccaagcagcagggccccagagagagcggcagaaccaucagcgugaccccccagaacggcagagugaucagcagcugggagcuguacaagagcggcagcgagaccggccuguga

SEQ ID NO: 191736 - RNA, 1575 nt, Artificial Sequence
  derived and/or modified CDS sequence (opt4) from glycoprotein__RABV__KM594025.1
augaucccccuggaccugcugcugggccugcugcuggccagcagccugugcuucggcaaguuccccaucuacaccauccccgacaagcugggccccuggagccccaucgacauccaccaccugagcugccccaacaaccuggugguggaggacgagggcugcaccagccugagcggcuucagcuacauggagcugaaggugggcuacaucagcgccaucaaggugaacggcuucaccugcaccggcguggugaccgaggccgagaccuacaccaacuucgugggcuacgugaccaccaccuucaagagaaagcacuucagacccaugcccgacgccugcagagccgcccacgaguggaagaccgccggcgaccccagauacgaggacagccugcagaaccccuaccccgacuaccacuggcugagaaccgugaagaccaccaaggagagccuggugaucaucagccccagcguggccgaccuggaccccuacgacaagagccugcacagcagaguguuccccggcggcaagugccugggcgugaccaucagcagcaccuacugcagcaccaaccacgacuacaccaucuggaugcccgaggaggccggccugggcaccagcugcgacaucuucaccaacagcagaggcaagagagccagcaagggcggcagaaucugcggcuucguggacgagagaggccuguacaagagccugaagggcgccugcaagcugaagcugugcggcgugcccggccugagacugauggacggcaccugggugagcauccaggcccccgacgagaccaaguggugcccccccgaccagguggugaaccugcacgacuuccacagcgacgagaucgagcaccuggugguggaggagcugaucaagaagagagaggagugccuggacgcccuggagagcaucaugaccaccaagagcgugagcuucagaagacugagccaccugagaaagcuggugcccggcuucggcaaggccuacaccaucuucaacaagacccugauggaggccgacgcccacuacaagagcgugagaaccuggaacgagguggugcccagcaagggcugccugaaggugggcggcagaugccacagcgacguggacggcguguucuucaacggcaucauccugggccccgacggcaacgugcugauccccgagaugcagagcagccugcugcagcagcacauggagcugcuggagagcagcgugaucccccugaugcacccccuggccgaccccagcaccaucuucaaggacagcgacgaggccgaggacuucguggacgugcaccugcccgacgugcacaagcaggugagcggcguggaccugggccugcccagcuggggcaaguaccugcugaugagcgccggcgcccuggccacccugaugagcgccaucuuccuggugaccugcugcaagaaggugaagagagccgagcccgcccaccacggccccaaggagagcggcagaaagaucagcgugaccccccagaacggcaaggugaucagcagcugggagguguacaagagcggcaacgagcccggccuguga

SEQ ID NO: 191737 - RNA, 1575 nt, Artificial Sequence
  derived and/or modified CDS sequence (opt4) from glycoprotein__RABV__KM594026.1
augaucccccaggcccugcuguucgugccccugcugaucagcagcagcugcuucggcaaguuccccguguacaccauccccgagaagcugggccccuggagccccaucgacauccaccaccugagcugccccaacaaccuggccguggaggacgagggcugcaacagccugagcggcuucagcuacauggagcugaaggugggcuacaucagcgccaucaaggugaacggcuucaccugcaccggcguggugaccgaggccgagaccuacaccaacuucgugggcuacgugaccaccaccuucaagagaaagcacuucagacccaugcccgacgccugcagagccgccuacaacuggaagauggccggcgaccccagauacgaggagagccugcacaaccccuaccccgacuaccacuggcugagaaccgugaccaccaccaaggagagccugaucaucaucagccccagcguggccaaccuggaccccuacgacaagagccugcacagcagaguguuccccggcggcaagugcaugggcaucaccgugagcagcaccuucugcagcaccaaccacgacuacaccaucuggaugcccgagaacgccagacugggcaccagcugcgacaucuucaccaccagcaagggcaagaaggccagcaagggcggcaagaucugcggcuucguggacgagagaggccuguacaagagccugaagggcgccugcaagcugaagcugugcggcgugagcggccugagacugcuggacggcaccugggugaccauccagaccagcgacgagaucaaguggugcccccccgacaagcuggugaaccugcacgacuuccacagcgacgagaucgagcaccuggugguggaggagcuggugagaaagagagaggagugccuggacacccuggagagcaucaugaccaccaagagcgugagcuucagaagacugagccaccugagaaagcuggugcccggcuucggcaaggccuacaccaucuucaacaagacccugauggaggccgacgcccacuacaagagcgugaacaccuggaacgagaucauccccagcaagggcugccugaccgugggcggcagaugccacccccacgugaacggcguguucuucaacggcaucauccugggccccgacggccacgugcugauccccgagaugcagagcagccugcugcagcagcacauggagcugcuggagagcagcgugaucccccugaugcacccccuggccgaccccagcaccguguucaaggacggcgacgaggccgaggacuucguggaggugcaccugcccgacgugcacaagcaggugagcggcaucgaccugggccugcccaacuggggcaaguacgugcugaucagcgccggcuuccuggugacccugcugcugaucaucuucuucaugaucugcugcagaagagccaacagaagagugagcacccagcagagccugggcgagagcggcaagaagguguucgugaucccccagaacggcaaggugaucagcagcugggagagcuacaagaacggcaccgagaccagacuguga

SEQ ID NO: 191738 - RNA, 1575 nt, Artificial Sequence
  derived and/or modified CDS sequence (opt4) from glycoprotein__RABV__KM594027.1
augaucccccaggcccugcuguucgugccccugcugaucagcagcagcugcuucggcaaguuccccguguacaccauccccgagaagcugggccccuggagccccaucgacauccaccaccugagcugccccaacaaccuggccguggaggacgagggcugcaacagccugagcggcuucagcuacauggagcugaaggugggcuacaucagcgccaucaaggugaacggcuucaccugcaccggcguggugaccgaggccgagaccuacaccaacuucgugggcuacgugaccaccaccuucaagagaaagcacuucagacccaugcccgacgccugcagagccgccuacaacuggaagauggccggcgaccccagauacgaggagagccugcacaaccccuaccccgacuaccacuggcugagaaccgugaccaccaccaaggagagccugaucaucaucagccccagcguggccaaccuggaccccuacgacaagagccugcacagcagaguguuccccggcggcaagugcaugggcaucaccgugagcagcaccuucugcagcaccaaccacgacuacaccaucuggaugcccgagaacgccagacugggcaccagcugcgacaucuucaccaccagcaagggcaagaaggccagcaagggcggcaagaucugcggcuucguggacgagagaggccuguacaagagccugaagggcgccugcaagcugaagcugugcggcgugagcggccugagacugcuggacggcaccugggugaccauccagaccagcgacgagaucaaguggugcccccccgacaagcuggugaaccugcacgacuuccacagcgacgagaucgagcaccuggugguggaggagcuggugagaaagagagaggagugccuggacacccuggagagcaucaugaccaccaagagcgugagcuucagaagacugagccaccugagaaagcuggugcccggcuucggcaaggccuacaccaucuucaacaagacccugauggaggccgacgcccacuacaagagcgugaacaccuggaacgagaucauccccagcaagggcugccugaccgugggcggcagaugccacccccacgugaacggcguguucuucaacggcaucauccugggccccgacggccacgugcugauccccgagaugcagagcagccugcugcagcagcacauggagcugcuggagagcagcgugaucccccugaugcacccccuggccgaccccagcaccguguucaaggacggcgacgaggccgaggacuucguggaggugcaccugcccgacgugcacaagcaggugagcggcaucgaccugggccugcccaacuggggcaaguacgugcugaucagcgccggcuuccuggugacccugcugcugaucaucuuccugaugaucugcugcagaagagccaacagaagagugagcacccagcagagccugggcgagagcggcaagaagguguucgugaucccccagaacggcaaggugaucagcagcugggagagcuacaagaacggcgccgagaccagacuguga

SEQ ID NO: 191739 - RNA, 1575 nt, Artificial Sequence
  derived and/or modified CDS sequence (opt4) from glycoprotein__RABV__KM594028.1
augaucccccaggcccugcuguucgugccccugcugaucagcagcagcugcuucggcaaguuccccguguacaccauccccgagaagcugggccccuggagccccaucgacauccaccaccugagcugccccaacaaccuggccguggaggacgagggcugcaacagccugagcggcuucagcuacauggagcugaaggugggcuacaucagcgccaucaaggugaacggcuucaccugcaccggcguggugaccgaggccgagaccuacaccaacuucgugggcuacgugaccaccaccuucaagagaaagcacuucagacccaugcccgacgccugcagagccgccuacaacuggaagauggccggcgaccccagauacgaggagagccugcacaaccccuaccccgacuaccacuggcugagaaccgugaccaccaccaaggagagccugaucaucaucagccccagcguggccaaccuggaccccuacgacaagagccugcacagcagaguguuccccggcggcaagugcaugggcaucaccgugagcagcaccuucugcagcaccaaccacgacuacaccaucuggaugcccgagaacgccagacugggcaccagcugcgacaucuucaccaccagcaagggcaagaaggccagcaagggcggcaagaucugcggcuucguggacgagagaggccuguacaagagccugaagggcgccugcaagcugaagcugugcggcgugagcggccugagacugcuggacggcaccugggugaccauccagaccagcgacgagaucaaguggugcccccccgacaagcuggugaaccugcacgacuuccacagcgacgagaucgagcaccuggugguggaggagcuggugagaaagagagaggagugccuggacacccuggagagcaucaugaccaccaagagcgugagcuucagaagacugagccaccugagaaagcuggugcccggcuucggcaaggccuacaccaucuucaacaagacccugauggaggccgacgcccacuacaagagcgugaacaccuggaacgagaucauccccagcaagggcugccugaccgugggcggcagaugccacccccacgugaacggcguguucuucaacggcaucauccugggccccgacggccacgugcugauccccgagaugcagagcagccugcugcagcagcacauggagcugcuggagagcagcgugaucccccugaugcacccccuggccgaccccagcaccguguucaaggagggcgacgaggccgaggacuucguggaggugcaccugcccgacgugcacaagcaggugagcggcaucgaccugggccugcccaacuggggcaaguacgugcugaucagcgccggcuuccuggugacccugcugcugaucaucuuccugaugaucugcugcagaagagccaacagaagagugagcacccagcagagccugggcgagagcggcaagaagauguucgugaucccccagaacggcaaggugaucagcagcugggagagcuacaagaacggcgccgagaccggccuguga

SEQ ID NO: 191740 - RNA, 1575 nt, Artificial Sequence
  derived and/or modified CDS sequence (opt4) from glycoprotein__RABV__KM594029.1
augauccaccaggcccugcugcuggugccccugaugaucagcagccagugccugggcaaguuccccaucuacaccauccccgacaagcugggccccuggagccccaucgacauccaccaccugagcugccccaacaaccugaucguggaggacgagggcugcaccagccugagcggccugagcuacauggagcugaaggugggcuacaucagcgccaucaaggugaacggcuucaccugcaccggcguggugaccgaggccgagaccuacaccaacuucgugggcuacgugaccaccaccuucaagagaaagcacuucagacccaugcccgacgccugcagagccgccuacaacuggaagaucgccggcgaccccagauacgaggagagccugcagaaccccuaccccgacagccacuggcugagaaccgugaagaccaccaaggagagccugaucaucaucagccccagcguggccgaccuggaccccuacgacaagagccugagaagcagaguguuccccggcggcaagugccugggcaucaccaucagcagcaccuacugcagcaccaaccacgacuacaccaucuggaugcccgaggaggccagacugggcaccagcugcgacaucuucaccaacagcaagggcaagagagccagcaagggcggcaagaucugcggcuucguggacgagagaggccuguacaagagccugaagggcgccugcaagcugaagcugugcggcgugagcggccugagacugauggacggcaccugggugagcauccagauccccgacgagaucaaguggugccccagcgaccagcuggugaaccugcacgacuuccacagcgacgagaucgagcaccuggugguggaggagcuggugaagaagagagaggagugccuggacgcccuggagagcaucaugaccaccaagagcgugagcuucagaagacugagccaccugagaaagcuggugcccggcuucggcaaggccuacaccaucuucaacaagacccugauggaggccgacgcccacuacaacagcgugagaaccuggaacgagaucauccccagcaagggcugccugaaggugggcggcagaugccacccccacguggacggcguguucuucaacggcaucaucaugggccccgacggcagcgugcugauccccgagaugcagagcagccugcugcagcagcacauggagcugcuggagagcagcgugaucccccugaugcacccccuggccgaccccagcaccguguucaaggacgacgacgaggccgagaacuucguggaggugcaccugcccgacauccacaagcaggugagcggcaucgaccugggccugcccgacuggggcaaguaccugcugaugagcaccggcgcccuggccgcccugauccugaccaucuuccugauccugugcugcagaaaggugaacagaaaggagagcauccagagaagccuggaggagagcggcagaaaggugcccgugaccccccagaacggcaaggugaucagcagcugggagcuguacaagaacggcggcgagaccaagcuguga

SEQ ID NO: 191741 - RNA, 1575 nt, Artificial Sequence
  derived and/or modified CDS sequence (opt4) from glycoprotein__RABV__KM594030.1
augaucccccaggcccugcuguucgugcugcugcugaucagcagcagcugcuucggcaaguuccccguguacaccauccccgacaagcugggccccuggagccccaucgacauccaccaccugagcugccccaacaaccugaucguggaggacgagggcugcaacaaccugagcggcuucagcuacauggagcugaaggugggcuacaucagcgccaucaaggugaacggcuucaccugcaccggcguggugaccgaggccgagaccuacaccaacuucgugggcuacgugaccaccaccuucaagagaaagcacuucagacccacccccgacgccugcagagccgccuacaacuggaagauggccggcgaccccagauacgaggagagccugcacaaccccuaccccgacuaccacuggcugagaaccgugaagaccaccaaggagagccugaucaucaucagccccagcguggccgaccuggaccccuacgacaagagccugcacagcagaguguuccccagcggcaagugccugggcaucaccaucagcagcaccuacugcagcaccaaccacgacuacaccaucuggaugcccgagaaggccagacugggcaccagcugcgacaucuucaccaacagcaagggcaagaaggccagcaagggcggcaaggugugcggcuucguggacgagagaggccuguacaagagccugaagggcgccugcaagcugaagcugugcggcgugcccggccugagacugauggacggcaccugggugagcgugcagacccccgacgaggccaaguggugcccccccgaccagcuggugaaccugcacgacuuccacagcgacgagaucgagcaccuggugguggaggagcuggugaagaagagagaggagugccuggacacccuggagagcaucaugaccaccaagagcgugagcuucagaagacugagccaccugagaaagcuggugcccggcuucggcaaggccuacaccaucuucaacaagacccugauggaggccgacgcccacuacaagagcgugcacaccuggaacgaggugauccccagcaagggcugccugaaggugggcggcagaugccacccccacgugaacggcguguuccugaacggcaucauccugggccccgacggcaacgugcugauccccgagaugcagagcagccugcugcagcagcacauggagcugcuggagagcagcgugaucccccugaugcacccccugagcgaccccagcaccguguucaaggacggcgacgaggccgaggacuucguggaggugcaccugcccgacgugcacaagcaggugagcggcguggacuucggccugcccaacuggggcagauacgugcugaugagcgccggcgugcuggccauccugauccugaccaucuuccugaugaucugcugcagaagagugaacagaaaggacagcagcagaagcagccccggcgagcugggcagaaaggugagcgugaccccccagaacggcaaggugaucagcagcugggagagcuacaagagcgagggcgagaccagacuguga

SEQ ID NO: 191742 - RNA, 1575 nt, Artificial Sequence
  derived and/or modified CDS sequence (opt4) from glycoprotein__RABV__KM594031.1
augaucccccaggcccugcuguucgugcugcugcugaucagcagcagcugcuucggcaaguuccccguguacaccauccccgacaagcugggccccuggagccccaucgacauccaccaccugagcugccccaacaaccugaucguggaggacgagggcugcaacaaccugagcggcuucagcuacauggagcugaaggugggcuacaucagcgccaucaaggugaacggcuucaccugcaccggcguggugaccgaggccgagaccuacaccaacuucgugggcuacgugaccaccaccuucaagagaaagcacuucagacccacccccgacgccugcagagccgccuacaacuggaagauggccggcgaccccagauacgaggagagccugcacaaccccuaccccgacuaccacuggcugagaaccgugaagaccaccaaggagagccugaucaucaucagccccagcguggccgaccuggaccccuacgacaagagccugcacagcagaguguuccccagcggcaagugccugggcaucaccaucagcagcaccuacugcagcaccaaccacgacuacaccaucuggaugcccgagaaggccagacugggcaccagcugcgacaucuucaccaacagcaagggcaagaaggccagcaagggcggcaaggugugcggcuucguggacgagagaggccuguacaagagccugaagggcgccugcaagcugaagcugugcggcgugcccggccugagacugauggacggcaccugggugagcgugcagacccccgacgaggccaaguggugcccccccgaccagcuggugaaccugcacgacuuccacagcgacgagaucgagcaccuggugguggaggagcuggugaagaagagagaggagugccuggacacccuggagagcaucaugaccaccaagagcgugagcuucagaagacugagccaccugagaaagcuggugcccggcuucggcaaggccuacaccaucuucaacaagacccugauggaggccgacgcccacuacaagagcgugcacaccuggaacgaggugauccccagcaagggcugccugaaggugggcggcagaugccacccccacgugaacggcguguuccugaacggcaucauccugggccccgacggcaacgugcugauccccgagaugcagagcagccugcugcagcagcacauggagcugcuggagagcagcgugaucccccugaugcacccccugagcgaccccagcaccguguucaaggacggcgacgaggccgaggacuucguggaggugcaccugcccgacgugcacaagcaggugagcggcguggacuucggccugcccaacuggggcagauacgugcugaugagcgccggcgugcuggccauccugauccugaccaucuuccugaugaucugcugcagaagagugaacagaaaggacagcagcagaagcagccugggcgagcugggcagaaaggugagcgugaccccccagaacggcaaggugaucagcagcugggagagcuacaagagcgagggcgagaccagacuguga

SEQ ID NO: 191743 - RNA, 1575 nt, Artificial Sequence
  derived and/or modified CDS sequence (opt4) from glycoprotein__RABV__KM594032.1
augaucccccaggcccugcuguucgugcugcugcugaucagcagccugugcagcggcaaguuccccaucuacaccauccccgacaagcugggccccuggagccccaucgacauccaccaccugagcugccccaacaaccugaucguggaggacgagggcugcagcagccugagcggcuucagcuacauggagcugaaggugggcuacaucagcgccaucaaggugaacggcuucaccugcaccggcguggugaccgaggccgagaccuacaccaacuucgugggcuacgugaccaccaccuucaagagaaagcacuucagacccaugcccgacgccugcagagccgccuacaacuggaagauggccggcgaccccagauacgaggagagccugcacaaccccuaccccgacuaccacuggcugagaaccgugaagaccaccaaggagagccugaucaucaucagccccagcguggccgaccuggaccccuacgacaagagccugcacagcagaguguuccccggcggcaagugccugggcaucaccaucagcagcaccuacugcagcaccaaccacgacuacaccaucuggaugcccgaggagcccagacugagaaccagcugcgacaucuucaccaacagcaagggcaagagagccagcaagggcggcaagaugugcggcuucguggacgagagaggccuguacaagagccugaagggcgccugcaagcugaagcugugcggcgugcccggccugagacugauggacggcaccugggugagcgugcagacccccgacgagaccaaguggugcagccccgaccagcuggugaaccugcacgacuuccacagcgacgagaucgagcaccuggugguggaggagcuggugaagaagagagaggagugccuggacacccuggagagcaucaugaccaccaagagcgugagcuucagaagacugagccaccugagaaagcuggugcccggcuucggcaaggccuacaccaucuucaacaagacccugauggaggccgacgcccacuacaagagcauccagaccuggaacgaggugauccccagcaagggcugccugaaggugggcggcagaugccacccccacgugaacggcguguuccugaacggcaucauccugggccccgacggcaacgugcugauccccgagaugcagagcagccugcugcagcagcacauggagcugcuggagagcagcgugaucccccugaugcacccccugagcgaccccagcaccguguucaaggacggcgacgaggccgaggacuucguggaggugcaccugcccgacgugcacaagcaggugagcggcguggacuucggccugcccaacuggggcagauacgugcugaugagcgccggcgcccuggccauccugaugcugaccaucuuccugaugaucugcugcagaaaggugaagagaaccgacagcagccagagcagccuggaggagcugagaagaaaggugagcgugaccccccagaacggcaaggugaucagcagcugggagagcuacaagagcgagggcgagaccagacuguga

SEQ ID NO: 191744 - RNA, 1575 nt, Artificial Sequence
  derived and/or modified CDS sequence (opt4) from glycoprotein__RABV__KM594033.1
augaucccccaggcccugcugcuggugccccuggugaucagcagccugugccugggcaaguuccccaucuacaccauccccgacaagcugggccccuggagccccaucgacauccaccaccugagcugccccaacaaccuggugguggaggacgagggcugcaccagccugagcggcuucagcuacauggagcugaaggugggcuacaucagcgccaucaaggugaacggcuucaccugcaccggcguggugaccgaggccgagaccuacaccaacuucgugggcuacgugaccaccaccuucaagagaaagcacuucagacccaugagcgacgccugcagagccgccuacaacuggaagguggccggcgaccccagauacgaggagagccugcagaaccccuaccccgacuaccacuggcugagaaccgugaagaccaccaaggagagccugaucaucaucagccccagcguggccgaccuggaccccuacgacaagagccugagaagcagaaucuuccccggcggcaagugccugggcaucaccgugagcagcaccuacugcagcaccaaccacgacuacaccaucuggaugcccgaggaggccagacugggcaccuacugcgacaucuucaccaacagcaagggcaagagagccagcaagggcggcaagaucugcggcuucguggacgagagaggccuguacaagagccugaagggcgccugcagacugaagcugugcggcgugagcggccugagacugauggacggcaccuggguggccauccagaccagcgaggagaccaaguggugccccagcgaccagcuggugaaccugcacgacuuccacagcgacgagaucgagcaccuggugguggaggagcuggugaagaagagagaggagugccuggacacccuggagagcaucaugaccaccaagagcgugagcuucagaagacugagccaccugagaaagcuggugcccggcuucggcaaggccuacaccaucuucaacaagacccugauggaggccgacgcccacuacaacagcgugagaaccuggaacgagaucauccccagcaagggcugccugaaggugggcggcagaugccacccccacguggacggcguguucuucaacggcaucauccugggccccgacggcaacgugcugauccccgagaugcagagcagccugcugcagcagcacauggagcugcuggagagcagcgugaucccccugaugcacccccuggccgaccccagcaccguguucaaggagggcgacgaggccgagaacuucguggaggugcaccugcccgacauccacaagcaggugagcggcaucgaccugggccugcccaacuggggcaaguaccugcugaugagcgccggcgcccuggccgcccugauccugaccaucuuccugaucaccugcugcagaagagugaacagaaccgagagcaucaagagaggccccgaggagagcagaagaaaggugagcgugaccccccagaacggcaaggugaucagcagcugggagcuguacaagaacggcggcgagaccaagcuguga

SEQ ID NO: 191745 - RNA, 1575 nt, Artificial Sequence
  derived and/or modified CDS sequence (opt4) from glycoprotein__RABV__KM594034.1
augaucccccaggcccugcugcuggugccccuggugaucagcagccugugccugggcaaguuccccaucuacaccauccccgacaagcugggccccuggagccccaucgacauccaccaccugagcugccccaacaaccuggugguggaggacgagggcugcaccagccugagcggcuucagcuacauggagcugaaggugggcuacaucagcgccaucaaggugaacggcuucaccugcaccggcguggugaccgaggccgagaccuacaccaacuucgugggcuacgugaccaccaccuucaagagaaagcacuucagacccaugagcggcgccugcagagccgccuacaacuggaagguggccggcgaccccagauacgaggagagccugcagaaccccuaccccgacuaccacuggcugagaaccgugaagaccaccaaggagagccugaucaucaucagccccagcguggccgaccuggaccccuacgacaagagccugagaagcagaaucuuccccggcggcaagugccugggcaucaccgugagcagcaccuacugcagcaccaaccacgacuacaccaucuggaugcccgaggaggccagacugggcaccagcugcgacaucuucaccaacagcaagggcaagagagccagcaagggcggcaagaucugcggcuucguggacgagagaggccuguacaagagccugaagggcgccugcagacugaagcugugcggcgugagcggccugagacugauggacggcaccuggguggccauccagaccagcgaggagaccaaguggugccccagcgaccagcuggugaaccugcacgacuuccacagcgacgagaucgagcaccuggugguggaggagcuggugaagaagagagaggagugccuggacacccuggagagcaucaugaccaccaagagcgugagcuucagaagacugagccaccugagaaagcuggugcccggcuucggcaaggccuacaccaucuucaacaagacccugauggaggccgacgcccacuacaacagcgugagaaccuggaacgagaucauccccagcaagggcugccugagagugggcggcagaugccacccccacguggacggcguguucuucaacggcaucauccugggccccgacggcaacgugcugauccccgagaugcagagcagccugcugcagcagcacauggagcugcuggagagcagcgugaucccccugaugcacccccuggccgaccccagcaccguguucaaggagggcgacgaggccgagaacuucguggaggugcaccugcccgacauccacaagcaggugagcggcaucgaccugggccugcccaacuggggcaaguaccugcugaugagcgccggcgcccuggccgcccugauccugaccaucuuccugaucaccugcugcagaagagugaacagaaccgagagcaucaagcagggccccgaggagagcagaagaaaggugagcgugaccccccagaacggcaaggugaucagcagcugggagcuguacaagaacggcggcgagaccaagcuguga

SEQ ID NO: 191746 - RNA, 1575 nt, Artificial Sequence
  derived and/or modified CDS sequence (opt4) from glycoprotein__RABV__KM594035.1
augaucccccaggcccugcugcuggugccccuggugaucagcagccugugccugggcaaguuccccaucuacaccauccccgacaagcugggccccuggagccccaucgacauccaccaccugagcugccccaacaaccuggugguggaggacgagggcugcaccagccugagcggcuucagcuacauggagcugaaggugggcuacaucagcgccaucaaggugaacggcuucaccugcaccggcguggugaccgaggccgagaccuacaccaacuucgugggcuacgugaccaccaccuucaagagaaagcacuucagacccaugagcgacgccugcagagccgccuacaacuggaagguggccggcgaccccagauacgaggagagccugcagaaccccuaccccgacuaccacuggcugagaaccgugaagaccaccaaggagagccugaucaucaucagccccagcguggccgaccuggaccccuacgacaagagccugagaagcagaaucuuccccggcggcaagugccugggcaucaccgugagcagcaccuacugcagcaccaaccacgacuacaccaucuggaugcccgaggaggccagacugggcaccagcugcgacaucuucaccaacagcaagggcaagagagccagcaagggcggcaagaucugcggcuucguggacgagagaggccuguacaagagccugaagggcgccugcagacugaagcugugcggcgugagcggccugagacugauggacggcaccuggguggccauccagaccagcgaggagaccaaguggugccccagcgaccagcuggugaaccugcacgacuuccacagcgacgagaucgagcaccuggugguggaggagcuggugaagaagagagaggagugccuggacacccuggagagcaucaugaccaccaagagcgugagcuucagaagacugagccaccugagaaagcuggugcccggcuucggcaaggccuacaccaucuucaacaagacccugauggaggccgacgcccacuacaacagcgugagaaccuggaacgagaucauccccagcaagggcugccugaaggugggcggcagaugccacccccacguggacggcguguucuucaacggcaucauccugggccccgacggcaacgugcugauccccgagaugcagagcagccugcugcagcagcacauggagcugcuggagagcagcgugaucccccugaugcacccccuggccgaccccagcaccguguucaaggagggcgacgaggccgagaacuucguggaggugcaccugcccgacauccacaagcaggugagcggcaucgaccugggccugcccaacuggggcaaguaccugcugaugagcgccggcgcccuggccgcccugauccugaccaucuuccugaucaccugcugcagaagagugaacagaaccgagagcaucaagagaggccccgaggagagcagaagaaaggugagcgugaccccccagaacggcaaggugaucagcagcugggagcuguacaagaacggcggcgagaccaagcuguga

SEQ ID NO: 191747 - RNA, 1575 nt, Artificial Sequence
  derived and/or modified CDS sequence (opt4) from glycoprotein__RABV__KM594036.1
augaucccccaggcccugcugcuggugccccuggugaucagcagccugugccugggcaaguuccccaucuacaccauccccgacaagcugggccccuggagccccaucgacauccaccaccugagcugccccaacaaccuggugguggaggacgagggcugcaccagccugagcggcuucagcuacauggagcugaaggugggcuacaucagcgccaucaaggugaacggcuucaccugcaccggcguggugaccgaggccgagaccuacaccaacuucgugggcuacgugaccaccaccuucaagagaaagcacuucagacccaugagcgacgccugcagagccgccuacaacuggaagguggccggcgaccccagauacgaggagagccugcagaaccccuaccccgacuaccacuggcugagaaccgugaagaccaccaaggagagccugaucaucaucagccccagcguggccgaccuggaccccuacgacaagagccugagaagcagaaucuuccccggcggcaagugccugggcaucaccgugagcagcaccuacugcagcaccaaccacgacuacaccaucuggaugcccgaggaggccagacugggcaccagcugcgacaucuucaccaacagcaagggcaagagagccagcaagggcggcaagaucugcggcuucguggacgagagaggccuguacaagagccugaagggcgccugcagacugaagcugugcggcgugagcggccugagacugauggacggcaccuggguggccauccagaccagcgaggagaccaaguggugccccagcgaccagcuggugaaccugcacgacuuccacagcgacgagaucgagcaccuggugguggaggagcuggugaagaagagagaggagugccuggacacccuggagagcaucaugaccaccaagagcgugagcuucagaagacugagccaccugagaaagcuggugcccggcuucggcaaggccuacaccaucuucaacaagacccugauggaggccgacgcccacuacaacagcgugagaaccuggaacgagaucauccccagcaagggcugccugaaggugggcggcagaugccacccccacguggacggcguguucuucaacggcaucauccugggccccgacggcaacgugcugauccccgagaugcagagcagccugcugcagcagcacauggagcugcuggagagcagcgugaucccccugaugcacccccuggccgaccccagcaccguguucaaggagggcgacgaggccgagaacuucguggaggugcaccugcccgacauccacaagcaggugagcggcaucgaccugggccugcccaacuggggcaaguaccugcugaugagcgccggcgcccuggccgcccugauccugaccaucuuccugaucaccugcugcagaagagugaacagaaccgagagcaucaagcagggccccgaggagagcagaagaaaggugagcgugaccccccagaacggcaaggugaucagcagcugggagcuguacaagaacggcggcgagaccaagcuguga

SEQ ID NO: 191748 - RNA, 1575 nt, Artificial Sequence
  derived and/or modified CDS sequence (opt4) from glycoprotein__RABV__KM594037.1
augauccugcaggcccugcuguucgugccccugcugaucagcagccugugcuucggcaaguuccccaucuacaccauccccgacaagcugggccccuggagccccaucgacauccaccaccugagcugccccaacaaccuggugguggaggacgagggcugcaccagccugagcggcuucagcuacauggagcugaaggugggcuacaucagcgccaucaaggugaacggcuucaccugcaccggcguggugaccgaggccgagaccuacaccaacuucgugggcuacgugaccaccaccuucaagagaaagcacuucagacccacccccgacgccugcagagccgccuacaacuggaagguggccggcgaccccagauacgaggagagccugcagaaccccuaccccgacuaccacuggcugagaaccgugaagaccaccaaggagagccugaucaucaucagccccagcguggccgaccuggaccccuacgacaagagccugcacagcagaguguuccccagcggcaagugccugggcaucaccaucagcagcaccuacugcagcaccaaccacgacuacaccaucuggaugcccgaggaggccagacugggcaccagcugcgacaucuucaccagcagcaagggcaagaaggccagcaagggcggcaagaccugcggcuucguggacgagagaggccuguacaagagccugaagggcgccugcaagcugaagcugugcggcgugcccggccugagacugauggacggcaccugggugaccauccagaccagcgacgagaccaaguggugcccccccgaccagcuggugaaccugcacgacuuccacagcgacgagaucgagcaccuggugguggaggagcuggugaagaagagagaggagugccuggacgcccuggagagcaucaugaccaccaagagcgugagcuucagaagacugagccaccugagaaagcuggugcccggcuucggcaaggccuacaccaucuucaacaagacccugauggaggccgacgcccacuacaagagcgugagaaccuggaacgagaucauccccagcaagggcugccugaaggugggcggcagaugccacccccacguggacggcguguucuucaacggcaucauccugggccccgacggcaacgugcugauccccgagaugcagagcagccugcugcagcagcacauggagcugcuggagagcagcgugaucccccugaugcacccccuggccgaccccagcaccguguucaaggacggcgacgaggccgaggacuucguggaggugcaccugcccgacgugcacaagcagaucagcggcguggaccugggccugcccagcuggggcaaguaccugcugaugaucgccggcgcccuggccggccugauccugaucaucuuccugauggccugcugcagaagagccaagagaaccgagagcagaagaagaggcagcggcgagagcgagagaaaggugcccgugcccccccagaacggcaaggugaucagcagcugggagcuguacaagagcgagggcgagaccggccuguga

SEQ ID NO: 191749 - RNA, 1575 nt, Artificial Sequence
  derived and/or modified CDS sequence (opt4) from glycoprotein__RABV__KM594038.1
augauccugcaggcccugcuguucgugccccugcugaucagcagccugugcuucggcaaguuccccaucuacaccauccccgacaagcugggccccuggagccccaucgacauccaccaccugagcugccccaacaaccuggugguggaggacgagggcugcaccagccugagcggcuucagcuacauggagcugaaggugggcuacaucagcgccaucaaggugaacggcuucaccugcaccggcguggugaccgaggccgagaccuacaccaacuucgugggcuacgugaccaccaccuucaagagaaagcacuucagacccacccccgacgccugcagagccgccuacaacuggaagguggccggcgaccccagauacgaggagagccugcagaaccccuaccccgacuaccacuggcugagaaccgugaagaccaccaaggagagccugaucaucaucagccccagcguggccgaccuggaccccuacgacaagagccugcacagcagaguguuccccagcggcaagugccugggcaucaccaucagcagcaccuacugcagcaccaaccacgacuacaccaucuggaugcccgaggaggccagacugggcaccagcugcgacaucuucaccagcagcaagggcaagaaggccagcaagggcggcagaaccugcggcuucguggacgagagaggccuguacaagagccugaagggcgccugcaagcugaagcugugcggcgugcccggccugagacugauggacggcaccugggugaccauccagaccagcgacgagaccaaguggugcccccccgaccagcuggugaaccugcacgacuuccacagcgacgagaucgagcaccuggugguggaggagcuggugaagaagagagaggagugccuggacgcccuggagagcaucaugaccaccaagagcgugagcuucagaagacugagccaccugagaaagcuggugcccggcuucggcaaggccuacaccaucuucaacaagacccugauggaggccgacgcccacuacaagagcgugagaaccuggaacgagaucauccccagcaagggcugccugaaggugggcggcagaugccacccccacguggacggcguguucuucaacggcaucauccugggccccgacggcaacgugcugauccccgagaugcagagcagccugcugcagcagcacauggagcugcuggagagcagcgugaucccccugaugcacccccuggccgaccccagcaccguguucaaggacggcgacgaggccgaggacuucguggaggugcaccugcccgacgugcacaagcagaucagcggcguggaccugggccugcccagcuggggcaaguaccugcugaugaucgccggcgcccuggccggccugauccugaucaucuuccugauggccugcugcagaagagccaagagaaccgagagcagaagaagaggcagcggcgagagcgagagaaaggugcccgugcccccccagaacggcaaggugaucagcagcugggagcuguacaagagcgagggcgagaccggccuguga

SEQ ID NO: 191750 - RNA, 1575 nt, Artificial Sequence; identical to SEQ ID NO: 190585
  derived and/or modified CDS sequence (opt4) from glycoprotein__RABV__KM594039.1

SEQ ID NO: 191751 - RNA, 1575 nt, Artificial Sequence; identical to SEQ ID NO: 190601
  derived and/or modified CDS sequence (opt4) from glycoprotein__RABV__KM594040.1

SEQ ID NO: 191752 - RNA, 1575 nt, Artificial Sequence
  derived and/or modified CDS sequence (opt4) from glycoprotein__RABV__KM594041.1
augauccugcaggcccugcuguucgugccccugcugaucagcagccugugccugggcaaguuccccaucuacaccauccccgacaagcugggccccuggagccccaucgacauccaccaccugagcugccccaacaaccuggugguggaggacgagggcugcaccaaccugagcggcuucagcuacauggagcugaaggugggcuacaucagcgccaucaaggugaacggcuucaccugcaccggcguggugaccgaggccgagaccuacaccaacuucgugggcuacgugaccaccaccuucaagagaaagcacuucagacccauccccgacgccugcagagccgccuacaacuggaagauggccggcgaccccagauacgaggagagccugcagaaccccuaccccgacuaccacuggcugagaaccgugaagaccaccaaggagagccugaucaucaucagccccagcguggccgaccuggaccccuacgacaagagccugcacagcagaguguuccccggcggcaagugccugggcaucaccgugagcagcaccuacugcagcaccaaccacgacuacaccaucuggaugcccgaggagcccagacugggcaccagcugcgacaucuucaccagcagcaagggcaagaaggccagcaagggcggcaagaccugcggcuucguggacgagagaggccuguacaagagccugaagggcgccugcaagcugaagcugugcggcgugcugggccugagacugauggacggcaccugggugagcauccagaccagcgacgacaccaaguggugcccccccgaccagcuggugaaccugcacgacuuccacagcgacgagaucgagcaccuggugguggaggagcuggugaagaagagagaggagugccuggacgcccuggagagcaucaugaccaccaagagcgugagcuucagaagacugagcuaccugagaaagcuggugcccggcuucggcaaggccuacaccaucuucaacaagacccugauggaggccgacgcccacuacaagagcgugagaaccuggaacgagaucauccccagcaagggcugccugaaggugagagagagaugccacccccccguggacggcguguucuucaacggcaucauccugggccccgacggcaacgugcugauccccgagaugcagagcagccugcugcagcagcacauggagcugcuggagagcagcgugaucccccugaugcacccccuggccgaccccagcaccguguucaaggagggcgacgaggccgaggacuucguggaggugcaccugcccgacgugcacaagcagaucagcggcguggaccugggccugcccagcuggggcaaguaccugcugaugaucgccggcggccuggccacccuggugcugaucaucugcagcauggccugcugcagaagaaccaagagaaccgagagcagaagaagaggcagcagagagagcgagaagaaggugaccgccgccccccagaccagaaagguggugagcagcugggagcuguacaagagcgagggcgacgccagacuguga

SEQ ID NO: 191753 - RNA, 1575 nt, Artificial Sequence; identical to SEQ ID NO: 190601
  derived and/or modified CDS sequence (opt4) from glycoprotein__RABV__KM594042.1

SEQ ID NO: 191754 - RNA, 1575 nt, Artificial Sequence
  derived and/or modified CDS sequence (opt4) from glycoprotein__RABV__KM594043.1
augauccugcaggcccugcuguucgugccccugcugaucagcagccugugccugggcaaguuccccaucuacaccauccccgacaagcugggccccuggagccccaucgacauccaccaccugagcugccccaacaaccuggugguggaggacgagggcugcaccaaccugagcggcuucagcuacauggagcugaaggugggcuacaucagcgccaucaaggugaacggcuucaccugcaccggcguggugaccgaggccgagaccuacaccaacuucgugggcuacgugaccaccaccuucaagagaaagcacuucagacccauccccgacgccugcagagccgccuacaacuggaagauggccggcgaccccagauacgaggagagccugcagaaccccuaccccgacuaccacuggcugagaaccgugaagaccaccaaggagagccugaucaucaucagccccagcguggccgaccuggaccccuacgacaagagccugcacagcagaguguuccccggcggcaagugccugggcaccaccgugagcagcaccuacugcagcaccaaccacgacuacaccaucuggaugcccgaggagcccagacugggcaccagcugcgacaucuucaccagcagcaagggcaagaaggccagcaagggcggcaagaccugcggcuucguggacgagagaggccuguacaagagccugaagggcgccugcaagcugaagcugugcggcgugcugggccugagacugauggacggcaccugggugagcauccagaccagcgacgacaccaaguggugcccccccgaccagcuggugaaccugcacgacuuccacagcgacgagaucgagcaccuggugguggaggagcuggugaagaagagagaggagugccuggacgcccuggagagcaucaugaccaccaagagcgugagcuucagaagacugagcuaccugagaaagcuggugcccggcuucggcaaggccuacaccaucuucaacaagacccugauggaggccgacgcccacuacaagagcgugagaaccuggaacgagaucauccccagcaagggcugccugaaggugagagagagaugccacccccccguggacggcguguucuucaacggcaucauccugggccccgacggcaacgugcugauccccgagaugcagagcagccugcugcagcagcacauggagcugcuggagagcagcgugaucccccugaugcacccccuggccgaccccagcaccguguucaaggagggcgacgaggccgaggacuucguggaggugcaccugcccgacgugcacaagcagaucagcggcguggaccugggccugcccagcuggggcagauaccugcugaugaucgccggcggccuggccacccuggugcugaucaucugcagcauggccugcugcagaagaaccaagagaaccgagagcagaagaagagacagcagagagagcgagaagaaggugaccgugaccccccagaccagaaagguggugagcagcugggagcuguacaagagcgagggcgacgccagccuguga

SEQ ID NO: 191755 - RNA, 1575 nt, Artificial Sequence
  derived and/or modified CDS sequence (opt4) from glycoprotein__RABV__KP723638.1
auggugcugcagacccugcuguucgugcccuuccugguguucagccugugcuucggcaaguuccccaucuacaccauccccgacaagcugggccccuggagccccaucgacauccaccaccugagcugccccaacaaccuggugguggaggacgagggcugcaccaaccugagcggcuucagcuacauggagcugaaggugggcuacaucagcgccaucaaggugaacggcuucaccugcaccggcguggugaccgaggccgagaccuacaccaacuucgugggcuacgugaccaccaccuucaagagaaagcacuucagacccacccccgacgccugcagagccgccuacaacuggaagauggccggcgaccccagauacgaggagagccugcacaaccccuaccccgacuaccacuggcugagaaccgugaagaccaccaaggagagccuggugaucaucagccccagcguggccgaccuggaccccuacgacaagagccugcacagcagaguguuccccagcggcaagugcagcggcaucaccgugagcagcaccuacugcagcaccaaccacgacuacaccaucuggaugcccgagaaccccagacugggcaccagcugcgacaucuucgccaacagcagaggcaagagagccagcaagggcagcaagaccugcggcuucguggacgagagaggccuguacaagagccugaagggcgccugcaagcugaagcugugcggcgugcugggccugagacugauggacggcaccuggguggccaugcagaccagcgaggagaccaaguggugcccccccgaccagcuggugaaccugcacgacuucagaagcgacgagaucgagcaccuggugguggaggagcuggugaagaagagagaggagugccuggacgcccuggagagcaucaugaccaccaagagcgugagcuucagaagacugagccaccugagaaagcuggugcccggcuucggcaaggccuacaccaucuucaacaagacccugauggaggccgacgcccacuacaagagcgugagaaccuggaacgagaucauccccagcaagggcugccugagagugggcggcagaugccacccccacgugaacggcguguucuucaacggcaucauccugggccccgacggccacgugcugauccccgagaugcagagcagccugcugcagcagcacauggagcugcuggagagcagcgugaucccccugaugcacccccuggccgaccccagcaccguguucaaggacggcgacgaggccgaggacuucguggaggugcaccugcccgacgugcacaagcaggugagcggcguggaccugggccugcccaacuggggcaaguacgugcugcugagcgccggcacccugaucgugcugaugcugaucaucuuccugaugaccugcugcagaagagugaacagacccaagcccacccagagaagccugggcggcaccggcagaaaggugagcgugaccagccagagcggcaaggugaucagcagcugggagagcuacaagagcggcagcgagaccagacuguga

SEQ ID NO: 191756 - RNA, 1575 nt, Artificial Sequence
  derived and/or modified CDS sequence (opt4) from glycoprotein__RABV__KR105372.1
auggugccccaggugcugcuguucgugccccugcugggcuucagccugugcuucggcaaguuccccaucuacaccauccccgacgagcugggccccuggagccccaucgacauccaccaccugagcugccccaacaaccuggugguggaggacgagggcugcaccaaccugagcgaguucagcuacauggagcugaaggugggcuacaucagcgccaucaaggugaacggcuucaccugcaccggcguggugaccgaggccgagaccuacaccaacuucgugggcuacgugaccaccaccuucaagagaaagcacuucagacccacccccgacgccugcagagccgccuacaacuggaagauggccggcgaccccagauacgaggagagccugcacaaccccuaccccgacuaccacuggcugagaaccgugagaaccaccaaggagagccugaucaucaucagccccagcgugaccgaccuggaccccuacgacaagagccugcacagcagaguguuccccggcggcaagugcagcggcaucaccgugagcagcaccuacugcagcaccaaccacgacuacaccaucuggaugcccgaggaccccagacccagaacccccugcgacaucuucaccaacagcagaggcaagagagccagcaagggcaacaagaccugcggcuucguggacgagagaggccuguacaagagccugaagggcgccugcagacugaagcugugcggcgugcugggccugagacugauggacggcaccuggguggccaugcagaccagcgacgagaccaaguggugcccccccgaccagcuggugaaccugcacgacuuccacagcgacgagaucgagcaccuggugguggaggagcuggugaagaagagagaggagugccuggacgcccuggagagcaucaugaccaccaagagcgugagcuucagaagacugagccaccugagaaagcuggugcccggcuucggcaaggccuacaccaucuucaacaagacccugauggaggccgacgcccacuacaagagcgugagaaccuggaacgagaucauccccagcaagggcugccugaaggugggcggcagaugccacccccacgugaacggcguguucuucaacggcaucauccugggccccgacggccacgugcugauccccgagaugcagagcagccugcugcagcagcacauggagcugcugaagagcagcgugaucccccugaugcacccccuggccgaccccagcaccguguucaaggagggcgacgaggccgaggacuucguggaggugcaccugcccgacguguacaagagaaucagcggcguggaccugggccugcccaacuggggcaaguacgugcugaugaccgccggcgccaugaucggccuggugcugaucuucagccugaugaccuggugcagaagagccaacagacccgagagcaagcagagaagcuucggcggcaccggcagaaacgugagcgugaccagccagagcggcaaggugauccccagcugggagagcuacaagagcggcggcgagaccagacuguga

SEQ ID NO: 191757 - RNA, 1575 nt, Artificial Sequence
  derived and/or modified CDS sequence (opt4) from glycoprotein__RABV__KR906734.1
auggugccccaggcccugcuguucgugccccugcugguguucccccugugcuucggcaaguuccccaucuacaccauccccgacaagcugggccccuggagccccaucgacauccaccaccugagcugccccaacaaccuggugguggaggacgagggcugcaccaaccugagcggcuucagcuacauggagcugaaggugggcuacaucagcgccaucaaggugaacggcuucaccugcaccggcguggugaccgaggccgagaccuacaccaacuucgugggcuacgugaccaccaccuucaagagaaagcacuucagacccauccccgacgccugcagagccgccuacaacuggaagauggccggcgaccccagauacgaggagagccugcacaaccccuaccccgacuaccacuggcugagaaccgugaagaccaccaaggagagccuggugaucaucagccccagcguggccgaccuggaccccuacgacaagagccugcacagcagaguguuccccagcggcaagugcagcggcaucaccgugagcagcaccuacugcagcaccaaccacgacuacaccaucuggaugcccgagaaccccagacugggcaccagcugcgacaucuucaccaacagcagaggcaagagagccagcaagggcggcaagaccugcggcuucguggacgagagaggccuguacaagagccugagaggcgccugcaagcugaagcugugcggcgugcugggccugagacugauggacggcaccuggguggccaugcagaccagcgacgagaccaaguggugcccccccgaccagcuggugaacaugcacgacuucagaagcgacgagaucgagcaccuggugguggaggagcuggugaagaagagagaggagugccuggacgcccuggagagcaucaugaccaccaagagcgugagcuucagaagacugagccaccugagaaagcuggugcccggcuucggcaaggccuacaccaucuucaacaagacccugauggaggccgacgcccacuacaagagcgugagaaccuggaacgagaucauccccagcaagggcugccugagagugggcggcagaugccacccccacgugaacggcguguucuucaacggcaucauccugggccccgacggccacgugcugauccccgagaugcagagcagccugcugcagcagcacauggagcugcuggagagcagcgugaucccccugaugcacccccuggccgaccccagcaccguguucaaggagggcgacgaggccgaggacuucguggaggugcaccugcccgacgugcacaagcaggugagcggcguggaccugggccugcccaacuggggcaaguacgugcugcugagcgccggcacccugaucgcccugaugcugaucaucuuccugaugaccugcugcagaagagugaacagacccgagcccacccagagaagccugggcggcaccggcagaaaggugagcgugaccagccagagcggcaaggugaucagcagcugggagagcuacaagagcggcggcgagaccagacuguga

SEQ ID NO: 191758 - RNA, 1575 nt, Artificial Sequence
  derived and/or modified CDS sequence (opt4) from glycoprotein__RABV__KR906735.1
auggugccccagacccugcuguucgugccccugcugguguucagccugugcuucggcaaguuccccaucuacaccauccccgacaagcugggccccuggagccccaucgacauccaccaccugagcugccccaacaaccuggugguggaggacgagggcugcaccaaccugagcggcuucagcuacauggagcugaaggugggcuacaucagcgccaucaaggugaacggcuucaccugcaccggcguggugaccgaggccgagaccuacaccaacuucgugggcuacgugaccaccaccuucaagagaaagcacuucagacccauccccgacgccugcagagccgccuacaacuggaagauggccggcgaccccagauacgaggagagccugcacaaccccuaccccgacuaccacuggcugagaaccgugaagaccaccaaggagagccuggugaucaucagccccagcguggccgaccuggaccccuacgacaagagccugcacagcagaguguuccccagcggcaagugcagcggcaucaccgugagcagcaccuacugcagcaccaaccacgacuacaccaucuggaugcccgagaaccccagacugggcaccagcugcaacaucuucaccaacagcagaggcaagagagccagcaagggcggcaagaccugcggcuucguggacgagagaggccuguacaagagccugaagggcgccugcaagcugaagcugugcggcgugcugggccugagacugauggacggcaccuggguggccaugcagaccagcgacgagaccaaguggugcccccccgaccagcuggugaacaugcacgacuucagaagcgacgagaucgagcaccuggugguggaggagcuggugaagaagagagaggagugccuggacgcccuggagagcaucaugaccaccaagagcgugagcuucagaagacugagccaccugagaaagcuggugcccggcuucggcaaggccuacaccaucuucaacaagacccugauggaggccgacgcccacuacaagagcgugagaaccuggaacgagaucauccccagcaagggcugccugagagugggcggcagaugccacccccacgugaacggcguguucuucaacggcaucauccugggccccgacggccacgugcugauccccgagaugcagagcagccugcugcagcagcacauggagcugcuggagagcagcgugaucccccugaugcacccccuggccgaccccagcaccguguucaaggacggcgacgaggccgaggacuucguggaggugcaccugcccgacgugcacaagcaggugagcggcguggaccugggccugcccaacuggggcaaguacgugcugcugagcgccggcacccugaucgcccugaugcugaucaucuuccugaugaccugcugcagaagagugaacagacccgagagcacccagagaagccugggcggcaccagaagaaaggugagcgugaccagccagagcggcaaggugaucagcagcugggagagcuacaagagcggcggcgagaccagacuguga

SEQ ID NO: 191759 - RNA, 1575 nt, Artificial Sequence; identical to SEQ ID NO: 191758
  derived and/or modified CDS sequence (opt4) from glycoprotein__RABV__KR906736.1

SEQ ID NO: 191760 - RNA, 1575 nt, Artificial Sequence
  derived and/or modified CDS sequence (opt4) from glycoprotein__RABV__KR906737.1
auggugccccaggcccugcuguucgugccccugcugguguucccccugugcuucggcaaguuccccaucuacaccauccccgacaagcugggccccuggagccccaucgacauccaccaccugagcugccccaacaaccuggugguggaggacgagggcugcaccaaccugagcggcuucagcuacauggagcugaaggugggcuacaucagcgccaucaaggugaacggcuucaccugcaccggcguggugaccgaggccgagaccuacaccaacuucgugggcuacgugaccaccaccuucaagagaaagcacuucagacccauccccgacgccugcagagccgccuacaacuggaagauggccggcgaccccagauacgaggagagccugcacaaccccuaccccgacuaccacuggcugagaaccgugaagaccaccaaggagagccuggugaucaucagccccagcguggccgaccuggaccccuacgacaagagccugcacagcagaguguucaccagcggcaagugcagcggcaucaccgugagcagcaccuacugcagcaccaaccacgacuacaccaucuggaugcccgagaaccccagacugggcaccagcugcaacaucuucgugaacagcaagggcaagagagccagcaagggcggcaagaccugcggcuucguggacgagagaggccuguacaagagccugaagggcgccugcaagcugaagcugugcggcgugcugggccugagacugauggacggcaccuggguggccaugcagaccagcgacgagaccaaguggugcagccccgaccagcuggugaacaugcacgacuucagaagcgacgagaucgagcaccuggugguggaggagcuggugaagaagagagaggagugccuggacgcccuggagagcaucaugaccaccaagagcgugagcuucagaagacugagccaccugagaaagcuggugcccggcuucggcaaggccuacaccaucuucaacaagacccugauggaggccgacgcccacuacaagagcgugagaaccuggaacgagaucauccccagcaagggcugccugagagugggcggcagaugccacccccacgugaacggcguguucuucaacggcaucauccugggccccgacggccacgugcugauccccgagaugcagagcagccugcugcagcagcacauggagcugcuggagagcagcgugaucccccugaugcacccccuggccgaccccagcaccguguucaaggacggcgacgaggccgaggacuucguggaggugcaccugcccgacgugcacaagcaggugagcggcguggaccugggccugcccaacuggggcaaguacgugcugcugagcgccggcacccugaucgcccugaugcugaucaucuuccugaugaccugcugcagaagagugaacagacccgagagcacccagagaagccugggcggcaccggcagaaaggugagcgugaccagccagagcggcaaggugaucagcagcugggagagcuacaagagcggcggcgagaccagacuguga

SEQ ID NO: 191761 - RNA, 1575 nt, Artificial Sequence; identical to SEQ ID NO: 191760
  derived and/or modified CDS sequence (opt4) from glycoprotein__RABV__KR906738.1

SEQ ID NO: 191762 - RNA, 1575 nt, Artificial Sequence
  derived and/or modified CDS sequence (opt4) from glycoprotein__RABV__KR906739.1
auggugccccaggcccugcuguucgugccccugcugguguucccccugugcuucggcaaguuccccaucuacaccauccccgacaagcugggccccuggagccccaucgacauccaccaccugagcugccccaacaaccuggugguggaggacgagggcugcaccaaccugagcggcuucagcuacauggagcugaaggugggcuacaucagcgccaucaaggugaacggcuucaccugcaccggcguggugaccgaggccgagaccuacaccaacuucgugggcuacgugaccaccaccuucaagagaaagcacuucagacccauccccgacgccugcagagccgccuacaacuggaagauggccggcgaccccagauacgaggagagccugcacaaccccuaccccgacuaccacuggcugagaaccgugaagaccaccaaggagagccuggugaucaucagccccagcguggccgaccuggaccccuacgacaagacccugcacagcagaguguuccccagcggcaagugcagcggcaucaccgugagcagcaccuacugcagcaccaaccacgacuacaccaucuggaugcccgagaaccccagacugggcaccagcugcgacaucuucaccaacagcagaggcaagagagccagcaagggcggcaagaccugcggcuucguggacgagagaggccuguacaagagccugaagggcgccugcaagcugaagcugugcggcgugcugggccugagacugauggacggcaccuggguggccaugcagaccagcgacgagaccaaguggugcccccccgacagacuggugaacaugcacgacuucagaagcgacgagaucgagcaccuggugguggaggagcuggugaagaagagagaggagugccuggacgcccuggagagcaucaugaccaccaagagcgugagcuucagaagacugagccaccugagaaagcuggugcccggcuucggcaaggccuacaccaucuucaacaagacccugauggaggccgacgcccacuacaagagcgugagaaccuggaacgagaucauccccagcaagggcugccugagagugggcggcagaugccacccccacgugaacggcguguucuucaacggcaucauccugggccccgacggccacgugcugauccccgagaugcagagcagccugcugcagcagcacauggagcugcuggagagcagcgugaucccccugaugcacccccuggccgaccccagcaccguguucaaggacggcgacgaggccgaggacuucguggaggugcaccugcccgacgugcacaagcaggugagcggcguggaccugggccugcccaacuggggcaaguacgugcugcugagcgccggcacccugaucgcccugaugcugaucaucuuccugaugaccugcugcagaagagugaacagacccgagcccacccagagaagccugggcggcaccggcagaaaggugagcgugaccagccagagcggcaaggugaucagcagcugggagagcuacaagagcggcggcgagaccaagcuguga

SEQ ID NO: 191763 - RNA, 1575 nt, Artificial Sequence
  derived and/or modified CDS sequence (opt4) from glycoprotein__RABV__KR906740.1
auggugccccaggccagacuguucgugccccugcugguguucccccugugcuucggcaaguuccccaucuacaccauccccgacaagcugggccccuggagccccaucgacauccaccaccugagcugccccaacaaccuggugguggaggacgagggcugcaccaaccugagcggcuucagcuacauggagcugaaggugggcuacaucagcgccaucaaggugaacggcuucaccugcaccggcguggugaccgaggccgagaccuacaccaacuucgugggcuacgugaccaccaccuucaagagaaagcacuucagacccauccccgacgccugcagagccgccuacaacuggaagauggccggcgaccccagauacgaggagagccugcacaaccccuaccccgacuaccacuggcugagaaccgugaagaccaccaaggagagccuggugaucaucagccccagcguggccgaccuggaccccuacgacagaagccugcacagcagaguguucaccggcggcaagugcagcggcaucaccgugagcagcaccuacugcagcaccaaccacgacuacaccaucuggaugcccgagaaccccagacugggcaccagcugcaacaucuucgccaacagcaagggcaagagagccagcaagggcggcaagaccugcggcuucguggacgagagaggccuguacaagagccugaagggcgccugcaagcugaagcugugcggcgugcugggccugagacugauggacggcaccuggguggccaugcagaccagcgacgagaccaaguggugcccccccgaccagcuggugaacaugcacgacuucagaagcgacgagaucgagcaccuggugguggaggagcuggugaagaagagagaggagugccuggacgcccuggagagcaucaugaccaccaagagcgugagcuucagaagacugagccaccugagaaagcuggugcccggcuucggcaaggccuacaccaucuucaacaagacccugauggaggccgacgcccacuacaagagcgugagaaccuggaacgagaucauccccagcaagggcugccugagagugggcggcagaugccacccccacgugaacggcguguucuucaacggcaucauccugggccccgacggccacgugcugauccccgagaugcagagcagccugcugcagcagcacauggagcugcuggagagcagcgugaucccccugaugcacccccuggccgaccccagcaccguguucaaggacggcgacgaggccgaggacuucguggaggugcaccugcccgacgugcacaagcaggugagcggcguggaccugggccugcccaacuggggcaaguacgugcugcugagcgccggcacccugaucgcccugaugcugaucaucuuccugaugaccugcugcagaagagugagcagacccgagagcacccagagaagccugggcagaaucggcagaaaggugagcgugaccagccagagcggcaaggugaucagcagcugggagagcuacaagagcggcggcgagaccagacuguga

SEQ ID NO: 191764 - RNA, 1575 nt, Artificial Sequence
  derived and/or modified CDS sequence (opt4) from glycoprotein__RABV__KR906741.1
auggugccccaggcccugcuguucgugccccugcugguguucccccugugcuucggcaaguuccccaucuacaccauccccgacaagcugggccccuggagccccaucgacauccaccaccugagcugccccaacaaccuggugguggaggacgagggcugcaccaaccugagcggcuucagcuacauggagcugaaggugggcuacaucagcgccaucaaggugaacggcuucaccugcaccggcguggugaccgaggccgagaccuacaccaacuucgugggcuacgugaccaccaccuucaagagaaagcacuucagacccauccccgacgccugcagagccgccuacaacuggaagauggccggcgaccccagauacgaggagagccugcacaaccccuaccccgacuaccacuggcugagaaccgugaagaccaccaaggagagccuggugaucaucagccccagcguggccgaccuggaccccuacgacaagagccugcacagcagaguguucaccagcggcaagugcagcggcaucaccgugagcagcaccuacugcagcaccaaccacgacuacaccaucuggaugcccgagaaccccagacugggcaccagcugcaacaucuucgccaacagcaagggcaagagagccagcaagggcggcaagaccugcggcuucguggacgagagaggccuguacaagagccugaagggcgccugcaagcugaagcugugcggcgugcugggccugagacugauggacggcaccuggguggccaugcagaccagcgacgagaccaaguggugcccccccgaccagcuggugaacaugcacgacuucagaagcgacgagaucgagcaccuggugguggaggagcuggugaagaagagagaggagugccuggacgcccuggagagcaucaugaccaccaagagcgugagcuucagaagacugagccaccugagaaagcuggugcccggcuucggcaaggccuacaccaucuucaacaagacccugauggaggccgacgcccacuacaagagcgugagaaccuggaacgagaucauccccagcaagggcugccugagagugggcggcagaugccacccccacgugaacggcguguucuucaacggcaucauccugggccccgacggccacgugcugauccccgagaugcagagcagccugcugcagcagcacauggagcugcuggagagcagcgugaucccccugaugcacccccuggccgaccccagcaccguguucaaggacggcgacgaggccgaggacuucguggaggugcaccugcccgacgugcacaagcaggugagcggcguggaccugggccugcccaacuggggcaaguacgugcugcugagcgccggcacccugaucgcccugaugcugauccuguuccugaugaccugcugcagaagagugaacagacccgagagcacccagagaagccugggcggcaccggcagaaaggugagcgugaccagccagagcggcaaggugaucagcagcugggagagcuacaagagcggcggcgagaccagacuguga

SEQ ID NO: 191765 - RNA, 1575 nt, Artificial Sequence; identical to SEQ ID NO: 191552
  derived and/or modified CDS sequence (opt4) from glycoprotein__RABV__KR906742.1

SEQ ID NO: 191766 - RNA, 1575 nt, Artificial Sequence; identical to SEQ ID NO: 191757
  derived and/or modified CDS sequence (opt4) from glycoprotein__RABV__KR906743.1

SEQ ID NO: 191767 - RNA, 1575 nt, Artificial Sequence
  derived and/or modified CDS sequence (opt4) from glycoprotein__RABV__KR906744.1
auggugccccaggcccugcuguucgugccccugcugguguucccccugugcuucggcaaguuccccaucuacaccauccccgacaagcugggccccuggagccccaucgacauccaccaccugagcugccccaacaaccuggugguggaggacgagggcugcaccaaccugagcggcuucagcuacauggagcugaaggugggcuacaucagcgccaucaaggugaacggcuucaccugcaccggcguggugaccgaggccgagaccuacaccaacuucgugggcuacgugaccaccaccuucaagagaaagcacuucagacccauccccgacgccugcagagccgccuacaacuggaagauggccggcgaccccagauacgaggagagccugcacaaccccuaccccgacuaccacuggcugagaaccgugaagaccaccaaggagagccuggugaucaucagccccagcguggccgaccuggaccccuacgacaagacccugcacagcagaguguuccccagcggcaagugcagcggcaucaccgugagcagcaccuacugcagcaccaaccacgacuacaccaucuggaugcccgagaaccccagacugggcaccagcugcgacaucuucaccaacagcagaggcaagagagccagcaagggcggcaagaccugcggcuucguggacgagagaggccuguacaagagccugaagggcgccugcaagcugaagcugugcggcgugcugggccugagacugauggacggcaccuggguggccaugcagaccagcgacgagaccaaguggugcccccccgaccagcuggugaacaugcacgacuucagaagcgacgagaucgagcaccuggugguggaggagcuggugaagaagagagaggagugccuggacgcccuggagagcaucaugaccaccaagagcgugagcuucagaagacugagccaccugagaaagcuggugcccggcuucggcaaggccuacaccaucuucaacaagacccugauggaggccgacgcccacuacaagagcgugagaaccuggaacgagaucauccccagcaagggcugccugagagugggcggcagaugccacccccacgugaacggcguguucuucaacggcaucauccugggccccgacggccacgugcugauccccgagaugcagagcagccugcugcagcagcacauggagcugcuggagagcagcgugaucccccugaugcacccccuggccgaccccagcaccguguucaaggacggcgacgaggccgaggacuucguggaggugcaccugcccgacgugcacaagcaggugagcggcguggaccugggccugcccaacuggggcaaguacgugcugcugagcgccggcacccugaucgcccugaugcugaucaucuuccugaugaccugcugcagaagagugaacagacccgagcccacccagagaagccugggcggcaccggcagaaaggugagcgugaccagccagagcggcaaggugaucagcagcugggagagcuacaagagcggcggcgagaccaagcuguga

SEQ ID NO: 191768 - RNA, 1575 nt, Artificial Sequence; identical to SEQ ID NO: 191760
  derived and/or modified CDS sequence (opt4) from glycoprotein__RABV__KR906745.1

SEQ ID NO: 191769 - RNA, 1575 nt, Artificial Sequence
  derived and/or modified CDS sequence (opt4) from glycoprotein__RABV__KR906746.1
auggugccccaggcccugcuguucgugacccugcugguguucagccugugcuucggcaaguuccccaucuacaccauccccgacaagcugggccccuggagccccaucgacauccaccaccugagcugccccaacaaccuggugguggaggacgagggcugcaccaaccugagcggcuucagcuacauggagcugaaggugggcuacaucagcgccaucaaggugaacggcuucaccugcaccggcguggugaccgaggccgagaccuacaccaacuucgugggcuacgugaccaccaccuucaagagaaagcacuucagacccauccccgacgccugcagagccgccuacaacuggaagauggccggcgaccccagauacgaggagagccugcacaaccccuaccccgacuaccacuggcugagaaccgugaagaccaccaaggagagccuggugaucaucagccccagcguggccgaccuggaccccuacgacaagagccugcacagcagaguguuccccggcggcaagugcagcggcaucaccgugagcagcaccuucugcagcaccaaccacgacuacaccaucuggaugcccgagaaccccagacugggcaccagcugcgacaucuucgccaacagcagaggcaagagagccagcaagggcggcaagaccugcggcuucguggacgagagaggccuguacaagagccugaagggcgccugcaagcugaagcugugcggcgugcugggccugagacugauggacggcaccuggguggccaugcagaccagcgacgagaccaaguggugcccccccgaccagcuggugaacaugcacgacuucagaagcgacgagaucgagcaccuggugguggaggagcuggugaagaagagagaggagugccuggacgcccuggagagcaucaugaccaccaagagcgugagcuucagaagacugagccaccugagaaagcuggugcccggcuucggcaaggccuacaccauguucaacaagacccugauggaggccgacgcccacuacaagagcgugagaaccuggaacgagaucauccccagcaagggcugccugagagugggcggcagaugccacccccacgugaacggcguguucuucaacggcaucauccugggccccgacggccacgugcugauccccgagaugcagagcagccugcugcagcagcacauggagcugcuggagagcagcgugaucccccugaugcacccccuggccgaccccagcaccguguucaaggacggcgacgaggccgaggacuucguggaggugcaccugcccgacgugcacaagcaggugagcggcguggaccugggccugcccaacuggggcaaguacgugcugcugagcgccggcacccugaucgcccugaugcugaucaucuuccugaugaccugcugcagaagagugaacagacccgagagcaccgacagaagccugggcggcaccggcagaaaggugagcgugaccagccagagcggcaaggugaucagcagcugggagagcuacaagagcggcggcgagaccagacuguga

SEQ ID NO: 191770 - RNA, 1575 nt, Artificial Sequence; identical to SEQ ID NO: 191769
  derived and/or modified CDS sequence (opt4) from glycoprotein__RABV__KR906747.1

SEQ ID NO: 191771 - RNA, 1575 nt, Artificial Sequence
  derived and/or modified CDS sequence (opt4) from glycoprotein__RABV__KR906748.1
auggugccccaggcccugcuguucgugccccugcugguguucagccugugcuucggcaaguuccccaucuacaccauccccgacaagcugggccccuggagccccaucgacauccaccaccugagcugccccaacaaccuggugguggaggacgagggcugcaccaaccugagcggcuucagcuacauggagcugaaggugggcuacaucagcgccaucaaggugaacggcuucaccugcaccggcguggugaccgaggccgagaccuacaccaacuucgugggcuacgugaccaccaccuucaagagaaagcacuucagacccauccccgacgccugcagagccaccuacaacuggaagaucgccggcgaccccagauacgaggagagccugcacaaccccuaccccgacuaccacuggcugagaaccgugaagaccaccaaggagagccuggugaucaucagccccagcguggccgaccuggaccccuacgacaagagccugcacagcagaguguuccccagcggcaagugcagcggcaucaccgugagcagcacccacugcagcaccaaccacgacuacaccaucuggaugcccgagaaccccagacugggcaccagcugcgacaucuucaccaacagcagaggcaagagagccagcaagggcagcaagaccugcggcuucguggacgagagaggccuguacaagagccugaagggcgccugcaagcugaagcugugcggcgugcugggccugagacugauggacggcaccuggguggccaugcagaccagcgacgagaccaaguggugcccccccgaccagcuggugaaccugcacgacuucagaagcgacgagaucgagcaccuggugguggaggagcuggugaagaagagagaggagugccuggacgcccuggagagcaucaugaccaccaagagcgugagcuucagaagacugagccaccugagaaagcuggugcccggcuucggcaaggccuacaccaucuucaacaagacccugauggaggccgacgcccacuacaagagcgugagaaccuggaacgagaucauccccagcaagggcugccugagagugggcggcagaugccacccccccgugaacggcguguucuucaacggcaucauccugggccccgacggccacgugcugauccccgagaugcagagcagccugcugcagcagcacauggagcugcuggagagcagcgugaucccccugaugcacccccuggccgaccccagcgccguguucaaggacggcgacgaggccgaggacuucguggaggugcaccugcccgacgugcacaagcaggugagcggcguggaccugggccugcccaacuggggcaaguacgugcugcugagcgccggcacccugaucgcccugaugcugaucaucuuccugaugaccugcugcagaggcgugaacagacccgagagcaagcagugcagccugggcggcaccagaagaaaggugagcgugaccagccagagcggcaaggugaucagcagcugggagagcuacaagagcggcggcgagaccagacuguga

SEQ ID NO: 191772 - RNA, 1575 nt, Artificial Sequence
  derived and/or modified CDS sequence (opt4) from glycoprotein__RABV__KR906749.1
auggugccccaggaccugcuguucgugccccugcuggugcugccccugugcuucggcaaguuccccaucuacaccauccccgacaagcugggccccuggagccccaucgacauccaccaccugagcugccccaacaaccuggugguggaggacgagggcugcaccaaccugagcggcuucagcuacauggagcugaaggugggcuacaucagcgccaucaaggugaacggcuucaccugcaccggcguggugaccgaggccgagaccuacaccaacuucgugggcuacgugaccaccaccuucaagagaaagcacuucagacccauccccgacgccugcagagccgccuacaacuggaagauggccggcgaccccagauacgaggagagccugcacaaccccuaccccgacuaccacuggcugagaaccgugaagaccaccaaggagagccuggugaucaucagccccagcguggccgaccuggaccccuacgacaagagccugcacagcagaguguucaccagcggcaagugcagcggcaucaccgugagcagcaccuacugcagcaccaaccacgacuacaccaucuggaugcccgagaaccccagacugggcaccagcugcaacaucuucgccaacagcaagggcaagagagccagcaagggcggcaagaccugcggcuucguggacgagagaggccuguacaagagccugaagggcgccugcaagcugaagcugugcggcgugcugggccugagacugauggacggcaccuggguggccaugcagaccagcgacgagaccaaguggugcccccccgaccagcuggugaacaugcacgacuucagaagcgacgagaucgagcaccuggugguggaggagcuggugaagaagagagaggagugccuggacgcccuggagagcaucaugaccaccaagagcgugagcuucagaagacugagccaccugagaaagcuggugcccggcuucggcaaggccuacaccaucuucaacaagacccugauggaggccgacgcccacuacaagagcgugagaaccuggaacgagaucauccccagcaagggcugccugagagugggcggcagaugccacccccacgugaacggcguguucuucaacggcaucauccugggccccgacggccacgugcugauccccgagaugcagagcagccugcugcagcagcacauggagcugcuggagagcagcgugaucccccugaugcacccccuggccgaccccagcaccguguucaaggacggcgacgaggccgaggacuucguggaggugcaccugcccgacgugcacaagcaggugagcggcguggaccugggccugcccaacuggggcaaguacgugcugcugagcgccggcacccugaucgcccugaugcugaucaucuuccugaccaccugcugcagaagagugaacagacccgagagcacccagagaagccugggcggcaccggcagaaaggugagcgugaccagccagagcggcaaggugaucagcagcugggagagcuacaagagcggcggcgagaccagacuguga

SEQ ID NO: 191773 - RNA, 1575 nt, Artificial Sequence; identical to SEQ ID NO: 191552
  derived and/or modified CDS sequence (opt4) from glycoprotein__RABV__KR906750.1

SEQ ID NO: 191774 - RNA, 1575 nt, Artificial Sequence
  derived and/or modified CDS sequence (opt4) from glycoprotein__RABV__KR906751.1
auggugccccaggcccugcuguucgugacccugcugguguucagccugugcuucggcaaguuccccaucuacaccauccccgacaagcugggccccuggagccccaucgacauccaccaccugagcugccccaacaaccuggugguggaggacgagggcugcaccaaccugagcggcuucagcuacauggagcugaaggugggcuacaucagcgccaucaaggugaacggcuucaccugcaccggcguggugaccgaggccgagaccuacaccaacuucgugggcuacgugaccaccaccuucaagagaaagcacuucagacccauccccgacgccugcagagccgccuacaacuggaagauggccggcgaccccagauacgaggagagccugcacaaccccuaccccgacuaccacuggcugagaaccgugaagaccaccaaggagagccuggugaucaucagccccagcguggccgaccuggaccccuacgacaagagccugcacagcagaguguuccccggcggcaagugcagcggcaucaccgugagcagcaccuucugcagcaccaaccacgacuacaccaucuggaugcccgagaaccccagacugggcaccagcugcgacaucuucgccaacagcaagggcaagagagccagcaagggcggcaagaccugcggcuucguggacgagagaggccuguacaagagccugaagggcgccugcaagcugaagcugugcggcgugcugggccugagacugauggacggcaccuggguggccaugcagaccagcgacgagaccaaguggugcccccccgaccagcuggugaacaugcacgacuucagaagcgacgagaucgagcaccuggugguggaggagcuggugaagaagagagaggagugccuggacgcccuggagagcaucaugaccaccaagagcgugagcuucagaagacugagccaccugagaaagcuggugcccggcuucggcaaggccuacaccauguucaacaagacccugauggaggccgacgcccacuacaagagcgugagaaccuggaacgagaucauccccagcaagggcugccugagagugggcggcagaugccacccccacgugaacggcguguucuucaacggcaucauccugggccccgacggccacgugcugauccccgagaugcagagcagccugcugcagcagcacauggagcugcuggagagcagcgugaucccccugaugcacccccuggccgaccccagcaccguguucaaggacggcgacgaggccgaggacuucguggaggugcaccugcccgacgugcacaagcaggugagcggcguggaccugggccugcccaacuggggcaaguacgugcugcugagcgccggcacccugaucgcccugaugcugaucaucuuccugaugaccugcugcagaagagugaacagacccgagagcacccacagaagccugggcagaaccggcagaaaggugagcgugaccagccagagcggcaaggugaucagcagcugggagagcuacaagagcggcggcgagaccagacuguga

SEQ ID NO: 191775 - RNA, 1575 nt, Artificial Sequence; identical to SEQ ID NO: 191764
  derived and/or modified CDS sequence (opt4) from glycoprotein__RABV__KR906753.1

SEQ ID NO: 191776 - RNA, 1575 nt, Artificial Sequence
  derived and/or modified CDS sequence (opt4) from glycoprotein__RABV__KR906755.1
auggugccccaggcccugcuguucgugcugcugcugguguucccccugugcuucggcaaguuccccaucuacaccauccccgacaagcugggccccuggagccccaucgacauccaccaccugagcugccccaacaaccuggugguggaggacgagggcugcaccaaccugagcggcuucagcuacauggagcugaaggugggcuacaucagcgccaucaaggugaacggcuucaccugcaccggcguggugaccgaggccgagaccuacaccaacuucgugggcuacgugaccaccaccuucaagagaaagcacuucagacccauccccgacgccugcagagccgccuacaacuggaagauggccggcgaccccagauacgaggagagccugcacaaccccuaccccgacuaccacuggcugagaaccgugaagaccaccaaggagagccuggugaucaucagccccagcguggccgaccuggaccccuacgacaagagccugcacagcagaguguucaccagcggcaagugcagcggcaucaccgugagcagcaccuacugcagcaccaaccacgacuacaccaucuggaugcccgagaaccccagacugggcaccagcugcaacaucuucgugaacagcaagggcaagagagccagcaagggcggcaagaccugcggcuucguggacgagagaggccuguacaagagccugaagggcgccugcaagcugaagcugugcggcgugcugggccugagacugauggacggcaccuggguggccaugcagaccagcgacgagaccaaguggugcagccccgaccagcuggugaacaugcacgacuucagaagcgacgagaucgagcaccuggugguggaggagcuggugaagaagagagaggagugccuggacgcccuggagagcaucaugaccaccaagagcgugagcuucagaagacugagccaccugagaaagcuggugcccggcuucggcaaggccuacaccaucuucaacaagacccugauggaggccgacgcccacuacaagagcgugagaaccuggaacgagaucauccccagcaagggcugccugagagugggcggcagaugccacccccacgugaacggcguguucuucaacggcaucauccugggccccgacggccacgugcugauccccgagaugcagagcagccugcugcagcagcacauggagcugcuggagagcagcgugaucccccugaugcacccccuggccgaccccagcaccguguucaaggacggcgacgaggccgaggacuucguggaggugcaccugcccgacgugcacaagcaggugagcggcguggaccugggccugcccaacuggggcaaguacgugcugcugagcgccggcacccugaucgcccugaugcugaucaucuuccugaugaccugcugcagaagagugaacagacccgagagcacccagagaagccugggcggcaccggcagaaaggugagcgugaccagccagagcggcaaggugaucagcagcugggagagcuacaagagcggcggcgagaccagacuguga

SEQ ID NO: 191777 - RNA, 1575 nt, Artificial Sequence
  derived and/or modified CDS sequence (opt4) from glycoprotein__RABV__KR906756.1
auggugccccaggcccugcuguucgugcugcugcugguguucccccugugcuucggcaaguuccccaucuacaccauccccgacaagcugggccccuggagccccaucgacauccaccaccugagcugccccaacaaccuggugguggaggacgagggcugcaccaaccugagcggcuucagcuacauggagcugaaggugggcuacaucagcgccaucaaggugaacggcuucaccugcaccggcguggugaccgaggccgagaccuacaccaacuucgugggcuacgugaccaccaccuucaagagaaagcacuucagacccauccccgacgccugcagagccgccuacaacuggaagauggccggcgaccccagauacgaggagagccugcacaaccccuaccccgacuaccacuggcugagaaccgugaagaccaccaaggagagccugaucaucaucagccccagcguggccgaccuggaccccuacgacaagagccugcacagcagaguguucaccagcggcaagugcagcggcaucaccgugagcagcaccuacugcagcaccaaccacgacuacaccaucuggaugcccgagaaccccagacugggcaccagcugcaacaucuucgugaacagcaagggcaagagagccagcaagggcggcaagaccugcggcuucguggacgagagaggccuguacaagagccugaagggcgccugcaagcugaagcugugcggcgugcugggccugagacugaucgacggcaccuggguggccaugcagaccagcgacgagaccaaguggugcagccccgaccagcuggugaacaugcacgacuucagaagcgacgagaucgagcaccuggugguggaggagcuggugaagaagagagaggagugccuggacgcccuggagagcaucaugaccaccaagagcgugagcuucagaagacugagccaccugagaaagcuggugcccggcuucggcaaggccuacaccaucuucaacaagacccugauggaggccgacgcccacuacaagagcgugagaaccuggaacgagaucauccccagcaagggcugccugagagugggcggcagaugccacccccacgugaacggcguguucuucaacggcaucauccugggccccgacggccacgugcugauccccgagaugcagagcagccugcugcagcagcacauggagcugcuggagagcagcgugaucccccugaugcacccccuggccgaccccagcaccguguucaaggacggcgacgaggccgaggacuucguggaggugcaccugcccgacgugcacaagcaggugagcggcguggaccugggccugcccaacuggggcaaguacgugcugcugagcgccggcacccugaucgcccugaugcugaucaucuuccugaugaccugcugcagaagagugaacagacccgagagcacccagagaagccugggcggcaccggcagaaaggugagcgugaccagccagagcggcaaggugaucagcagcugggagagcuacaagagcggcggcgagaccagacuguga

SEQ ID NO: 191778 - RNA, 1575 nt, Artificial Sequence; identical to SEQ ID NO: 191777
  derived and/or modified CDS sequence (opt4) from glycoprotein__RABV__KR906760.1

SEQ ID NO: 191779 - RNA, 1575 nt, Artificial Sequence
  derived and/or modified CDS sequence (opt4) from glycoprotein__RABV__KR906762.1
auggugccccaggccagacuguucgugccccugcugguguucccccugugcuucggcaaguuccccaucuacaccauccccgacaagcugggccccuggagccccaucgacauccaccaccugagcugccccaacaaccuggugguggaggacgagggcugcaccaaccugagcggcuucagcuacauggagcugaaggugggcuacaucagcgccaucaaggugaacggcuucaccugcaccggcguggugaccgaggccgagaccuacaccaacuucgugggcuacgugaccaccaccuucaagagaaagcacuucagacccauccccgacgccugcagagccgccuacaacuggaagauggccggcgaccccagauacgaggagagccugcacaaccccuaccccgacuaccacuggcugagaaccgugaagaccaccaaggagagccuggugaucaucagccccagcguggccgaccuggaccccuacgacaagagccugcacagcagaguguucaccggcggcaagugcagcggcaucaccgugagcagcaccuacugcagcaccaaccacgacuacaccaucuggaugcccgagaaccccagacugggcaccagcugcaacaucuucgccaacagcaagggcaagagagccagcaagggcggcaagaccugcggcuucguggacgagagaggccuguacaagagccugaagggcgccugcaagcugaagcugugcggcgugcugggccugagacugauggacggcaccuggguggccaugcagaccagcgacgagaccaaguggugcccccccgaccagcuggugaacaugcacgacuucagaagcgacgagaucgagcaccuggugguggaggagcuggugaagaagagagaggagugccuggacgcccuggagagcaucaugaccaccaagagcgugagcuucagaagacugagccaccugagaaagcuggugcccggcuucggcaaggccuacaccaucuucaacaagacccugauggaggccgacgcccacuacaagagcgugagaaccuggaacgagaucauccccagcaagggcugccugagagugggcggcagaugccacccccacgugaacggcguguucuucaacggcaucauccugggccccgacggccacgugcugauccccgagaugcagagcagccugcugcagcagcacauggagcugcuggagagcagcgugaucccccugaugcacccccuggccgaccccagcaccguguucaaggacggcgacgaggccgaggacuucguggaggugcaccugcccgacgugcacaagcaggugagcggcguggaccugggccugcccaacuggggcaaguacauccugcugagcgccggcacccugaucgcccugaugcugaucaucuuccugaugaccugcugcagaagagugagcagacccgagagcacccagagaagccugggcagaaccggcagaaaggugagcgugaccagccagagcggcaaggugaucagcagcugggagagcuacaagagcggcggcgagaccagacuguga

SEQ ID NO: 191780 - RNA, 1575 nt, Artificial Sequence; identical to SEQ ID NO: 191758
  derived and/or modified CDS sequence (opt4) from glycoprotein__RABV__KR906763.1

SEQ ID NO: 191781 - RNA, 1575 nt, Artificial Sequence
  derived and/or modified CDS sequence (opt4) from glycoprotein__RABV__KR906766.1
auggugccccagacccugcuguucgugccccugcugguguucagccugugcuucggcaaguuccccaucuacaccauccccgacaagcugggccccuggagccccaucgacauccaccaccugagcugccccaacaaccuggugguggaggacgagggcugcaccaaccugagcggcuucagcuacauggagcugaaggugggcuacaucagcgccaucagagugaacggcuucaccugcaccggcguggugaccgaggccgagaccuacaccaacuucgugggcuacgugaccaccaccuucaagagaaagcacuucagacccauccccgacgccugcagagccgccuacaacuggaagauggccggcgaccccagauacgaggagagccugcacaaccccuaccccgacuaccacuggcugagaaccgugaagaccaccaaggagagccuggugaucaucagccccagcguggccgaccuggaccccuacgacaagagccugcacagcagaguguuccccagcggcaagugcagcggcaucaccgugagcagcaccuacugcagcaccaaccacgacuacaccaucuggaugcccgagaaccccagacugggcaccagcugcaacaucuucaccaacagcagaggcaagagagccagcaagggcggcaagaccugcggcuucguggacgagagaggccuguacaagagccugaagggcgccugcaagcugaagcugugcggcgugcugggccugagacugauggacggcaccuggguggccaugcagaccagcgacgagaccaaguggugcccccccgaccagcuggugaacaugcacgacuucagaagcgacgagaucgagcaccuggugguggaggagcuggugaagaagagagaggagugccuggacgcccuggagagcaucaugaccaccaagagcgugagcuucagaagacugagccaccugagaaagcuggugcccggcuucggcaaggccuacaccaucuucaacaagacccugauggaggccgacgcccacuacaagagcgugagaaccuggaacgagaucauccccagcaagggcugccugagagugggcggcagaugccacccccacgugaacggcguguucuucaacggcaucauccugggccccgacggccacgugcugauccccgagaugcagagcagccugcugcagcagcacauggagcugcuggagagcagcgugaucccccugaugcacccccuggccgaccccagcaccguguucaaggacggcgacgaggccgaggacuucguggaggugcaccugcccgacgugcacaagcaggugagcggcguggaccugggccugcccaacuggggcaaguacgugcugcugagcgccggcacccugaucgcccugaugcugaucaucuuccugaugaccugcugcagaagagugaacagacccgagagcacccagagaagccugggcggcaccagaagaaaggugagcgugaccagccagagcggcaaggugaucagcagcugggagagcuacaagagcggcggcgagaccagacuguga

SEQ ID NO: 191782 - RNA, 1575 nt, Artificial Sequence
  derived and/or modified CDS sequence (opt4) from glycoprotein__RABV__KR906767.1
auggugccccaggcccugcuguucgugccccugcugguguucccccugugcuucggcaaguuccccaucuacaccauccccgacaagcugggccccuggagccccaucgacauccaccaccugagcugccccaacaaccuggugguggaggacgagggcugcaccaaccugagcggcuucagcuacauggagcugaaggugggcuacaucagcgccaucaaggugaacggcuucaccugcaccggcguggugaccgaggccgagaccuacaccaacuucgugggcuacgugaccaccaccuucaagagaaagcacuucagacccauccccgacgccugcagagccgccuacaacuggaagauggccggcgaccccagauacgaggagagccugcacaaccccuaccccgacuaccacuggcugagaaccgugaagaccaccaaggagagccuggugaucaucagccccagcguggccgaccuggaccccuacgacaagagccugcacagcagaguguucaccagcggcaagugcagcggcaucaccgugagcagcaccuacugcagcaccaaccacgacuacaccaucuggaugcccgagaaccccagacugggcaccagcugcaacaucuucgccaacagcaagggcaagagagccagcaagggcggcaagaccugcggcuucguggacgagagaggccuguacaagagccugagaggcgccugcaagcugaagcugugcggcgugcugggccugagacugauggacggcaccuggguggccaugcagaccagcgacgagaccaaguggugcccccccgaccagcuggugaacaugcacgacuucagaagcgacgagaucgagcaccuggugguggaggagcuggugaagaagagagaggagugccuggacgcccuggagagcaucaugaccaccaagagcgugagcuucagaagacugagccaccugagaaagcuggugcccggcuucggcaaggccuacaccaucuucaacaagacccugauggaggccgacgcccacuacaagagcgugagaaccuggaacgagaucauccccagcaagggcugccugagagugggcggcagaugccacccccacgugaacggcguguucuucaacggcaucauccugggccccgacggccacgugcugauccccgagaugcagagcagccugcugcagcagcacauggagcugcuggagagcagcgugaucccccugaugcacccccuggccgaccccagcaccguguucaaggacggcgacgaggccgaggacuucguggaggugcaccugcccgacgugcacaagcaggugagcggcguggaccugggccugcccaacuggggcaaguacgugcugcugagcgccggcacccugaucgcccugaugcugaucaucuuccugaugaccugcugcagaagagugagcagacccgagagcacccagagaagccugggcggcaccggcagaaaggugagcgugaccagccagagcggcaaggugaucagcagcugggagagcuacaagagcggcggcgagaccagacuguga

SEQ ID NO: 191783 - RNA, 1575 nt, Artificial Sequence; identical to SEQ ID NO: 191552
  derived and/or modified CDS sequence (opt4) from glycoprotein__RABV__KR906768.1

SEQ ID NO: 191784 - RNA, 1575 nt, Artificial Sequence
  derived and/or modified CDS sequence (opt4) from glycoprotein__RABV__KR906769.1
auggugccccaggcccugcuguucgugccccugcugguguucccccugugcuucggcaaguuccccaucuacaccauccccgacaagcugggccccuggagccccaucgacauccaccaccugagcugccccaacaaccuggugguggaggacgagggcugcaccaaccugagcggcuucagcuacauggagcugaaggugggcuacaucagcgccaucaaggugaacggcuucaccugcaccggcguggugaccgaggccgagaccuacaccaacuucgugggcuacgugaccaccaccuucaagagaaagcacuucagacccauccccgacgccugcagagccgccuacaacuggaagauggccggcgaccccagauacgaggagagccugcacaaccccuaccccgacuaccacuggcugagaaccgugaagaccaccaaggagagccuggugaucaucagccccagcguggccgaccuggaccccuacgacaagagccugcacagcagaguguuccccagcggcaagugcagcggcaucaccgugagcagcaccuacugcagcaccaaccacgacuacaccaucuggaugcccgagaaccccagacugggcaccagcugcaacaucuucgccaacagcaagggcaagagagccagcaagggcggcaagaccugcggcuucguggacgagagaggccuguacaagagccugaagggcgccugcaagcugaagcugugcggcgugcugggccugagacugauggacggcaccuggguggccaugcagaccagcgacgagaccaaguggugcccccccgaccagcuggugaacaugcacgacuucagaagcgacgagaucgagcaccuggugguggaggagcuggugaagaagagagaggagugccuggacgcccuggagagcaucaugaccaccaagagcgugagcuucagaagacugagccaccugagaaagcuggugcccggcuucggcaaggccuacaccaucuucaacaagacccugauggaggccgacgcccacuacaagagcgugagaaccuggaacgagaucauccccagcaagggcugccugagagugggcggcagaugccacccccacgugaacggcguguucuucaacggcaucauccugggccccgacggccacgugcugauccccgagaugcagagcagccugcugcagcagcacauggagcugcuggagagcagcgugaucccccugaugcacccccuggccgaccccagcaccguguucaaggacggcgacgaggccgaggacuucguggaggugcaccugcccgacgugcacaagcaggugagcggcguggaccugggccugcccaacuggggcaaguacgugcugcugagcgccggcacccugaucgcccugaugcugaucaucuuccugaugaccugcugcagaagagugagcagacccgagagcacccagagaagccugggcagaaccggcagaaaggugagcgugaccagccagagcggcaaggugaucagcagcugggagagcuacaagagcggcggcgagaccagacuguga

SEQ ID NO: 191785 - RNA, 1575 nt, Artificial Sequence; identical to SEQ ID NO: 191757
  derived and/or modified CDS sequence (opt4) from glycoprotein__RABV__KR906770.1

SEQ ID NO: 191786 - RNA, 1575 nt, Artificial Sequence
  derived and/or modified CDS sequence (opt4) from glycoprotein__RABV__KR906771.1
auggugccccaggcccugcuguucgugcugcugcugguguucccccugugcuucggcaaguuccccaucuacaccauccccgacaagcugggccccuggagccccaucgacauccaccaccugagcugccccaacaaccuggugguggaggacgagggcugcaccaaccugagcggcuucagcuacauggagcugaaggugggcuacaucagcgccaucaaggugaacggcuucaccugcaccggcguggugaccgaggccgagaccuacaccaacuucgugggcuacgugaccaccaccuucaagagaaagcacuucagacccauccccgacgccugcagagccgccuacaacuggaagauggccggcgaccccagauacgaggagagccugcacaaccccuaccccgacuaccacuggcugagaaccgugaagaccaccaaggagagccuggugaucaucagccccagcguggccgaccuggaccccuacgacaagagccugcacagcagaguguucaccagcggcaagugcagcggcaucaccgugagcagcaccuacugcagcaccaaccacgacuacaccaucuggaugcccgagaaccccagacugggcaccagcugcaacaucuucgugaacagcaagggcaagagagccagcaagggcggcaagaccugcggcuucguggacgagagaggccuguacaagagccugaagggcgccugcaagcugaagcugugcggcgugcugggccugagacugauggacggcaccuggguggccaugcagaccagcgacgagaccaaguggugcagccccgaccagcuggugaacaugcacgacuucagaagcgacgagaucgagcaccuggugguggaggagcuggugaagaagagagaggagugccuggacgcccuggagagcaucaugaccaccaagagcgugagcuucagaagacugagccaccugagaaagcuggugcccggcuucggcaaggccuacaccaucuucaacaagacccugauggaggccgacgcccacuacaagagcgugagaaccuggaacgagaucauccccagcaagggcugccugagagugggcggcagaugccacccccacgugaacggcguguucuucaacggcaucauccugggccccaacggccacgugcugauccccgagaugcagagcagccugcugcagcagcacauggagcugcuggagagcagcgugaucccccugaugcacccccuggccgaccccagcaccguguucaaggacggcgacgaggccgaggacuucguggaggugcaccugcccgacgugcacaagcaggugagcggcguggaccugggccugcccaacuggggcaaguacgugcugcugagcgccggcacccugaucgcccugaugcugaucaucuuccugaugaccugcugcagaagagugaacagacccgagagcacccagagaagccugggcggcaccggcagaaaggugagcgugaccagccagagcggcaaggugaucagcagcugggagagcuacaagagcggcggcgagaccagacuguga

SEQ ID NO: 191787 - RNA, 1575 nt, Artificial Sequence; identical to SEQ ID NO: 191760
  derived and/or modified CDS sequence (opt4) from glycoprotein__RABV__KR906773.1

SEQ ID NO: 191788 - RNA, 1575 nt, Artificial Sequence; identical to SEQ ID NO: 191757
  derived and/or modified CDS sequence (opt4) from glycoprotein__RABV__KR906776.1

SEQ ID NO: 191789 - RNA, 1575 nt, Artificial Sequence; identical to SEQ ID NO: 191760
  derived and/or modified CDS sequence (opt4) from glycoprotein__RABV__KR906778.1

SEQ ID NO: 191790 - RNA, 1575 nt, Artificial Sequence
  derived and/or modified CDS sequence (opt4) from glycoprotein__RABV__KR906779.1
auggugccccaggcccugcuguucgugccccugcugguguucccccugugcuucggcaaguuccccaucuacaccauccccgacaagcugggccccuggagccccaucgacauccaccaccugagcugccccaacaaccuggugguggaggacgagggcugcaccaaccugagcggcuucagcuacauggagcugaaggugggcuacaucagcgccaucaaggugaacggcuucaccugcaccggcguggugaccgaggccgagaccuacaccaacuucgugggcuacgugaccaccaccuucaagagaaagcacuucagacccauccccgacgccugcagagccgccuacaacuggaagauggccggcgaccccagauacgaggagagccugcacaaccccuaccccgacuaccacuggcugagaaccgugaagaccaccaaggagagccuggugaucaucagccccagcguggccgaccuggaccccuacgacaagagccugcacagcagaguguuccccagcggcaagugcagcggcaucaccgugagcagcaccuacugcagcaccaaccacgacuacaccaucuggaugcccgagaaccccagacugggcaccagcugcgacaucuucaccaacagcagaggcaagagagccagcaagggcggcaagaccugcggcuucguggacgagagaggccuguacaagagccugaagggcgccugcaagcugaagcugugcggcgugcugggccugagacugauggacggcaccuggguggccaugcagaccagcgacgagaccaaguggugcccccccgaccagcuggugaacaugcacgacuucagaagcgacgagaucgagcaccuggugguggaggagcuggugaagaagagagaggagugccuggacgcccuggagagcaucaugaccaccaagagcgugagcuucagaagacugagccaccugagaaagcuggugcccggcuucggcaaggccuacaccaucuucaacaagacccugauggaggccgacgcccacuacaagagcgugagaaccuggaacgagaucauccccagcaagggcugccugagagugggcggcagaugccacccccacgugaacggcguguucuucaacggcaucauccugggccccgacggccacgugcugauccccgagaugcagagcagccugcugcagcagcacauggagcugcuggagagcagcgugaucccccugaugcacccccuggccgaccccagcaccguguucaaggacggcgacgaggccgaggacuucguggaggugcaccugcccgacgugcacaagcaggugagcggcguggaccugggccugcccaacuggggcaaguacgugcugcugagcgccggcacccugaucgcccugaugcugaucaucuuccugaugaccugcugcagaagagugaacagacccgagagcacccagagaagccugggcggcaccggcagaaaggugagcgugaccagccagagcggcaaggugaucagcagcugggagagcuacaagagcggcggcgagaccagacuguga

SEQ ID NO: 191791 - RNA, 1575 nt, Artificial Sequence; identical to SEQ ID NO: 191760
  derived and/or modified CDS sequence (opt4) from glycoprotein__RABV__KR906780.1

SEQ ID NO: 191792 - RNA, 1575 nt, Artificial Sequence; identical to SEQ ID NO: 191760
  derived and/or modified CDS sequence (opt4) from glycoprotein__RABV__KR906781.1

SEQ ID NO: 191793 - RNA, 1575 nt, Artificial Sequence; identical to SEQ ID NO: 191776
  derived and/or modified CDS sequence (opt4) from glycoprotein__RABV__KR906782.1

SEQ ID NO: 191794 - RNA, 1575 nt, Artificial Sequence; identical to SEQ ID NO: 191757
  derived and/or modified CDS sequence (opt4) from glycoprotein__RABV__KR906784.1

SEQ ID NO: 191795 - RNA, 1575 nt, Artificial Sequence
  derived and/or modified CDS sequence (opt4) from glycoprotein__RABV__KR906785.1
auggugccccaggcccugcuguucgugccccugcugguguucccccugugcuucggcaaguuccccaucuacaccauccccgacaagcugggccccuggagccccaucgacauccaccaccugagcugccccaacaaccuggugguggaggacgagggcugcaccaaccugagcggcuucagcuacauggagcugaaggugggcuacaucagcgccaucaaggugaacggcuucaccugcaccggcguggugaccgaggccgagaccuacaccaacuucgugggcuacgugaccaccaccuucaagagaaagcacuucagacccauccccgacgccugcagagccgccuacaacuggaagauggccggcgaccccagauacgaggagagccugcacaaccccuaccccgacuaccacuggcugagaaccgugaagaccaccaaggagagccuggugaucaucagccccagcguggccgaccuggaccccuacgacaagagccugcacagcagaguguuccccagcggcaagugcagcggcaucaccgugagcagcaccuacugcagcaccaaccacgacuacaccaucuggaugcccgagaaccccagacugggcaccagcugcgacaucuucaccaacagcagaggcaagagagccagcaagggcggcaagaccugcggcuucguggacgagagaggccuguacaagagccugagaggcgccugcaagcugaagcugugcggcgugcugggccugagacugauggacggcaccuggguggccaugcagaccagcgacgagaccaaguggugcccccccgaccagcuggugaacaugcacgacuucagaagcgacgagaucgagcaccuggugguggaggagcuggugaagaagagagaggagugccuggacgcccuggagagcaucaugaccaccaagagcgugagcuucagaagacugagccaccugagaaagcuggugcccggcuucggcaaggccuacaccaucuucaacaagacccugauggaggccgacgcccacuacaagagcgugagaaccuggaacgagaucauccccagcaagggcugccugagagugggcggcagaugccacccccacgugaacggcguguucuucaacggcaucauccugggccccgacggccacgugcugauccccgagaugcagagcagccugcugcagcagcacauggagcugcuggagagcagcgugaucccccugaugcacccccuggccgaccccagcaccguguucaaggagggcgacgaggccgaggacuucguggaggugcaccugcccgacgugcacaagcaggugagcggcguggaccugggccugcccaacuggggcaaguacgugcugcugagcgccggcacccugaucgccagcaugcugaucaucuuccugaugaccugcugcagaagagugaacagacccgagcccacccagagaagccugggcggcaccggcagaaaggugagcgugaccagccagagcggcaaggugaucagcagcugggagagcuacaagagcggcggcgagaccagacuguga

SEQ ID NO: 191796 - RNA, 1575 nt, Artificial Sequence
  derived and/or modified CDS sequence (opt4) from glycoprotein__RABV__KR906787.1
auggugccccaggcccugcuguucgugcugcugcugguguucccccugugcuucggcaaguuccccaucuacaccauccccgacaagcugggccccuggagccccaucgacauccaccaccugagcugccccaacaaccuggugguggaggacgagggcugcaccaaccugagcggcuucagcuacauggagcugaaggugggcuacaucagcgccaucaaggugaacggcuucaccugcaccggcguggugaccgaggccgagaccuacaccaacuucgugggcuacgugaccaccaccuucaagagaaagcacuucagacccauccccgacgccugcagagccgccuacaacuggaagauggccggcgaccccagauacgaggagagccugcacaaccccuaccccgacuaccacuggcugagaaccgugaagaccaccaaggagagccuggugaucaucagccccagcguggccgaccuggaccccuacgacaagagccugcacagcagaguguucaccagcggcaagugcagcggcaucaccgugagcagcaccuacugcagcaccaaccacgacuacaccaucuggaugcccgagaaccccagacugggcaccagcugcaacaucuucgugaacagcaagggcaagagagccagcaagggcggcaagaccugcggcuucguggacgagagaggccuguacaagagccugaagggcgccugcaagcugaagcugugcggcgugcugggccugagacugauggacggcaccuggguggccaugcagaccagcgacgagaccaaguggugcagccccgaccagcuggugaacaugcacgacuucagaagcgacgagaucgagcaccuggugguggaggagcuggugaagaagagagaggagugccuggacgcccuggagagcaucaugaccaccaagagcgugagcuucagaagacugagccaccugagaaagcuggugcccggcuucggcaaggccuacaccaucuucaacaagacccugauggaggccgacgcccacuacaagagcgugagaaccuggaacgagaucauccccagcaagggcugccugagagugggcggcagaugccacccccacgugaacggcguguucuucaacggcaucauccugggccccgacggccacgugcugauccccgagaugcagagcagccugcugcagcagcacauggagcugcuggagagcagcgugaucccccugaugcacccccuggccgaccccagcaccguguucaaggacggcgacgaggccgaggacuucguggaggugcaccugcccgacgugcacaagcaggugagcggcguggaccugggccugcccaacuggggcaaguacgugcugcugagcgccggcacccugaucgcccugaugcugaucaucuuccugaugaccugcugcagaagagugaacagacccgagagcacccagagaagccugagaggcaccggcagaaaggugagcgugaccagccagagcggcaaggugaucagcagcugggagagcuacaagagcggcggcgagaccagacuguga

SEQ ID NO: 191797 - RNA, 1575 nt, Artificial Sequence
  derived and/or modified CDS sequence (opt4) from glycoprotein__RABV__KR906788.1
auggugccccaggcccugcuguucgugccccugcugguguucccccugugcuucggcaaguuccccaucuacaccauccccgacaagcugggccccuggagccccaucgacauccaccaccugagcugccccaacaaccuggugguggaggacgagggcugcaccaaccugagcggcuucagcuacauggagcugaaggugggcuacaucagcgccaucaaggugaacggcuucaccugcaccggcguggugaccgaggccgagaccuacaccaacuucgugggcuacgugaccaccaccuucaagagaaagcacuucagacccauccccgacgccugcagagccgccuacaacuggaagauggccggcgaccccagauacgaggagagccugcacaaccccuaccccgacuaccacuggcugagaaccgugaagaccaccaaggagagccuggugaucaucagccccagcguggccgaccuggaccccuacgacaagagccugcacagcagaguguucaccagcggcaagugcagcggcaucaccgugagcagcaccuacugcagcaccaaccacgacuacaccaucuggaugcccgagaaccccagacugggcaccagcugcaacaucuucgugaacagcaagggcaagagagccagcaagggcggcaagaccugcggcuucguggacgagagaggccuguacaagagccugaagggcgccugcaagcugaagcugugcggcgugcugggccugagacugauggacggcaccuggguggccaugcagaccagcgacgagaccaaguggugcagccccgaccagcuggugaacaugcacgacuucagaagcgacgagaucgagcaccuggugguggaggagcuggugaagaagagagaggagugccuggacgcccuggagagcaucaugaccaccaagagcgugagcuucagaagacugagccaccugagaaagcuggugcccggcuucggcaaggccuacaccaucuucaacaagacccugauggaggccgacgcccacuacaagagcgugagaaccuggaacgagaucauccccagcaagggcugccugagagugggcggcagaugccacccccacgugaacggcguguucuucaacggcaucauccugggccccgacggccacgugcugauccccgagaugcagagcagccugcugcagcagcacauggagcugcuggagagcagcgugaucccccugaugcacccccuggccgaccccagcaccguguucaaggacggcgacgaggccgaggacuucguggaggugcaccugcccgacgugcacaagcaggugagcggcguggaccugggccugcccaacuggggcaaguacgugcugcugagcgccggcacccugaucgcccugaugcugaccaucuuccugaugaccugcugcagaagagugaacagacccgagagcacccagagaagccugggcggcaccggcagaaaggugagcgugaccagccagagcggcaaggugaucagcagcugggagagcuacaagagcggcggcgagaccagacuguga

SEQ ID NO: 191798 - RNA, 1575 nt, Artificial Sequence; identical to SEQ ID NO: 191790
  derived and/or modified CDS sequence (opt4) from glycoprotein__RABV__KR906790.1

SEQ ID NO: 191799 - RNA, 1575 nt, Artificial Sequence; identical to SEQ ID NO: 191752
  derived and/or modified CDS sequence (opt4) from glycoprotein__RABV__KT023100.1

SEQ ID NO: 191800 - RNA, 1575 nt, Artificial Sequence
  derived and/or modified CDS sequence (opt4) from glycoprotein__RABV__KT221112.1
augaucccccaggcccugcuguucgugccccugcugguguucagccugugcuucggcaaguuccccaucuacaccauccccgacaagcugggccccuggagccccaucgacauccaccaccugagcugccccaacaaccuggugguggaggacgagggcugcaccaaccugagcggcuucagcuacauggagcugaaggugggcuacaucagcgccaucaaggugaacggcuucaccugcaccggcguggugaccgaggccgagaccuacaccaacuucgugggcuacgugaccaccaccuucaagagaaagcacuucagacccacccccgacgccugcagagccgccuacaacuggaagauggccggcgaccccagauacgaggagagccugaacaaccccuaccccgacuaccacuggcugagaaccgugaagaccaccaaggagagccugguggugaucagccccagcguggccgaccuggaccccuacgacaagagccugcacagcagaguguuccccagcggcaagugcagcggcaucaccgugagcagcaccugcugcagcaccaaccacgacuacaccaucuggaugcccgagaaccccagacugggcaccagcugcgacaucuucgugaacagcagaggcaagagagccagcaagggcagcaagaccugcggcuucguggacgagagaggccuguacaagagccugaagggcgccugcaagcugaagcugugcggcgugcugggccugagacugauggacggcaccuggguggccauccagaccagcgacgagaccaaguggugcccccccgaccagcuggugaaccugcacgacuucagaagcgacgagaucgagcaccuggugguggaggagcuggugaagaagagagaggagugccuggacgcccuggagagcaucaugaccaccaagagcgugagcuucagaagacugagccaccugagaaagcuggugcccggcuucggcaaggccuacaccaucuucaacaagacccugauggaggccgacgcccacuacaagagcgugagaaccuggaacgagaucauccccagcaagggcugccugagagugggcggcagaugccacccccacgugaacggcguguucuucaacggcaucauccugggccccgacggccacgugcugauccccgagaugcagagcagccugcugcagcagcacauggagcugcuggagagcagcgugaucccccugaugcacccccuggccgaccccagcaccaucuucaaggacggcgacgaggccgaggacuucguggaggugcaccugcccgacgugcacaagcaggugagcggcguggaccugggccugcccaacuggggcaaguacgugcugaugagcgccggcgcccugaucgcccugaugcugaugaucuucagcaugaccugcugcagaaagaccgacagaaucggcagcacccaccacggccccggcgagaccggcagaaaggugagcgugaccagccagaacggcagagugaucgccagcugggagagcuacaagagcggcggcgagaccaagcuguga

SEQ ID NO: 191801 - RNA, 1575 nt, Artificial Sequence
  derived and/or modified CDS sequence (opt4) from glycoprotein__RABV__KT221113.1
augaucccccaggcccugcuguucgugccccugcugguguucagccugugcuucggcaaguuccccaucuacaccauccccgacaagcugggccccuggagccccaucgacauccaccaccugagcugccccaacaaccuggugguggaggacgagggcugcaccaaccugagcggcuucagcuacauggagcugaaggugggcuacaucagcgccaucaaggugaacggcuucaccugcaccggcguggugaccgaggccgagaccuacaccaacuucgugggcuacgugaccaccaccuucaagagaaagcacuucagacccacccccgacgccugcagagccgcccacaacuggaagauggccggcgaccccagauacgaggagagccugcacaaccccuaccccgacuaccacuggcugagaaccgugaagaccaccaaggagagccuggugaucaucagccccagcguggccgaccuggaccccuacgacaagagccugcacagcagaguguuccccagcggcaagugcagcggcaucaccgugagcagcaccuacugcagcaccaaccacgacuacaccaucuggaugcccgagaaccccagacugggcaccagcugcgacaucuucgugaacagcagaggcaagagagccagcaagggcagcaagaccugcggcuucguggacgagagaggccuguacaagagccugaagggcgccugcaagcugaagcugugcggcgugcugggccugagacugauggacggcaccuggguggccauccagaccagcgacgagaccaaguggugcccccccgaccagcuggugaaccugcacgacuucagaagcgacgagaucgagcaccuggugguggaggagcuggugaagaagagagaggagugccuggacgcccuggagagcaucaugaccaccaagagcgugagcuucagaagacugagccaccugagaaagcuggugcccggcuucggcaaggccuacaccaucuucaacaagacccugauggaggccgacgcccacuacaagagcgugagaaccuggaacgagaucauccccagcaagggcugccugagagugggcggcagaugccacccccacgugaacggcguguucuucaacggcaucauccugggccccgacggccacgugcugauccccgagaugcagagcagccugcugcagcagcacauggagcugcuggagagcagcgugaucccccugaugcacccccuggccgaccccagcaccaucuucaaggacggcgacgaggccgaggacuucguggaggugcaccugcccgacgugcacagacaggugagcggcguggaccugggccugcccaacuggggcaaguacgugcugaugagcgccggcgcccugguggcccugaugcugaugaucuuccugaugaccugcugcgugaagaccgacagaaccggcagcacccaccacagccccggcgagaccggcagaaaggugagcgugaccagccagaacggcagagugaucgccagcugggagagcuacaagagcggcggcgagaccaagcuguga

SEQ ID NO: 191802 - RNA, 1575 nt, Artificial Sequence
  derived and/or modified CDS sequence (opt4) from glycoprotein__RABV__KT221114.1
augaucccccaggcccugcuguucgugccccugcugguguucagccugugcuucggcaaguuccccaucuacaccauccccgacaagcugggccccuggagccccaucgacauccaccaccugagcugccccaacaaccuggugguggaggacgagggcugcaccaaccugagcggcuucagcuacauggagcugaaggugggcuacaucagcgccaucaaggugaacggcuucaccugcaccggcguggugaccgaggccgagaccuacaccaacuucgugggcuacgugaccaccaccuucaagagaaagcacuucagacccacccccgacgccugcagagccgcccacaacuggaagauggccggcgacagcagauacgaggagagccugcacaaccccuaccccgacuaccacuggcugagaaccgugaagaccaccaaggagagccuggugaucaucagccccagcguggccgaccuggaccccuacgacaagagccugcacagcagaguguuccccagcggcaagugcagcggcaucaccgugagcagcaccuacugcagcaccaaccacgacuacaccaucuggaugcccgagaaccccagacugggcaccagcugcgacaucuucgugaacagcagaggcaagagagccagcaagggcagcaagaccugcggcuucguggacgagagaggccuguacaagagccugaagggcgccugcaagcugaagcugugcggcgugcugggccugagacugauggacggcaccuggguggccauccagaccagcgacgagaccaaguggugcccccccgaccagcuggugaaccugcacgacuucagaagcgacgagaucgagcaccuggugguggaggagcuggugaagaagagagaggagugccuggacgcccuggagagcaucaugaccaccaagagcgugagcuucagaagacugagccaccugagaaagcuggugcccggcuucggcaaggccuacaccaucuucaacaagacccugauggaggccgacgcccacuacaagagcgugagaaccuggaacgagaucauccccagcaagggcugccugagagugggcggcagaugccacccccacgugaacggcguguucuucaacggcaucauccugggccccgacggccacgugcugauccccgagaugcagagcagccugcugcagcagcacauggagcugcuggagagcagcgugaucccccugaugcacccccuggccgaccccagcaccaucuucaaggacggcgacgaggccgaggacuucguggaggugcaccugcccgacgugcacagacaggugagcggcguggaccugggccugcccaacuggggcaaguacgugcugaugagcgccggcgcccugguggcccugaugcugaugaucuuccugaugaccugcugcgugaagaccgacagaaccggcagcacccaccacagccccggcgagaccggcagaaaggugagcgugaccagccagaacggcagagugaucgccagcugggagagcuacaagagcggcggcgagaccaagcuguga

SEQ ID NO: 191803 - RNA, 1575 nt, Artificial Sequence; identical to SEQ ID NO: 191801
  derived and/or modified CDS sequence (opt4) from glycoprotein__RABV__KT221115.1

SEQ ID NO: 191804 - RNA, 1575 nt, Artificial Sequence
  derived and/or modified CDS sequence (opt4) from glycoprotein__RABV__KT221117.1
augaucccccaggcccugcuguucgugccccugcugguguucagccugugcuucggcaaguuccccaucuacaccauccccgacaagcugggccccuggagccccaucgacauccaccaccugagcugccccaacaaccuggugguggaggacgagggcugcaccaaccugagcggcuucagcuacauggagcugaaggugggcuacaucagcgccaucaaggugaacggcuucaccugcaccggcguggugaccgaggccgagaccuacaccaacuucgugggcuacgugaccaccaccuucaagagaaagcacuucagacccacccccgacgccugcagagccgccuacaacuggaagauggccggcgaccccagauacgaggagagccugcacaaccccuaccccgacuaccacuggcugagaaccgugaagaccaccaaggagagccugguggugaucagccccagcguggccgaccuggaccccuacgacaagagccugcacagcagaguguuccccagcggcaagugcagcggcaucaccgugagcagcaccuacugcagcaccaaccacgacuacaccaucuggaugcccgagaaccccagacugggcaccagcugcgacaucuucgugaacagcagaggcaagagagccagcaagggcagcaagaccugcggcuucguggacgagagaggccuguacaagagccugaagggcgccugcaagcugaagcugugcggcgugcugggccugagacugauggacggcaccuggguggccauccagaccagcgacgagaccaaguggugcccccccgaccagcuggugaaccugcacgacuucagaagcgacgagaucgagcaccuggugguggaggagcuggugaagaagagagaggagugccuggacgcccuggagagcaucaugaccaccaagagcgugagcuucagaagacugagccaccugagaaagcuggugcccggcuucggcaaggccuacaccaucuucaacaagacccugauggaggccgacgcccacuacaagagcgugagaaccuggaacgagaucauccccagcaagggcugccugagagugggcggcagaugccacccccacgugaacggcguguucuucaacggcaucauccugggccccgacggccacgugcugauccccgagaugcagagcagccugcugcagcagcacauggagcugcuggagagcagcgugaucccccugaugcacccccuggccgaccccagcaccaucuucaaggacggcgacgaggccgaggacuucguggaggugcaccugcccgacgugcacaagcaggugagcggcguggaccugggccugcccaacuggggcaaguacgugcugaugagcgccggcgcccugaucgcccugaugcugaugguguuccugaugaccugcugcagaaagaccgacagaaccggcagcacccaccacagccccggcgagaccggcagaaaggugagcgugaccagccagaacgagagagugaucgccagcugggagagcuacaagagcggcggcgagaccaagcuguga

SEQ ID NO: 191805 - RNA, 1575 nt, Artificial Sequence
  derived and/or modified CDS sequence (opt4) from glycoprotein__RABV__KT221118.1
auggugccccaggcccugcuguucgugccccugcuggccgugccccugugcuucggcaaguuccccaucuacaccauccccgacaagcugggccccuggagccccaucgacauccaccaccugagcugccccaacaaccuggugguggaggacgagggcugcaccaaccugagcggcuucagcuacauggagcugaaggugggcuacaucagcgccaucaaggugaacggcuucaccugcaccggcguggugaccgaggccgagaccuacaccaacuucgugggcuacgugaccaccaccuucaagagaaagcacuucagacccacccccgacgccugcagaagcgccuacaacuggaagauggccggcgaccccagauacgaggagagccugcacaaccccuaccccgacuaccacuggcugagaaccgugaagaccaccaaggagagcuucgugaucaucagccccagcguggccgaccuggaccccuacgacaagagccugcacagcagaguguuccccagaggcaagugcagcggcaucaccgugagcagcaccuacugcagcaccaaccacgacuacaccaucuggaugcccgagaaccccagacugggcaccagcugcgacaucuucaccaacagcagaggcaagagagccagcaagggcagcaagaccugcggcuucguggacgagagaggccuguacaagagccugaagggcgccugcaagcugaagcugugcggcgugcugggccugagacugauggacggcaccuggguggccauccagaccagcgacgagaccaaguggugcccccccgaccagcuggugaaccugcacgacuuccacagcgacgagaucgagcaccuggugguggaggugcuggugaagaagagagaggagugccuggacgcccuggagagcaucaugaccaccaagagcgugagcuucagaagacugagccaccugagaaagcuggugcccggcuucggcaaggccuacaccaucuucaacaagacccugauggaggccgacgcccacuacaagagcgugagaaccuggaacgagaucauccccagcaagggcugccugagagugggcggcagaugccacccccacgugaacggcguguucuucaacggcaucauccugggccccgacggccacgugcugauccccgagaugcagagcagccugcugcagcagcacauggagcugcuggagagcagcgugaucccccugaugcacccccuggccgaccccagcaccguguucaaggacggcgacgaggccgaggacuucguggaggugcaccugcccgacgugcacaagcaggugagcggcguggaccugggccugcccagcuggggcaaguacgugcugaugagcgccggcauccugaccgcccugaugcugaugaucuuccugaugaccugcugcagaagaaccaacagagccgagagcauccagcacagccugggcgagaccggcagaaaggugagcgugaccagccagaacggcagagugaucagcagcugggagagcuacaagagcggcggcgagaccaagcuguga

SEQ ID NO: 191806 - RNA, 1575 nt, Artificial Sequence; identical to SEQ ID NO: 190887
  derived and/or modified CDS sequence (opt4) from glycoprotein__RABV__KT221120.1

SEQ ID NO: 191807 - RNA, 1575 nt, Artificial Sequence
  derived and/or modified CDS sequence (opt4) from glycoprotein__RABV__KT221122.1
augaucccccaggugcugcuguucgugcccuuccugguguucagcagcugcuucggcaaguuccccaucuacaccauccccgacaagcugggccccuggagccccaucgacauccaccaccugagcugccccaacaaccuggugguggaggacgagggcugcaccaaccugagcggcuucagcuacauggagcugaaggugggcuacaucagcgccaucaaggugaacggcuucaccugcaccggcguggugaccgaggccgagaccuacaccaacuucgugggcuacgugaccaccaccuucaagagaaagcacuucagacccacccccgacgccugcagagccgccuacaacuggaagauggccggcgaccccagauacgaggagagccugcacaaccccuaccccgacuaccacuggcugagaaccgugaagaccagcaaggagagccuggugaucaucagccccagcguggccgaccuggaccccuacgacaagagccugcacagcagaguguuccccggcggcaagugcagcggcaucaccgugagcagcaccugcugcagcaccaaccacgacuacaccaucuggaugcccgagaaccccagacugggcaccagcugcgacaucuucaccaacagcagaggcaagagagccagcaagggcggcaagaccugcggcuucguggacgagagaggccuguacaagagccugaagggcgccugcaagcugaagcugugcggcgugcugggccugagacugauggacggcaccuggguggccauccagaccagcgacgagaucaaguggugcagccccgaccagcuggugaaccugcacgacuuccacagcgacgagaucgagcaccuggugguggaggagcuggugaagaagagagaggagugccuggacgcccuggagaccaucaugaccaccaagagcgugagcuucagaagacugagccaccugagaaagcuggugcccggcuucggcaaggccuacaccaucuucaacaagacccugauggaggccgacgcccacuacaagagcaucagaaccuggaacgagaucauccccagcaagggcugccugagagugggcggcagaugccacccccacgugaacggcguguucuucaacggcaucauccugggccccgacggccacgugcugauccccgagaugcagagcagccugcugcaccagcacauggagcugcuggagagcagcgugaucccccugaugcacccccuggccgaccccagcaccguguucaaggacggcgacgaggccgaggacuucguggaggugcaccugcccgacgugcacaagcagaucagcggcguggaccugggccugcccaacuggggcaaguacgugcuggugagcgccggcgcccugaccgcccugaugcugaugaucuuccugaugaccugcugcagaaagaccaacagagccgagagcauccagcacagccccggcgagaccggcagaaaggugagcgugaccagccacaacggcagagugaucagcagcugggagagcuacaagagcggcggcgagaccaagcuguga

SEQ ID NO: 191808 - RNA, 1575 nt, Artificial Sequence; identical to SEQ ID NO: 191016
  derived and/or modified CDS sequence (opt4) from glycoprotein__RABV__KT221125.1

SEQ ID NO: 191809 - RNA, 1575 nt, Artificial Sequence; identical to SEQ ID NO: 191016
  derived and/or modified CDS sequence (opt4) from glycoprotein__RABV__KT221126.1

SEQ ID NO: 191810 - RNA, 1575 nt, Artificial Sequence; identical to SEQ ID NO: 191235
  derived and/or modified CDS sequence (opt4) from glycoprotein__RABV__KT221127.1

SEQ ID NO: 191811 - RNA, 1575 nt, Artificial Sequence; identical to SEQ ID NO: 190906
  derived and/or modified CDS sequence (opt4) from glycoprotein__RABV__KT221128.1

SEQ ID NO: 191812 - RNA, 1575 nt, Artificial Sequence; identical to SEQ ID NO: 190906
  derived and/or modified CDS sequence (opt4) from glycoprotein__RABV__KT221129.1

SEQ ID NO: 191813 - RNA, 1575 nt, Artificial Sequence
  derived and/or modified CDS sequence (opt4) from glycoprotein__RABV__KT221130.1
auggugccccccgugcugcuguucgugccccugcuguucuucagcagcugcuucggcaaguuccccaucuaccccauccccgacaagcugggccccuggagccccaucgacauccaccaccugaccugccccaacaaccuggugguggagaacgagggcugcaccauccugagcggcuucagcuacauggagcugaaggugggcuacaucagccccaucaaggugaacggcuucaccugcaccggcguggugaccaaggccaagaccuacaccaacuucgugggcuacgugaccaccaccuucaagaagaagcacuucccccccaugcccgacgccugcaaggccgccuacaacuggaagauggccggcgaccccagauacgagaagagccugcacaaccccuaccccgacuaccacuggcugcagaccgugaagaccaccaaggagagccuggugaucaucagccccagcguggccaaccuggaccccuacgacaagagccugcacagcagaguguuccccggcggcaagugcagcggcaucaccgugagcagcaccugcugcagcaccaaccacgacuacaccaucuggaugcccgagaaccccaagcugggcaccagcugcgacaucuucaccaacagcagaggcaagagagccagcaagggcggcaagaccugcggcuucguggacgagagaggccuguacaagagccugaagggcgccugcaagcugaagcugugcggcgugcugggccugagacugauggacggcaccuggguggccauccagaccagcgacgagaucaaguggugcagccccgaccagcuggugaaccugcacgacuuccacagcgacgagaucgagcaccuggugguggaggagcuggugaagaagagagaggagugccuggacgcccuggagaccaucaugaccaccaagagcgugagcuucagaagacugagccaccugagaaagcuggugcccggcuucggcaaggccuacaccaucuucaacaagacccugauggaggccgacgcccacuacaagagcaucagaaccuggaacgagaucauccccagcaagggcugccugagagugggcggcagaugccacccccacgugaacggcguguucuucaacggcaucauccugggccccgacggccacgugcugauccccgagaugcagagcagccugcugcaccagcacauggagcugcuggagagcagcgugaucccccugaugcacccccuggccgaccccagcaccguguucaaggacggcgacgaggccgaggacuucguggaggugcaccugcccgacgugcacaagcagaucagcggcguggaccugggccugcccaacuggggcaaguacgugcugaucagcgccggcgcccugaccgcccugaugcugaugaucuuccugaugaccugcugcagaaaggccaacagagccgagagcauccagcacaaccccggcgagaccggcagaaaggugagcgugaccagccacaacggcagagugaucagcagcugggagagcuacaagagcggcggcgagaccaagcuguga

SEQ ID NO: 191814 - RNA, 1575 nt, Artificial Sequence
  derived and/or modified CDS sequence (opt4) from glycoprotein__RABV__KT221132.1
augaucccccaggugcugcuguucgugcaccugcugguguucagcagcugcuucggcaaguuccccaucuacaccauccccgacaagcugggccccuggagccccaucgacauccaccaccugagcugccccaacaaccuggugguggaggacgagggcugcaccaaccugagcggcuucagcuacauggagcugaaggugggcuacaucagcgccaucaaggugaacggcuucaccugcaccggcguggugaccgaggccgagaccuacaccaacuucgugggcuacgugaccaccaccuucaagagaaagcacuucagacccaugcccgacgccugcagagccgccuacaacuggaagauggccggcgaccccagauacgaggagagccugcacaaccccuaccccgacuaccacuggcugagaaccgugaagaccaccaaggagagccuggugaucaucagccccagcguggccgaccuggaccccuacgacaagagccugcacagcagaguguuccccggcggcaagugcagcggcaucaccgugagcagcaccugcugcagcaccaaccacgacuacaccaucuggaugcccgagaaccccagacugggcaccagcugcgacaucuucaccaacagcagaggcaagagagccagcaagggcggcaagaccugcggcuucguggacgagagaggccuguacaagagccugaagggcgccugcaagcugaagcugugcggcgugcugggccugagacugauggacggcaccuggguggccauccagaccagcgacgagaucaaguggugcagccccgaccagcuggugaaccugcacgacuuccacagcgacgagaucgagcaccuggugguggaggagcuggugaagaagagagaggagugccuggacgcccuggagaccaucaugaccaccaagagcgugagcuucagaagacugagccaccugagaaagcuggugcccggcuucggcaaggccuacaccaucuucaacaagacccugauggaggccgacgcccacuacaagagcaucagaaccuggaacgagaucauccccagcaagggcugccugagagugggcggcagaugccacccccacgugaacggcguguucuucaacggcaucauccugggccccgacggccacgugcugauccccgagaugcagagcagccugcugcaccagcacauggagcugcuggagagcagcgugaucccccugaugcacccccuggccgaccccagcaccguguucaaggacggcgacgaggccgaggacuucguggaggugcaccugcccgacgugcacaagcagaucagcggcguggaccugggccugcccaacuggggcaaguacgugcugaucagcgccggcgcccugaccgcccugaugcugaccaucuuccugaugaccugcugcagaaagaccaacagagccggcagcauccagcacagccccggcgagaccggcagaaaggugagcgugaccagccacaacggcagagugaucagcagcugggagagcuacaagagcggcagcgagaccaagcuguga

SEQ ID NO: 191815 - RNA, 1575 nt, Artificial Sequence; identical to SEQ ID NO: 190887
  derived and/or modified CDS sequence (opt4) from glycoprotein__RABV__KT221133.1

SEQ ID NO: 191816 - RNA, 1575 nt, Artificial Sequence; identical to SEQ ID NO: 190887
  derived and/or modified CDS sequence (opt4) from glycoprotein__RABV__KT221134.1

SEQ ID NO: 191817 - RNA, 1575 nt, Artificial Sequence
  derived and/or modified CDS sequence (opt4) from glycoprotein__RABV__KT221136.1
auggugccccaggcccugcuguucgugccccugcuggccaucccccugugcuucggcaaguuccccaucuacaccauccccgacaagcugggccccuggagccccaucgacauccaccaccugagcugccccaacaaccuggugguggaggacgagggcugcaccaaccugagcggcuucagcuacauggagcugaaggugggcuacaucagcgccaucaaggugaacggcuucaccugcaccggcguggugaccgaggccgagaccuacaccaacuucgugggcuacgugaccaccaccuucaagagaaagcacuucagacccacccccgacgccugcagaagcgccuacaacuggaagauggccggcgaccccagauacgaggagagccugcacaaccccuaccccgacuaccacuggcugagaaccgugaagaccaccaaggagagcuucgugaucaucagccccagcguggccgaccuggaccccuacgacaagagccugcacagcagaguguuccccagaggcaagugcagcggcaucaccgugagcagcaccuacugcagcaccaaccacgacuacaccaucuggaugcccgagaaccccagacugggcaccagcugcgacaucuucaccaacagcagaggcaagagagccagcaagggcagcaagaccugcggcuucguggacgagagaggccuguacaagagccugaagggcgccugcaagcugaagcugugcggcgugcugggccugagacugauggacggcaccuggguggccauccagaccagcgacgagaccaaguggugcccccccgaccagcuggugaaccugcacgacuuccacagcgacgagaucgagcaccuggugguggaggagcuggugaagaagagagaggagugccuggacgcccuggagagcaucaugaccaccaagagcgugagcuucagaagacugagccaccugagaaagcuggugcccggcuucggcaaggccuacaccaucuucaacaagacccugauggaggccgacgcccacuacaagagcgugagaaccuggaacgagaucauccccagcaagggcugccugagagugggcggcagaugccacccccacgugaacggcguguucuucaacggcaucauccugggccccgacggccacgugcugauccccgagaugcagagcagccugcugcagcagcacauggagcugcuggagagcagcgugaucccccugaugcacccccuggccgaccccagcaccguguucaaggacggcgacgaggccgaggacuucguggaggugcaccugcccgacgugcacaagcaggugagcggcguggaccugggccugcccagcuggggcaaguacgugcugaugagcgccggcauccugaccgcccugaugcugaugaucuuccugaugaccugcugcagaagaaccaacagagccgagagcauccagagaagccugggcgagaccggcagaaaggugagcgugaccagccagagcggcagagugaucagcagcugggagagcuacaagagcggcggcgagaccaagcuguga

SEQ ID NO: 191818 - RNA, 1575 nt, Artificial Sequence; identical to SEQ ID NO: 191016
  derived and/or modified CDS sequence (opt4) from glycoprotein__RABV__KT221138.1

SEQ ID NO: 191819 - RNA, 1575 nt, Artificial Sequence
  derived and/or modified CDS sequence (opt4) from glycoprotein__RABV__KT221139.1
augaucccccaggugcugcuguucgugacccugcugguguucagcagcugcuucggcaaguuccccaucuacaccauccccgacaagcugggccccuggagccccaucgacauccaccaccugagcugccccaacaaccuggugguggaggacgagggcugcaccaaccugagcggcuucagcuacauggagcugaaggugggcuacaucagcgccaucaaggugaacggcuucaccugcaccggcguggugaccgaggccgagaccuacaccaacuucgugggcuacgugaccaccaccuucaagagaaagcacuucagacccaugcccgacgccugcagagccgccuacaacuggaagauggccggcgaccccagauacgaggagagccugcacaaccccuaccccgacuaccacuggcugagaaccgugaagaccaccaaggagagccuggugaucaucagccccagcguggccgaccuggaccccuacgacaagagccugcacagcagaguguuccccggcggcaagugcagcggcaucaccgugagcagcaccugcugcagcaccaaccacgacuacaccaucuggaugcccgagaaccccagacugggcaccagcugcgacaucuucaccaacagcagaggcaagagagccagcaagggcggcaagaccugcggcuucguggacgagagaggccuguacaagagccugaagggcgccugcaagcugaagcugugcggcgugcugggccugagacugauggacggcaccuggguggccauccagaccagcgacgagaucaaguggugcccccccgaccagcuggugaaccugcacgacuuccacagcgacgagaucgagcaccuggugguggaggagcuggugaagaagagagaggagugccuggacgcccuggagaccaucaugaccaccaagagcgugagcuucagaagacugagccaccugagaaagcuggugcccggcuucggcaaggccuacaccaucuucaacaagacccugauggaggccgacgcccacuacaagagcaucagaaccuggaacgagaucauccccagcaagggcugccugagagugggcggcagaugccacccccacgugaacggcguguucuucaacggcaucauccugggccccgacggccacgugcugauccccgagaugcagagcagccugcugcaccagcacauggagcugcuggagagcagcgugaucccccugaugcacccccuggccgaccccagcaccguguucaaggacggcgacgaggccgaggacuucguggaggugcaccugcccgacgugcacaagcagaucagcggcguggaccugggccugcccaacuggggcaaguacgugcugaucagcgccggcgcccugaccgcccugaugcugaccaucuuccugaugaccugcugcagaaagaccaacggcgccggcagcauccagcacagccccggcgagaccggcagaaaggugagcgugaccagccacaacggcagagugaucagcagcugggagagcuacaagagcggcagcgagaccaagcuguga

SEQ ID NO: 191820 - RNA, 1575 nt, Artificial Sequence; identical to SEQ ID NO: 191819
  derived and/or modified CDS sequence (opt4) from glycoprotein__RABV__KT221140.1

SEQ ID NO: 191821 - RNA, 1575 nt, Artificial Sequence
  derived and/or modified CDS sequence (opt4) from glycoprotein__RABV__KT276368.1
augauccugcaggcccugcuguucgugccccugcugaucagcagccugugccugggcaaguuccccaucuacaccauccccgacaagcugggccccuggagccccaucgacauccaccaccugagcugccccaacaaccuggugguggaggacgagggcugcaccaaccugagcggcuucagcuacauggagcugaaggugggcuacaucagcgccaucaaggugaacggcuucaccugcaccggcguggugaccgaggccgagaccuacaccaacuucgugggcuacgugaccaccaccuucaagagaaagcacuucagacccauccccgacgccugcagagccgccuacaacuggaagauggccggcgaccccagauacgaggagagccugcagaaccccuaccccgacuaccacuggcugagaaccgugaagaccaccaaggagagccugaucaucaucagccccagcguggccgaccuggaccccuacgacaagagccugcacagcagaguguuccccggcggcaagugccugggcaucaccgugagcagcaccuacugcagcaccaaccacgacuacaccaucuggaugcccgaggagcccagacugggcaccagcugcgacaucuucaccagcagcaagggcaagaaggccagcaagggcggcaagaccugcggcuucguggacgagagaggccuguacaagagccugaagggcgccugcaagcugaagcugugcggcgugcugggccugagacugauggacggcaccugggugagcauccagaccagcgacgacaccaaguggugcccccccgaccagcuggugaaccugcacgacuuccacagcgacgagaucgagcaccuggugguggaggagcuggugaagaagagagaggagugccuggacgcccuggagagcaucaugaccaccaagagcgugagcuucagaagacugagcuaccugagaaagcuggugcccggcuucggcaaggccuacaccaucuucaacaagacccugauggaggccgacgcccacuacaagagcgugagaaccuggaacgagaucauccccagcaagggcugccugaaggugagagagagaugccacccccccguggacggcguguucuucaacggcaucauccugggccccgacggcaacgugcugauccccgagaugcagagcagccugcugcagcagcacauggagcugcuggagagcagcgugaucccccugaugcacccccuggccgaccccagcaccguguucaaggagggcgacgaggccgaggacuucguggaggugcaccugcccgacgugcacaagcagaucagcggcguggaccugggccugcccagcuggggcaaguaccugcugaugaucgccggcggccuggccacccuggugcugaucaucugcagcauggccugcugcagaagaaccaagcagaccgagagcagaagaagaggcagcagagagagcgagaagaaggugaccgccgccccccagaccagaaagguggugagcagcugggagcuguacaagagcgagggcgacgccagacuguga

SEQ ID NO: 191822 - RNA, 1575 nt, Artificial Sequence
  derived and/or modified CDS sequence (opt4) from glycoprotein__RABV__KT336432.1
auggugccccaggcccugcuguucgugccccugcugguguucccccugugcuucggcaaguuccccaucuacaccauccccgacaagcugggccccuggagccccaucgacauccaccaccugagcugccccaacaaccuggugguggaggacgagggcugcaccaaccugagcggcuucagcuacauggagcugaaggugggcuacaucagcgccaucaaggugaacggcuucaccugcaccggcguggugaccgaggccgagaccuacaccaacuucgugggcuacgugaccaccaccuucaagagaaagcacuucagaccccugcccgacgccugcagagccgccuacaacuggaagauggccggcgaccccagauacgaggagagccugcacaaccccuaccccgacuaccacuggcugagaaccgugaagaccaccaaggagagccuggugaucaucagccccagcguggccgaccuggaccccuacgacaagagccugcacagcagaguguuccccagcggcaagugcagcggcaucaccgugagcagcaccuucugcagcaccaaccacgacuacaccaucuggaugcccgagaaccccagacugggcaccagcugcgacaucuucgccaacagcagaggcaagagagccagcaagggcggcaagaccugcggcuucguggacgagagaggccuguacaagagccugaagggcgccugcaagcugaagcugugcggcgugcugggccugagacugauggacggcaccuggguggccauccagaccagcgacgagaccaaguggugcccccccgaccagcuggugaacaugcacgacuucagaagcgacgagaucgagcaccuggugguggaggagcuggugaagaagagagaggagugccuggacgcccuggagagcaucaugaccaccaagagcgugagcuucagaagacugagccaccugagaaagcuggugcccggcuucggcaaggccuacaccaucuucaacaagacccugauggaggccgacgcccacuacaagagcgugagaaccuggaacgagaucauccccagcaagggcugccugagagugggcggcagaugccacccccacgugaacggcguguucuucaacggcaucauccugggccccgacggccacgugcugauccccgagaugcagagcagccugcugcagcagcacauggagcugcuggagagcagcgugaucccccugaugcacccccuggccgaccccagcaccguguucaaggacggcgacgaggccgaggacuucguggaggugcaccugcccgacgugcacaagcaggugagcggcguggaccugggccugcccaacuggggcaaguacgugcugcugagcgccggcacccugaucgcccugaugcugaucaccuuccugaugaccugcugcagaagagugaacagacccgagagcaccaagagaagccugggcggcaccggcagaaaggugagcgugaccagccagagcggcaaggugaucagcagcugggagagcuacaagagcggcggcgagaccagacuguga

SEQ ID NO: 191823 - RNA, 1575 nt, Artificial Sequence
  derived and/or modified CDS sequence (opt4) from glycoprotein__RABV__KT336433.1
auggugccccaggcccugcuguucgugccccugcugguguucagccugugcuucggcaaguuccccaucuacaccauccccgacaagcugggccccuggagccccaucgacauccaccaccugagcugccccaacaaccuggugguggaggacgagggcugcaccaaccugagcggcuucagcuacauggagcugaaggugggcuacaucagcgccaucaaggugaacggcuucaccugcaccggcguggugaccgaggccgagaccuacaccaacuucgugggcuacgugaccaccaccuucaagagaaagcacuucagacccauccccgacgccugcagagccgccuacaacuggaagauggccggcgaccccagauacgaggagagccugcacaaccccuaccccgacuaccacuggcugagaaccgugaagaccaccaaggagagccuggugaucaucagccccagcguggccgaccuggaccccuacgacaagagccugcacagcagaguguuccccagcggcaagugcagcggcaucaccgugagcagcaccuacugcagcaccaaccacgacuacaccaucuggaugcccgagaaccccagacugggcaccagcugcgacaucuucgccaacagcagaggcaagagagccagcaagggcggcaagaccugcggcuucguggacgagagaggccuguacaagagccugaagggcgccugcaagcugaagcugugcggcgugcugggccugagacugauggacggcaccuggguggccaugcagaccagcgacgagaccaaguggugcccccccgaccagcuggugaacaugcacgacuucagaagcgacgagaucgagcaccuggugguggaggagcuggugaagaagagagaggagugccuggacgcccuggagagcaucaucaccaccaaggccgugagcuucagaagacugagccaccugagaaagcuggugcccggcuucggcaaggccuacaccaucuucaacaagacccugauggaggccgacgcccacuacaagagcgugagaaccuggaacgagaucauccccagcaagggcugccugagagugggcggcagaugccacccccacgugaacggcguguucuucaacggcaucauccugggccccgacggcagagugcugauccccgagaugcagagcagccugcugcagcagcacauggagcugcuggagagcagcgugaucccccugaugcacccccuggccgaccccagcaccguguucaaggacggcgacgaggccgaggacuucguggaggugcaccugcccgacgugcacaagcaggugagcggcguggaccugggccugcccaacuggggcaaguacgugcugcugagcgccggcacccugaucgcccugaugcugaccaucuuccugaucaccugcugcagaagagugaacagacccgaguucacccagagaagccugggcggcaccggcagaaaggugagcgugaccagccagagcggcaaggugaucagcagcugggagagcuacaagagcggcggcgagaccagacuguga

SEQ ID NO: 191824 - RNA, 1575 nt, Artificial Sequence
  derived and/or modified CDS sequence (opt4) from glycoprotein__RABV__KT336434.1
auggugccccaggcccugcuguucgugccccugcugguguucagccugugcuucggcaaguuccccaucuacaccauccccgacaagcugggccccuggagccccaucgacauccaccaccugagcugccccaacaaccuggugguggaggacgagggcugcaccaaccugagcggcuucagcuacauggagcugaaggugggcuacaucagcgccaucaaggugaacggcuucaccugcaccggcguggugaccgaggccgagaccuacaccaacuucgugggcuacgugaccaccaccuucaagagaaagcacuucagacccauccccgacgccugcagagccgccuacaacuggaagauggccggcgaccccagauacgaggagagccugcacaaccccuaccccgacuaccacuggcugagaaccgugaagaccaccaaggagagccuggugaucaucagccccagcguggccgaccuggaccccuacgacaagagccugcacagcagaguguuccccagcggcaagugcagcggcaucaccgugagcagcaccuucugcagcaccaaccacgacuacaccaucuggaugcccgagaaccccagacugggcaccagcugcgacaucuucgccaacagcagaggcaagagagccagcaagggcggcaagaccugcggcuucguggacgagagaggccuguacaagagccugaagggcgccugcaagcugaagcugugcggcgugcugggccugagacugauggacggcaccuggguggccaugcagaccagcgacgagaccaaguggugcccccccgaccagcuggugaacaugcacgacuucagaagcgacgagaucgagcaccuggugguggaggagcuggugaagaagagagaggagugccuggacgcccuggagagcaucaugaccaccaagagcgugagcuucagaagacugagccaccugagaaagcuggugcccggcuucggcaaggccuacaccaucuucaacaagacccugauggaggccgacgcccacuacaagagcgugagaaccuggaacgagaucauccccagcaagggcugccugagagugggcggcagaugccacccccacgugaacggcguguucuucaacggcaucauccugggccccgacggccacgugcugauccccgagaugcagagcagccugcugcagcagcacauggagcugcuggagagcagcgugaucccccugaugcacccccuggccgaccccagcaccguguucaaggacggcgacgaggccgaggacuucguggaggugcaccugcccgacgugcacaagcaggugagcggcguggaccugggccugcccaacuggggcaaguacgugcugcugagcgccggcacccugaucgcccugaugcugaucaucuuccugaugaccugcugcagaagagugaacagacccgagagcaccgacagaagccugggcggcaccggcagaaaggugagcgugaccagccagagcggcaaggugaucagcagcugggagagcuacaagagcggcggcgagaccagacuguga

SEQ ID NO: 191825 - RNA, 1575 nt, Artificial Sequence
  derived and/or modified CDS sequence (opt4) from glycoprotein__RABV__KT336435.1
auggugccccaggcccugcuguuccugccccugcugguguucccccugugcuucggcaaguuccccaucuacaccauccccgacaagcugggccccuggagccccaucgacauccaccaccugagcugccccaacaaccuggugguggaggacgagggcugcaccaaccugagcggcuucagcuacauggagcugaaggugggcuacaucagcgccaucaaggugaacggcuucaccugcaccggcguggugaccgaggccgagaccuacaccaacuucgugggcuacgugaccaccaccuucaagagaaagcacuucagacccauccccgacgccugcagagccgccuacaacuggaagauggccggcgaccccagauacgaggagagccugcacaaccccuaccccgacuaccacuggcugagaaccgugaagaccaccaaggagagccuggugaucaucagccccagcguggccgaccuggaccccuacgacaagagccugcacagcagaguguuccccagcggcaagugcagcggcaucaccgugagcagcaccuucugcagcaccaaccacgacuacaccaucuggaugcccgagaaccccagacugggcaccagcugcgacaucuucgccaacagcagaggcaagagagccagcaagggcggcaagaccugcggcuucguggacgagagaggccuguacaagagccugaagggcgccugcaagcugaagcugugcggcgugcugggccugagacugauggacggcaccuggguggccaugcagaccagcgacgagaccaaguggugcccccccgaccagcuggugaacauccacgacuucagaagcgacgagaucgagcaccuggugguggaggagcuggugaagaagagagaggagugccuggacgcccuggagagcaucaugaccaccaagagcgugagcuucagaagacugagccaccugagaaagcuggugcccggcuucggcaaggccuacaccaucuucaacaagacccugauggaggccgacgcccacuacaagagcgugagaaccuggaacgagaucauccccagcaagggcugccugagagugggcggcagaugccacccccacgugaacggcguguucuucaacggcaucauccugggccccgacggccacgugcugauccccgagaugcagagcagccugcugcagcagcacauggagcugcuggagagcagcgugaucccccugaugcacccccuggccgaccccagcaccguguucaaggacggcgacgaggccgaggacuucguggaggugcaccugcccgacgugcacaagcaggugagcggcguggaccugggccugcccaacuggggcaaguacgugcugcugagcgccggcacccugaucgcccugaugcugaucaucuuccugaugaccugcugcagaagagugaacagacccgagagcaccgagagaagccugggcagaaccggcagaaaggugagcgugaccagccagagcggcaaggugaucagcagcugggagagcuacaagagcggcggcgagaccagacuguga

SEQ ID NO: 191826 - RNA, 1575 nt, Artificial Sequence
  derived and/or modified CDS sequence (opt4) from glycoprotein__RABV__KT336436.1
auggugccccaggcccugcuguucgugccccugcugguguucccccugugcuucggcaaguuccccaucuacaccauccccgacaagcugggccccuggagccccaucgacauccaccaccugagcugccccaacaaccuggugguggaggacgagggcugcaccaaccugagcggcuucagcuacauggagcugaaggugggcuacaucagcgccaucaaggugaacggcuucaccugcaccggcguggugaccgaggccgagaccuacaccaacuucgugggcuacgugaccaccaccuucaagagaaagcacuucagacccauccccgacgccugcagagccgccuacaacuggaagauggccggcgaccccagauacgaggagagccugcacaaccccuaccccgacuaccacuggcugagaaccgugaagaccaccaaggagagccuggugaucaucagccccagcguggccgaccuggaccccuacgacaagagccugcacagcagaguguuccccagcggcaagugcagcggcaucaccgugagcagcaccuucugcagcaccaaccacgacuacaccaucuggaugcccgagaaccccagacugggcaccagcugcgacaucuucgccaacagcagaggcaagagagccagcaagggcggcaagaccugcggcuucguggacgagagaggccuguacaagagccugaagggcgccugcaagcugaagcugugcggcgugcugggccugagacugauggacggcaccuggguggccaugcagaccagcgacgagaccaaguggugcccccccgaccagcuggugaacaugcacgacuucagaagcgacgagaucgagcaccuggugguggaggagcuggugaagaagagagaggagugccuggacgcccuggagagcaucaugaccaccaagagcgugagcuucagaagacugagccaccugagaaagcuggugcccggcuucggcaaggccuacaccaucuucaacaagacccugauggaggccgacgcccacuacaagagcgugagaaccuggaacgagaucauccccagcaagggcugccugagagugggcggcagaugccacccccacgugaacggcguguucuucaacggcaucauccugggccccgacggccacgugcugauccccgagaugcagagcagccugcugcagcagcacauggagcugcuggagagcagcgugaucccccugaugcacccccuggccgaccccagcaccguguucaaggacggcgacgaggccgaggacuucguggaggugcaccugcccgacgugcacaagcaggugagcggcguggaccugggccugcccaacuggggcaaguacgugcugcugagcgccggcacccugaucgcccugaugcugaucaccuuccugaugaccugcugcagaagagugaacagacccgagagcaccaagagaagacugggcggcaccggcagaaaggugagcgugaccagccagagcggcaaggugaucagcagcugggagagcuacaagagcggcggcgagaccagacuguga

SEQ ID NO: 191827 - RNA, 1575 nt, Artificial Sequence
  derived and/or modified CDS sequence (opt4) from glycoprotein__RABV__KT336437.1
auggugccccaggcccugcuguuccugccccugcugguguucccccugugcuucggcaaguuccccaucuacaccauccccgacaagcugggccccuggagccccaucgacauccaccaccugaacugccccaacaaccuggugguggaggacgagggcugcaccaaccugagcggcuucagcuacauggagcugaaggugggcuacaucagcgccaucaaggugaacggcuucaccugcaccggcguggugaccgaggccgagaccuacaccaacuucgugggcuacgugaccaccaccuucaagagaaagcacuucagacccauccccgacgccugcagagccgccuacaacuggaagauggccggcgaccccagauacgaggagagccugcacaaccccuaccccgacuaccacuggcugagaaccgugaagaccaccaaggagagccuggugaucaucagccccagcguggccgaccuggaccccuacgacaagagccugcacagcagaguguuccccagcggcaagugcagcggcaucaccgugagcagcaccuucugcagcaccaaccacgacuacaccaucuggaugcccgagaaccccagacugggcaccagcugcgacaucuucgccaacagcagaggcaagagagccagcaagggcggcaagaccugcggcuucguggacgagagaggccuguacaagagccugaagggcgccugcaagcugaagcugugcggcgugcugggccugagacugauggacggcaccuggguggccaugcagaccagcgacgagaccaaguggugcccccccgaccagcuggugaacauccacgacuucagaagcgacgagaucgagcaccuggugguggaggagcuggugaagaagagagaggagugccuggacgcccuggagagcaucaugaccaccaagagcgugagcuucagaagacugagccaccugagaaagcuggugcccggcuucggcaaggccuacaccaucuucaacaagacccugauggaggccgacgcccacuacaagagcgugagaaccuggaacgagaucauccccagcaagggcugccugagagugggcggcagaugccacccccacgugaacggcguguucuucaacggcaucauccugggccccgacggccacauccugauccccgagaugcagagcagccugcugcagcagcacauggagcugcuggagagcagcgugaucccccugaugcacccccuggccgaccccagcaccguguucaaggacggcgacgaggccgaggacuucguggaggugcaccugcccgacgugcacaagcaggugagcggcguggaccugggccugcccaacuggggcaaguacgugcugcugagcgccggcacccugaucgcccugaugcugaucaucuuccugaugaccugcugcagaagagugaacagacccgagagcaccgagagaagccugggcggcaccggcagaaaggugagcgugaccagccagagcggcaaggugaucagcagcugggagagcuacaagagcggcggcgagaccagacuguga

SEQ ID NO: 191828 - RNA, 1575 nt, Artificial Sequence
  derived and/or modified CDS sequence (opt4) from glycoprotein__RABV__KU198460.1
auggugccccaggcccugcuguucgugccccugcuggccuuccccaugugcuucggcaaguuccccaucuacaccauccccgacaagcugggccccuggagccccaucgacauccaccaccugagcugccccaacaaccuggugguggaggacgagggcugcaccaaccugagcggcuucagcuacauggagcugaaggugggcuacaucagcgccaucaaggugaacggcuucaccugcaccggcguggugaccgaggccgagaccuacaccaacuucgugggcuacgugaccaccaccuucaagagaaagcacuucagacccacccccgacgccugcagagccgccuacaacuggaagauggccggcgaccccagauacgaggagagccugcacaaccccuaccccgacuaccacuggcugagaaccgugaagaccaccaaggagagccugaucaucaucagccccagcguggccgaccuggaccccuacgacaagagccugcacagcagaguguuccccagcggcaagugccugggcaucaccaucagcagcaccuacugcagcaccaaccacgacuacaccaucuggaugcccgagaaccugagacugggcaccagcugcgacaucuucaccaacagcagaggcaagagagccagcaagggcagcaagaccugcggcuucguggacgagagaggccuguacaagagccugaagggcgccugcaagcugaagcugugcggcgugcugggccugagacugauggacggcaccuggguggccaugcagaccagcgacgagaccaaguggugcagccccgaccagcuggugaaccugcacgacuucagaagcgacgagaucgagcaccuggugguggaggagcuggugaagaagagagaggagugccuggacgcccuggagagcaucaugaccaccaagagcgugagcuucagaagacugagccaccugagaaagcuggugcccggcuucggcaaggccuacaccaucuucaacaagacccugauggaggccgacgcccacuacaagagcgugagaaccuggagcgagaucauccccagcaagggcugccugagagugggcggcagaugccacccccacgugaacggcguguucuucaacggcaucauccugggccccgacggccacgugcugauccccgagaugcagagcagccugcugcagcagcacauggagcugcuggagagcagcgugaucccccugaugcacccccuggccgaccccagcaccguguucaaggacggcgacgaggccgaggacuucguggaggugcaccugcccgacgugcacaagcagaucagcggcguggaccugggccugcccaacuggggcagauacgugcugaucaucgccggcgugcugaucgccaugauccugaccaucuuccugaugaccugcugcggcagaggcaacagacccaagagcacccagcacagccugggcggcaucggcagaaaggugagcgccaccagccagagcggcaaggugaucagcagcugggagagcuacaagagcggcggcgagaccagacuguga

SEQ ID NO: 191829 - RNA, 1575 nt, Artificial Sequence
  derived and/or modified CDS sequence (opt4) from glycoprotein__RABV__KU198461.1
auggugccccaggcccugcuguucgugccccugcuggccuuccccaugugcuucggcaaguuccccaucuacaccauccccgacaagcugggccccuggagccccaucgacauccaccaccugagcugccccaacaaccuggugguggaggacgagggcugcaccaaccugagcggcuucagcuacauggagcugaaggugggcuacaucagcgccaucaaggugaacggcuucaccugcaccggcguggugaccgaggccgagaccuacaccaacuucgugggcuacgugaccaccaccuucaagagaaagcacuucagacccacccccgacgccugcagagccgccuacaacuggaagauggccggcgaccccagauacgaggagagccugcacaaccccuaccccgacuaccacuggcugagaaccgugaagaccaccaaggagagccugaucaucaucagccccagcguggccgaccuggaccccuacgacaagagccugcacagcagaguguuccccagcggcaagugccugggcaucaccaucagcagcaccuacugcagcaccaaccacgacuacaccaucuggaugcccgagaaccugagacugggcaccagcugcgacaucuucaccaacagcagaggcaagagagccagcaagggcagcaagaccugcggcuucguggacgagagaggccuguacaagagccugaagggcgccugcaagcugaagcugugcggcgugcugggccugagacugauggacggcaccuggguggccaugcagaccagcgacgagaccaaguggugcagccccgaccagcuggugaaccugcacgacuucagaagcgacgagaucgagcaccuggugguggaggagcuggugaagaagagagaggagugccuggacgcccuggagagcaucaugaccaccaagagcgugagcuucagaagacugagccaccugagaaagcuggugcccggcuucggcaaggccuacaccaucuucaacaagacccugauggaggccgacgcccacuacaagagcgugagaaccuggaacgagaucauccccagcaagggcugccugagagugggcggcagaugccacccccacgugaacggcguguucuucaacggcaucauccugggccccgacggccacgugcugauccccgagaugcagagcagccugcugcagcagcacauggagcugcuggagagcagcgugaucccccugaugcacccccuggccgaccccagcaccguguucaaggacggcgacgaggccgaggacuucguggaggugcaccugcccgacgugcacaagcagaucagcggcguggaccugggccugcccaacuggggcaaguacgugcugaucaucgccggcgugcugaucgccaugauccugaccaucuuccugaugaccugcugcggcagaggcaacagacccaagagcacccagcacagccugggcggcaucggcagaaaggugagcgccaccagccagagcggcaaggugaucagcagcugggagagcuacaagagcggcggcgagaccagacuguga

SEQ ID NO: 191830 - RNA, 1575 nt, Artificial Sequence
  derived and/or modified CDS sequence (opt4) from glycoprotein__RABV__KU198462.1
auggugccccaggcccugcuguucgugccccugcuggccuuccccaugugcuucggcaaguuccccaucuacaccauccccgacaagcugggccccuggagccccaucgacauccaccaccugagcugccccaacaaccuggugguggaggacgagggcugcaccaaccugagcggcuucagcuacauggagcugaaggugggcuacaucagcgccaucaaggugaacggcuucaccugcaccggcguggugaccgaggccgagaccuacaccaacuucgugggcuacgugaccaccaccuucaagagaaagcacuucagacccacccccgacgccugcagagccgccuacaacuggaagauggccggcgaccccagauacgaggagagccugcacaaccccuaccccgacuaccacuggcugagaaccgugaagaccaccaaggagagccugaucaucaucagccccagcguggccgaccuggaccccuacgacaagagccugcacagcagaguguuccccagcggcaagugccugggcaucaccaucagcagcaccuacugcagcaccaaccacgacuacaccaucuggaugcccgagaaccugagacugggcaccagcugcgacaucuucaccaacagcagaggcaagagagccagcaagggcagcaagaccugcggcuucguggacgagagaggccuguacaagagccugaagggcgccugcaagcugaagcugugcggcgugcugggccugagacugauggacggcaccuggguggccaugcagaccagcgacgagaccaaguggugcccccccgaccagcuggugaaccugcacgacuucagaagcgacgagaucgagcaccuggugguggaggagcuggugaagaagagagaggagugccuggacgcccuggagagcaucaugaccaccaagagcgugagcuucagaagacugagccaccugagaaagcuggugcccggcuucggcaaggccuacaccaucuucaacaagacccugauggaggccgacgcccacuacaagagcgugagaaccuggaacgagaucauccccagcaagggcugccugagagugggcggcagaugccacccccacgugaacggcguguucuucaacggcaucauccugggccccgacggccacgugcugauccccgagaugcagagcagccugcugcagcagcacauggagcugcuggagagcagcgugaucccccugaugcacccccuggccgaccccagcaccguguucaaggacggcgacgaggccgaggacuucguggaggugcaccugcccgacgugcacaagcagaucagcggcguggaccugggccugcccaacuggggcaaguacgugcugaucaucgccggcgugcugaucgccaugauccugaccaucuuccugaugaccugcugcggcagaggcaacagacccaagagcacccagcacagccccggcggcaucggcagaaaggugagcgccaccagccagagcggcaaggugaucagcagcugggagagcuacaagagcggcggcgagaccagacuguga

SEQ ID NO: 191831 - RNA, 1575 nt, Artificial Sequence
  derived and/or modified CDS sequence (opt4) from glycoprotein__RABV__KU198463.1
auggugccccaggcccugcuguucgugccccugcuggccuuccccaugugcuucggcaaguuccccaucuacaccauccccgacaagcugggccccuggagccccaucgacauccaccaccugagcugccccaacaaccuggugguggaggacgagggcugcaccaaccugagcggcuucagcuacauggagcugaaggugggcuacaucagcgccaucaaggugaacggcuucaccugcaccggcguggugaccgaggccgagaccuacaccaacuucgugggcuacgugaccaccaccuucaagagaaagcacuucagacccacccccgacgccugcagagccgccuacaacuggaagauggccggcgaccccagauacgaggagagccugcacaaccccuaccccgacuaccacuggcugagaaccgugaagaccaccaaggagagccugaucaucaucagccccagcguggccgaccuggaccccuacgacaagagccugcacagcagaguguuccccagcggcaagugccugggcaucaccaucagcagcaccuacugcagcaccaaccacgacuacaccaucuggaugcccgagaaccugagacugggcaccagcugcgacaucuucaccaacagcagaggcaagagagccagcaagggcagcaagaccugcggcuucguggacgagagaggccuguacaagagccugaagggcgccugcaagcugaagcugugcggcgugcugggccugagacugaucgacggcaccuggguggccaugcagaccagcgacgagaccaaguggugcccccccgaccagcuggugaaccugcacgacuucagaagcgacgagaucgagcaccuggugguggaggagcuggugaagaagagagaggagugccuggacgcccuggagagcaucaugaccaccaagagcgugagcuucagaagacugagccaccugagaaagcuggugcccggcuucggcaaggccuacaccaucuucaacaagacccugauggaggccgacgcccacuacaagagcgugagaaccuggaacgagaucauccccagcaagggcugccugagagugggcggcagaugccacccccacgugaacggcguguucuucaacggcaucauccugggccccgacggccacgugcugauccccgagaugcagagcagccugcugcagcagcacauggagcugcuggagagcagcgugaucccccugaugcacccccuggccgaccccagcaccguguucaaggacggcgacgaggccgaggacuucguggaggugcaccugcccgacgugcacaagcagaucagcggcguggaccugggccugcccaacuggggcaaguacgugcugaucaucgccggcgugcugaucgccaugauccugaccaucuuccugaugaccugcugcggcagaggcaacagacccaagagcacccagcacagccugggcggcaucggcagaaaggugagcgccaccagccagagcggcaaggugaucagcagcugggagagcuacaagagcggcggcgagaccagacuguga

SEQ ID NO: 191832 - RNA, 1575 nt, Artificial Sequence
  derived and/or modified CDS sequence (opt4) from glycoprotein__RABV__KU198464.1
auggugccccaggcccugcuguucgugccccugcuggccuuccccaugugcuucggcaaguuccccaucuacaccauccccgacaagcugggccccuggagccccaucgacauccaccaccugagcugccccaacaaccuggugguggaggacgagggcugcaccaaccugagcggcuucagcuacauggagcugaaggugggcuacaucagcgccaucaaggugaacggcuucaccugcaccggcguggugaccgaggccgagaccuacaccaacuucgugggcuacgugaccaccaccuucaagagaaagcacuucagacccacccccgacgccugcagagccgccuacaacuggaagauggccggcgaccccagauacgaggagagccugcacaaccccuaccccgacuaccacuggcugagaaccgugaagaccaccaaggagagccugaucaucaucagccccagcguggccgaccuggaccccuacgacaagagccugcacagcagaguguuccccagcggcaagugccugggcaucaccaucagcagcaccuacugcagcaccaaccacgacuacaccaucuggaugcccgagaaccugagacugggcaccagcugcgacaucuucaccaacagcagaggcaagagagccagcaagggcagcaagaccugcggcuucguggacgagagaggccuguacaagagccugaagggcgccugcaagcugaagcugugcggcgugcugggccugagacugauggacggcaccuggguggccaugcagaccagcgacgagaccaaguggugcccccccgaccagcuggugaaccugcacgacuucagaagcgacgagaucgagcaccuggugguggaggagcuggugaagaagagagaggagugccuggacgcccuggagagcaucaugaccaccaagagcgugagcuucagaagacugagccaccugagaaagcuggugcccggcuucggcaaggccuacaccaucuucaacaagacccugauggaggccgacgcccacuacaagagcgugagaaccuggagcgagaucauccccagcaagggcugccugagagugggcggcagaugccacccccacgugaacggcguguucuucaacggcaucauccugggccccgacggccacgugcugauccccgagaugcagagcagccugcugcagcagcacauggagcugcuggagagcagcgugaucccccugaugcacccccuggccgaccccagcaccguguucaaggacggcgacgaggccgaggacuucguggaggugcaccugcccgacgugcacaagcagaucagcggcguggaccugggccugcccaacuggggcaaguacgugcugaucaucgccggcgugcugaucgccaugauccugaccaucuuccugaugaccugcugcggcagaugcaacagacccaagagcacccagcacagccugggcggcaucggcagaaaggugagcgccaccagccagagcggcaaggugaucagcagcugggagagcuacaagagcggcggcgagaccagacuguga

SEQ ID NO: 191833 - RNA, 1575 nt, Artificial Sequence
  derived and/or modified CDS sequence (opt4) from glycoprotein__RABV__KU198465.1
auggugccccaggcccugcugcuggugccccugcuggccuuccccaugugcuucggcaaguuccccaucuacaccauccccgacaagcugggccccuggagccccaucgacauccaccaccugagcugccccaacaaccuggugguggaggacgagggcugcaccaaccugagcggcuucagcuacauggagcugaaggugggcuacaucagcgccaucaaggugaacggcuucaccugcaccggcguggugaccgaggccgagaccuacaccaacuucgugggcuacgugaccaccaccuucaagagaaagcacuucagacccacccccgacgccugcagagccgccuacaacuggaagauggccggcgaccccagauacgaggagagccugcacaaccccuaccccgacuaccacuggcugagaaccgugaagaccaccaaggagagccugaucaucaucagccccagcguggccgaccuggaccccuacgacaagagccugcacagcagaguguuccccagcggcaagugccugggcaucaccaucagcagcaccuacugcagcaccaaccacgacuacaccaucuggaugcccgagaaccugagacugggcaccagcugcgacaucuucaccaacagcagaggcaagagagccagcaagggcagcaagaccugcggcuucguggacgagagaggccuguacaagagccugaagggcgccugcaagcugaagcugugcggcgugcugggccugagacugauggacggcaccuggguggccaugcagaccagcgacgagaccaaguggugcccccccgaccagcuggugaaccugcacgacuucagaagcgacgagaucgagcaccuggugguggaggagcuggugaagaagagagaggagugccuggacgcccuggagagcaucaugaccaccaagagcgugagcuucagaagacugagccaccugagaaagcuggugcccggcuucggcaaggccuacaccaucuucaacaagacccugauggaggccgacgcccacuacaagagcgugagaaccuggagcgagaucauccccagcaagggcugccugagagugggcggcagaugccacccccacgugaacggcguguucuucaacggcaucauccugggccccgacggccacgugcugauccccgagaugcagagcagccugcugcagcagcacauggagcugcuggagagcagcgugaucccccugaugcacccccuggccgaccccagcaccguguucaaggacggcgacgaggccgaggacuucguggaggugcaccugcccgacgugcacaagcagaucagcggcguggaccugggccugcccaacuggggcaaguacgugcugaucaucgccggcgugcugaucgccaugauccugaccaucuuccugaugaccugcugcggcagaggcaacagacccaagagcacccagcacagccugggcggcaucggcagaaaggugagcgccaccagccagagcggcaaggugaucagcagcugggagagcuacaagagcggcagcgagaccagacuguga

SEQ ID NO: 191834 - RNA, 1575 nt, Artificial Sequence; identical to SEQ ID NO: 191544
  derived and/or modified CDS sequence (opt4) from glycoprotein__RABV__KU198466.1

SEQ ID NO: 191835 - RNA, 1575 nt, Artificial Sequence; identical to SEQ ID NO: 191544
  derived and/or modified CDS sequence (opt4) from glycoprotein__RABV__KU198467.1

SEQ ID NO: 191836 - RNA, 1575 nt, Artificial Sequence
  derived and/or modified CDS sequence (opt4) from glycoprotein__RABV__KU198468.1
auggugccccaggcccugcuguucgugccccugcuggccuuccccaugugcuucggcaaguuccccaucuacaccauccccgacaagcugggccccuggagccccaucgacauccaccaccugagcugccccaacaaccugaucguggaggacgagggcugcaccaaccugagcggcuucagcuacauggagcugaaggugggcuacaucagcgccaucaaggugaacggcuucaccugcaccggcguggugaccgaggccgagaccuacaccaacuucgugggcuacgugaccaccaccuucaagagaaagcacuucagacccacccccgacgccugcagagccgccuacaacuggaagauggccggcgaccccagauacgaggagagccugcacaaccccuaccccgacuaccacuggcugagaaccgugaagaccaccaaggagagccugaucaucaucagccccagcguggccgaccuggaccccuacgacaagagccugcacagcagaguguuccccagcggcaagugccugggcaucaccaucagcagcaccuacugcagcaccaaccacgacuacaccaucuggaugcccgagaaccugagacugggcaccagcugcgacaucuucaccaacagcagaggcaagagagccagcaagggcagcaagaccugcggcuucguggacgagagaggccuguacaagagccugaagggcgccugcaagcugaagcugugcggcgugcugggccugagacugauggacggcaccuggguggccaugcagaccagcgacgagaccaaguggugcccccccaaccagcuggugaaccugcacgacuucagaagcgacgagaucgagcaccuggugguggaggagcuggugaagaagagagaggagugccuggacgcccuggagagcaucaugaccaccaagagcgugagcuucagaagacugagccaccugagaaagcuggugcccggcuucggcaaggccuacaccaucuucaacaagacccugauggaggccgacgcccacuacaagagcgugagaaccuggaacgagaucauccccagcaagggcugccugagagugggcggcagaugccacccccacgugaacggcguguucuucaacggcaucauccugggccccgacggccacgugcugauccccgagaugcagagcagccugcugcagcagcacauggagcugcuggagagcagcgugaucccccugaugcacccccuggccgaccccagcaccguguucaaggacggcgacgaggccgaggacuucguggaggugcaccugcccgacgugcacaagcagaucagcggcguggaccugggccugcccaacuggggcaaguacgugcugaucaucgccggcgugcugaucgccaugauccugaccaucuuccugaugaccugcugcggcagaggcaacagacccaagagcacccagcacagccugggcggcaucggcagaaaggugagcgccaccagccagagcggcaaggugaucagcagcugggagagcuacaagagcggcggcgagaccagacuguga

SEQ ID NO: 191837 - RNA, 1575 nt, Artificial Sequence
  derived and/or modified CDS sequence (opt4) from glycoprotein__RABV__KU198469.1
auggugccccaggcccugcuguucgugccccugcuggccuuccccaugugcuucggcaaguuccccaucuacaccauccccgacaagcugggccccuggagccccaucgacauccaccaccugagcugccccaacaaccuggugguggaggacgagggcugcaccaaccugagcggcuucagcuacauggagcugaaggugggcuacaucagcgccaucaaggugaacggcuucaccugcaccggcguggugaccgaggccgagaccuacaccaacuucgugggcuacgugaccaccaccuucaagagaaagcacuucagacccacccccgacgccugcagagccgccuacaacuggaagauggccggcgaccccagauacgaggagagccugcacaaccccuaccccgacuaccacuggcugagaaccgugaagaccaccaaggagagccugaucaucaucagccccagcguggccgaccuggaccccuacgacaagagccugcacagcagaguguuccccagcggcaagugccugggcaucaccaucagcagcaccuacugcagcaccaaccacgacuacaccaucuggaugcccgagaaccugagacugggcaccagcugcgacaucuucaccaacagcagaggcaagagagccagcaagggcagcaagaccugcggcuucguggacgagagaggccuguacaagagccugaagggcgccugcaagcugaagcugugcggcgugcugggccugagacugauggacggcaccuggguggccaugcagaccagcgacgagaccaaguggugcccccccgaccagcuggugaaccugcacgacuucagaagcgacgagaucgagcaccuggugguggaggagcuggugaagaagagagaggagugccuggacgcccuggagagcaucaugaccaccaagagcgugagcuucagaagacugagccaccugagaaagcuggugcccggcuucggcaaggccuacaccaucuucaacaagacccugauggaggccgacgcccacuacaagagcgugagaaccuggaacgagaucauccccagcaagggcugccugagagugggcggcagaugccacccccacgugaacggcguguucuucaacggcaucauccugggccccgacggccacgugcugauccccgagaugcagagcagccugcugcagcagcacauggagcugcuggagagcagcgugaucccccugaugcacccccuggccgaccccagcaccguguucaaggacggcgacgaggccgaggacuucguggaggugcaccugcccgacgugcacaagcagaucagcggcguggaccugggccugcccaacuggggcaaguacgugcugaucaucgccggcgugcugaucgccaugauccugaccaccuuccugaugaccugcugcggcagaggcaacagacccaagagcacccagcacagccugggcggcaucggcagaaaggugagcgccaccagccagagcggcaaggugaucagcagcugggagagcuacaagagcggcggcgagaccagacuguga

SEQ ID NO: 191838 - RNA, 1575 nt, Artificial Sequence; identical to SEQ ID NO: 191534
  derived and/or modified CDS sequence (opt4) from glycoprotein__RABV__KU198470.1

SEQ ID NO: 191839 - RNA, 1575 nt, Artificial Sequence; identical to SEQ ID NO: 191535
  derived and/or modified CDS sequence (opt4) from glycoprotein__RABV__KU198471.1

SEQ ID NO: 191840 - RNA, 1575 nt, Artificial Sequence
  derived and/or modified CDS sequence (opt4) from glycoprotein__RABV__KU198472.1
auggugccccaggcccugcuguucgugccccugcuggccuuccccaugugcuucggcaaguuccccaucuacaccauccccgacaagcugggccccuggagccccaucgacauccaccaccugagcugccccaacaaccuggugguggaggacgagggcugcaccaaccugagcggcuucagcuacauggagcugaaggugggcuacaucagcgccaucaaggugaacggcuucaccugcaccggcguggugaccgaggccgagaccuacaccaacuucgugggcuacgugaccaccaccuucaagagaaagcacuucagacccacccccgacgccugcagagccgccuacaacuggaagauggccggcgaccccagauacgaggagagccugcacaaccccuaccccgacuaccacuggcugagaaccgugaagaccaccaaggagagccugaucaucaucagccccagcgugagcgaccuggaccccuacgacaagagccugcacagcagaguguuccccagcggcaagugccugggcaucaccaucagcagcaccuacugcagcaccaaccacgacuacaccaucuggaugcccgagaacgugagacugggcaccagcugcgacaucuucaccaacagcagaggcaagagagccagcaagggcagcaagaccugcggcuucguggacgagagaggccuguacaagagccugaagggcgccugcaagcugaagcugugcggcgugcugggccugagacugauggacggcaccugggugagcaugcccaccagcgacgagaccaaguggugcccccccgaccagcuggugaaccugcacgacuucagaagcgacgagaucgagcaccuggugguggaggagcuggugagaaagagagaggagugccuggacgcccuggagagcaucaugaccaccaagagcgugagcuucagaagacugagccaccugagaaagcuggugcccggcuucggcaaggccuacaccaucuucaacaagacccugauggaggccgacgcccacuacaagagcgugagaaccuggagcgagaucauccccagcaagggcugccugagagugggcggcagaugccacccccacgugaacggcguguucuucaacggcaucauccugggccccgacggccacgugcugauccccgagaugcagagcagccugcugcagcagcacauggagcugcuggagagcagcgugaucccccugaugcacccccuggccgaccccagcaccguguucaaggacggcgacgaggccgaggacuucguggaggugcaccugcccgacgugcacaagcagaucagcggcguggaccugggccugcccaacuggggcaaguacgugcugaucaucgccggcgugcugaucgccaugauccugaccauccugcugaugaccugcugcggcagaggcaacagacccaagagcacccagcacagccugggcggcaucggcagaaaggugagcagcaccagccagagcggcaaggugaucagcagcugggagagcuacaagagcggcggcgagaccagacuguga

SEQ ID NO: 191841 - RNA, 1575 nt, Artificial Sequence
  derived and/or modified CDS sequence (opt4) from glycoprotein__RABV__KU198473.1
auggugccccaggcccugcuguucgugccccugcuggccuuccccaugugcuucggcaaguuccccaucuacaccauccccgacaagcugggccccuggagccccaucgacauccaccaccugagcugccccaacaaccuggugguggaggacgagggcugcaccaaccugagcggcuucagcuacauggagcugaaggugggcuacaucagcgccaucaaggugaacggcuucaccugcaccggcguggugaccgaggccgagaccuacaccaacuucgugggcuacgugaccaccaccuucaagagaaagcacuucagacccacccccgacgccugcagagccgccuacaacuggaagauggccggcgaccccagauacgaggagagccugcacaaccccuaccccgacuaccacuggcugagaaccgugaagaccaccaaggagagccugaucaucaucagccccagcguggccgaccuggaccccuacgacaagagccugcacagcagaguguuccccagcggcaagugccugggcaucaccaucagcagcaccuacugcagcaccaaccacgacuacaccaucuggaugcccgagaacgugagacugggcaccagcugcgacaucuucaccaacagcagaggcaagagagccagcaagggcagcaagaccugcggcuucguggacgagagaggccuguacaagagccugaagggcgccugcaagcugaagcugugcggcgugcugggccugagacugauggacggcaccugggugagcaugcccaccagcgacgagaccaaguggugcccccccgaccagcuggugaaccugcacgacuucagaagcgacgagaucgagcaccuggugguggaggagcuggugagaaagagagaggagugccuggacgcccuggagagcaucaugaccaccaagagcgugagcuucagaagacugagccaccugagaaagcuggugcccggcuucggcaaggccuacaccaucuucaacaagacccugauggaggccgacgcccacuacaagagcgugagaaccuggaacgagaucauccccagcaagggcugccugagagugggcggcagaugccacccccacgugaacggcguguucuucaacggcaucauccugggccccgacggccacgugcugauccccgagaugcagagcagccugcugcagcagcacauggagcugcuggagagcagcgugaucccccugaugcacccccuggccgaccccagcaccguguucaaggacggcgacgaggccgaggacuucguggaggugcaccugcccgacgugcacaagcagaucagcggcguggaccugggccugcccaacuggggcaaguacgugcugaucaucgccggcgugcugaucgccaugauccugaccaucuuccugaugaccugcugcggcagaggcaacagacccaagagcacccagcacagccugggcggcaucggcagaaaggugagcagcaccagccagagcggcaaggugaucagcagcugggagagcuacaagagcggcggcgagaccagacuguga

SEQ ID NO: 191842 - RNA, 1575 nt, Artificial Sequence; identical to SEQ ID NO: 191841
  derived and/or modified CDS sequence (opt4) from glycoprotein__RABV__KU198474.1

SEQ ID NO: 191843 - RNA, 1575 nt, Artificial Sequence
  derived and/or modified CDS sequence (opt4) from glycoprotein__RABV__KU198475.1
auggugccccaggcccugcuguucgugccccugcuggccuuccccaugugcuucggcaaguuccccaucuacaccauccccgacaagcugggccccuggagccccaucgacauccaccaccugagcugccccaacaaccuggugguggaggacgagggcugcaccaaccugagcggcuucagcuacauggagcugaaggugggcuacaucagcgccaucaaggugaacggcuucaccugcaccggcguggugaccgaggccgagaccuacaccaacuucgugggcuacgugaccaccaccuucaagagaaagcacuucagacccacccccgacgccugcagagccgccuacaacuggaagauggccggcgaccccagauacgaggagagccugcacaaccccuaccccgacuaccacuggcugagaaccgugaagaccaccaaggagagccugaucaucaucagccccagcgugagcgaccuggaccccuacgacaagagccugcacagcagaguguuccccagcggcaagugccugggcaucaccaucagcagcaccuacugcagcaccaaccacgacuacaccaucuggaugcccgagaacgugagacugggcaccagcugcgacaucuucaccaacagcagaggcaagagagccagcaagggcagcaagaccugcggcuucguggacgagagaggccuguacaagagccugaagggcgccugcaagcugaagcugugcggcgugcugggccugagacugauggacggcaccugggugagcaugcccaccagcgacgagaccaaguggugcccccccgaccagcuggugaaccugcacgacuucagaagcgacgagaucgagcaccuggugguggaggagcuggugagaaagagagaggagugccuggacgcccuggagagcaucaugaccaccaagagcgugagcuucagaagacugagccaccugagaaagcuggugcccggcuucggcaaggccuacaccaucuucaacaagacccugauggaggccgacgcccacuacaagagcgugagaaccuggaacgagaucauccccagcaagggcugccugagagugggcggcagaugccacccccacgugaacggcguguucuucaacggcaucauccugggccccgacggccacgugcugauccccgagaugcagagcagccugcugcagcagcacauggagcugcuggagagcagcgugaucccccugaugcacccccuggccgaccccagcaccguguucaaggacggcgacgaggccgaggacuucguggaggugcaccugcccgacgugcacaagcagaucagcggcguggaccugggccugcccaacuggggcaaguacgugcugaucaucgccggcgugcugaucgccaugauccugaccauccugcugaugaccugcugcggcagaggcaacagacccaagagcacccagcacagccugggcggcaucggcagaaaggugagcagcaccagccagagcggcaaggugaucagcagcugggagagcuacaagagcggcggcgagaccagacuguga

SEQ ID NO: 191844 - RNA, 1575 nt, Artificial Sequence
  derived and/or modified CDS sequence (opt4) from glycoprotein__RABV__KU198476.1
auggugccccaggcccugcuguucgugccccugcuggccuuccccaugugcuucggcaaguuccccaucuacaccauccccgacaagcugggccccuggagccccaucgacauccaccaccugagcugccccaacaaccuggugguggaggacgagggcugcaccaaccugagcggcuucagcuacauggagcugaaggugggcuacaucagcgccaucaaggugaacggcuucaccugcaccggcguggugaccgaggccgagaccuacaccaacuucgugggcuacgugaccaccaccuucaagagaaagcacuucagacccacccccgacgccugcagagccgccuacaacuggaagauggccggcgaccccagauacgaggagagccugcacaaccccuaccccgacuaccacuggcugagaaccgugaagaccaccaaggagagccugaucaucaucagccccagcguggccgaccuggaccccuacgacaagagccugcacagcagaguguuccccagcggcaagugccugggcaucaccaucagcagcaccuacugcagcaccaaccacgacuacaccaucuggaugcccgagaacgugagacugggcaccagcugcgacaucuucaccaacagcagaggcaagagagccagcaagggcagcaagaccugcggcuucguggacgagagaggccuguacaagagccugaagggcgccugcaagcugaagcugugcggcgugcugggccugagacugauggacggcaccuggguggccaugcccaccagcgacgagaccaaguggugcccccccgaccagcuggugaaccugcacgacuucagaagcgacgagaucgagcaccuggugguggaggagcuggugagaaagagagaggagugccuggacgcccuggagagcaucaugaccaccaagagcgugagcuucagaagacugagccaccugagaaagcuggugcccggcuucggcaaggccuacaccaucuucaacaagacccugauggaggccgacgcccacuacaagagcgugagaaccuggaacgagaucauccccagcaagggcugccugagagugggcggcagaugccacccccacgugaacggcguguucuucaacggcaucauccugggccccgacggccacgugcugauccccgagaugcagagcagccugcugcagcagcacauggagcugcuggagagcagcgugaucccccugaugcacccccuggccgaccccagcaccguguucaaggacggcgacgaggccgaggacuucguggaggugcaccugcccgacgugcacaagcagaucagcggcguggaccugggccugcccaacuggggcaaguacgugcugaucaucgccggcgugcugaucgccaugauccugaccaucuuccugaugaccugcugcggcagaggcaacagacugaagagcacccagcacagccugggcggcaucggcagaaaggugagcagcaccagccagagcggcaaggugaucagcagcugggagagcuacaagagcggcggcgagaccagacuguga

SEQ ID NO: 191845 - RNA, 1575 nt, Artificial Sequence; identical to SEQ ID NO: 191534
  derived and/or modified CDS sequence (opt4) from glycoprotein__RABV__KU198478.1

SEQ ID NO: 191846 - RNA, 1575 nt, Artificial Sequence
  derived and/or modified CDS sequence (opt4) from glycoprotein__RABV__KU198479.1
auggugccccaggcccugcuguucgugccccugcuggccuuccccaugugcuucggcaaguuccccaucuacaccauccccgacaagcugggccccuggagccccaucgacauccaccaccugagcugccccaacaaccuggugguggaggacgagggcugcaccaaccugagcggcuucagcuacauggagcugaaggugggcuacaucagcgccaucaaggugaacggcuucaccugcaccggcguggugaccgaggccgagaccuacaccaacuucgugggcuacgugaccaccaccuucaagagaaagcacuucagacccacccccgacgccugcagagccgccuacaacuggaagauggccggcgaccccagauacgaggagagccugcacaaccccuaccccgacuaccacuggcugagaaccgugaagaccgccaaggagagccugaucaucaucagccccagcguggccgaccuggaccccuacgacaagagccugcacagcagaguguuccccagcggcaagugccugggcaucaccaucagcagcaccuacugcagcaccaaccacgacuacaccaucuggaugcccgagaacgugagacugggcaccagcugcgacaucuucaccaacagcagaggcaagagagccagcaagggcagcaagaccugcggcuucguggacgagagaggccuguacaagagccugaagggcgccugcaagcugaagcugugcggcgugcugggccugagacugauggacggcaccugggugagcaugcccaccagcgacgagaccaaguggugcccccccgaccagcuggugaaccugcacgacuucagaagcgacgagaucgagcaccuggugguggaggagcuggugagaaagagagaggagugccuggacgcccuggagagcaucaugaccaccaagagcgugagcuucagaagacugagccaccugagaaagcuggugcccggcuucggcaaggccuacaccaucuucaacaagacccugauggaggccgacgcccacuacaagagcgugagaaccuggaacgagaucauccccagcaagggcugccugagagugggcggcagaugccacccccacaucaacggcguguucuucaacggcaucauccugggccccgacggccacgugcugauccccgagaugcagagcagccugcugcagcagcacauggagcugcuggagagcagcgugaucccccugaugcacccccuggccgaccccagcaccguguucaaggacggcgacgaggccgaggacuucguggaggugcaccugcccgacgugcacaagcagaucagcggcguggaccugggccugcccaacuggggcaaguacgugcugaucaucgccggcgugcugaucgccaugauccugaccaucuuccugaugaccugcugcggcagaggcaacagacccaagagcacccagcacagccugggcggcaucggcagaaaggugagcagcaccagccagagcggcaaggugaucagcagcugggagagcuacaagagcggcggcgagaccagacuguga

SEQ ID NO: 191847 - RNA, 1575 nt, Artificial Sequence; identical to SEQ ID NO: 191397
  derived and/or modified CDS sequence (opt4) from glycoprotein__RABV__KU534939.1

SEQ ID NO: 191848 - RNA, 1575 nt, Artificial Sequence
  derived and/or modified CDS sequence (opt4) from glycoprotein__RABV__KU534940.1
auggugccccaggugcugcuguucgugccccugcugguguucagcaugugcuucggcaaguuccccaucuacaccauccccgacaagcugggccccuggagccccaucgacauccaccaccugagcugccccaacaaccuggugguggaggacgagggcugcaccaaccugagcggcuucagcuacauggagcugaaggugggcuacaucagcgccaucaaggugaacggcuucaccugcaccggcguggugaccgaggccgagaccuacaccaacuucgugggcuacgugaccaccaccuucaagagaaagcacuucagacccacccccgacgccugcagagccgccuacaacuggaagauggccggcgaccccagauacgaggagagccugcacaaccccuaccccgacuaccacuggcugagaaccgugaagaccaccaaggagagccuggugaucaucagccccagcguggccgaccuggaccccuacgacaagagccugcacagcagaguguuccccagcggcaagugcagcggcaucaccaucagcagcaccuacugcagcaccaaccacgacuacaccaucuggaugcccgagaaccccagacugggcaccagcugcgacaucuucaccaacagcagaggcaagagagccagcaagggcggcaagaccugcggcuucguggacgagagaggccuguacaagagccugaagggcgccugcaagcugaagcugugcggcgugcugggccugagacugauggacggcaccuggguggccaugcagaccagcgacgagaccaaguggugcccccccgaccagcuggugaaccugcacgacuucagaagcgacgagaucgagcaccuggugguggaggagcuggugaagaagagagaggagugccuggacgcccuggagagcaucaugaccaccaagagcgugagcuucagaagacugagccaccugagaaagcuggugcccggcuucggcaaggccuacaccaucuucaacaagacccugauggaggccgacgcccacuacaagagcgugagaaccuggaacgagaucauccccagcaagggcugccugagagugggcggcagaugccacccccacgugaagggcguguucuucaacggcaucauccugggccccgacggccacgugcugauccccgagaugcagagcagccugcugcagcagcacauggagcugcuggagagcagcgugaucccccugaugcacccccuggccgaccccagcaccguguucaaggacggcgacgaggccgaggacuucguggaggugcaccugcccgacgugcacaagcagaucagcggcguggaccugggccugcccagcuggggcaaguacgugcuggccagcgccggcgugcugguggugcugaugcugaccaucuucaucaucaccugcugcggcagagugcacagacccaagagcacccagcacggccugggcggcaccggcagaaaggugagcgugaccagccagagcggcaaggugaucagcagcugggagagcuacaagagcggcggcgagaccagacuguga

SEQ ID NO: 191849 - RNA, 1575 nt, Artificial Sequence; identical to SEQ ID NO: 191398
  derived and/or modified CDS sequence (opt4) from glycoprotein__RABV__KU534941.1

SEQ ID NO: 191850 - RNA, 1575 nt, Artificial Sequence; identical to SEQ ID NO: 191184
  derived and/or modified CDS sequence (opt4) from glycoprotein__RABV__KU534942.1

SEQ ID NO: 191851 - RNA, 1575 nt, Artificial Sequence
  derived and/or modified CDS sequence (opt4) from glycoprotein__RABV__KU739036.1
auggugccccaggugcugugguucgugccccugcugguguucagcaugugcuucggcaaguuccccaucuacaccauccccgacaagcugggccccuggagccccaucgacauccaccaccugagcugccccaacaaccuggugguggaggacgagggcugcaccaaccugagcggcuucagcuacauggagcugaaggugggcuacaucagcgccaucaaggugaacggcuucaccugcaccggcguggugaccgaggccgagaccuacaccaacuucgugggcuacgugaccaccaccuucaagagaaagcacuucagacccacccccgacgccugcagagccgccuacaacuggaagauggccggcgaccccagauacgaggagagccugcacaaccccuaccccgacuaccacuggcugagaaccgugaagaccaccaaggagagccuggugaucaucagccccagcguggccgaccuggaccccuacgacaagagccugcacagcagaguguuccccagcggcaagugcagcggcaucaccaucagcagcaccuacugcagcaccaaccacgacuacaccaucuggaugcccgagaaccccagacugggcaccagcugcgacaucuucgccaacagcagaggcaagagagccagcaagggcagcaagaccugcggcuucguggacgagagaggccuguacaagagccugaagggcgccugcaagcugaagcugugcggcgugcugggccugagacugauggacggcaccuggguggccaugcagaccagcgacgagaccaaguggugcccccccgaccagcuggugaaccugcacgacuucagaagcgacgagaucgagcaccuggugguggaggagcuggugaagaagagagaggagugccuggacgcccuggagagcaucaugaccaccaagagcgugagcuucagaagacugagccaccugagaaagcuggugcccggcuucggcaaggccuacaccaucuucaacaagacccugauggaggccgacgcccacuacaagagcgugagaaccuggaacgagaucauccccagcaagggcugccugagagugggcggcagaugccacccccacgugaacggcguguucuucaacggcaucauccugggccccgacggccacgugcugauccccgagaugcagagcagccugcugcagcagcacauggagcugcuggagagcagcgugaucccccugaugcacccccuggccgaccccagcaccguguucaaggacggcgacgaggccgaggacuucguggaggugcaccugcccgacgugcacaagcagaucagcggcguggaccugggccugcccaacuggggcaaguacgugcuggugagcgccggcgugcugguggugcugaugcuggccaucuucaucaugaccugcugcggcagagugaacagacccaagagcacccagcacagccuggagggcaccggcagaaaggugagcgugaccagccagagcggcaaggugaucagcagcugggagagcuacaagagcggcggcgagaccagacuguga

SEQ ID NO: 191852 - RNA, 1575 nt, Artificial Sequence
  derived and/or modified CDS sequence (opt4) from glycoprotein__RABV__KU739037.1
auggugccccaggcccugcuguucgugccccugcugguguucccccugugcuucggcaaguuccccaucuacaccauccccgacaagcugggccccuggagccccaucgacauccaccaccugagcugccccaacaaccuggugguggaggacgagggcugcaccaaccugagcggcuucagcuacauggagcugaaggugggcuacaucagcgccaucaaggugaacggcuucaccugcaccggcguggugaccgaggccgagaccuacaccaacuucgugggcuacgugaccaccaccuucagaagaaagcacuucagacccacccccgacgccugcagagccgccuacaacuggaagauggccggcgaccccagauacgaggagagccugcacaaccccuaccccgacuaccacuggcugagaaccgugaagaccaccaaggagagccuggugaucaucagccccagcguggccgaccuggaccccuacgacaagagccugcacagcagaguguuccccggcggcaagugcagcggcaucaccgugagcagcaccuacugcagcaccaaccacgacuacaccaucuggcugcccgagaaccccagacugggcaccagcugcgacaucuucaccaacagcagaggcaagagagccagcaagggcagcaagaccugcggcuucguggacgagagaggccuguacaagagccugaagggcgccugcaagcugaagcugugcggcgugcugggccugagacugauggacggcaccuggguggccaugcagaccagcgacgagaccaaguggugcccccccgaccagcuggugaaccugcacgacuucagaagcgacgagaucgagcaccuggugguggaggagcuggugaagaagagagaggagugccuggacgcccuggagagcaucaugaccaccaagagcgugagcuucagaagacugagccaccugagaaagcuggugcccggcuucggcaaggccuacaccaucuucaacaagacccugauggaggccgacgcccacuacaagagcgugagaaccuggaacgagaucauccccagcaagggcugccugagagugggcggcagaugccaccaccacgugaacggcguguucuucaacggcaucauccugggccccgacggccacgugcugauccccgagaugcagagcagccugcugcagcagcacauggagcugcuggagagcagcgugaucccccugaugcacccccuggccgaccccagcaccguguucaaggacggcgacgaggccgaggacuucguggaggugcaccugcccgacgugcacaagcaggugagcggcguggaccugggccugcccaacuggggcaaguacgugcugcugagcgccggcgcccugaucgcccugaugcugaucaucuuccugaugaccugcugcagaagagugaacagacccgagagcacccagagaagcuucggcggcaccgagagagaggugagcaucaccccccagagcggcaaggugaucagcagcugggagagcuacaagagcggcggcgagaccagacuguga

SEQ ID NO: 191853 - RNA, 1575 nt, Artificial Sequence
  derived and/or modified CDS sequence (opt4) from glycoprotein__RABV__KU739038.1
auggugccccuggcccugcugguggugccccugcuggugcugagccugugcagcggcaaguuccccaucuacaccauccccgacaagcugggccccuggagccccaucgacauccaccaccugagcugccccaacaaccuggugguggaggacgagggcugcaccaaccugagcggcuucagcuacauggagcugaaggugggcuacaucagcgccaucaaggugaacggcuucaccugcaccggcguggugaccgaggccgagaccuacaccaacuucgugggcuacgugaccaccaccuucagaagaaagcacuucagacccacccccgacgccugcagagccgccuacaacuggaagauggccggcgaccccagauacgaggagagccugcacaaccccuaccccgacuaccacuggcugagaaccgugaagaccaccaaggagagccuggugaucaucagccccagcguggccgaccuggaccccuacgacagaagccugcacagcagaguguuccccaacggcaagugcagcggcaucaccgugagcagcaccuacugccccaccaaccacgacuacaccaucuggaugcccgagaaccccagacugggcaccagcugcgacaucuucgugaacagcagaggcaagagagccagcaagggcagcaagaccugcggcuucguggacgagagaggccuguacaagagccugaagggcgccugcaagcugaagcugugcggcgugcugggccugagacugauggacggcaccuggguggccaugagaaccagcgacgagaccaaguggugcccccccgaccagcuggugaacauccacgacuucagaagcgacgagaucgagcaccuggugguggaggagcuggugaagaagagagaggagugccuggacgcccuggagagcaucaugaccaccaagagcgugagcuucagaagacugagccaccugagaaagcuggugcccggcuucggcaaggccuacaccaucuucaacaagacccugauggaggccgacgcccacuacaagagcgugagaaccugggacgagaucauccccagcaagggcugccugagagugggcggcagaugccacccccacgugcacggcguguucuucaacggcaucauccugggccccgacggccacgugcugauccccgagaugcagagcagccugcugcagcagcacauggagcugcuggagagcagcgugaucccccugaugcacccccuggccgaccccagcaccguguucaaggacggcgacgaggccgaggacuucguggaggugcaccugcccgacgugcacaagcagaucagcggcguggaccugggccugcccaacuggggcaaguacgugcugaugagcgccggcgcccugaucgcccugaugcugaucaucuuccugaugaccugcugcagaaagaucaagcagcccgagagcacccagcacagccugagaggcaccggcagaaaggugagcgugaccagccagaacggcaaggugaucagcagcugggagagcuacaagagcggcggcgagaccagacuguga

SEQ ID NO: 191854 - RNA, 1575 nt, Artificial Sequence
  derived and/or modified CDS sequence (opt4) from glycoprotein__RABV__KU739043.1
auggugccccugacccugcugguggugccccugcuggugcugagccugugcagcggcaaguuccccaucuacaccauccccgacaagcugggccccuggagccccaucgacauccaccaccugagcugccccaacaaccuggugguggaggacgagggcugcaccaaccugagcggcuucagcuacauggagcugaaggugggcuacaucagcgccaucaaggugaacggcuucaccugcaccggcguggugaccgaggccgagaccuacaccaacuucgugggcuacgugaccaccaccuucagaagaaagcacuucagacccacccccgacgccugcagaaccgccuacaacuggaagauggccggcgaccccagauacgaggagagccugcacaaccccuaccccgacuaccacuggcugagaaccgugaagaccaccaaggagagccuggugaucaucagccccagcguggccgaccuggaccccuacgacagaagccugcacagcagaguguuccccaacggcaagugcagcggcaucaccgugagcagcaccuacugccccaccaaccacgacuacaccaucuggaugcccgagaaccccagacugggcaccagcugcgacaucuucgugaacagcagaggcaagagagccagcaagggcagcaagaccugcggcuucguggacgagagaggccuguacaagagccugaagggcgccugcaagcugaagcugugcggcgugcugggccugagacugauggacggcaccuggguggccaugagaaccagcgacgagaccaaguggugcccccccgaccagcuggugaacauccacgacuuccacagcgacgagaucgagcaccuggugguggaggagcuggugaagaagagagaggagugccuggacgcccuggagagcaucaugaccaccaagagcgugagcuucagaagacugagccaccugagaaagcuggugcccggcuucggcaaggccuacaccaucuucaacaagacccugauggaggccgacgcccacuacaagagcgugagaaccugggacgagaucauccccagcaagggcugccugagagugggcggcagaugccacccccacgugcacggcguguucuucaacggcaucauccugggccccgacggccacgugcugauccccgagaugcagagcagccugcugcagcagcacauggagcugcuggagagcagcgugaucccccugaugcacccccuggccgaccccagcaccguguucaaggacggcgacgaggccgaggacuucguggaggugcaccugcccgacgugcacaagcagaucagcggcguggaccugggccugcccaacuggggcaaguacgugcugaugagcgccggcgcccugaucgcccugaugcugaucaucuuccugaugaccugcugcagaaagaucaagagacccgagagcacccagcacagccccagaggcaccggcagaaaggugagcgugaccagccagaacggcaaggugaucagcagcugggagagcuacaagagcggcggcgagaccagacuguga

SEQ ID NO: 191855 - RNA, 1575 nt, Artificial Sequence
  derived and/or modified CDS sequence (opt4) from glycoprotein__RABV__KU739044.1
auggugccccaggcccugcuguucgugccccugcugguguucagccugugcuucggcaaguuccccaucuacaccauccccgacaagcugggccccuggagccccaucgacauccaccaccugagcugccccaacaaccuggugguggaggacgagggcugcaccaaccugagcggcuucagcuacauggagcugaaggugggcuacaucagcgccaucaaggugaacggcuucaccugcaccggcguggugaccgaggccgagaccuacaccaacuucgugggcuacgugaccaccaccuucaagagaaagcacuucagacccacccccgacgccugcagagccgccuacaacuggaagauggccggcgaccccagauacgaggagagccugcacaaccccuaccccgacuaccacuggcugagaaccgugaagaccaccaaggagagccuggugaucaucagccccagcguggccgaccuggaccccuacgacaagagccugcacagcagaguguuccccagcggcaagugcagcggcaucaccgugagcagcaccuacugcagcaccaaccacgacuacaccaucuggaugcccgagaaccccagacugggcaccagcugcgacaucuucaccaacagcagaggcaagagagccagcaagggcagcaagaccugcggcuucguggacgagagaggccuguacaagagccugaagggcgccugcaagcugaagcugugcggcgugcugggccugagacugauggacggcaccuggguggccaugcagaccagcgacgagaccaaguggugcccccccgaccagcuggugaaccugcacgacuucagaagcgacgagaucgagcaccuggugguggaggagcuggugaagaagagagaggagugccuggacgcccuggagagcaucaugaccaccaagagcgugagcuucagaagacugagccaccugagaaagcuggugcccggcuucggcaaggccuacaccaucuucaacaagacccugauggaggccgacgcccacuacaagagcgugagaaccuggaacgagaucauccccagcaagggcugccugagagugggcggcagaugccacccccacgugaacggcguguucuucaacggcaucauccugggccccgacggccacgugcugauccccgagaugcagagcagccugcugcagcagcacauggagcugcuggagagcagcgugaucccccugaugcacccccuggccgaccccagcaccguguucaaggacggcgacgaggccgaggacuucguggaggugcaccugcccgacgugcacaagcaggugagcggcguggaccugggccugcccaacuggggcaaguacgugcugcugagcgccggcacccugaucgcccugaugcugaucaucuuccugaugaccugcugcagaagagugaacagacccaagagcacccagagaggccccggcgagaccggcagaaaggugagcgugaccagccagagcggcaaggugaucagcagcugggagagcuacaagagcggcggcgagaccagacuguga

SEQ ID NO: 191856 - RNA, 1575 nt, Artificial Sequence; identical to SEQ ID NO: 190615
  derived and/or modified CDS sequence (opt4) from glycoprotein__RABV__KU739045.1

SEQ ID NO: 191857 - RNA, 1575 nt, Artificial Sequence; identical to SEQ ID NO: 191747
  derived and/or modified CDS sequence (opt4) from glycoprotein__RABV__KU739047.1

SEQ ID NO: 191858 - RNA, 1575 nt, Artificial Sequence
  derived and/or modified CDS sequence (opt4) from glycoprotein__RABV__KU739048.1
auggugccccaggcccugcuguucgugccccugcugggcuucagccugugcuucggcaaguuccccaucuacaccauccccgacaagcugggccccuggagccccaucgacauccaccaccugagcugccccaacaaccuggugguggaggacgagggcugcaccaaccugagcggcuucagcuacauggagcugaaggugggcuacaucagcgccaucaaggugaacggcuucaccugcaccggcguggugaccgaggccgagaccuacaccaacuucgugggcuacgugaccaccaccuucaagagaaagcacuucagacccacccccgacgccugcagagccgccuacaacuggaagauggccggcgaccccagauacgaggagagccugcacaaccccuaccccgacuaccacuggcugagaaccgugaagaccaccaaggagagccuggugaucaucagccccagcguggccgaccuggaccccuacgacaagagccugcacagcagaguguuccccggcggcaagugcagcggcaucaccgugagcagcaccuacugcagcaccaaccacgacuacaccaucuggcugcccgagaaccccagacugggcaccagcugcgacaucuucaccaacagcagaggcaagagagccagcaagggcagcaagaccugcggcuucguggacgagagaggccuguacaagagccugaagggcgccugcaagcugaagcugugcggcgugcugggccugagacugauggacggcaccuggguggccaugcagaccagcgacgagaccaaguggugcagccccgaccagcuggugaaccugcacgacuucagaagcgacgagaucgagcaccuggugguggaggagcuggugaagaagagagaggagugccuggacacccuggagagcaucaugaccaccaagagcgugagcuucagaagacugagccaccugagaaagcuggugcccggcuucggcaaggccuacaccaucuucaacaagacccugauggaggccgacgcccacuacaagagcgugagaaccuggaacgagaucauccccagcaagggcugccugagagugggcggcagaugccaccaccacgugaacggcguguucuucaacggcaucauccugggccccgacggccacgugcugauccccgagaugcagagcagccugcugcagcagcacauggagcugcuggagagcagcgugaucccccugaugcacccccuggccgaccccagcaccguguucaaggacggcgacgaggccgaggacuucguggaggugcaccugcccgacgugcacaagcaggugagcggcguggaccugggccugcccaacuggggcaaguacgugcugcugagcgccggcgcccugguggcccugaugcugaucaucuuccugaugaccugcugcagaagagugaacagacccgagagcacccagagaagcuucggcggcaccgagagaaaggugagcaucaccccccagagcggcaaggugaucagcagcugggagagcuacaagagcggcagcgagaccagacuguga

SEQ ID NO: 191859 - RNA, 1575 nt, Artificial Sequence
  derived and/or modified CDS sequence (opt4) from glycoprotein__RABV__KU739049.1
auggugccccaggcccugcugcuggugccccugcugggcuucagccugugcuucggcaaguuccccaucuacaccauccccgacaagcugggccccuggagccccaucgacauccaccaccugagcugccccaacaaccuggugguggaggacgagggcugcaccaaccugagcggcuucagcuacauggagcugaaggugggcuacaucagcagcaucaaggugaacggcuucaccugcaccggcguggugaccgaggccgagaccuacaccaacuucgugggcuacgugaccaccaccuucagaagaaagcacuucagacccacccccgacgccugcagagccgccuacaacuggaagauggccggcgaccccagauacgaggagagccugcacaaccccuaccccgacuaccacuggcugagaaccgugaagaccaccaaggagagccuggugaucaucagccccagcguggccgaccuggaccccuacgacaagagccugcacagcagaguguuccccagcggcaagugcagcggcaucaccgugagcagcaccuacugcagcaccaaccacgacuacaccaucuggaugcccgagaaccugagacugggcaccagcugcgacaucuucaccaacagcagaggcaagagagccagcaagggcagcaagaccugcggcuucguggacgagagaggccuguacaagagccugaagggcgccugcaagcugaagcugugcggcgugcugggccugagacugauggacggcaccuggguggccaugcagaccagcgacgagaccaaguggugcccccccgaccagcuggugaaccugcacgacuucagaagcgacgagaucgagcaccuggugguggaggagcuggugaagaagagagaggagugccuggacgcccuggagagcaucaugaccaccaagagcgugagcuucagaagacugagccaccugagaaagcuggugcccggcuucggcaaggccuacaccaucuucaacaagacccugauggaggccgacgcccacuacaagagcgugagaaccuggaacgaggugauccccagcagaggcugccugagagugggcggcagaugccacccccacgugaacggcguguucuucaacggcaucauccugggccccgacggccacgugcugauccccgagaugcagagcagccugcugcagcagcacaucgagcugcuggagagcagcgugaucccccugacccacccccuggccgaccccagcaccguguucaaggacggcgacgaggccgaggacuucguggaggugcaccugcccgacgugcacaagcaggugagcggcguggaccugggccugcccaacuggggcaaguacgugcugcugagcgccggcgcccugaucgcccugaugcugaucaucuuccugaucaccugcugcagaagagugaacagacccgagagcacccagagaagccugagaggcgccggcagaaaggugagcaucaccagccagagcggcaaggugaucagcagcugggagagcuacaagagcggcggcgagaccagacuguga

SEQ ID NO: 191860 - RNA, 1575 nt, Artificial Sequence
  derived and/or modified CDS sequence (opt4) from glycoprotein__RABV__KU739050.1
auggugccccaggcccugcuguucgugccccugcugguguucagccugugcuucggcaaguuccccaucuacaccauccccgacaagcugggccccuggagccccaucgacauccaccaccugagcugccccaacaaccuggugguggaggacgagggcugcaccaaccugagcggcuucagcuacauggagcugaaggugggcuacaucagcgccaucaaggugaacggcuucaccugcaccggcguggugaccgaggccgagaccuacaccaacuucgugggcuacgugaccaccaccuucagaagaaagcacuucagacccacccccgacgccugcagagccgccuacaacuggaagauggccggcgaccccagauacgaggagagccugcacaaccccuaccccgacuaccacuggcugagaaccgugaagaccaccaaggagagccuggugaucaucagccccagcguggccgaccuggaccccuacgacaagagccugcacagcagaguguuccccagcggcaagugcagcggcaucaccgugagcagcaccuacugcagcaccaaccacgacuacaccaucuggaugcccgagaaccccagacugggcaccagcugcgacaucuucaccaacagcagaggcaagagagccagcaagggcagcaagaccugcggcuucguggacgagagaggccuguacaagagccugaagggcgccugcaagcugaagcugugcggcgugcugggccugagacugauggacggcaccuggguggccaugcagaccaccgacgagaccaaguggugcccccccgaccagcuggugaaccugcacgacuucagaagcgacgagaucgagcaccuggugguggaggagcuggugaagaagagagaggagugccuggacgcccuggagagcaucaugaccaccaagagcgugagcuucagaagacugagccaccugagaaagcuggugcccggcuucggcaaggccuacaccaucuucaacaagacccugauggaggccgacgcccacuacaagagcgugagaaccuggaacgagaucauccccagcaagggcugccugagagugggcggcagaugccacccccacgugaacggcguguucuucaacggcaucauccugggccccgacggccacgugcugauccccgagaugcagagcagccugcugcagcagcacauggagcugcuggagagcagcgugaucccccugaugcacccccuggccgaccccagcaccguguucaaggacggcgacgaggccgaggacuucguggaggugcaccugcccgacgugcacaagcaggugagcggcguggaccugggccugcccaacuggggcaaguacgugcugcugagcgccggcacccugaucgcccugaugcugaucaucuuccugaugaccugcugcagaagagugaacagacccgagagcaugcagagaagccugggcgagaccggcagaaaggugagcgugaccagccagagcggcaaggugaucagcagcugggagagcuacaagagcggcggcgagaccagacuguga

SEQ ID NO: 191861 - RNA, 1575 nt, Artificial Sequence
  derived and/or modified CDS sequence (opt4) from glycoprotein__RABV__KU888637.1
auggugccccaggcccugcuguucgugccccugcugguguucagccugugcuucggcaaguuccccaucuacaccauccccgacaagcugggccccuggagccccaucgacauccaccaccugagcugccccaacaaccuggugguggaggacgagggcugcaccaaccugagcggcuucagcuacauggagcugaaggugggcuacaucagcgccaucaaggugaacggcuucaccugcaccggcguggugaccgaggccgagaccuacaccaacuucgugggcuacgugaccaccaccuucaagagaaagcacuucagacccacccccgacgccugcagagccgccuacaacuggaagauggccggcgaccccagauacgaggagagccugcacaaccccuaccccgacuaccacuggcugagaaccgugaagaccaccaaggagagccuggugaucaucagccccagcguggccgaccuggaccccuacgacaagagccugcacagcagaguguuccccagcggcaagugcagcggcaucaccgugagcagcaccuacugcagcaccaaccacgacuacaccaucuggaugcccgagaaccccagacugggcaccagcugcgacaucuucgccaacagcagaggcaagagagccagcaagggcagcaagaccugcggcuucguggacgagagaggccuguacaagagccugaagggcgccugcaagcugaagcugugcggcgugcugggccugagacugauggacggcaccuggguggccaugcagaccagcgacgagaccaaguggugcccccccgaccagcuggugaaccugcacgacuucagaagcgacgagaucgagcaccuggugguggaggagcuggugaagaagagagaggagugccuggacgcccuggagagcaucaugaccaccaagagcgugagcuucagaagacugagccaccugagaaagcuggugcccggcuucggcaaggccuacaccaucuucaacaagacccugauggaggccgacgcccacuacaagagcgugagaaccuggaacgagaucauccccagcaagggcugccugagagugggcggcagaugccacccccacgugaacggcguguucuucaacggcaucauccugggccccgacggccacgugcugauccccgagaugcagagcagccugcugcagcagcacauggagcugcuggagagcagcgugaucccccugaugcacccccuggccgaccccagcaccguguucaaggacggcgacgaggccgaggacuucguggaggugcaccugcccgacgugcacaagcaggugagcggcguggaccugggccugcccggcuggggcaaguacgugcugcugagcgccggcgcccugaucgcccugaugcugaucaucuuccugaugaccugcugcagaagagugaacagacccgagagcacccagagaagccugggcggcaccggcagaaaggugagcaucaccagccagagcggcaaggugaucagcagcugggagagcuacaagagcggcggcgagaccagacuguga

SEQ ID NO: 191862 - RNA, 1575 nt, Artificial Sequence; identical to SEQ ID NO: 191398
  derived and/or modified CDS sequence (opt4) from glycoprotein__RABV__KU888639.1

SEQ ID NO: 191863 - RNA, 1575 nt, Artificial Sequence
  derived and/or modified CDS sequence (opt4) from glycoprotein__RABV__KU888640.1
auggugccccaggcccugcuguucgugccccugcugggcuucagccugugcuucggcaaguuccccaucuacaccauccccgacaagcugggccccuggagccccaucgacauccaccaccugagcugccccaacaaccuggugguggaggacgagggcugcaccaaccugagcggcuucagcuacauggagcugaaggugggcuacaucagcgccaucaaggugaacggcuucaccugcaccggcguggugaccgaggccgagaccuacaccaacuucgugggcuacgugaccaccaccuucaagagaaagcacuucagacccacccccgacgccugcagagccgccuacaacuggaagauggccggcgaccccagauacgaggagagccugcacaaccccuaccccgacuaccacuggcugagaaccgugaagaccaccaaggagagccuggugaucaucagccccagcguggccgaccuggaccccuacgacaagagccugcacagcagaguguuccccagcggcaagugcagcggcaucaccgugagcagcaccuacugccccaccaaccacgacuacaccaucuggaugcccgagaaccccagacugggcaccagcugcgacaucuucaccagcagcaagggcaagagagccagcaagggcagcaagaccugcggcuucguggacgagagaggccuguacaagagccugaagggcgccugcaagcugaagcugugcggcgugcugggccugagacugauggacggcaccuggguggccaugcagaccagcgacgagaccaaguggugcccccccgaccagcuggugaaccugcacgacuucagaagcgacgagaucgagcaccuggugguggaggagcuggugaagaagagagaggagugccuggacgcccuggagagcaucaugaccaccaagagcgugagcuucagaagacugagccaccugagaaagcuggugcccggcuucggcaaggccuacaccaucuucaacaagacccugauggaggccgacgcccacuacaagagcgugagaaccuggaacgagaucauccccagcaagggcugccugagaaucggcggcagaugccacccccacgugaacggcguguucuucaacggcaucauccugggccccgacggccacgugcugauccccgagaugcagagcagccugcugcagcagcacauggagcugcuggagagcagcgugaucccccugaugcacccccuggccgaccccagcaccgugcugaaggacggcgacgaggccgaggacuucguggaggugcaccugcccgacgugcacaagcagaucagcggcguggaccugggccugcccaacuggggcaaguacgugcugcugagcgccggcgcccugaucgcccugaugcugaucaucuuccugaugaccugcugcagaagagugaacagacaggagagcacccagagaagccugggcggcaccggcagaaaggugagcaucaccagccagagcggcaaggugaucagcagcugggagagcuacaagagcggcggcgagaccagacuguga

SEQ ID NO: 191864 - RNA, 1575 nt, Artificial Sequence
  derived and/or modified CDS sequence (opt4) from glycoprotein__RABV__KU888641.1
auggugccccaggcccugcuggugaucccccugcugggcuucagccugugcuucggcaaguuccccaucuacaccauccccgacaagcugggccccuggagccccaucgacauccaccaccugagcugccccaacaaccugaucguggaggacgagggcugcaccaaccugagcggcuucagcuacauggagcugaaggugggcuacaucagcgccaucaaggugaacggcuucaccugcaccggcguggugaccgaggccgagaccuacaccaacuucgugggcuacgugaccaccaccuucaagagaaagcacuucagacccacccccgacgagugcagagccgccuacaacuggaagauggccggcgaccccagauacgaggagagccugcacaaccccuaccccgacuaccacuggcugagaaccgugaagaccaccaaggagagccuggugaucaucagccccagcguggccgaccuggaccccuacgacaagagccugcacagcagaguguuccccagcggcaagugcagcggcaucaccgugagcagcaccuacugcagcaccaaccacgacuacaccaucuggaugcccgagaaccccagacugggcaccagcugcgacaucuucaccaacagcagaggcaagagagccagcaagggcagcaagaccugcggcuucguggacgagagaggccuguacaagagccugaagggcgccugcaagcugaagcugugcggcgugcugggccugaagcugauggacggcaccuggguggccaugcaggccagcgacgagaccaaguggugcccccccgaccagcuggugaaccugcacgaccugagaagcgacgagaucgagcaccuggugguggaggagcuggugaagaagagagaggagugccuggacgcccuggagagcaucaugaccaccaagagcgugagcuucagaagacugagccaccugagaaagcuggugcccggcuucggcaaggccuacaccaucuucaacaagacccugauggaggccgacgcccacuacaagagcgugagaaccuggaacgagaucauccccagcaagggcugccugaaggugggcggcagaugccacccccacgugaacggcguguucuucaacggcgugauccugggccccgacggccacgugcugauccccgagaugcagagcagccugcugcagcagcacauggagcugcuggagagcagcgugaucccccugaugcacccccuggccgaccccagcaccguguucaaggacggcgaggaggccgaggacuucguggaggugcaccugcccgacgugcacaagcaggugagcggcguggaccugggccugcccaacuggggcaaguacgugagccugggcgccggcgcccugaucgcccugaugcugaccauccugcugaucaccugcugcagaagagugaacagacccgagcccaccagaagaagccuggagggcaaggagagaaaggugagcgugaccagccagagcggcaaggugaucagcagcugggagagcuacaagagcggcggcgagaccagacuguga

SEQ ID NO: 191865 - RNA, 1575 nt, Artificial Sequence
  derived and/or modified CDS sequence (opt4) from glycoprotein__RABV__KU888642.1
auggugccccaggcccugcuguucgugccccugcugggcuucagccugugcuucggcaaguuccccaucuacaccauccccgacaagcugggccccuggagccccaucgacauccaccaccugagcugccccaacaaccuggugguggaggacgagggcugcaccaaccugagcggcuucagcuacauggagcugaaggugggcuacaucagcgccaucaaggugaacggcuucaccugcaccggcguggugaccgaggccgagaccuacaccaacuucgugggcuacgugaccaccaccuucaagagaaagcacuucagacccacccccgacgccugcagagccgccuacaacuggaagauggccggcgaccccagauacgaggagagccugcacaaccccuaccccgacuaccacuggcugagaaccgugaagaccaccaaggagagccuggugaucaucagccccagcguggccgaccuggaccccuacgacaagagccugcacagcagaguguuccccagcggcaagugcagcggcaucaccgugagcagcaccuacugcagcaccaaccacgacuacaccaucuggaugcccgagaaccccagacugggcaccagcugcgacaucuucaccaacagcaagggcaagagagccagcaagggcagcaagaccugcggcuucguggacgagagaggccuguacaagagccugaagggcgccugcaagcugaagcugugcggcgugcugggccugagacugauggacggcaccuggguggccaugcagaccagcgacgagaccaaguggugcccccccgaccagcuggugaaccugcacgacuucagaagcgacgagaucgagcaccuggugguggaggagcuggugaagaagagagaggagugccuggacgcccuggagagcaucaugaccaccaagagcgugagcuucagaagacugagccaccugagaaagcuggugcccggcuucggcaaggccuacaccaucuucaacaagacccugauggaggccgacgcccacuacaagagcgugagaaccuggaacgagaucauccccagcaagggcugccugagagugggcggcagaugccacccccacgugaacggcguguucuucaacggcaucauccugggccccgacggccacgugcugauccccgagaugcagagcagccugcugcagcagcacauggagcugcuggagagcagcgugaucccccugaugcacccccuggccgaccccagcaccgugcugaaggacagcgacgaggccgaggacuucguggaggugcaccugcccgacgugcacaagcagaucagcggcguggaccugggccugcccaacuggggcaaguacgugcugcugagcgccggcgcccugaucgcccugaugcugaucaucuuccugaugaccugcugcagaagagugaacagacaggagagcacccagagaagccugggcggcaccggcagaaaggugagcaucaccagccagagcggcaaggugaucagcagcugggagagcuacaagagcggcggcgagaccagacuguga

SEQ ID NO: 191866 - RNA, 1575 nt, Artificial Sequence; identical to SEQ ID NO: 190905
  derived and/or modified CDS sequence (opt4) from glycoprotein__RABV__KU888643.1

SEQ ID NO: 191867 - RNA, 1575 nt, Artificial Sequence
  derived and/or modified CDS sequence (opt4) from glycoprotein__RABV__KU946961.1
augaucccccaggcccugcuguucgugccccugcugguguucccccugugcuucggcaaguuccccaucuacaccauccccgacaagcugggccccuggagccccaucgacauccaccaccugagcugccccaacaaccuggugguggaggacgagggcugcaccaaccugagcggcuucagcuacauggagcugaaggugggcuacaucagcgccaucaaggugaacggcuucaccugcaccggcguggugaccgaggccgagaccuacaccaacuucgugggcuacgugaccaccaccuucaagagaaagcacuucagacccacccccgacgccugcagaagcgccuacaacuggaagauggccggcgaccccagauacgaggagagccugcacaaccccuaccccgacuaccacuggcugagaaccgugaagaccaccaaggagagcguggugaucaucagccccagcguggccgaccuggaccccuacgacaagagccugcacagcagaguguuccccagaggcaagugcagcggcaucaccgugagcagcgccuacugcagcaccaaccacgacuacaccaucuggaugcccgagaaccccagacugggcaccagcugcgacaucuucaccaacagcagaggcaagagagccagcaagggcagcaagaccugcggcuucguggacgagagaggccuguacaagagccugaagggcgccugcaagcugaagcugugcggcgugcugggccugagacugauggacggcaccuggguggccauccagaccagcaacgagaccaaguggugcccccccgaccagcuggugaaccugcacgacuuccacagcgacgagaucgagcaccuggugguggaggagguggugaagaagagagaggagugccuggacgcccuggagagcaucaugaccaccaagagcgugagcuucagaagacugagccaccugagaaagcuggugcccggcuucggcaaggccuacaccaucuucaacaagacccugauggaggccgacgcccacuacaagagcgugcagaccugggacgagaucauccccagcaagggcugccugagagugggcggcagaugccacccccacgugaacggcguguucuucaacggcaucauccugggccccgacggccacgugcugauccccgagaugcagagcagccugcugcagcagcacauggagcugcugaagagcagcgugaucccccugaugcacccccuggccgaccccagcaccguguucaaggacggcgacgagguggaggacuucguggaggugcaccugcccgacgugcacaagcaggugagcggcguggaccugggccugcccaacuggggcaaggacgugcugaugggcgccggcgugcugaccgcccugaugcugaugaucuuccugaugaccugcugcagaagaaccaacagagccgagagcauccagcacagccugggcgagaccggcagaaaggugagcgugaccagccagagcggcagagugaucagcagcugggagagcuacaagagcggcggcgagaccaagcuguga

SEQ ID NO: 191868 - RNA, 1575 nt, Artificial Sequence; identical to SEQ ID NO: 191534
  derived and/or modified CDS sequence (opt4) from glycoprotein__RABV__KX036361.1

SEQ ID NO: 191869 - RNA, 1575 nt, Artificial Sequence
  derived and/or modified CDS sequence (opt4) from glycoprotein__RABV__KX036363.1
auggugccccaggcccugcuguucgugccccugcuggccuuccccaugugcuucggcaaguuccccaucuacaccauccccgacaagcugggccccuggagccccaucgacauccaccaccugagcugccccaacaaccuggugguggaggacgagggcugcaccaaccugagcggcuucagcuacauggagcugaaggugggcuacaucagcgccaucaaggugaacggcuucaccugcaccggcguggugaccgaggccgagaccuacaccaacuucgugggcuacgugaccaccaccuucaagagaaagcacuucagacccacccccgacgccugcagagccgccuacaacuggaagauggccggcgaccccagauacgaggagagccugcacaaccccuaccccgacuaccacuggcugagaaccgugaagaccaccaaggagagccugaucaucaucagccccagcguggccgaccuggaccccuacgacaagagccugcacagcagaguguuccccagcggcaagugccugggcaucaccaucagcagcaccuacugcagcaccaaccacgacuacaccaucuggaugcccgagaacgugagacugggcaccagcugcgacaucuucaccaacagcagaggcaagagagccagcaagggcagcaagaccugcggcuucguggacgagagaggccuguacaagagccugaagggcgccugcaagcugaagcugugcggcgugcugggccugagacugauggacggcaccuggguggccaugcccaccagcgacgagaccaaguggugcccccccgaccagcuggugaaccugcacgacuucagaagcgacgagaucgagcaccuggugguggaggagcuggugagaaagagagaggagugccuggacgcccuggagagcaucaugaccaccaagagcgugagcuucagaagacugagccaccugagaaagcuggugcccggcuucggcaaggccuacaccaucuucaacaagacccugauggaggccgacgcccacuacaagagcgugagaaccuggaacgagaucauccccagcaagggcugccugagagugggcggcagaugccacccccacgugaacggcguguucuucaacggcaucauccugggccccgacggccacgugcugauccccgagaugcagagcagccugcugcagcagcacauggagcugcuggagagcagcgugaucccccugaugcacccccuggccgaccccagcaccguguucaaggacggcgacgaggccgaggacuucguggaggugcaccugcccgacgugcacaagcagaucagcggcguggaccugggccugcccaacuggggcaaguacgugcugaucaucgccggcgugcugaucgccaugauccugaccaucuuccugaugaccugcugcggcagaggcaacagacccaagagcaagcagcacagccugggcggcaucggcagaaaggugagcagcaccagccagagcggcaaggugaucagcagcugggagagcuacaagagcggcggcgagaccagacuguga

SEQ ID NO: 191870 - RNA, 1575 nt, Artificial Sequence; identical to SEQ ID NO: 191869
  derived and/or modified CDS sequence (opt4) from glycoprotein__RABV__KX036364.1

SEQ ID NO: 191871 - RNA, 1575 nt, Artificial Sequence; identical to SEQ ID NO: 191869
  derived and/or modified CDS sequence (opt4) from glycoprotein__RABV__KX036365.1

SEQ ID NO: 191872 - RNA, 1575 nt, Artificial Sequence
  derived and/or modified CDS sequence (opt4) from glycoprotein__RABV__KX036366.1
auggugccccaggcccugcuguucgugccccugauggccuuccccaugugcuucggcaaguuccccaucuacaccauccccgacaagcugggccccuggagccccaucgacauccaccaccugagcugccccaacaaccuggugguggaggacgagggcugcaccaaccugagcggcuucagcuacauggagcugaaggugggcuacaucagcgccaucaaggugaacggcuucaccugcaccggcguggugaccgaggccgagaccuacaccaacuucgugggcuacgugaccaccaccuucaagagaaagcacuucagacccacccccgacgccugcagagccgccuacaacuggaagauggccggcgaccccagauacgaggagagccugcacaaccccuaccccgacuaccacuggcugagaaccgugaagaccaccaaggagagccugaucaucaucagccccagcguggccgaccuggaccccuacgacaagagccugcacagcagaguguuccccagcggcaagugccugggcaucaccaucagcagcaccuacugcagcaccaaccacgacuacaccaucuggaugcccgacaacgugagacugggcaccagcugcgacaucuucaccaacagcagaggcaagagagccagcaagggcagcaagaccugcggcuucguggacgagagaggccuguacaagagccugaagggcgccugcaagcugaagcugugcggcgugcugggccugagacugauggacggcaccuggguggccaugcccaccagcgacgagaccaaguggugcccccccgaccagcuggugaaccugcacgacuucagacuggacgagaucgagcaccuggugguggaggagcuggugagaaagagagaggagugccuggacgcccuggagagcaucgugaccaccaagagcgugagcuucagaagacugagccaccugagaaagcuggugcccggcuucggcaaggccuacaccaucuucaacaagacccugauggaggccgacgcccacuacaagagcgugagaaccuggaacgagaucauccccagcaagggcugccugagagugggcggcagaugccacccccacgugaacggcguguucuucaacggcaucauccugggccccgacggccacgugcugauccccgagaugcagagcagccugcugcagcagcacauggagcugcuggagagcagcgugaucccccugaugcacccccuggccgaccccagcaccguguucaaggacggcgacgaggccgaggacuucguggaggugcaccugcccgacgugcacaagcagaucagcggcguggaccugggccugcccaacuggggcaaguacgugcugaucaucgccggcgugcugaucgccaugauccugaccaucuuccugaugaccugcugcggcagaggcaacagacccaagagcacccagcacagccugggcggcaucggcagaaaggugagcagcaccagccagagcggcaaggugaucagcagcugggagagcuacaagagcggcggcgagaccagacuguga

SEQ ID NO: 191873 - RNA, 1575 nt, Artificial Sequence
  derived and/or modified CDS sequence (opt4) from glycoprotein__RABV__KX036367.1
auggugccccaggcccugcuguucgugccccugcuggccuuccccaugugcuucggcaaguuccccaucuacaccauccccgacaagcugggccccuggagccccaucgacauccaccaccugagcugccccaacaaccuggugguggaggacgagggcugcaccaaccugagcggcuucagcuacauggagcugaaggugggcuacaucagcgccaucaaggugaacggcuucaccugcaccggcguggugaccgaggccgagaccuacaccaacuucgugggcuacgugaccaccaccuucaagagaaagcacuucagacccacccccgacgccugcagagccgccuacaacuggaagauggccggcgaccccagauacgaggagagccugcacaaccccuaccccgacuaccacuggcugagaaccgugaagaccaccaaggagagccugaucaucaucagccccagcguggccgaccuggaccccuacgacaagagccugcacagcagaguguuccccagcggcaagugccugggcaucaccaucagcagcaccuacugcagcaccaaccacgacuacaccaucuggaugcccgagaacgugagacugggcaccagcugcgacaucuucaccaacagcagaggcaagagagccagcaagggcagcaagaccugcggcuucguggacgagagaggccuguacaagagccugaagggcgccugcaagcugaagcugugcggcgugcugggccugagacugauggacggcaccuggguggccaugcccaccagcgacgagaccaaguggugcccccccgaccagcuggugaaccugcacgacuucagaagcgacgagaucgagcaccuggugguggaggagcuggugagaaagagagaggagugccuggacgcccuggagagcaucaugaccaccaagagcgugagcuucagaagacugagccaccugagaaagcuggugcccggcuucggcaaggccuacaccaucuucaacaagacccugauggaggccgacgcccacuacaagagcgugagaaccuggaacgagaucauccccagcaagggcugccugagagugggcggcagaugccacccccacgugaacggcguguucuucaacggcaucauccugggccccgacggccacgugcugauccccgagaugcagagcagccugcugcagcagcacauggagcugcuggagagcagcgugaucccccugaugcacccccuggccgaccccagcaccguguucaaggacggcgacgaggccgaggacuucguggaggugcaccugcccgacgugcacaagcagaucagcggcguggaccugggccugcccaacuggggcaaguacgugcugaucaucgccggcgugcugaucgccaugauccugaccaucuuccugaugaccugcugcggcagaggcaacagacccaugagcaagcagcacagccugggcggcaucggcagaaaggugagcagcaccagccagagcggcaaggugaucagcagcugggagagcuacaagagcggcggcgagaccagacuguga

SEQ ID NO: 191874 - RNA, 1575 nt, Artificial Sequence
  derived and/or modified CDS sequence (opt4) from glycoprotein__RABV__L40426.1
auggugccccaggugcugcuguucgugcugcugcugggcuucagccugugcuucggcaaguuccccaucuacaccauccccgacaagcugggccccuggagccccaucgacauccaccaccugagaugccccaacaaccuggugguggaggacgagggcugcaccaaccugagcggcuucagcuacauggagcugaaggugggcuacaucagcgccaucaaggugaacggcuucaccugcaccggcguggugaccgaggccgagaccuacaccaacuucgugggcuacgugaccaccaccuucaagagaaagcacuucagacccacccccgacgccugcagagccgccuacaacuggaagauggccggcgaccccagauacgaggagagccugcagaaccccuaccccgacuaccacuggcugagaaccgugagaaccaccaaggagagccugaucaucaucagccccagcgugaccgaccuggaccccuacgacaagagccugcacagcagaguguuccccggcggcaagugcagcggcaucaccgugagcagcaccuacugcagcaccaaccacgacuacaccaucuggaugcccgagaaccccagacccggcacccccugcgacaucuucaccaacagcagaggcaagagagccagcaacggcaacaagaccugcggcuucguggacgagagaggccuguacaagagccugaagggcgccugcagacugaagcugugcggcgugcugggccugagacugauggacggcaccuggguggccaugcagaccagcgacgagaccaaguggugcagccccgaccagcuggugaaccugcacgacuucagaagcgacgagaucgagcaccuggugguggaggagcuggugaagaagagagaggagugccuggacacccuggagagcaucaugaccaccaagagcgugagcuucagaagacugagccaccugagaaagcuggugcccggcuucggcaaggccuacaccaucuucaacaagacccugauggaggccgacgcccacuacaagagcgugagaaccuggaacgagaucauccccagcaagggcugccugaaggugggcggcagaugccacccccacgugaacggcguguucuucaacggcaucauccugggccccgacgacagagugcugauccccgagaugcagagcagccugcugagacagcacauggagcugcuggagagcagcgugaucccccugaugcacccccuggccgaccccagcaccguguucaaggagggcgacgaggccgaggacuucguggaggugcaccugcccgacguguacaagcagaucagcggcguggaccugggccugcccaacuggggcaaguacgugcugaugaccgccggcgccaugaucggccuggugcugaucuucagccugaugaccuggugcagaagagccaacagacccgagagcaagcagagaagcuucggcggcaccggcggcaacgugagcgugaccagccagagcggcaaggugauccccagcugggagagcuacaagagcggcggcgagaucagacuguga

SEQ ID NO: 191875 - RNA, 1575 nt, Artificial Sequence; identical to SEQ ID NO: 190632
  derived and/or modified CDS sequence (opt4) from glycoprotein__RABV__LC009632.1

SEQ ID NO: 191876 - RNA, 1575 nt, Artificial Sequence
  derived and/or modified CDS sequence (opt4) from glycoprotein__RABV__LC009633.1
augaucccccaggcccugcuguucgugccccugcugguguucagccugugcuucggcaaguuccccaucuacaccauccccgacaagcugggccccuggagccccaucgacauccaccaccugagcugccccaacaaccuggugguggaggacgagggcugcaccaaccugagcggcuucagcuacauggagcugaaggugggcuacaucagcgccaucaaggugaacggcuucaccugcaccggcguggugaccgaggccgagaccuacaccaacuucgugggcuacgugaccaccaccuucaagagaaagcacuucagacccacccccgacgccugcagagccgccuacaacuggaagauggccggcgaccccagauacgaggagagccugcacaaccccuaccccgacuaccacuggcugagaaccgugaagaccaccaaggagagccuggugaucaucagccccagcguggccgaccuggaccccuacgacaagagccugcacagcagaguguuccccagcggcaagugcagcggcaucaccgugagcagcaccuacugcagcaccaaccacgacuacaccaucuggaugcccgagaaccccagacugggcaccagcugcgacaucuucaccaacagcagaggcaagagagccagcaagggcaacaagaccugcggcuucguggacgagagaggccuguacaagagccugaagggcgccugcaagcugaagcugugcggcgugcugggccugagacugauggacggcaccugggccgccauccagaccagcgacgagaccaaguggugcccccccgaccagcuggugaaccugcacgacuucagaagcgacgagaucgagcaccuggugguggaggagcuggugaagaagagagaggagugccuggacgcccuggagagcaucaugaccaccaagagcgugagcuucagaagacugagccaccugagaaagcuggugcccggcuucggcaaggccuacaccaucuucaacaagacccugauggaggccgacgcccacuacaagagcgugagaaccuggaacgagaucauccccagcaagggcugccugagagugggcggcagaugccacccccacgugaacggcguguucuucaacggcaucauccugggccccgacggccacgugcugauccccgagaugcagagcagccugcugcagcagcacauggagcugcuggagagcagcgugaucccccugaugcacccccuggccgaccccagcaccguguucaaggacgacgacgaggccgaggacuucguggaggugcaccugcccgacgugcacaagcaggugagcggcguggaccugggccugcccagcuggggcaaguacgugcugaugagcgccggcgugcugaccgcccugaugcugaugaucuuccugaugaccugcugcagaagagccaacagagccgagagcgcccagcacagccugggcgagagaggcagaaaggugagcgugaccagccagagcggcagagugaucagcagcugggagagcuacaagagcggcggcgagaccaagcuguga

SEQ ID NO: 191877 - RNA, 1575 nt, Artificial Sequence
  derived and/or modified CDS sequence (opt4) from glycoprotein__RABV__LC009635.1
auggugccccaggugcugcuguucgugcugcugcugggcuucagccugugcuucggcaaguuccccaucuacaccauccccgacgagcugggccccuggagccccaucgacauccaccaccugagcugccccaacaaccuggugguggaggacgagggcugcaccaaccugagcgaguucagcuacauggagcugaaggugggcuacaucagcgccaucaaggugaacggcuucaccugcaccggcguggugaccgaggccgagaccuacaccaacuucgugggcuacgugaccaccaccuucaagagaaagcacuucagacccacccccgacgccugcagagccgccuacaacuggaagauggccggcgaccccagauacgaggagagccugcacaaccccuaccccgacuaccacuggcugagaaccgugagaaccaccaaggagagccugaucaucaucagccccagcgugaccgaccuggaccccuacgacaagagccugcacagcagaguguuccccggcggcaagugcagcggcaucaccgugagcagcaccuacugcagcaccaaccacgacuacaccaucuggaugcccgagaaccccagacccagaacccccugcgacaucuucaccaacagcagaggcaagagagccagcaacggcagcaagaccugcggcuucguggacgagagaggccuguacaagagccugaagggcgccugcagacugaagcugugcggcgugcugggccugagacugauggacggcaccuggguggccaugcagaccagcgacgagaccaaguggugcccccccgaccagcuggugaaccugcacgacuucagaagcgacgagaucgagcaccuggugguggaggagcuggugaagaagagagaggagugccuggacgcccuggagagcaucaugaccaccaagagcgugagcuucagaagacugagccaccugagaaagcuggugcccggcuucggcaaggccuacaccaucuucaacaagacccugauggaggccgacgcccacuacaagagcgugagaaccuggaacgagaucauccccagcaagggcugccugaaggugggcggcagaugccacccccacgugaacggcguguucuucaacggcaucauccugggccccgacgaccacgugcugauccccgagaugcagagcagccugcugcagcagcacauggagcugcuggagagcagcgugaucccccugaugcacccccuggccgaccccagcaccguguucaaggagggcgacgaggccgaggacuucguggaggugcaccugcccgacguguacaagcagaucagcggcguggaccugggccugcccaacuggggcaaguacgugcugaugaccgccggcgccaugaucggccuggugcugaucuucagccugaugaccuggugcagaagagccaacagacccgagagcaagcagagaagcuucggcggcaccggcggcaacgugagcgugaccagccagagcggcaaggugauccccagcugggagagcuacaagagcggcggcgagaucagacuguga

SEQ ID NO: 191878 - RNA, 1575 nt, Artificial Sequence; identical to SEQ ID NO: 190632
  derived and/or modified CDS sequence (opt4) from glycoprotein__RABV__LC018482.1

SEQ ID NO: 191879 - RNA, 1575 nt, Artificial Sequence; identical to SEQ ID NO: 190631
  derived and/or modified CDS sequence (opt4) from glycoprotein__RABV__LC018483.1

SEQ ID NO: 191880 - RNA, 1575 nt, Artificial Sequence; identical to SEQ ID NO: 190658
  derived and/or modified CDS sequence (opt4) from glycoprotein__RABV__LC018484.1

SEQ ID NO: 191881 - RNA, 1575 nt, Artificial Sequence; identical to SEQ ID NO: 190655
  derived and/or modified CDS sequence (opt4) from glycoprotein__RABV__LC018485.1

SEQ ID NO: 191882 - RNA, 1575 nt, Artificial Sequence; identical to SEQ ID NO: 190632
  derived and/or modified CDS sequence (opt4) from glycoprotein__RABV__LC018486.1

SEQ ID NO: 191883 - RNA, 1575 nt, Artificial Sequence; identical to SEQ ID NO: 190655
  derived and/or modified CDS sequence (opt4) from glycoprotein__RABV__LC018487.1

SEQ ID NO: 191884 - RNA, 1575 nt, Artificial Sequence; identical to SEQ ID NO: 190659
  derived and/or modified CDS sequence (opt4) from glycoprotein__RABV__LC018488.1

SEQ ID NO: 191885 - RNA, 1575 nt, Artificial Sequence; identical to SEQ ID NO: 190655
  derived and/or modified CDS sequence (opt4) from glycoprotein__RABV__LC018489.1

SEQ ID NO: 191886 - RNA, 1575 nt, Artificial Sequence; identical to SEQ ID NO: 190655
  derived and/or modified CDS sequence (opt4) from glycoprotein__RABV__LC018490.1

SEQ ID NO: 191887 - RNA, 1575 nt, Artificial Sequence; identical to SEQ ID NO: 190632
  derived and/or modified CDS sequence (opt4) from glycoprotein__RABV__LC018493.1

SEQ ID NO: 191888 - RNA, 1575 nt, Artificial Sequence; identical to SEQ ID NO: 190655
  derived and/or modified CDS sequence (opt4) from glycoprotein__RABV__LC018494.1

SEQ ID NO: 191889 - RNA, 1575 nt, Artificial Sequence; identical to SEQ ID NO: 190655
  derived and/or modified CDS sequence (opt4) from glycoprotein__RABV__LC018495.1

SEQ ID NO: 191890 - RNA, 1575 nt, Artificial Sequence; identical to SEQ ID NO: 190655
  derived and/or modified CDS sequence (opt4) from glycoprotein__RABV__LC018496.1

SEQ ID NO: 191891 - RNA, 1575 nt, Artificial Sequence
  derived and/or modified CDS sequence (opt4) from glycoprotein__RABV__LC018497.1
augaucccccaggcccugcuguucgugccccugcugguguucagccugugcuucggcaaguuccccaucuacaccauccccgacaagcugggccccuggagccccaucgacauccaccaccugagcugccccaacaaccuggugguggaggacgagggcugcaccaaccugagcggcuucagcuacauggagcugaaggugggcuacaucagcgccaucaaggugaacggcuucaccugcaccggcguggugaccgaggccgagaccuacaccaacuucgugggcuacgugaccaccaccuucaagagaaagcacuucagacccacccccgacgccugcagaagcgccuacaacuggaagauggccggcgaccccagauacgaggagagccugcacaaccccuaccccgacuaccacuggcugagaaccgugaagaccaccaaggagagccuggugaucaucagccccagcguggccgaccuggaccccuacgacaagagccugcacagcagaguguuccccagcggcaagugcagcggcaucaccgugagcagcaccuacugcagcaccaaccacgacuacaccaucuggaugcccgagaaccccagacugggcaccagcugcgacaucuucaccaacagcagaggcaagagagccagcaagggcagcaagaccugcggcuucguggacgagagaggccuguacaagagccugaagggcgccugcaagcugaagcugugcggcgugcugggccugagacugauggacggcaccugggccgccauccagaccagcgacgagaccaaguggugcccccccgaccagcuggugaaccugcacgacuucagaagcgacgagaucgagcaccuggugguggaggagcuggugaagaagagagaggagugccuggacgcccuggagagcaucaugaccaccaagagcgugagcuucagaagacugagccaccugagaaagcuggugcccggcuucggcaaggccuacaccaucuucaacaagacccugauggaggccgacgcccacuacaagagcgugagaaccuggaacgagaucauccccagcaagggcugccugagagugggcggcagaugccacccccacgugaacggcguguucuucaacggcaucauccugggccccgacggccacgugcugauccccgagaugcagagcagccugcugcagcagcacauggagcugcuggagagcagcgugaucccccugaugcacccccuggccgaccccagcaccguguucaaggacgacgacgaggccgaggacuucguggaggugcaccugcccgacgugcacaagcaggugagcggcguggaccugggccugcccagcuggggcaaguacgugcugaugagcgccggcgugcugaccgcccugaugcugaugaucuuccugaccagaugcugcagaagagccaacagagccgagagcgcccagcacagccugggcgagagaggcagaaaggugagcgugaccagccagagcggcagagugaucagcagcugggagagcuacaagagcggcggcgagaccaagcuguga

SEQ ID NO: 191892 - RNA, 1575 nt, Artificial Sequence; identical to SEQ ID NO: 190655
  derived and/or modified CDS sequence (opt4) from glycoprotein__RABV__LC018498.1

SEQ ID NO: 191893 - RNA, 1575 nt, Artificial Sequence
  derived and/or modified CDS sequence (opt4) from glycoprotein__RABV__LC018501.1
augaucccccaggcccugcuguucgugccccugcugguguucagccugugcuucggcaaguuccccaucuacaccauccccgacaagcugggccccuggagccccaucgacauccaccaccugagcugccccaacaaccuggugguggaggacgagggcugcaccaaccugagcggcuucagcuacauggagcugaaggugggcuacaucagcgccaucaaggugaacggcuucaccugcaccggcguggugaccgaggccgagaccuacaccaacuucgugggcuacgugaccaccaccuucaagagaaagcacuucagacccacccccgacgccugcagagccgccuacaacuggaagauggccggcgaccccagauacgaggagagccugcacaaccccuaccccgacuaccacuggcugagaaccgugaagaccaccaaggagagccuggugaucaucagccccagcguggccgaccuggaccccuacgacaagagccugcacagcagaguguuccccagcggcaagugcagcggcaucaccgugagcagcaccuacugcagcaccaaccacgacuacaccaucuggaugcccgagaaccccagacugggcaccagcugcgacaucuucaccaacagcagaggcaagagagccagcaagggcagcaagaccugcggcuucguggacgagagaggccuguacaagagccugaagggcgccugcaagcugaagcugugcggcgugcugggccugagacugauggacggcaccugggccgccauccagaccagcgacgagaccaaguggugcccccccgaccagcuggugaaccugcacgacuucagaagcgacgagaucgagcaccuggugguggaggagcuggugaagaagagagaggagugccuggacgcccuggagagcaucaugaccaccaagagcgugagcuucagaagacugagccaccugagaaagcuggugcccggcuucggcaaggccuacaccaucuucaacaagacccugauggaggccgacgcccacuacaagagcgugagaaccuggaacgagaucauccccagcaagggcugccugagagugggcggcagaugccacccccacgugaacggcguguucuucaacggcaucauccugggccccgacggccacgugcugauccccgagaugcagagcagccugcugcagcagcacauggagcugcuggagagcagcgugaucccccugaugcacccccuggccgaccccagcaccguguucaaggacgacgacgaggccgaggacuucguggaggugcaccugcccgacgugcacaagcaggugagcggcguggaccugggccugcccagcuggggcaaguacgugcugaugagcgccggcgugcugaccgcccugaugcugaugaucuuccugaugaccugcugcagaagaaccaacagagccgagagcgcccagcacagccccggcgagagaggcagaaaggugagcgugaccagccagagcggcagagugaucagcagcugggagagcuacaagagcggcggcgagaccaagcuguga

SEQ ID NO: 191894 - RNA, 1575 nt, Artificial Sequence; identical to SEQ ID NO: 190632
  derived and/or modified CDS sequence (opt4) from glycoprotein__RABV__LC018502.1

SEQ ID NO: 191895 - RNA, 1575 nt, Artificial Sequence
  derived and/or modified CDS sequence (opt4) from glycoprotein__RABV__LC018503.1
augaucccccaggcccugcuguucgugccccugcugguguucagccugugcuucggcaaguuccccaucuacaccauccccgacaagcugggccccuggagccccaucgacauccaccaccugagcugccccaacaaccuggugguggaggacgagggcugcaccaaccugagcggcuucagcuacauggagcugaaggugggcuacaucagcgccaucaaggugaacggcuucaccugcaccggcguggugaccgaggccgagaccuacaccaacuucgugggcuacgugaccaccaccuucaagagaaagcacuucagacccacccccgacgccugcagagccgccuacaacuggaagauggccggcgaccccagauacgaggagagccugcacaaccccuaccccgacuaccacuggcugagaaccgugaagaccaccaaggagagccuggugaucaucagccccagcguggccgaccuggaccccuacgacaagagccugcacagcagaguguuccugaacggcaagugcagcggcaucaccgugagcagcaccuacugcagcaccaaccacgacuacaccaucuggaugcccgagaaccccagacugggcaccagcugcgacaucuucaccaacagcagaggcaagagagccagcaagggcagcaagaccugcggcuucguggacgagagaggccuguacaagagccugaagggcgccugcaagcugaagcugugcggcgugcugggccugagacugauggacggcaccugggccgccauccagaccagcgacgagaccaaguggugcccccccgaccagcuggugaaccugcacgacuucagaagcgacgagaucgagcaccuggugguggaggagcuggugaagaagagagaggagugccuggacgcccuggagagcaucaugaccaccaagagcgugagcuucagaagacugagccaccugagaaagcuggugcccggcuucggcaaggccuacaccaucuucaacaagacccugauggaggccgacgcccacuacaagagcgugagaaccuggaacgagaucauccccagcaagggcugccugagagugggcggcagaugccacccccacgugaacggcguguucuucaacggcaucauccugggccccgacggccacgugcugauccccgagaugcagagcagccugcugcagcagcacguggagcugcuggagagcagcgugaucccccugaugcacccccuggccgaccccagcaccguguucaaggacgacgacgaggccgaggacuucguggaggugcaccugcccgacgugcacaagcaggugagcggcguggaccugggccugcccagcuggggcaaguacgugcugaugagcgccggcgugcugaccgcccugaugcugaugaucuuccugaugaccugcugcagaagagccaacagagccgagagcgcccagcacagccugggcgagagaggcagaaaggugagcgugaccagccagagcggcagaguggugagcagcugggagagcuacaagagcggcggcgagaccaagcuguga

SEQ ID NO: 191896 - RNA, 1575 nt, Artificial Sequence; identical to SEQ ID NO: 190632
  derived and/or modified CDS sequence (opt4) from glycoprotein__RABV__LC018504.1

SEQ ID NO: 191897 - RNA, 1575 nt, Artificial Sequence
  derived and/or modified CDS sequence (opt4) from glycoprotein__RABV__LC018505.1
augaucccccaggcccugcuguucgugccccugcugguguucagccugugcuucggcaaguuccccaucuacaccauccccgacaagcugggccccuggagccccaucgacauccaccaccugagcugccccaacaaccuggugguggaggacgagggcugcaccaaccugagcggcuucagcuacauggagcugaaggugggcuacaucagcgccaucaaggugaacggcuucaccugcaccggcguggugaccgaggccgagaccuacaccaacuucgugggcuacgugaccaccaccuucaagagaaagcacuucagacccacccccgacgccugcagagccgccuacaacuggaagauggccggcgaccccagauacgaggagagccugcacaaccccuaccccgacuaccacuggcugagaaccgugaagaccaccaaggagagccuggugaucaucagccccagcguggccgaccuggaccccuacgacaagagccugcacagcagaguguuccccaacggcaagugcagcggcaucaccgugagcagcaccuacugcagcaccaaccacgacuacaccaucuggaugcccgagaaccccagacugggcaccagcugcgacaucuucaccaacagcagaggcaagagagccagcaagggcagcaagaccugcggcuucguggacgagagaggccuguacaagagccugaagggcgccugcaagcugaagcugugcggcgugcugggccugagacugauggacggcaccugggccgccauccagaccagcgacgagaccaaguggugcccccccgaccagcuggugaaccugcacgacuucagaagcgacgagaucgagcaccuggugguggaggagcuggugaagaagagagaggagugccuggacgcccuggagagcaucaugaccaccaagagcgugagcuucagaagacugagccaccugagaaagcuggugcccggcuucggcaaggccuacaccaucuucaacaagacccugauggaggccgacgcccacuacaagagcgugagaaccuggaacgagaucauccccagcaagggcugccugagagugggcggcagaugccacccccacgugaacggcguguucuucaacggcaucauccugggccccgacggccacgugcugauccccgagaugcagagcagccugcugcagcagcacauggagcugcuggagagcagcgugaucccccugaugcacccccuggccgaccccagcaccguguucaaggacgacgacgaggccgaggacuucguggaggugcaccugcccgacgugcacaagcaggugagcggcguggaccugggccugcccagcuggggcaaguacgugcugaugagcgccggcgugcugaccgcccugaugcugaugaucuuccugaugaccugcugcagaagagccaacagagccgagagcgcccagcacagccugggcgagagaggcagaaaggugagcgugaccagccagagcggcagagugaucagcagcugggagagcuacaagagcggcggcgagaccaagcuguga

SEQ ID NO: 191898 - RNA, 1575 nt, Artificial Sequence
  derived and/or modified CDS sequence (opt4) from glycoprotein__RABV__LC018506.1
augaucccccaggcccugcuguucgugccccugcugguguucagccugugcuucggcaaguuccccaucuacaccauccccgacaagcugggccccuggagccccaucgacauccaccaccugagcugccccaacaaccuggugguggaggacgagggcugcaccaaccugagcggcuucagcuacauggagcugaaggugggcuacaucagcaccaucaaggugaacggcuucaccugcaccggcguggugaccgaggccgagaccuacaccaacuucgugggcuacgugaccaccaccuucaagagaaagcacuucagacccacccccgacgccugcagagccgccuacaacuggaagauggccggcgaccccagauacgaggagagccugcacaaccccuaccccgacuaccacuggcugagaaccgugaagaccaccaaggagagccuggugaucaucagccccagcguggccgaccuggaccccuacgacaagagccugcacagcagaguguuccccaacggcaagugcagcggcaucaccgugagcagcaccuacugcagcaccaaccacgacuacaccaucuggaugcccgagaaccccagacugggcaccagcugcgacaucuucaccaacagcagaggcaagagagccagcaagggcagcaagaccugcggcuucguggacgagagaggccuguacaagagccugaagggcgccugcaagcugaagcugugcggcgugcugggccugagacugauggacggcaccugggccgccauccagaccagcgacgagaccaaguggugcccccccgaccagcuggugaaccugcacgacuucagaagcgacgagaucgagcaccuggugguggaggagcuggugaagaagagagaggagugccuggacgcccuggagagcaucaugaccaccaagagcgugagcuucagaagacugagccaccugagaaagcuggugcccggcuucggcaaggccuacaccaucuucaacaagacccugauggaggccgacgcccacuacaagagcgugagaaccuggaacgagaucauccccagcaagggcugccugagagugggcggcagaugccacccccacgugaacggcguguucuucaacggcaucauccugggccccgacggccacgugcugauccccgagaugcagagcagccugcugcagcagcacauggagcugcuggagagcagcgugaucccccugaugcacccccuggccgaccccagcaccguguucaaggacgacgacgaggccgaggacuucguggaggugcaccugcccgacgugcacaagcaggugagcggcguggaccugggccugcccagcuggggcaaguacgugcugaugagcgccggcgugcugaccgcccugaugcugaugaucuuccugaugaccugcugcagaagagccaacagagccgagagcgcccagcacagccugggcgagagaggcagaaaggugagcgugaccagccagagcggcagagugaucagcagcugggagagcuacaagagcggcggcgagaccaagcuguga

SEQ ID NO: 191899 - RNA, 1575 nt, Artificial Sequence; identical to SEQ ID NO: 190632
  derived and/or modified CDS sequence (opt4) from glycoprotein__RABV__LC018507.1

SEQ ID NO: 191900 - RNA, 1575 nt, Artificial Sequence; identical to SEQ ID NO: 190655
  derived and/or modified CDS sequence (opt4) from glycoprotein__RABV__LC018508.1

SEQ ID NO: 191901 - RNA, 1575 nt, Artificial Sequence; identical to SEQ ID NO: 190678
  derived and/or modified CDS sequence (opt4) from glycoprotein__RABV__LC018509.1

SEQ ID NO: 191902 - RNA, 1575 nt, Artificial Sequence; identical to SEQ ID NO: 190655
  derived and/or modified CDS sequence (opt4) from glycoprotein__RABV__LC018513.1

SEQ ID NO: 191903 - RNA, 1575 nt, Artificial Sequence; identical to SEQ ID NO: 190655
  derived and/or modified CDS sequence (opt4) from glycoprotein__RABV__LC018514.1

SEQ ID NO: 191904 - RNA, 1575 nt, Artificial Sequence; identical to SEQ ID NO: 190655
  derived and/or modified CDS sequence (opt4) from glycoprotein__RABV__LC018515.1

SEQ ID NO: 191905 - RNA, 1575 nt, Artificial Sequence
  derived and/or modified CDS sequence (opt4) from glycoprotein__RABV__LC018516.1
augaucccccaggcccugcuguucgugccccugcugguguucagccugugcuucggcaaguuccccaucuacaccauccccgacaagcugggccccuggagccccaucgacauccaccaccugagcugccccaacaaccuggugguggaggacgagggcugcaccaaccugagcggcuucagcuacauggagcugaaggugggcuacaucagcgccaucaaggugaacggcuucaccugcaccggcguggugaccgaggccgagaccuacaccaacuucgugggcuacgugaccaccaccuucaagagaaagcacuucagacccacccccgacgccugcagagccgccuacaacuggaagauggccggcgaccccagauacgaggagagccugcacaaccccuaccccgacuaccacuggcugagaaccgugaagaccaccaaggagagccuggugaucaucagccccagcguggccgaccuggaccccuacgacaagagccugcacagcagaguguuccccagcggcaagugcagcggcaucaccgugagcagcaccuacugcagcaccaaccacgacuacaccaucuggaugcccgagaaccccagacugggcaccagcugcgacaucuucaccaacagcagaggcaagagagccagcaagggcagcaagaccugcggcuucguggacgagagaggccuguacagaagccugaagggcgccugcaagcugaagcugugcggcgugcugggccugagacugauggacggcaccugggccgccauccagaccagcgacgagaccaaguggugcccccccgaccagcuggugaaccugcacgacuucagaagcgacgagaucgagcaccuggugguggaggagcuggugaagaagagagaggagugccuggacgcccuggagagcaucaugaccaccaagagcgugagcuucagaagacugagccaccugagaaagcuggugcccggcuucggcaaggccuacaccaucuucaacaagacccugauggaggccgacgcccacuacaagagcgugagaaccuggaacgagaucauccccagcaagggcugccugagagugggcggcagaugccacccccacgugaacggcguguucuucaacggcaucauccugggccccgacggccacgugcugauccccgagaugcagagcagccugcugcagcagcacauggagcugcuggagagcagcgugaucccccugaugcacccccuggccgaccccagcaccguguucaaggacgacgacgaggccgaggacuucguggaggugcaccugcccgacgugcacaagcaggugagcggcguggaccugggccugcccagcuggggcaaguacgugcugaugagcgccggcgugcugaccgcccugaugcugaugaucuuccugaugaccugcugcagaagaaccaacagagccgagagcgcccagcacagccugggcgagagaggcagaaaggugagcgugaccagccagagcggcagagugaucagcagcugggagagcuacaagagcggcggcgagaccaagcuguga

SEQ ID NO: 191906 - RNA, 1575 nt, Artificial Sequence
  derived and/or modified CDS sequence (opt4) from glycoprotein__RABV__LC018517.1
augaucccccaggcccugcuguucgugccccugcugguguucagccugugcuucggcaaguuccccaucuacaccauccccgacaagcugggccccuggagccccaucgacauccaccaccugagcugccccaacaaccuggugguggaggacgagggcugcaccaaccugagcggcuucagcuacauggagcugaaggugggcuacaucagcgccaucaaggugaacggcuucaccugcaccggcguggugaccgaggccgagaccuacaccaacuucgugggcuacgugaccaccaccuucaagagaaagcacuucagacccacccccgacgccugcagagccgccuacaacuggaagauggccggcgaccccagauacgaggagagccugcacaaccccuaccccgacuaccacuggcugagaaccgugaagaccaccaaggagagccuggugaucaucagccccagcguggccgaccuggaccccuacgacaagagccugcacagcagaguguuccccaacggcaagugcagcggcaucaccgugagcagcaccuacugcagcaccaaccacgacuacaccaucuggaugcccgagaaccccagacugggcaccagcugcgacaucuucaccaacagcagaggcaagagagccagcaagggcagcaagaccugcggcuucguggacgagagaggccuguacaagagccugaagggcgccugcaagcugaagcugugcggcgugcugggccugagacugauggacggcaccugggccgccauccagaccagcgacgagaccaaguggugcccccccgaccagcuggugaaccugcacgacuucagaagcgacgagaucgagcaccuggugguggaggagcuggugaagaagagagaggagugccuggacgcccuggagagcaucaugaccaccaagagcgugagcuucagaagacugagccaccugagaaagcuggugcccggcuucggcaaggccuacaccaucuucaacaagacccugauggaggccgacgcccacuacaagagcgugagaaccuggaacgagaucauccccagcaagggcugccugagagugggcggcagaugccacccccacgugaacggcguguucuucaacggcaucauccugggccccgacggccacgugcugauccccgagaugcagagcagccugcugcagcagcacauggagcugcuggagagcagcgugaucccccugaugcacccccuggccgaccccagcaccguguucaaggacgacgacgaggccgaggacuucguggaggugcaccugcccgacgugcacaagcaggugagcggcguggaccugggccugcccagcuggggcaaguacgugcugaugagcgccggcgugagcaccgcccugaugcugaugaucuuccugaugaccugcugcagaagagccaacagagccgagagcgcccagcacagccugggcgagagaggcagaaaggugagcgugaccagccagagcggcagagugaucagcagcugggagagcuacaagagcggcggcgagaccaagcuguga

SEQ ID NO: 191907 - RNA, 1575 nt, Artificial Sequence; identical to SEQ ID NO: 190631
  derived and/or modified CDS sequence (opt4) from glycoprotein__RABV__LC018518.1

SEQ ID NO: 191908 - RNA, 1575 nt, Artificial Sequence; identical to SEQ ID NO: 190631
  derived and/or modified CDS sequence (opt4) from glycoprotein__RABV__LC018519.1

SEQ ID NO: 191909 - RNA, 1575 nt, Artificial Sequence; identical to SEQ ID NO: 190632
  derived and/or modified CDS sequence (opt4) from glycoprotein__RABV__LC018520.1

SEQ ID NO: 191910 - RNA, 1575 nt, Artificial Sequence
  derived and/or modified CDS sequence (opt4) from glycoprotein__RABV__LC018522.1
augaucccccaggcccugcuguucgugccccugcugguguucagccugugcuucggcaaguuccccaucuacaccauccccgacaagcugggccccuggagccccaucgacauccaccaccugagcugccccaacaaccuggugguggaggacgagggcugcaccaaccugagcggcuucagcuacauggagcugaaggugggcuacaucagcgccaucaaggugaacggcuucaccugcaccggcguggugaccgaggccgagaccuacaccaacuucgugggcuacgugaccaccaccuucaagagaaagcacuucagacccacccccgacgccugcagagccgccuacaacuggaagauggccggcgaccccagauacgaggagagccugcacaaccccuaccccgacuaccacuggcugagaaccgugaagaccaccaaggagagccuggugaucaucagccccagcguggccgaccuggaccccuacgacaagagccugcacagcagaguguuccccaacggcaagugcagcggcaucaccgugagcagcaccuacugcagcaccaaccacgacuacaccaucuggaugcccgagaaccccagacugggcaccagcugcgacaucuucaccaacagcagaggcaagagagccagcaagggcagcagaaccugcggcuucguggacgagagaggccuguacaagagccugaagggcgccugcaagcugaagcugugcggcgugcugggccugagacugauggacggcaccugggccgccauccagaccagcgacgagaccaaguggugcccccccgaccagcuggugaaccugcacgacuucagaagcgacgagaucgagcaccuggugguggaggagcuggugaagaagagagaggagugccuggacgcccuggagagcaucaugaccaccaagagcgugagcuucagaagacugagccaccugagaaagcuggugcccggcuucggcaaggccuacaccaucuucaacaagacccugauggaggccgacgcccacuacaagagcgugagaaccuggaacgagaucauccccagcaagggcugccugagagugggcggcagaugccacccccacgugaacggcguguucuucaacggcaucauccugggccccgacggccacgugcugauccccgagaugcagagcagccugcugcagcagcacauggagcugcuggagagcagcgugaucccccugaugcacccccuggccgaccccagcaccguguucaaggacgacgacgaggccgaggacuucguggaggugcaccugcccgacgugcacaagcaggugagcggcguggaccugggccugcccagcuggggcaaguacgugcugaugagcgccggcgugcugaccgcccugaugcugaugaucuuccugaugaccugcugcagaagagccaacagagccgagagcgcccagcacagccugggcgagagaggcagaaaggugagcgugaccagccagagcggcagagugaucagcagcugggagagcuacaagagcggcggcgagaccaagcuguga

SEQ ID NO: 191911 - RNA, 1575 nt, Artificial Sequence
  derived and/or modified CDS sequence (opt4) from glycoprotein__RABV__LC018523.1
augaucccccaggcccugcuguucgugccccugcugguguucagccugugcuucggcaaguuccccaucuacaccauccccgacaagcugggccccuggagccccaucgacauccaccaccugagcugccccaacaaccuggugguggaggacgagggcugcaccaaccugagcggcuucagcuacauggagcugaaggugggcuacaucagcgccaucaaggugaacggcuucaccugcaccggcguggugaccgaggccgagaccuacaccaacuucgugggcuacgugaccaccaccuucaagagaaagcacuucagacccacccccgacgccugcagagccgccuacaacuggaagauggccggcgaccccagauacgaggagagccugcacaaccccuaccccgacuaccacuggcugagaaccgugaagaccaccaaggagagccuggugaucaucagccccagcguggccgaccuggaccccuacgacaagagccugcacagcagaguguuccccagcggcaagugcagcggcaucaccgugagcagcaccuacugcagcaccaaccacgacuacaccaucuggaugcccgagaaccccagacugggcaccagcugcgacaucuucaccaacagcagaggcaagagagccagcaagggcagcaagaccugcggcuucguggacgagagaggccuguacaagagccugaagggcgccugcaagcugaagcugugcggcgugcugggccugagacugauggacggcaccugggccgccauccagaccagcgacgagaccaaguggugcccccccgaccagcuggugaaccugcacgacuucagaagcgacgagaucgagcaccuggugguggaggagcuggugaagaagagagaggagugccuggacgcccuggagagcaucaugaccaccaagagcgugagcuucagaagacugagccaccugagaaagcuggugcccggcuucggcaaggccuacaccaucuucaacaagacccugauggaggccgacgcccacuacaagagcgugagaaccuggaacgagaucauccccagcaagggcugccugagagugggcggcagaugccacccccacgugaacggcguguucuucaacggcaucauccugggccccgacggccacgugcugauccccgagaugcagagcagccugcugcagcagcacauggagcugcuggagagcagcgugaucccccugaugcacccccuggccgaccccagcaccguguucaaggacgacgacgaggccgaggacuucguggaggugcaccugcccgacgugcacaagcaggugagcggcguggaccugggccugcccagcuggggcaaguacgugcugaugagcgccggcauccugaccgcccugaugcugaugaucuuccugaugaccugcugcagaagagccaacagaguggagagcgcccagcacagccugggcgagagaggcagaaaggugagcgugaccagccagagcggcagagugaucagcagcugggagagcuacaagagcggcggcgagaccaagcuguga

SEQ ID NO: 191912 - RNA, 1575 nt, Artificial Sequence; identical to SEQ ID NO: 190631
  derived and/or modified CDS sequence (opt4) from glycoprotein__RABV__LC018524.1

SEQ ID NO: 191913 - RNA, 1575 nt, Artificial Sequence
  derived and/or modified CDS sequence (opt4) from glycoprotein__RABV__LC018525.1
augaucccccaggcccugcuguucgugccccugcugguguucagccugugcuucggcaaguuccccaucuacaccauccccgacaagcugggccccuggagccccaucgacauccaccaccugagcugccccaacaaccuggugguggaggacgagggcugcaccaaccugagcggcuucagcuacauggagcugaaggugggcuacaucagcgccaucaaggugaacggcuucaccugcaccggcguggugaccgaggccgagaccuacaccaacuucgugggcuacgugaccaccaccuucaagagaaagcacuucagacccacccccgacgccugcagagccgccuacaacuggaagauggccggcgaccccagauacgaggagagccugcacaaccccuaccccgacuaccacuggcugagaaccgugaagaccaccaaggagagccuggugaucaucagccccagcguggccgaccuggaccccuacgacaagagccugcacagcagaguguuccccagcggcaagugcagcggcaucaccgugagcagcaccuacugcagcaccaaccacgacuacaccaucuggaugcccgagaaccccagacugggcaccagcugcgacaucuucaccaacagcagaggcaagagagccagcaagggcagcaagaccugcggcuucguggacgagagaggccuguacaagagccugaagggcgccugcaagcugaagcugugcggcgugcugggccugagacugauggacggcaccugggccgccauccagaccagcgacgagaccaaguggugcccccccgaccagcuggugaaccugcacgacuucagaagcgacgagaucgagcacuucgugguggaggagcuggugaagaagagagaggagugccuggacgcccuggagagcaucaucaccaccaagagcgugagcuucagaagacugagccaccugagaaagcuggugcccggcuucggcaaggccuacaccaucuucaacaagacccugauggaggccgacgcccacuacaagagcgugagaaccuggaacgagaucauccccagcaagggcugccugagagugggcggcagaugccacccccacgugaacggcguguucuucaacggcaucauccugggccccgacggccacgugcugauccccgagaugcagagcagccugcugcagcagcacauggagcugcuggagagcagcgugaucccccugaugcacccccuggccgaccccagcaccguguucaaggacgacgacgaggccgaggacuucguggaggugcaccugcccgacgugcacaagcaggugagcggcguggaccugggccugcccagcuggggcaaguacgugcugaugagcgccggcgugcugaccgcccugaugcugaugaucuuccugaugaccugcugcagaagagccaacagagccgagagcgcccagcacagccugggcgagagaggcagaaaggugagcgugaccagccagagcggcagagugaucagcagcugggagagcuacaagagcggcggcgagaccaagcuguga

SEQ ID NO: 191914 - RNA, 1575 nt, Artificial Sequence
  derived and/or modified CDS sequence (opt4) from glycoprotein__RABV__LC018526.1
augaucccccaggcccugcuguucgugccccugaugguguucagccugugcuucggcaaguuccccaucuacaccauccccgacaagcugggccccuggagccccaucgacauccaccaccugagcugccccaacaaccuggugguggaggacgagggcugcaccaaccugagcggcuucagcuacauggagcugaaggugggcuacaucagcgccaucaaggugaacggcuucaccugcaccggcguggugaccgaggccgagaccuacaccaacuucgugggcuacgugaccaccaccuucaagagaaagcacuucagacccacccccgacgccugcagagccgccuacaacuggaagauggccggcgaccccagauacgaggagagccugcacaaccccuaccccgacuaccacuggcugagaaccgugaagaccaccaaggagagccuggugaucaucagccccagcguggccgaccuggaccccuacgacaagagccugcacagcagaguguuccccagcggcaagugcagcggcaucaccgugagcagcaccuacugcagcaccaaccacgacuacaccaucuggaugcccgagaaccccagacugggcaccagcugcgacaucuucaccaacagcagaggcaagagagccagcaagggcagcaagaccugcggcuucguggacgagagaggccuguacaagagccugaagggcgccugcaagcugaagcugugcggcgugcugggccugagacugauggacggcaccugggccgccauccagaccagcgacgagaccaaguggugcccccccgaccagcuggugaaccugcacgacuucagaagcgacgagaucgagcaccuggugguggaggagcuggugaagaagagagaggagugccuggacgcccuggagagcaucaugaccaccaagagcgugagcuucagaagacugagccaccugagaaagcuggugcccggcuucggcaaggccuacaccaucuucaacaagacccugauggaggccgacgcccacuacaagagcgugagaaccuggaacgagaucauccccagcaagggcugccugagagugggcggcagaugccacccccacgugaacggcguguucuucaacggcaucauccugggccccgacggccacgugcugauccccgagaugcagagcagccugcugcagcagcacauggagcugcuggagagcagcgugaucccccugaugcacccccuggccgaccccagcaccguguucaaggacgacgacgaggccgaggacuucguggaggugcaccugcccgacgugcacaagcaggugagcggcguggaccugggccugcccagcuggggcaaguacgugcugaugagcgccggcgugcugaccgcccugaugcugaugaucuuccugaugaccugcugcagaagaaccaacagagccgagagcgcccagcacagccugggcgagagaggcagaaaggugagcgugaccagccagagcggcagagugaucagcagcugggagagcuacaagagcggcggcgagaccaagcuguga

SEQ ID NO: 191915 - RNA, 1575 nt, Artificial Sequence
  derived and/or modified CDS sequence (opt4) from glycoprotein__RABV__LC018527.1
augaucccccaggcccugcuguucgugccccugcugguguucagccugugcuucggcaaguuccccaucuacaccauccccgacaagcugggccccuggagccccaucgacauccaccaccugagcugccccaacaaccugaucguggaggacgagggcugcaccaaccugagcggcuucagcuacauggagcugaaggugggcuacaucagcgccaucaaggugaacggcuucaccugcaccggcguggugaccgaggccgagaccuacaccaacuucgugggcuacgugaccaccaccuucaagagaaagcacuucagacccacccccgacgccugcagagccgccuacaacuggaagauggccggcgaccccagauacgaggagagccugcacaaccccuaccccgacuaccacuggcugagaaccgugaagaccaccaaggagagccuggugaucaucagccccagcguggccgaccuggaccccuacgacaagagccugcacagcagaguguuccccagcggcaagugcagcggcaucaccgugagcagcaccuacugcagcaccaaccacgacuacaccaucuggaugcccgagaaccccagacugggcaccagcugcgacaucuucaccaacagcagaggcaagagagccagcaagggcagcaagaccugcggcuucguggacgagagaggccuguacaagagccugaagggcgccugcaagcugaagcugugcggcgugcugggccugagacugauggacggcaccugggccgccauccagaccagcgacgagaccaaguggugcccccccgaccagcuggugaaccugcacgacuucagaagcgacgagaucgagcaccuggugguggaggagcuggugaagaagagagaggagugccuggacgcccuggagagcaucaugaccaccaagagcgugagcuucagaagacugagccaccugagaaagcuggugcccggcuucggcaaggccuacaccaucuucaacaagacccugauggaggccgacgcccacuacaagagcgugagaaccuggaacgagaucauccccagcaagggcugccugagagugggcggcagaugccacccccacgugaacggcguguucuucaacggcaucauccugggccccgacggccacgugcugauccccgagaugcagagcagccugcugcagcagcacauggagcugcuggagagcagcgugaucccccugaugcacccccuggccgaccccagcaccguguucaaggacgacgacgaggccgaggacuucguggaggugcaccugcccgacgugcacaagcaggugagcggcguggaccugggccugcccagcuggggcaaguacgugcugaugagcgccggcgugcugaccgcccugaugcugaugaucuuccugaugaccugcugcagaagaaccaacagagccgagagcgcccagcacagccugggcgagagaggcagaaaggugagcgugaccagccagagcggcagagugaucagcagcugggagagcuacaagagcggcggcgagaccaagcuguga

SEQ ID NO: 191916 - RNA, 1575 nt, Artificial Sequence; identical to SEQ ID NO: 190655
  derived and/or modified CDS sequence (opt4) from glycoprotein__RABV__LC018529.1

SEQ ID NO: 191917 - RNA, 1575 nt, Artificial Sequence; identical to SEQ ID NO: 190655
  derived and/or modified CDS sequence (opt4) from glycoprotein__RABV__LC018531.1

SEQ ID NO: 191918 - RNA, 1575 nt, Artificial Sequence; identical to SEQ ID NO: 190631
  derived and/or modified CDS sequence (opt4) from glycoprotein__RABV__LC018532.1

SEQ ID NO: 191919 - RNA, 1575 nt, Artificial Sequence; identical to SEQ ID NO: 190655
  derived and/or modified CDS sequence (opt4) from glycoprotein__RABV__LC018534.1

SEQ ID NO: 191920 - RNA, 1575 nt, Artificial Sequence; identical to SEQ ID NO: 190655
  derived and/or modified CDS sequence (opt4) from glycoprotein__RABV__LC018535.1

SEQ ID NO: 191921 - RNA, 1575 nt, Artificial Sequence; identical to SEQ ID NO: 190631
  derived and/or modified CDS sequence (opt4) from glycoprotein__RABV__LC018536.1

SEQ ID NO: 191922 - RNA, 1575 nt, Artificial Sequence; identical to SEQ ID NO: 190655
  derived and/or modified CDS sequence (opt4) from glycoprotein__RABV__LC018539.1

SEQ ID NO: 191923 - RNA, 1575 nt, Artificial Sequence
  derived and/or modified CDS sequence (opt4) from glycoprotein__RABV__LC018540.1
augaucccccaggcccugcuguucgugccccugcugguguucagccugugcuucggcaaguuccccaucuacaccauccccgacaagcugggccccuggagccccaucgacauccaccaccugagcugccccaacaaccuggugguggaggacgagggcugcaccaaccugagcggcuucagcuacauggagcugaaggugggcuacaucagcgccaucaaggugaacggcuucaccugcaccggcguggugaccgaggccgagaccuacaccaacuucgugggcuacgugaccaccaccuucaagagaaagcacuucagacccacccccgacgccugcagagccgccuacaacuggaagauggccggcgaccccagauacgaggagagccugcacaaccccuaccccgacuaccacuggcugagaaccgugaagaccaccaaggagagccuggugaucaucagccccagcguggccgaccuggaccccuacgacagaagccugcacagcagaguguuccccagcggcaagugcagcggcaucaccgugagcagcaccuacugcagcaccaaccacgacuacaccaucuggaugcccgagaaccccagacugggcaccagcugcgacaucuucaccaacagcagaggcaagagagccagcaagggcagcaagaccugcggcuucguggacgagagaggccuguacaagagccugaagggcgccugcaagcugaagcugugcggcgugcugggccugagacugauggacggcaccugggccgccauccagaccagcgacgagaccaaguggugcccccccgaccagcuggugaaccugcacgacuucagaagcgacgagaucgagcaccuggugguggaggagcuggugaagaagagagaggagugccuggacgcccuggagagcaucaugaccaccaagagcgugagcuucagaagacugagccaccugagaaagcuggugcccggcuucggcaaggccuacaccaucuucaacaagacccugauggaggccgacgcccacuacaagagcgugagaaccuggaacgagaucauccccagcaagggcugccugagagugggcggcagaugccacccccacgugaacggcguguucuucaacggcaucauccugggccccgacggccacgugcugauccccgagaugcagagcagccugcugcagcagcacauggagcugcuggagagcagcgugaucccccugaugcacccccuggccgaccccagcaccguguucaaggacgacgacgaggccgaggacuucguggaggugcaccugcccgacgugcacaagcaggugagcggcguggaccugggccugcccagcuggggcaaguacgugcugaugagcgccggcgugcugaccgcccugaugcugaugaucuuccugaugaccugcugcagaagagccaacagaguggagagcgcccagcacagccugggcgagagaggcagaaaggugagcgugaccagccagagcggcagagugaucagcagcugggagagcuacaagagcggcggcgagaccaagcuguga

SEQ ID NO: 191924 - RNA, 1575 nt, Artificial Sequence
  derived and/or modified CDS sequence (opt4) from glycoprotein__RABV__LC018542.1
augaucccccaggcccugcuguucgugccccugcugguguucagccugugcuucggcaaguuccccaucuacaccauccccgacaagcugggccccuggagccccaucgacauccaccaccugagcugccccaacaaccuggugguggaggacgagggcugcaccaaccugagcggcuucagcuacauggagcugaaggugggcuacaucagcgccaucaaggugaacggcuucaccugcaccggcguggugaccgaggccgagaccuacaccaacuucgugggcuacgugaccaccaccuucaagagaaagcacuucagacccacccccgacgccugcagagccgccuacaacuggaagauggccggcgaccccagauacgaggagagccugcacaaccccuaccccgacuaccacuggcugagaaccgugaagaccaccaaggagagccuggugaucaucagccccagcguggccgaccuggaccccuacgacaagagccugcacagcagaguguuccccagcggcaagugcagcggcaucaccgugagcagcaccuacugcagcaccaaccacgacuacaccaucuggaugcccgagaaccccagacugggcaccagcugcgacaucuucaccagcagcagaggcaagagagccagcaagggcagcaagaccugcggcuucguggacgagagaggccuguacaagagccugaagggcgccugcaagcugaagcugugcggcgugcugggccugagacugauggacggcaccugggccgccauccagaccagcgacgagaccaaguggugcccccccgaccagcuggugaaccugcacgacuucagaagcgacgagaucgagcaccuggugguggaggagcuggugaagaagagagaggagugccuggacgcccuggagagcaucaugaccaccaagagcgugagcuucagaagacugagccaccugagaaagcuggugcccggcuucggcaaggccuacaccaucuucaacaagacccugauggaggccgacgcccacuacaagagcgugagaaccuggaacgagaucauccccagcaagggcugccugagagugggcggcagaugccacccccacgugaacggcguguucuucaacggcaucauccugggccccgacggccacgugcugauccccgagaugcagagcagccugcugcagcagcacauggagcugcuggagagcagcgugaucccccugaugcacccccuggccgaccccagcaccguguucaaggacgacgacgaggccgaggacuucguggaggugcaccugcccgacgugcacaagcaggugagcggcguggaccugggccugcccagcuggggcaaguacgugcugaugagcgccggcgugcugaccgcccugaugcugaugaucuuccugaugaccugcugcagaagagccaacagaguggagagcgcccagcacagccugggcgagagaggcagaaaggugagcgugaccagccagagcggcagagugaucagcagcugggagagcuacaagagcggcggcgagaccaagcuguga

SEQ ID NO: 191925 - RNA, 1575 nt, Artificial Sequence
  derived and/or modified CDS sequence (opt4) from glycoprotein__RABV__LC018544.1
augaucccccaggcccugcuguucgugccccugcugguguucagccugugcuucggcaaguuccccaucuacaccauccccgacaagcugggccccuggagccccaucgacauccaccaccugagcugccccaacaaccuggugguggaggacgagggcugcaccaaccugagcggcuucagcuacauggagcugaaggugggcuacaucagcgccaucaaggugaacggcuucaccugcaccggcguggugaccgaggccgagaccuacaccaacuucgugggcuacgugaccaccaccuucaagagaaagcacuucagacccacccccgacgccugcagagccgccuacaacuggaagauggccggcgaccccagauacgaggagagccugcacaaccccuaccccgacuaccacuggcugagaaccgugaagaccaccaaggagagccuggugaucaucagccccagcguggccgaccuggaccccuacgacaagagccugcacagcagaguguuccccagcggcaagugcagcggcaucaccgugagcagcaccuacugcagcaccaaccacgacuacaccaucuggaugcccgagaaccccagacugggcaccagcugcgacaucuucaccaacagcagaggcaagagagccagcaagggcagcaagaccugcggcuucguggacgagagaggccuguacaagagccugaagggcgccugcaagcugaagcugugcggcgugcugggccugagacugauggacggcaccugggccgccauccagaccagcgacgagaccaaguggugcccccccgaccagcuggugaaccugcacgacuucagaagcgacgagaucgagcaccuggugguggaggagcuggugaagaagagagaggagugccuggacgcccuggagagcaucaugaccaccaagagcgugagcuucagaagacugagccaccugagaaagcuggugcccggcuucggcaaggccuacaccaucuucaacaagacccugauggaggccgacgcccacuacaagagcgugagaaccuggaacgagaucauccccagcaagggcugccugagagugggcggcagaugccacccccacgugaacggcguguucuucaacggcaucauccugggccccgacggccacgugcugauccccgagaugcagagcagccugcugcagcagcacauggagcugcuggagagcagcgugaucccccugaugcacccccuggccgaccccagcaccguguucaaggacgacgacgaggccgaggacuucguggaggugcaccugcccgacgugcacaagcaggugagcggcguggaccugggccugcccagcuggggcaaguacgugcugaugagcgccggcgugcugaccgcccugaugcugaugaucuuccugaugaccugcugcagaagagccaacaucguggagagcgcccagcacagccugggcgagagaggcagaaaggugagcgugaccagccagagcggcagagugaucagcagcugggagagcuacaagagcggcggcgagaccaagcuguga

SEQ ID NO: 191926 - RNA, 1575 nt, Artificial Sequence
  derived and/or modified CDS sequence (opt4) from glycoprotein__RABV__LC018545.1
augaucccccaggcccugcuguucgugccccugcugguguucagccugugcuucggcaaguuccccaucuacaccauccccgacaagcugggccccuggagccccaucgacauccaccaccugagcugccccaacaaccuggugguggaggacgagggcugcaccaaccugagcggcuucagcuacauggagcugaaggugggcuacaucagcgccaucaaggugaacggcuucaccugcaccggcguggugaccgaggccgagaccuacaccaacuucgugggcuacgugaccaccaccuucaagagaaagcacuucagacccacccccgacgccugcagagccgccuacaacuggaagauggccggcgaccccagauacgaggagagccugcacaaccccuaccccgacuaccacuggcugagaaccgugaagaccaccaaggagagccuggugaucaucagccccagcguggccgaccuggaccccuacgacaagagccugcacagcagaguguuccccagcggcaagugcagcggcaucaccgugagcagcaccuacugcagcaccaaccacgacuacaccaucuggaugcccgagaaccccagacugggcaccagcugcgacaucuucaccaacagcagaggcaagagagccagcaagggcagcaagaccugcggcuucguggacgagagaggccuguacaagagccugaagggcgccugcaagcugaagcugugcggcgugcugggccugagacugauggacggcaccugggccgccauccagaccagcgacgagaccaaguggugcccccccgaccagcuggugaaccugcacgacuucagaagcgacgagaucgagcaccuggugguggaggagcuggugaagaagagagaggagugccuggacgcccuggagagcaucaugaccaccaagagcgugagcuucagaagacugagccaccugagaaagcuggugcccggcuucggcaaggccuacaccaucuucaacaagacccugauggaggccgacgcccacuacaaggccgugagaaccuggaacgagaucauccccagcaagggcugccugagagugggcggcagaugccacccccacgugaacggcguguucuucaacggcaucauccugggccccgacggccacgugcugauccccgagaugcagagcagccugcugcagcagcacauggagcugcuggagagcagcgugaucccccugaugcacccccuggccgaccccagcaccguguucaaggacgacgacgaggccgaggacuucguggaggugcaccugcccgacgugcacaagcaggugagcggcguggaccugggccugcccagcuggggcaaguacgugcugaugagcgccggcgugcugaccgcccugaugcugaugaucuuccugaugaccugcugcagaagagccaacagagccgagagcgcccagcacagccugggcgagagaggcagaaaggugagcgugaccagccagagcggcagagugaucagcagcugggagagcuacaagagcggcggcgagaccaagcuguga

SEQ ID NO: 191927 - RNA, 1575 nt, Artificial Sequence
  derived and/or modified CDS sequence (opt4) from glycoprotein__RABV__LC018546.1
augaucccccaggcccugcuguucgugccccugcuggugagcagccugugcuucggcaaguuccccaucuacaccauccccgacaagcugggccccuggagccccaucgacauccaccaccugagcugccccaacaaccuggugguggaggacgagggcugcaccaaccugagcggcuucagcuacauggagcugaaggugggcuacaucagcgccaucaaggugaacggcuucaccugcaccggcguggugaccgaggccgagaccuacaccaacuucgugggcuacgugaccaccaccuucaagagaaagcacuucagacccacccccgacgccugcagagccgccuacaacuggaagauggccggcgaccccagauacgaggagagccugcacaaccccuaccccgacuaccacuggcugagaaccgugaagaccaccaaggagagccuggugaucaucagccccagcguggccgaccuggaccccuacgacaagagccugcacagcagaguguuccccagcggcaagugcagcggcaucaccgugagcagcaccuacugcagcaccaaccacgacuacaccaucuggaugcccgagaaccccagacugggcaccagcugcgacaucuucaccaacagcagaggcaagagagccagcaagggcagcaagaccugcggcuucguggacgagagaggccuguacaagagccugaagggcgccugcaagcugaagcugugcggcgugcugggccugagacugauggacggcaccugggccgccauccagaccagcgacgagaccaaguggugcccccccgaccagcuggugaaccugcacgacuucagaagcgacgagaucgagcaccuggugguggaggagcuggugaagaagagagaggagugccuggacgcccuggagagcaucaugaccaccaagagcgugagcuucagaagacugagccaccugagaaagcuggugcccggcuucggcaaggccuacaccaucuucaacaagacccugauggaggccgacgcccacuacaagagcgugagaaccuggaacgagaucauccccagcaagggcugccugagagugggcggcagaugccacccccacgugaacggcguguucuucaacggcaucauccugggccccgacggccacgugcugauccccgagaugcagagcagccugcugcagcagcacauggagcugcuggagagcagcgugaucccccugaugcacccccuggccgaccccagcaccguguucaaggacgacgacgaggccgaggacuucguggaggugcaccugcccgacgugcacaagcaggugagcggcguggaccugggccugcccagcuggggcaaguacgugcugaccagcgccggcgugcugaccgcccugaugcugaugaucuuccugaugaccugcugcagaaaggccaacagagccgagagcgcccagcacagccugggcgagagaggcagaaaggugagcgugaccagccagagcggcagagugaucagcagcugggagagcuacaagagcggcggcgagaccaagcuguga

SEQ ID NO: 191928 - RNA, 1575 nt, Artificial Sequence
  derived and/or modified CDS sequence (opt4) from glycoprotein__RABV__LC018548.1
augaucccccaggcccugcuguucgugccccugcugguguucagccugugcuucggcaaguuccccaucuacaccauccccgacaagcugggccccuggagccccaucgacauccaccaccugagcugccccaacaaccuggugguggaggacgagggcugcaccaaccugagcggcuucagcuacauggagcugaaggugggcuacaucagcgccaucaaggugaacggcuucaccugcaccggcguggugaccgaggccgagaccuacaccaacuucgugggcuacgugaccaccaccuucaagagaaagcacuucagacccacccccgacgccugcagagccgccuacaacuggaagauggccggcgaccccagauacgaggagagccugcacaaccccuaccccgacuaccacuggcugagaaccgugaagaccaccaaggagagccuggugaucaucagccccagcguggccgaccuggaccccuacgacaagagccugcacagcagaguguuccccagcggcaagugcagcggcaucaccgugagcagcaccuacugcagcaccaaccacgacuacaccaucuggaugcccgagaaccccagacugggcaccagcugcgacaucuucaccaacagcagaggcaagagagccagcaagggcagcaagaccugcggcuucguggacgagagaggccuguacaagagccugaagggcgccugcaagcugaagcugugcggcgugcccggccugagacugauggacggcaccugggccgccauccagaccagcgacgagaccaaguggugcccccccgaccagcuggugaaccugcacgacuucagaagcgacgagaucgagcaccuggugguggaggagcuggugaagaagagagaggagugccuggacgcccuggagagcaucaugaccaccaagagcgugagcuucagaagacugagccaccugagaaagcuggugcccggcuucggcaaggccuacaccaucuucaacaagacccugauggaggccgacgcccacuacaagagcgugagaaccuggaacgagaucauccccagcaagggcugccugagagugggcggcagaugccacccccacgugaacggcguguucuucaacggcaucauccugggccccgacggccacgugcugauccccgagaugcagagcagccugcugcagcagcacauggagcugcuggagagcagcgugaucccccugaugcacccccuggccgaccccagcaccguguucaaggacgacgacgaggccgaggacuucguggaggugcaccugcccgacgugcacaagcaggugagcggcguggaccugggccugcccagcuggggcaaguacgugcugaugagcgccggcgugcugaccgcccugaugcugaugaucuuccugaugaccugcugcagaagagccaacagagccgagagcgcccagcacagccugggcgagagaggcagaaaggugagcgugaccagccagagcggcagagugaucagcagcugggagagcuacaagagcggcggcgagaccaagcuguga

SEQ ID NO: 191929 - RNA, 1575 nt, Artificial Sequence; identical to SEQ ID NO: 190631
  derived and/or modified CDS sequence (opt4) from glycoprotein__RABV__LC018549.1

SEQ ID NO: 191930 - RNA, 1575 nt, Artificial Sequence; identical to SEQ ID NO: 191897
  derived and/or modified CDS sequence (opt4) from glycoprotein__RABV__LC018552.1

SEQ ID NO: 191931 - RNA, 1575 nt, Artificial Sequence; identical to SEQ ID NO: 190632
  derived and/or modified CDS sequence (opt4) from glycoprotein__RABV__LC018553.1

SEQ ID NO: 191932 - RNA, 1575 nt, Artificial Sequence
  derived and/or modified CDS sequence (opt4) from glycoprotein__RABV__LC018554.1
augaucccccaggcccugcuguucgugccccugcugguguucagccugugcuucggcaaguuccccaucuacaccauccccgacaagcugggccccuggagccccaucgacauccaccaccugagcugccccaacaaccuggugguggaggacgagggcugcaccaaccugagcggcuucagcuacauggagcugaaggugggcuacaucagcgccaucaaggugaacggcuucaccugcaccggcguggugaccgaggccgagaccuacaccaacuucgugggcuacgugaccaccaccuucaagagaaagcacuucagacccacccccgacgccugcagagccgccuacaacuggaagauggccggcgaccccagauacgaggagagccugcacaaccccuaccccgacuaccacuggcugagaaccgugaagaccaccaaggagagccuggugaucaucagccccagcguggccgaccuggaccccuacgacaagagccugcacagcagaguguuccccagcggcaagugcagcggcaucaccgugagcagcaccuacugcagcaccaaccacgacuacaccaucuggaugcccgagaaccccagacugggcaccagcugcgacaucuucaccaacagcagaggcaagagagccagcaagggcagcaagaccugcggcuucguggacgagagaggccuguacaagagccugaagggcgccugcaagcugaagcugugcggcgugcugggccugagacugauggacggcaccugggccgccauccagaccagcgacgagaccaaguggugcccccccgaccagcuggugaaccugcacgacuucagaagcgacgagaucgagcaccuggugguggaggagcuggugaagaagagagaggagugccuggacgcccuggagagcaucaugaccaccaagagcgugagcuucagaagacugagccaccugagaaagcuggugcccggcuucggcaaggccuacaccaucuucaacaagacccugauggaggccgacgcccacuacaagagcgugagaaccuggaacgagaucauccccagcaagggcugccugagagugggcggcagaugccacccccacgugaacggcguguucuucaacggcaucauccugggccccgacggccacgugcugauccccgagaugcagagcagccugcugcagcagcacauggagcugcuggagagcagcgugaucccccugaugcacccccuggccgaccccagcaccguguucaaggacgacgacgaggccgaggacuucguggaggugcaccugcccgacgugcacaagcaggugagcggcguggaccugggcuuccccagcuggggcaaguacgugcugaugagcgccggcgugcugaccagccugaugcugaugaucuuccugaugaccugcugcagaagagccaacagaguggagagcgcccagcacagccugggcgagagaggcagaaaggugagcgugaccagccagagcggcagagugaucagcagcugggagagcuacaagagcggcggcgagaccaagcuguga

SEQ ID NO: 191933 - RNA, 1575 nt, Artificial Sequence
  derived and/or modified CDS sequence (opt4) from glycoprotein__RABV__LC018555.1
augaucccccaggcccugcuguucgugccccugcugguguucagccugugcuucggcaaguuccccaucuacaccauccccgacaagcugggccccuggagccccaucgacauccaccaccugagcugccccaacaaccuggugguggaggacgagggcugcaccaaccugagcggcuucagcuacauggagcugaaggugggcuacaucagcgccaucaaggugaacggcuucaccugcaccggcguggugaccgaggccgagaccuacaccaacuucgugggcuacgugaccaccaccuucaagagaaagcacuucagacccacccccgacgccugcagagccgccuacaacuggaagauggccggcgaccccagauacgaggagagccugcacaaccccuaccccgacuaccacuggcugagaaccgugaagaccaccaaggagagccuggugaucaucagccccagcguggccgaccuggaccccuacgacaagagccugcacagcagaguguuccccagcggcagaugcagcggcaucaccgugagcagcaccuacugcagcaccaaccacgacuacaccaucuggaugcccgagaaccccagacugggcaccagcugcgacaucuucaccaacagcagaggcaagagagccagcaagggcagcaagaccugcggcuucguggacgagagaggccuguacaagagccugaagggcgccugcaagcugaagcugugcggcgugcugggccugagacugauggacggcaccugggccgccauccagaccagcgacgagaccaaguggugcccccccgaccagcuggugaaccugcacgacuucagaagcgacgagaucgagcaccuggugguggaggagcuggugaagaagagagaggagugccuggacgcccuggagagcaucaugaccaccaagagcgugagcuucagaagacugagccaccugagaaagcuggugcccggcuucggcaaggccuacaccaucuucaacaagacccugauggaggccgacgcccacuacaagagcgugagaaccuggaacgagaucauccccagcaagggcugccugagagugggcggcagaugccacccccacgugaacggcguguucuucaacggcaucauccugggccccgacggccacgugcugauccccgagaugcagagcagccugcugcagcagcacauggagcugcuggagagcagcgugaucccccugaugcacccccuggccgaccccagcaccguguucaaggacgacgacgaggccgaggacuucguggaggugcaccugcccgacgugcacaagcaggugagcggcguggaccugggccugcccagcuggggcaaguacgugcugaugagcgccggcgugcugaccgcccugaugcugaugaucuuccugaugaccugcugcagaagagccaacagagccgagagcgcccagcacagccugggcgagagaggcagaaaggugagcgugaccagccagagcggcagagugaucagcagcugggagagcuacaagagcggcggcgagaccaagcuguga

SEQ ID NO: 191934 - RNA, 1575 nt, Artificial Sequence; identical to SEQ ID NO: 190632
  derived and/or modified CDS sequence (opt4) from glycoprotein__RABV__LC018556.1

SEQ ID NO: 191935 - RNA, 1575 nt, Artificial Sequence
  derived and/or modified CDS sequence (opt4) from glycoprotein__RABV__LC018557.1
augaucccccaggcccugcuguucgugccccugcugguguucagccugugcuucggcaaguuccccaucuacaccauccccgacaagcugggccccuggagccccaucgacauccaccaccugagcugccccaacaaccuggugguggaggacgagggcugcaccaaccugagcggcuucagcuacauggagcugaaggugggcuacaucagcgccaucaaggugaacggcuucaccugcaccggcguggugaccgaggccgagaccuacaccaacuucgugggcuacgugaccaccaccuucaagagaaagcacuucagacccacccccgacgccugcagagccgccuacaacuggaagauggccggcgaccccagauacgaggagagccugcacaaccccuaccccgacuaccacuggcugagaaccgugaagaccaccaaggagagccuggugaucaucagccccagcguggccgaccuggaccccuacgacaagagccugcacagcagaguguuccccagcggcaagugcagcggcaucaccgugagcagcaccuacugcagcaccaaccacgacuacaccaucuggaugcccgagaaccccagacugggcaccagcugcgacaucuucaccaacagcagaggcaagagagccagcaagggcagcaagaccugcggcuucguggacgagagaggccuguacaagagccugaagggcgccugcaagcugaagcugugcggcgugcugggccugagacugauggacggcaccugggccgccauccagaccagcgacgagaccaaguggugcccccccgaccagcuggugaaccugcacgacuucagaagcgacgagaucgagcaccuggugguggaggagcuggugaagaagagagaggagugccuggacgcccuggagagcaucaugaccaccaagagcgugagcuucagaagacugagccaccugagaaagcuggugcccggcuucggcaaggccuacaccaucuucaacaagacccugauggaggccgacgcccacuacaagagcgugagaaccuggaacgagaucauccccagcaagggcugccugagagugggcggcagaugccacccccacgugaacggcguguucuucaacggcaucauccugggccccgacggccacgugcugauccccgagaugcagagcagccugcugcagcagcacauggagcugcuggagagcagcgugaucccccugaugcacccccuggccgaccccagcaccguguucaaggacgacgacgaggccgaggacuucguggaggugcaccugcccgacgugcacaagcaggugagcggcguggaccugggccugcccagcuggggcaaguacgugcugaugagcgccugcgugcugaccgcccugaugcugaugaucuuccugaugaccugcugcagaagagccaacagagccgagagcgcccagcacagccugggcgagagaggcagaaaggugagcgugaccagccagagcggcagagugaucagcagcugggagagcuacaagagcggcggcgagaccaagcuguga

SEQ ID NO: 191936 - RNA, 1575 nt, Artificial Sequence; identical to SEQ ID NO: 190655
  derived and/or modified CDS sequence (opt4) from glycoprotein__RABV__LC018558.1

SEQ ID NO: 191937 - RNA, 1575 nt, Artificial Sequence; identical to SEQ ID NO: 190655
  derived and/or modified CDS sequence (opt4) from glycoprotein__RABV__LC018561.1

SEQ ID NO: 191938 - RNA, 1575 nt, Artificial Sequence; identical to SEQ ID NO: 190655
  derived and/or modified CDS sequence (opt4) from glycoprotein__RABV__LC018562.1

SEQ ID NO: 191939 - RNA, 1575 nt, Artificial Sequence; identical to SEQ ID NO: 190655
  derived and/or modified CDS sequence (opt4) from glycoprotein__RABV__LC018564.1

SEQ ID NO: 191940 - RNA, 1575 nt, Artificial Sequence
  derived and/or modified CDS sequence (opt4) from glycoprotein__RABV__LC018565.1
augaucccccaggcccugcuguucgugccccugcugguguucagccugugcuucggcaaguuccccaucuacaccauccccgacaagcugggccccuggagccccaucgacauccaccaccugagcugccccaacaaccuggugguggaggacgagggcugcaccaaccugagcggcuucagcuacauggagcugaaggugggcuacaucagcgccaucaaggugaacggcuucaccugcaccggcguggugaccgaggccgagaccuacaccaacuucgugggcuacgugaccaccaccuucaagagaaagcacuucagacccacccccgacgccugcagagccgccuacaacuggaagauggccggcgaccccagauacgaggagagccugcacaaccccuaccccgacuaccacuggcugagaaccgugaagaccaccaaggagagccuggugaucaucagccccagcguggccgaccuggaccccuacgacaagagccugcacagcagaguguuccccagcggcaagugcagcggcaucaccgugagcagcaccuacugcagcaccaaccacgacuacaccaucuggaugcccgagaaccccagacugggcaccagcugcgacaucuucaccaacagcagaggcaagagagccagcaagggcagcaagaccugcggcuucguggacgagagaggccuguacaagagccugaagggcgccugcaagcugaagcugugcggcgugcugggccugagacugauggacggcaccugggccgccauccagaccagcgacgagaccaaguggugcccccccgaccagcuggugaaccugcacgacuucagaagcgacgagaucgagcaccuggugguggaggagcuggugaagaagagagaggagugccuggacgcccuggagagcaucaugaccaccaagagcgugagcuucagaagacugagccaccugagaaagcuggugcccggcuucggcaaggccuacaccaucuucaacaagacccugauggaggccgacgcccacuacaagagcgugagaaccuggaacgagaucauccccagcaagggcugccugagagugggcggcagaugccacccccacgugaacggcguguucuucaacggcaucauccugggccccgacggccacgugcugauccccgagaugcagagcagccugcugcagcagcacauggagcugcuggagagcagcgugaucccccugaugcacccccuggccgaccccagcaccguguucaaggacgacgacgaggccgaggacuucguggaggugcaccugcccgacgugcacaagcaggugagcggcguggaccugggccugcccagcuggggcaacuacgugcugaugagcgccggcgugcugaccgcccugaugcugaugaucuuccugaugaccugcugcagaagaaccaacagagccgagagcgcccagcacagccugggcgagagaggcagaaaggugagcgugaccagccagagcggcagagugaucagcagcugggagagcuacaagagcggcggcgagaccaagcuguga

SEQ ID NO: 191941 - RNA, 1575 nt, Artificial Sequence; identical to SEQ ID NO: 190655
  derived and/or modified CDS sequence (opt4) from glycoprotein__RABV__LC018567.1

SEQ ID NO: 191942 - RNA, 1575 nt, Artificial Sequence
  derived and/or modified CDS sequence (opt4) from glycoprotein__RABV__LC018569.1
augaucccccaggcccugcuguucgugccccugcugguguucagccugugcuucggcaaguuccccaucuacaccauccccgacaagcugggccccuggagccccaucgacauccaccaccugagcugccccaacaaccuggugguggaggacgagggcugcaccaaccugagcggcuucagcuacauggagcugaaggugggcuacaucagcgccaucaaggugaacggcuucaccugcaccggcguggugaccgaggccgagaccuacaccaacuucgugggcuacgugaccaccaccuucaagagaaagcacuucagacccacccccgacgccugcagagccgccuacaacuggaagauggccggcgaccccagauacgaggagagccugcacaaccccuaccccgacuaccacuggcugagaaccgugaagaccaccaaggagagccuggugaucaucagccccagcguggccgaccuggaccccuacgacaagagccugcacagcagaguguuccccagcggcaagugcagcggcaucaccgugagcagcaccuacugcagcaccaaccacgacuacaccaucuggaugcccgagaaccccagacugggcaccagcugcgacaucuucaccaacagcagaggcaagagagccagcaagggcagcaagaccugcggcuucguggacgagagaggccuguacaagagccugaagggcgccugcaagcugaagcugugcggcgugcugggccugagacugauggacggcaccugggccgccauccagaccagcgacgagaccaaguggugcccccccgaccagcuggugaaccugcacgacuuccacagcgacgagaucgagcaccuggugguggaggagcuggugaagaagagagaggagugccuggacgcccuggagagcaucaugaccaccaagagcgugagcuucagaagacugagccaccugagaaagcuggugcccggcuucggcaaggccuacaccaucuucaacaagacccugauggaggccgacgcccacuacaagagcgugagaaccuggaacgagaucauccccagcaagggcugccugagagugggcggcagaugccacccccacgugaacggcguguucuucaacggcaucauccugggccccgacggccacgugcugauccccgagaugcagagcagccugcugcagcagcacauggagcugcuggagagcagcgugaucccccugaugcacccccuggccgaccccagcaccguguucaaggacgacgacgaggccgaggacuucguggaggugcaccugcccgacgugcacaagcaggugagcggcguggaccugggccugcccagcuggggcaaguacgugcugaugagcgccggcgugcugaccgcccugaugcugaugaucuuccugaugaccugcugcagaagaaccaacagagccgagagcgcccagcacagccugggcgagagaggcagaaaggugagcgugaccagccagagcggcagagugaucagcagcugggagagcuacaagagcggcggcgagaccaagcuguga

SEQ ID NO: 191943 - RNA, 1575 nt, Artificial Sequence; identical to SEQ ID NO: 190655
  derived and/or modified CDS sequence (opt4) from glycoprotein__RABV__LC018570.1

SEQ ID NO: 191944 - RNA, 1575 nt, Artificial Sequence
  derived and/or modified CDS sequence (opt4) from glycoprotein__RABV__LC018571.1
augaucccccaggcccugcuguucgugccccugcugguguucagccugugcuucggcaaguuccccaucuacaccauccccgacaagcugggccccuggagccccaucgacauccaccaccugagcugccccaacaaccuggugguggaggacgagggcugcaccaaccugagcggcuucagcuacauggagcugaaggugggcuacaucagcgccaucaaggugaacggcuucaccugcaccggcguggugaccgaggccgagaccuacaccaacuucgugggcuacgugaccaccaccuucaagagaaagcacuucagacccacccccgacgccugcagagccgccuacaacuggaagauggccggcgaccccagauacgaggagagccugcacaaccccuaccccgacuaccacuggcugagaaccgugaagaccaccaaggagagccuggugaucaucagccccagcguggccgaccuggaccccuacgacaagagccugcacagcagaguguucagcagcggcaagugcagcggcaucaccgugagcagcaccuacugcagcaccaaccacgacuacaccaucuggaugcccgagaaccccagacugggcaccagcugcgacaucuucaccaacagcagaggcaagagagccagcaagggcagcaagaccugcggcuucguggacgagagaggccuguacaagagccugaagggcgccugcaagcugaagcugugcggcgugcugggccugagacugauggacggcaccugggccgccauccagaccagcgacgagaccaaguggugcccccccgaccagcuggugaaccugcacgacuucagaagcgacgagaucgagcaccuggugguggaggagcuggugaagaagagagaggagugccuggacgcccuggagagcaucaugaccaccaagagcgugagcuucagaagacugagccaccugagaaagcuggugcccggcuucggcaaggccuacaccaucuucaacaagacccugauggaggccgacgcccacuacaagagcgugagaaccuggaacgagaucauccccagcaagggcugccugagagugggcggcagaugccacccccacgugaacggcguguucuucaacggcaucauccugggccccgacggccacgugcugauccccgagaugcagagcagccugcugcagcagcacauggagcugcuggagagcagcgugaucccccugaugcacccccuggccgaccccagcaccguguucaaggacgacgacgaggccgaggacuucguggaggugcaccugcccgacgugcacaagcaggugagcggcguggaccugggccugcccagcuggggcaaguacgugcugaugagcgccggcgugcugaccgcccugaugcugaugaucuuccugaugaccugcugcagaagaaccaacagagccgagagcgcccagcacagccugggcgagagaggcagaaaggugagcgugaccagccagagcggcagagugaucagcagcugggagagcuacaagagcggcggcgagaccaagcuguga

SEQ ID NO: 191945 - RNA, 1575 nt, Artificial Sequence; identical to SEQ ID NO: 190655
  derived and/or modified CDS sequence (opt4) from glycoprotein__RABV__LC018572.1

SEQ ID NO: 191946 - RNA, 1575 nt, Artificial Sequence; identical to SEQ ID NO: 190655
  derived and/or modified CDS sequence (opt4) from glycoprotein__RABV__LC018573.1

SEQ ID NO: 191947 - RNA, 1575 nt, Artificial Sequence; identical to SEQ ID NO: 190655
  derived and/or modified CDS sequence (opt4) from glycoprotein__RABV__LC018581.1

SEQ ID NO: 191948 - RNA, 1575 nt, Artificial Sequence
  derived and/or modified CDS sequence (opt4) from glycoprotein__RABV__LC018584.1
augaucccccaggcccugcuguucgugccccugcugguguucagccugugcuucggcaaguuccccaucuacaccauccccgacaagcugggccccuggagccccaucgacauccaccaccugagcugccccaacaaccuggugguggaggacgagggcugcaccaaccugagcggcuucagcuaccuggagcugaaggugggcuacaucagcgccaucaaggugaacggcuucaccugcaccggcguggugaccgaggccgagaccuacaccaacuucgugggcuacgugaccaccaccuucaagagaaagcacuucagacccaugcccgacgccugcagagccgccuacaacuggaagauggccggcgaccccagauacgaggagagccugcacaaccccuaccccgacuaccacuggcugagaaccgugaagaccaccaaggagagccuggugaucaucagccccagcguggccgaccuggaccccuacaacaagagccugcacagcagaguguuccccagcggcaagugcagcggcaucaccgugagcagcaccuacugcagcaccaaccacgacuacaccaucuggaugcccgagaaccccagacugggcaccagcugcgacaucuucaccaacagcagaggcaagagagccagcaagggcagcaagaccugcggcuucguggacgagagaggccuguacaagagccugaagggcgccugcaagcugaagcugugcggcgugcugggccugagacugauggacggcaccugggccgccauccagaccagcgacgagaccaaguggugcccccccgaccagcuggugaaccugcacgacuucagaagcgacgagaucgagcaccuggugguggaggagcuggugaagaagagagaggagugccuggacgcccuggagagcaucaugaccaccaagagcgugagcuucagaagacugagccaccugagaaagcuggugcccggcuucggcaaggccuacaccaucuucaacaagacccugauggaggccgacgcccacuacaagagcgugagaaccuggaacgagauccugcccagcaagggcugccugagagugggcggcagaugccacccccacgugaacggcguguucuucaacggcaucauccugggccccgacggccacgugcugauccccgagaugcagagcagccugcugcagcagcacauggagcugcuggagagcagcgugaucccccugaugcacccccuggccgaccccagcaccguguucaaggacgacgacgaggccgaggacuucguggaggugcaccugcccgacgugcacaagcaggugagcggcguggaccugggccugcccagcuggggcaaguacgugcugaugagcgccggcgugcugaccgcccugaugcugaugaucuuccugaugaccugcugcagaagacccaacagagccgagagcgcccagcacagccugggcgagagagagaagaaggugagcgugaccagccagagcggcagagugaucagcagcugggagagcuacaagagcggcggcgagaccaagcuguga

SEQ ID NO: 191949 - RNA, 1575 nt, Artificial Sequence
  derived and/or modified CDS sequence (opt4) from glycoprotein__RABV__LC018585.1
augaucccccaggcccugcuguucgugccccugcugguguucagccugugcuucggcaaguuccccaucuacaccauccccgacaagcugggccccuggagccccaucgacauccaccaccugagcugccccaacaaccuggugguggaggacgagggcugcaccaaccugagcggcuucagcuaccuggagcugaaggugggcuacaucagcgccaucaaggugaacggcuucaccugcaccggcguggugaccgaggccgagaccuacaccaacuucgugggcuacgugaccaccaccuucaagagaaagcacuucagacccaugcccgacgccugcagagccgccuacaacuggaagauggccggcgaccccagauacgaggagagccugcacaaccccuaccccgacuaccacuggcugagaaccgugaagaccaccaaggagagccuggugaucaucagccccagcguggccgaccuggaccccuacgacaagagccugcacagcagaguguuccccagcggcaagugcagcggcaucaccgugagcagcaccuacugcagcaccaaccacgacuacaccaucuggaugcccgagaaccccagacugggcaccagcugcgacaucuucaccaacagcagaggcaagagagccagcaagggcagcaagaccugcggcuucguggacgagagaggccuguacaagagccugaagggcgccugcaagcugaagcugugcggcgugcugggccugagacugauggacggcaccugggccgccauccagaccagcgacgagaccaaguggugcccccccgaccagcuggugaaccugcacgacuucagaagcgacgagaucgagcaccuggugguggaggagcuggugaagaagagagaggagugccuggacgcccuggagagcaucaugaccaccaagagcgugagcuucagaagacugagccaccugagaaagcuggugcccggcuucggcaaggccuacaccaucuucaacaagacccugauggaggccgacgcccacuacaagagcgugagaaccuggaacgagaucauccccagcaagggcugccugagagugggcggcagaugccacccccacgugaacggcguguucuucaacggcaucauccugggccccgacggccacgugcugauccccgagaugcagagcagccugcugcagcagcacauggagcugcuggagagcagcgugaucccccugaugcacccccuggccgaccccagcaccguguucaaggacgacgacgaggccgaggacuucguggaggugcaccugcccgacgugcacaagcaggugagcggcguggaccugggccugcccagcuggggcaaguacgugcugaugagcgccggcgugcugaccgcccugaugcugaugaucuuccugaugaccugcugcagaagacccaacagagccgagagcgcccagcacagccugggcgagagagagaagaaggugagcgugaccagccagagcggcagagugaucagcagcugggagagcuacaagagcggcggcgagaccaagcuguga

SEQ ID NO: 191950 - RNA, 1575 nt, Artificial Sequence; identical to SEQ ID NO: 190632
  derived and/or modified CDS sequence (opt4) from glycoprotein__RABV__LC018586.1

SEQ ID NO: 191951 - RNA, 1575 nt, Artificial Sequence
  derived and/or modified CDS sequence (opt4) from glycoprotein__RABV__LC018587.1
augaucccccaggcccugcuguucgugccccugcugguguucagccugugcuucggcaaguuccccaucuacaccauccccgacaagcugggccccuggagccccaucgacauccaccaccugagcugccccaacaaccuggugguggaggacgagggcugcaccaaccugagcggcuucagcuacauggagcugaaggugggcuacaucagcgccaucaaggugaacggcuucaccugcaccggcguggugaccgaggccgagaccuacaccaacuucgugggcuacgugaccaccaccuucaagagaaagcacuucagacccacccccgacgccugcagagccgccuacaacuggaagauggccggcgaccccagauacgaggagagccugcacaaccccuaccccgacuaccacuggcugagaaccgugaagaccaccaaggagagccuggugaucaucagccccagcguggccgaccuggaccccuacgacaagagccugcacagcagaguguuccccagcggcaagugcagcggcaucaccgugagcagcaccuacugcagcaccaaccacgacuacaccaucuggaugcccgagaaccccagacugggcaccagcugcgacaucuucaccaacagcagaggcaagagagccagcaagggcagcaagaccugcggcuucguggacgagagaggccuguacaagagccugaagggcgccugcaagcugaagcugugcggcgugcugggccugagacugauggacggcaccuggguggccauccagaccagcgacgagaccaaguggugcccccccgaccagcuggugaaccugcacgacuucagaagcgacgagaucgagcaccuggugguggaggagcuggugaagaagagagaggagugccuggacgcccuggagagcaucaugaccaccaagagcgugagcuucagaagacugagccaccugagaaagcuggugcccggcuucggcaaggccuacaccaucuucaacaagacccugauggaggccgacgcccacuacaagagcgugagaaccuggaacgagaucauccccagcaagggcugccugagagugggcggcagaugccacccccacgugaacggcguguucuucaacggcaucauccugggccccgacggccacgugcugauccccgagaugcagagcagccugcugcagcagcacauggagcugcuggagagcagcgugaucccccugaugcacccccuggccgaccccagcaccguguucaaggacgacgacgaggccgaggacuucguggaggugcaccugcccgacgugcacaagcaggugagcggcguggaccugggccugcccagcuggggcaaguacgugcugaugagcgccggcgugcugaccgcccugaugcugaugaucuuccugaugaccugcugcagaagagccaacagagccgagagcgcccagcacagccugggcgagagaggcagaaaggugagcgugaccagccagagcggcagagugaucagcagcugggagagcuacaagagcggcggcgagaccaagcuguga

SEQ ID NO: 191952 - RNA, 1575 nt, Artificial Sequence; identical to SEQ ID NO: 190632
  derived and/or modified CDS sequence (opt4) from glycoprotein__RABV__LC018588.1

SEQ ID NO: 191953 - RNA, 1575 nt, Artificial Sequence
  derived and/or modified CDS sequence (opt4) from glycoprotein__RABV__LC018589.1
augaucccccaggcccugcuguucgugccccugcugguguucagccugugcuucggcaaguuccccaucuacaccauccccgacaagcugggccccuggagccccaucgacauccaccaccugagcugccccaacaaccuggugguggaggacgagggcugcaccaaccugagcggcuucagcuacauggagcugaaggugggcuacaucagcgccaucaaggugaacggcuucaccugcaccggcguggugaccgaggccgagaccuacaccaacuucgugggcuacgugaccaccaccuucaagagaaagcacuucagacccacccccgacgccugcagagccgccuacaacuggaagauggccggcgaccccagauacgaggagagccugcacaaccccuaccccgacuaccacuggcugagaaccgugaagaccaccaaggagagccuggugaucaucagccccagcguggccgaccuggaccccuacgacaagagccugcacagcagaguguuccccagcggcaagugcagcggcaucaccgugagcagcaccuacugcagcaccaaccacgacuacaccaucuggaugcccgagaaccccagacugggcaccagcugcgacaucuucaccaacagcagaggcaagagagccagcaagggcagcaagaccugcggcuucguggacgagagaggccuguacaagagccugaagggcgccugcaagcugaagcugugcggcgugcugggccugagacugauggacggcaccugggccgccauccagaccagcgacgagaccaaguggugcccccccgaccagcuggugaaccugcacgacuucagaagcgacgagaucgagcaccuggugguggaggagcuggugaagaagagagaggagugccuggacgcccuggagagcaucaugaccaccaagagcgugagcuucagaagacugagccaccugagaaagcuggugcccggcuucggcaaggccuacaccaucuucaacaagacccugauggaggccgacgcccacuacaagagcgugagaaccuggaacgagaucauccccagcaagggcugccugagagugggcggcagaugccacccccacgugaacggcguguucuucaacggcaucauccugggccccgacggccacgugcugauccccgagaugcagagcagccugcugcagcagcacauggagcugcuggagagcagcgugaucccccugaugcacccccuggccgaccccagcaccguguucaaggacgacgacgaggccgaggacuucguggaggugcaccugcccgacgugcacaagcaggugagcggcguggaccugggccugcccagcuggggcaaguacgugcugaugagcgccggcgugcugaccgcccugaugcugaugaucuuccugaugaccugcugcagaagagccaacagagccgagagcgccagacacagccugggcgagagaggcagaaaggugagcgugaccagccagagcggcagagugaucagcagcugggagagcuacaagagcggcggcgagaccaagcuguga

SEQ ID NO: 191954 - RNA, 1575 nt, Artificial Sequence
  derived and/or modified CDS sequence (opt4) from glycoprotein__RABV__LC018590.1
augaucccccaggcccugcuguucgugccccugcugguguucagccugugcuucggcaaguuccccaucuacaccauccccgacaagcugggccccuggagccccaucgacauccaccaccugagcugccccaacaaccuggugguggaggacgagggcugcaccaaccugagcggcuucagcuacauggagcugaaggugggcuacaucagcgccaucaaggugaacggcuucaccugcaccggcguggugaccgaggccgagaccuacaccaacuucgugggcuacgugaccaccaccuucaagagaaagcacuucagacccacccccgacgccugcagagccgccuacaacuggaagauggccggcgaccccagauacgaggagagccugcacaaccccuaccccgacuaccacuggcugagaaccgugaagaccaccaaggagagccuggugaucaucagccccagcguggccgaccuggaccccuacgacaagagccugcacagcagaguguuccccagcggcaagugcagcggcaucaccgugagcagcaccuacugcagcaccaaccacgacuacaccaucuggaugcccgagaaccccagacugggcaccagcugcgacaucuucaucaacagcagaggcaagagagccagcaagggcagcaagaccugcggcuucguggacgagagaggccuguacaagagccugaagggcgccugcaagcugaagcugugcggcgugcccggccugagacugauggacggcaccugggccgccauccagaccagcgacgagaccaaguggugcccccccgaccagcuggugaaccugcacgacuucagaagcgacgagaucgagcaccuggugguggaggagcuggugaagaagagagaggagugccuggacgcccuggagagcaucaugaccaccaagagcgugagcuucagaagacugagccaccugagaaagcuggugcccggcuucggcaaggccuacaccaucuucaacaagacccugauggaggccgacgcccacuacaagagcgugagaaccuggaacgagaucauccccagcaagggcugccugagagugggcggcagaugccacccccacgugaacggcguguucuucaacggcaucauccugggccccgacggccacgugcugauccccgagaugcagagcagccugcugcagcagcacauggagcugcuggagagcagcgugaucccccugaugcacccccuggccgaccccagcaccguguucaaggacgacgacgaggccgaggacuucguggaggugcaccugcccgacgugcacaagcaggugagcggcguggaccugggccugcccagcuggggcaaguacgugcugaugagcgccggcgugcugaccgcccugaugcugaugaucuuccugaugaccugcugcagaagagccaacagagccgagagcgcccagcacagccugggcgagagaggcagaaaggugagcgugaccagccagagcggcagagugaucagcagcugggagagcuacaagagcggcggcgagaccaagcuguga

SEQ ID NO: 191955 - RNA, 1575 nt, Artificial Sequence
  derived and/or modified CDS sequence (opt4) from glycoprotein__RABV__LC071936.1
augaucccccaggcccugcugcuggugccccugcugguguucccccugugcuucggcaaguuccccaucuacaccauccccgacaagcugggccccuggagccccaucgacauccaccaccugagcugccccaacaaccuggugguggaggacgagggcugcaccaaccugagcggcuucagcuacauggagcugaaggugggcuacaucagcgccaucaaggugaacggcuucaccugcaccggcguggugaccgaggccgagaccuacaccaacuucgugggcuacgugaccaccaccuucaagagaaagcacuucagacccacccccgacgccugcagagccgccuacaacuggaagauggccggcgaccccagauacgaggagagccugcacaaccccuaccccgacuaccacuggcugagaaccgugaaggccaccaaggagagccuggugaucaucagccccagcgugagcgaccuggaccccuacgacaagagccugcacagcagaguguuccccagcggcaagugcagcggcaucaccgugagcagcaccuacugccccaccagccacgacuacaccaucuggaugcccgagaaccccagacugggcaccagcugcgacaucuucaucaacagcagaggcaagagagccagcaagggcagcaagaccugcggcuucguggacgagagaggccuguacaagagccugaagggcgccugcaagcugaagcugugcggcgugcugggccugagacugauggacggcaccugggccgccauccagaccagcgacgaggccaaguggugcccccccgaccagcuggugaacauccacgacuuccacagcgacgagaucgagcaccuggugguggaggagcuggugaagaagagagaggagugccuggacgcccuggagagcaucaugaccaccaagagcgugagcuucagaagacugagccaccugagaaagcuggugcccggcuucggcaaggccuacaccaucuucaacaagacccugauggaggccgacgcccacuacaagagcgugagaaccuggaacgagaucauccccagcaagggcugccugagagugggcggcagaugccacccccacgugaacggcguguucuucaacggcaucauccugggccccgacggccacgugcugauccccgagaugcagagcagccugcugcagcagcacauggagcugcuggagagcagcgugaucccccugaugcacccccuggccgaccccagcaccguguucaaggacggcgacgaggccgaggacuucguggaggugcaccugcccgacgugcacaagcaggugagcggcguggaccugggccugcccagcuggggcaaguacgugcugaugagcgugggcacccugaucgcccugauggugaugaucuuccugaugaccugcugcagaaaggccaacggcguggagagcaugagacacagacugggcgagaccggcagaaaggugagcgugaccagccagagcggcagagugaucagcagcugggagagcuacaagagcggcggcgagaccaagcuguga

SEQ ID NO: 191956 - RNA, 1575 nt, Artificial Sequence
  derived and/or modified CDS sequence (opt4) from glycoprotein__RABV__LC071937.1
augaucccccaggcccugcuguucgugccccugcugguguucagccugugcuucggcaaguuccccaucuacaccauccccgacaagcugggccccuggagccccaucgacauccaccaccugagcugccccaacaaccuggugguggaggacgagggcugcaccaaccugagcggcuucagcuacauggagcugaaggugggcuacaucagcgccaucaaggugaacggcuucaccugcaccggcguggugaccgaggccgagaccuacaccaacuucgugggcuacgugaccaccaccuucaagagaaagcacuucagacccacccccgacgccugcagagccgccuacaacuggaagauggccggcgaccccagauacgaggagagccugcacaaccccuaccccgacuaccacuggcugagaaccgugaagaccaccaaggagagccuggugaucaucagccccagcgugagcgaccuggaccccuacgacaagagccugcacagcagaguguuccccagcggcaagugcagcggcaucaccgugagcagcaccuacugccccaccaaccacgacuacaccaucuggaugcccgagaaccccagacugggcaccagcugcgacaucuucaccaccagcagaggcaagagagccagcaagggcggcaagaccugcggcuucguggacgagagaggccuguacaagagccugaagggcgccugcaagcugaagcugugcggcgugcugggccugagacugauggacggcaccugggccgccauccagaccagcgacgaggccaaguggugcccccccgaccagcuggugaacauccacgacuucagaagcgacgagaucgagcaccuggugguggaggagcuggugaagaagagagaggagugccuggacgcccuggagagcaucaugaccaccaagagcgugagcuucagaagacugagccaccugagaaagcuggugcccggcuucggcaaggccuacaccaucuucaacaagacccugauggaggccgacgcccacuacaagagcgugagaaccuggaacgagaucauccccagcaagggcugccugagagugggcggcagaugccacccccacgugaacggcguguucuucaacggcaucauccugggccccgacggccacgugcugauccccgagaugcagagcagccugcugcagcagcacauggagcugcuggagagcagcgugaucccccugaugcacccccuggccgaccccagcaccguguucaaggacgacgacgaggccgaggacuucguggaggugcaccugcccgacgugcacaagcaggugagcggcguggaccugggccugcccagcuggggcaaguacgugcugaugagcgugggcgccaugaucgcccugaugcugaugaucuuccugaccaccugcugcagaaaggccaacggcgccgagagcaccccccacagacugggcgagaccggcagaaaggugagcgugaccagccagagcggcagagugaucagcagcugggagagcuacaagagcggcggcgagaccaagcuguga

SEQ ID NO: 191957 - RNA, 1575 nt, Artificial Sequence; identical to SEQ ID NO: 191956
  derived and/or modified CDS sequence (opt4) from glycoprotein__RABV__LC071938.1

SEQ ID NO: 191958 - RNA, 1575 nt, Artificial Sequence; identical to SEQ ID NO: 191956
  derived and/or modified CDS sequence (opt4) from glycoprotein__RABV__LC071939.1

SEQ ID NO: 191959 - RNA, 1575 nt, Artificial Sequence
  derived and/or modified CDS sequence (opt4) from glycoprotein__RABV__LC071940.1
augaucccccaggcccugcuguucgugccccugcugguguucagccugugcuucggcaaguucagcaucuacaccauccccgacaagcugggccccuggagccccaucgacauccaccaccugagcugccccaacaaccuggugguggaggacgagggcugcaccaaccugagcggcuucagcuacauggagcugaaggugggcuacaucagcgccaucaaggugaacggcuucaccugcaccggcguggugaccgaggccgagaccuacaccaacuucgugggcuacgugaccaccaccuucaagagaaagcacuucagacccacccccgacgccugcagagccgccuacaacuggaagauggccggcgaccccagauacgaggagagccugcacaaccccuaccccgacuaccacuggcugagaaccgugaagaccaccaaggagagccuggugaucaucagccccagcgugagcgaccuggaccccuacgacaagagccugcacagcagaguguuccccagcggcaagugcagcggcaucaccgugagcagcaccuacugccccaccaaccacgacuacaccaucuggaugcccgagaaccccagacugggcaccagcugcgacaucuucaccaccagcagaggcaagagagccagcaagggcggcaagaccugcggcuucguggacgagagaggccuguacaagagccugaagggcgccugcaagcugaagcugugcggcgugcugggccugagacugauggacggcaccugggccgccauccagaccagcgacgaggccaaguggugcccccccgaccagcuggugaacauccacgacuucagaagcgacgagaucgagcaccuggugguggaggagcuggugaagaagagagaggagugccuggacgcccuggagagcaucaugaccaccaagagcgugagcuucagaagacugagccaccugagaaagcuggugcccggcuucggcaaggccuacaccaucuucaacaagacccugauggaggccgacgcccacuacaagagcgugagaaccuggaacgagaucauccccagcaagggcugccugagagugggcggcagaugccacccccacgugaacggcguguucuucaacggcaucauccugggccccgacggccacgugcugauccccgagaugcagagcagccugcugcagcagcacauggagcugcuggagagcagcgugaucccccugaugcacccccuggccgaccccagcaccguguucaaggacgacgacgaggccgaggacuucguggaggugcaccugcccgacgugcacaagcaggugagcggcguggaccugggccugcccagcuggggcaaguacgugcugaugagcgugggcgccaugaucgcccugaugcugaugaucuuccugaccaccugcugcagaaaggccaacggcgccgagagcacccagcacagacugggcgagaccggcagaaaggugagcgugaccagccagagcggcagagugaucagcagcagagagagcuacaagagcggcggcgagaccaagcuguga

SEQ ID NO: 191960 - RNA, 1575 nt, Artificial Sequence
  derived and/or modified CDS sequence (opt4) from glycoprotein__RABV__LC071941.1
augaucccccaggcccugcuguucgugccccugcugguguucagccugugcuucggcaaguuccccaucuacaccauccccgacaagcugggccccuggagccccaucgacauccaccaccugagcugccccaacaaccuggugguggaggacgagggcugcaccaaccugagcggcuucagcuacauggagcugaaggugggcuacaucagcgccaucaaggugaacggcuucaccugcaccggcguggugaccgaggccgagaccuacaccaacuucgugggcuacgugaccaccaccuucaagagaaagcacuucagacccacccccgacgccugcagagccgccuacaacuggaagauggccggcgaccccagauacgaggagagccugcacaaccccuaccccgacuaccacuggcugagaaccgugaagaccaccaaggagagccuggugaucaucagccccagcgugagcgaccuggaccuguacgacaagagccugcacagcagaguguuccccagcggcaagugcagcggcaucaccgugagcagcaccuacugccccaccaaccacgacuacaccaucuggaugcccgagaaccccagacugggcaccagcugcgacaucuucaccaccagcagaggcaagagagccagcaagggcggcaagaccugcggcuucguggacgagagaggccuguacaagagccugaagggcgccugcaagcugaagcugugcggcgugcugggccugagacugauggacggcaccugggccgccauccagaccagcgacgaggccaaguggugcccccccgaccagcuggugaacauccacgacuucagaagcgacgagaucgagcaccuggugguggaggagcuggugaagaagagagaggagugccuggacgcccuggagagcaucaugaccaccaagagcgugagcuucagaagacugagccaccugagaaagcuggugcccggcuucggcaaggccuacaccaucuucaacaagacccugauggaggccgacgcccacuacaagagcgugagaaccuggaacgagaucauccccagcaagggcugccugagagugggcggcagaugccacccccacgugaacggcguguucuucaacggcaucauccugggccccgacggccacgugcugauccccgagaugcagagcagccugcugcagcagcacauggagcugcuggagagcagcgugaucccccugaugcacccccuggccgaccccagcaccguguucaaggacgacgacgaggccgaggacuucguggaggugcaccugcccgacgugcacaagcaggugagcggcguggaccugggccugcccagcuggggcaaguacgugcugaugagcgugggcgccaugaucgcccugaugcugaugaucuuccugaccaccugcugcagaaaggccaacggcgccgagagcacccagcacagacugggcgagaccggcagaaaggugagcgugaccagccagagcggcagagugaucagcagcugggagagcuacaagagcggcggcgagaccaagcuguga

SEQ ID NO: 191961 - RNA, 1575 nt, Artificial Sequence
  derived and/or modified CDS sequence (opt4) from glycoprotein__RABV__LC071943.1
augaucccccaggcccugcuguucgugccccugcugguguucagccugugcuucggcaaguuccccaucuacaccauccccgacaagcugggccccuggagccccaucgacauccaccaccugagcugccccaacaaccuggugguggaggacgagggcugcaccaaccugagcggcuucagcuacauggagcugaaggugggcuacaucagcgccaucaaggugaacggcuucaccugcaccggcguggugaccgaggccgagaccuacaccaacuucgugggcuacgugaccaccaccuucaagagaaagcacuucagacccacccccgacgccugcggcgccgccuacaacuggaagauggccggcgaccccagauacgaggagagccugcacaaccccuaccccgacuaccacuggcugagaaccgugaagaccaccaaggagagccuggugaucaucagccccagcgugagcgaccuggaccccuacgacaagagccugcacagcagaguguuccccagcggcaagugcagcggcaucaccgugagcagcaccuacugccccaccaaccacgacuacaccaucuggaugcccgagaaccccagacugggcaccagcugcgacaucuucaccaccagcagaggcaagagagccagcaagggcggcaagaccugcggcuucguggacgagagaggccuguacaagagccugaagggcgccugcaagcugaagcugugcggcgugcugggccugagacugauggacggcaccugggccgccauccagaccagcgacgaggccaaguggugcccccccgaccagcuggugaacauccacgacuucagaagcgacgagaucgagcaccuggugguggaggagcuggugaagaagagagaggagugccuggacgcccuggagagcaucaugaccaccaagagcgugagcuucagaagacugagccaccugagaaagcuggugcccggcuucggcaaggccuacaccaucuucaacaagacccugauggaggccgacgcccacuacaagagcgugcacaccuggaacgagaucauccccagcaagggcugccugagagugggcggcagaugccacccccacgugaacggcguguucuucaacggcaucauccugggccccgacggccacgugcugauccccgagaugcagagcagccugcugcagcagcacauggagcugcuggagagcagcgugaucccccugaugcacccccuggccgaccccagcaccguguucaaggacgacgacgaggccgaggacuucguggaggugcaccugcccgacgugcacaagcaggugagcggcguggaccugggccugcccagcuggggcaaguacgugcugaugagcgugggcgccaugaucgcccugaugcugaugaucuuccugaccaccugcugcagaaaggccaacggcgccgagagcacccagcacagacugggcgagaccggcagaaaggugagcgugaccagccagagcggcagagugaucagcagcugggagagcuacaagagcggcggcgagaccaagcuguga

SEQ ID NO: 191962 - RNA, 1575 nt, Artificial Sequence
  derived and/or modified CDS sequence (opt4) from glycoprotein__RABV__LC071944.1
augaucccccaggcccugcuguucgugccccugcugguguucagccugugcuucggcaaguuccccaucuacaccauccccgacaagcugggccccuggagccccaucgacauccaccaccugagcugccccaacaaccuggugguggaggacgagggcugcaccaaccugagcggcuucagcuacauggagcugaaggugggcuacaucagcgccaucaaggugaacggcuucaccugcaccggcguggugaccgaggccgagaccuacaccaacuucgugggcuacgugaccaccaccuucaagagaaagcacuucagacccacccccgacgccugcagagccgccuacaacuggaagauggccggcgaccccagauacgaggugagccugcacaaccccuaccccgacuaccacuggcugagaaccgugaagaccaccaaggagagccuggugaucaucagccccagcgugagcgaccuggaccccuacgacaagagccugcacagcagaguguuccccagcggcaagugcagcggcaucaccgugagcagcaccuacugccccaccaaccacgacuacaccaucuggaugcccgagaaccccagacugggcaccagcugcgacaucuucaccaccagcagaggcaagagagccagcaagggcggcaagaccugcggcuucguggacgagagaggccuguacaagagccugaagggcgccugcaagcugaagcugugcggcgugcugggccugagacugauggacggcaccugggccgccauccagaccagcgacgaggccaaguggugcccccccgaccagcuggugaacauccacgacuucagaagcgacgagaucgagcaccuggugguggaggagcuggugaagaagagagaggagugccuggacgcccuggagagcaucaugaccaccaagagcgugagcuucagaagacugagccaccugagaaagcuggugcccggcuucggcaaggccuacaccaucuucaacaagacccugauggaggccgacgcccacuacaagagcgugagaaccuggaacgagaucauccccagcaagggcugccugagagugggcggcagaugccacccccacgugaacggcguguucuucaacggcaucauccugggccccgacggccacgugcugauccccgagaugcagagcagccugcugcagcagcacauggagcugcuggagagcagcgugaucccccugaugcacccccuggccgaccccagcaccguguucaaggacgacgacgaggccgaggacuucguggaggugcaccugcccgacgugcacaagcaggugagcggcguggaccugggccugcccagcuggggcaaguacgugcugaugagcgugggcgccaugaucgcccugaugcugaugaucuuccugaccaccugcugcagaaaggccaacggcgccgagagcacccagcacagacugggcgagaccggcagaaaggugagcgugaccagccagagcggcagagugaucagcagcugggagagcuacaagagcggcggcgagaccaagcuguga

SEQ ID NO: 191963 - RNA, 1575 nt, Artificial Sequence
  derived and/or modified CDS sequence (opt4) from glycoprotein__RABV__LC071945.1
augaucccccaggcccugcuguucgugagccugcugguguucagccugugcuucggcaaguuccccaucuacaccauccccgacaagcugggccccuggagccccaucgacauccaccaccugagcugccccaacaaccuggugguggaggacgagggcugcaccaaccugagcggcuucagcuacauggagcugaaggugggcuacaucagcgccaucaaggugaacggcuucaccugcaccggcguggugaccgaggccgagaccuacaccaacuucgugggcuacgugaccaccaccuucaagagaaagcacuucagacccacccccgacgccugcagagccgccuacaacuggaagauggccggcgaccccagauacgaggagagccugcacaaccccuaccccgacuaccacuggcugagaaccgugaagaccaccaaggagagccuggugaucaucagccccagcgugagcgaccuggaccccuacgacaagagccugcacagcagagugcugcccggcggcaagugcagcggcaucaccgugagcagcaccuacugccccaccaaccacgacuacaccaucuggaugcccgagaaccccagacugggcaccagcugcgacaucuucaccaccagcagaggcaagagagccagcaagggcggcaagaccugcggcuucguggacgagagaggccuguacaagagccugaagggcgccugcaagcugaagcugugcggcgugcugggccugagacugauggacggcaccugggccgccauccagaccagcgacgaggccaaguggugcccccccgaccagcuggugaacauccacgacuucagaagcgacgagaucgagcaccuggugguggaggagcuggugaagaagagagaggagugccuggacgcccuggagagcaucaugaccaccaagagcgugagcuucagaagacugagccaccugagaaagcuggugcccggcuucggcaaggccuacaccaucuucaacaagacccugauggaggccgacgcccacuacaagagcgugagaaccuggaacgagaucauccccagcaagggcugccugagagugggcggcagaugccacccccacgugaacggcguguucuucaacggcaucauccugggccccgacggccacgugcugauccccgagaugcagagcagccugcugcagcagcacauggagcugcuggagagcagcgugaucccccugaugcacccccuggccgaccccagcaccguguucaaggacgacgacgaggccgaggacuucguggaggugcaccugcccgacgugcacaagcaggugagcggcguggaccugggccugcccagcuggggcaaguacgugcugaugagcgugggcgccaugaucgcccugaugcugaugaucuuccugaccaccugcugcagaaaggccaacggcgccgagagcacccagcacagacugggcgagaccggcagaaaggugagcgugaccagccagagcggcagagugaucagcagcugggagagcuacaagagcggcggcgagaccaagcuguga

SEQ ID NO: 191964 - RNA, 1575 nt, Artificial Sequence
  derived and/or modified CDS sequence (opt4) from glycoprotein__RABV__LC071946.1
augaucccccaggcccugcuguucgugccccugcugguguucagccugugcuucggcaaguuccccaucuacaccauccccgacaagcugggccccuggagccccaucgacauccaccaccugagcugccccaacaaccuggugguggaggacgagggcugcaccaaccugagcggcuucagcuacauggagcugaaggugggcuacaucagcgccaucaaggugaacggcuucaccugcaccggcguggugaccgaggccgagaccuacaccaacuucgugggcuacgugaccaccaccuucaagagaaagcacuucagacccacccccgacgccugcagagccgccuacaacuggaagauggccggcgaccccagauacgaggagagccugcacaaccccuaccccgacuaccacuggcugagaaccgugaagaccaccaaggagagccuggugaucaucagccccagcgugagcgaccuggaccccuacgacaagagccugcacagcagaguguuccccggcggcaagugcagcggcaucaccgugagcagcaccuacugccccaccaaccacgacuacaccaucuggaugcccgagaaccccagacugggcaccagcugcgacaucuucaccaccagcagaggcaagagagccagcaagggcggcaagaccugcggcuucguggacgagagaggccuguacaagagccugaagggcgccugcaagcugaagcugugcggcgugcugggccugagacugauggacggcaccugggccgccauccagaccagcgacgaggccaaguggugcccccccgaccagcuggugaacauccacgacuucagaagcgacgagaucgagcaccuggugguggaggagcuggugaagaagagagaggagugccuggacgcccuggagagcaucaugaccaccaagagcgugagcuucagaagacugagccaccugagaaagcuggugcccggcuucggcaaggccuacaccaucuucaacaagacccugauggaggccgacgcccacuacaagagcgugagaaccuggaacgagaucauccccagcaagggcugccugagagugggcggcagaugccacccccacgugaacggcguguucuucaacggcaucauccugggccccgacggccacgugcugauccccgagaugcagagcagccugcugcagcagcacauggagcugcuggagagcagcgugaucccccugaugcacccccuggccgaccccagcaccguguucaaggacgacgacgaggccgaggacuucguggaggugcaccugcccgacgugcacaagcaggugagcggcguggaccugggccugcccagcuggggcaagcacgugcugaugagcgugggcgccaugaucgcccugaugcugaugaucuuccugaccaccugcugcagaaaggccaacggcgccgagagcacccagcacagacugggcgagaccggcagaaaggugagcgugaccagccagagcggcagagugaucagcagcugggagagcuacaagagcggcggcgagaccaagcuguga

SEQ ID NO: 191965 - RNA, 1575 nt, Artificial Sequence
  derived and/or modified CDS sequence (opt4) from glycoprotein__RABV__LC071947.1
augaucccccaggcccugcuguucgugccccugcugguguucagccugugcuucggcaaguuccccaucuacaccauccccgacaagcugggccccuggagccccaucgacauccaccaccugagcugccccaacaaccuggugguggaggacgagggcugcaccaaccugagcggcuucagcuacauggagcugaaggugggcuacaucagcgccaucaaggugaacggcuucaccugcaccggcguggugaccgaggccgagaccuacaccaacuucgugggcuacgugaccaccaccuucaagagaaagcacuucagacccacccccgacgccugcagagccgccuacaacuggaagauggccggcgaccccagauacgaggagagccugcacaaccccuaccccgacuaccacuggcugagaaccgugaagaccaccaaggagagccuggugaucaucagccccagcgugagcgaccuggaccccuacgacaagagccugcacagcagaguguuccccagcggcaagugcagcggcaucaccgugagcagcaccuacugccccaccaaccacgacuacaccaucuggaugcccgagaaccccagacugggcaccagcugcgacaucuucaccaccagcagaggcaagagagccagcaagggcggcaagaccugcggcuucguggacgagagaggccuguacaagagccugaagggcgccugcaagcugaagcugugcggcgugcugggccugagacugauggacggcaccugggccgccauccagaccagcgacgaggccaaguggugcccccccgaccagcuggugaacauccacgacuucagaagcgacgagaucgagcaccuggugguggaggagcuggugaagaagagagaggagugccuggacgcccuggagagcaucaugaccaccaagagcgugagcuucagaagacugagccaccugagaaagcuggugcccggcuucggcaaggccuacaccaucuucaacaagacccugauggaggccgacgcccacuacaagagcgugagaaccuggaacgagaucauccccagcaagggcugccugagagugggcggcagaugccacccccacgugaacggcguguucuucaacggcaucauccugggccccgacggccacgugcugauccccgagaugcagagcagccugcugcagcagcacauggagcugcuggagagcagcgugaucccccugaugcacccccuggccgaccccagcaccguguucaaggacgacgacgaggccgaggacuucguggaggugcaccugcccgacgugcacaagcaggugagcggcguggaccugggccugcccagcuggggcaaguacgugcugaugagcgugggcgccaugaucgcccugaugcugaugaucuuccugaccaccugcugcagaaaggccaacggcgccgagagcacccagcacagacugggcgagaccggcagaaaggugagcgugaccagccagagcggcagagugaucagcagcugggagagcuacaagagcggcggcgagaccaagcuguga

SEQ ID NO: 191966 - RNA, 1575 nt, Artificial Sequence
  derived and/or modified CDS sequence (opt4) from glycoprotein__RABV__LC071948.1
augaucccccaggcccugcuguucgugccccugcugguguucagccugugcuucggcaaguuccccaucuacaccauccccgacaagcugggccccuggagccccaucgacauccaccaccugagcugccccaacaaccuggugguggaggacgagggcugcaccaaccugagcggcuucagcuacauggagcugaaggugggcuacaucagcgccaucaaggugaacggcuucaccugcaccggcguggugaccgaggccgagaccuacaccaacuucgugggcuacgugaccaccaccuucaagagaaagcacuucagacccacccccgacgccugcagagccgccuacaacuggaagauggccggcgaccccagauacgaggagagccugcacaaccccuaccccgacuaccacuggcugagaaccgugaagaccaccaaggagagccuggugaucaucagccccagcgugagcgaccuggaccccuacgacaagagccugcacagcagaguguuccccagcggcaagugcagcggcaucaccgugagcagcaccuacugccccaccaaccacgacuacaccaucuggaugcccgagaaccccagacugggcaccagcugcgacaucuucaccaccagcagaggcaagagagccagcaagggcggcaagaccugcggcuucguggacgagagaggccuguacaagagccugaagggcgccugcaagcugaagcugugcggcgugcugggccugagacugauggacggcaccugggccgccauccagaccagcgacgaggccaaguggugcccccccgaccagcuggugaacauccacgacuucagaagcgacgagaucgagcaccuggugguggaggagcuggugaagaagagagaggagugccuggacgcccuggagagcaucaugaccaccaagagcgugagcuucagaagacugagccaccugagaaagcuggugcccggcuucggcaaggccuacaccaucuucaacaagacccugauggaggccgacgcccacuacaagagcgugagaaccuggaacgagaucauccccagcaagggcugccugagagugggcggcagaugccacccccacgugaacggcguguucuucaacggcaucauccugggccccgacggccacgugcugauccccgagaugcagagcagccugcugcagcagcacauggagcugcuggagagcagcgugaucccccugaugcacccccuggccgaccccagcaccguguucaaggacgacgacgaggccgaggacuucguggaggugcaccugcccgacgugcacaagcaggugagcggcguggaccugggccugcccagcuggggcaaguacgugcugaugagcgugggcgccaugaucgcccugaugcugaugaucuuccugaugaccugcugcagaaaggccaacggcgccgagagcacccagcacagacugggcgagaccggcagaaaggugagcgugaccagccagagcggcagagugaucagcagcugggagagcuacaagagcggcggcgagaccaagcuguga

SEQ ID NO: 191967 - RNA, 1575 nt, Artificial Sequence; identical to SEQ ID NO: 191965
  derived and/or modified CDS sequence (opt4) from glycoprotein__RABV__LC071949.1

SEQ ID NO: 191968 - RNA, 1575 nt, Artificial Sequence
  derived and/or modified CDS sequence (opt4) from glycoprotein__RABV__LC071950.1
augaucccccaggcccugcuguucgugccccugcugguguucagccugugcuucggcaaguuccccaucuacaccauccccgacaagcugggccccuggagccccaucgacauccaccaccugagcugccccaacaaccuggugguggaggacgagggcugcaccagccugagcggcuucagcuacauggagcugaaggugggcuacaucagcgccaucaaggugaacggcuucaccugcaccggcguggugaccgaggccgagaccuacaccaacuucgugggcuacgugaccaccaccuucaagagaaagcacuucagacccacccccgacgccugcagagccgccuacaacuggaagauggccggcgaccccagauacgaggagagccugcacaaccccuaccccgacuaccacuggcugagaaccgugaagaccaccaaggagagccuggugaucaucagccccagcgugagcgaccuggaccccuacgacaagagccugcacagcagaguguuccccagcggcaagugcagcggcaucaccgugagcagcaccuacugccccaccaaccacgacuacaccaucuggaugcccgagaagcccagacugggcaccagcugcgacaucuucaccaccagcagaggcaagagagccagcaagggcggcaagaccugcggcuucguggacgagagaggccuguacaagagccugaagggcgccugcaagcugaagcugugcggcgugcugggccugagacugauggacggcaccugggccgccauccagaccagcgacgaggccaaguggugcccccccgaccagcuggugaacauccacgacuucagaagcgacgagaucgagcaccuggugguggaggagcuggugaagaagagagaggagugccuggacgcccuggagagcaucaugaccaccaagagcgugagcuucagaagacugagccaccugagaaagcuggugcccggcuucggcaaggccuacaccaucuucaacaagacccugauggaggccgacgcccacuacaagagcgugagaaccuggaacgagaucauccccagcaagggcugccugagagugggcggcagaugccacccccacgugaacggcguguucuucaacggcaucauccugggccccgacggccacgugcugauccccgagaugcagagcagccugcugcagcagcacauggagcugcuggagagcagcgugaucccccugaugcacccccuggccgaccccagcaccguguucaaggacgacgacgaggccgaggacuucguggaggugcaccugcccgacgugcacaagcaggugagcggcguggaccugggccugcccagcuggggcaaguacgugcugaugagcgugggcgccaugaucgcccugaugcugaugaucuuccugaccaccugcugcagaaaggccaacggcgccgagagcacccagcacagacugggcgagaccggcagaaaggugagcgugaccagccagagcggcagagugaucagcagcugggagagcuacaagagcggcggcgagaccaagcuguga

SEQ ID NO: 191969 - RNA, 1575 nt, Artificial Sequence
  derived and/or modified CDS sequence (opt4) from glycoprotein__RABV__LC071951.1
augaucccccaggcccugcuguucgugccccugcugguguucagccugugcuucggcaaguuccccaucuacaccauccccgacaagcugggccccuggagccccaucgacauccaccaccugagcugccccaacaaccuggugguggaggacgagggcugcaccaaccugagcggcuucagcuacauggagcugaaggugggcuacaucagcgccaucaaggugaacggcuucaccugcaccggcguggugaccgaggccgagaccuacaccaacuucgugggcuacgugaccaccaccuucaagagaaagcacuucagacccacccccgacgccugcagagccgccuacaacuggaagauggccggcgaccccagauacgaggagagccugcacaaccccuaccccgacuaccacuggcugagaaccgugaagaccaccaaggagagccuggugaucaucagccccagcgugagcgaccuggaccccuacgacaagagccugcacagcagaguguuccccagcggcaagugcagcggcaucaccgugagcagcaccuacugccccaccaaccacgacuacaccaucuggaugcccgagaaccccagacugggcaccagcugcgacaucuucaccaccagcagaggcaagagagccagcaagggcggcaagaccugcggcuucguggacgagagaggccuguacaagagccugaagggcgccugcaagcugaagcugugcggcgugcugggccugagacugauggacggcaccugggccgccauccagaccagcgacgaggccaaguggugcccccccgaccagcuggugaacauccacgacuucagaagcgacgagaucgagcaccuggugguggaggagcuggugaagaagagagaggagugccuggacgcccuggagagcaucaugaccaccaagagcgugagcuucagaagacugagccaccugagaagacuggugcccggcuucggcaaggccuacaccaucuucaacaagacccugauggaggccgacgcccacuacaagagcgugagaaccuggaacgagaucauccccagcaagggcugccugagagugggcggcagaugccacccccacgugaacggcguguucuucaacggcaucauccugggccccgacggccacgugcugauccccgagaugcagagcagccugcugcagcagcacauggagcugcuggagagcagcgugaucccccugaugcacccccuggccgaccccagcaccguguucaaggacgacgacgaggccgaggacuucguggaggugcaccugcccgacgugcacaagcaggugagcggcguggaccugggccugcccagcuggggcaaguacgugcugaugagcgugggcgccaugaucgcccugaugcugaugaucuuccugaccaccugcugcagaaaggccaacggcgccgagagcacccagcacagacugggcgagaccggcagaaaggugagcgugaccagccagagcggcagagugaucagcagcugggagagcuacaagagcggcggcgagaccaagcuguga

SEQ ID NO: 191970 - RNA, 1575 nt, Artificial Sequence; identical to SEQ ID NO: 191965
  derived and/or modified CDS sequence (opt4) from glycoprotein__RABV__LC071952.1

SEQ ID NO: 191971 - RNA, 1575 nt, Artificial Sequence
  derived and/or modified CDS sequence (opt4) from glycoprotein__RABV__LC071953.1
augaucccccaggcccugcuguucgugccccugcugguguucagccugugcuucggcaaguuccccaucuacaccauccccgacaagcugggccccuggagccccaucgacauccaccaccugagcugccccaacaaccuggugguggaggacgagggcugcaccaaccugagcggcuucagcuacauggagcugaaggugggcuacaucagcgccaucaaggugaacggcuucaccugcaccggcguggugaccgaggccgagaccuacaccaacuucgugggcuacgugaccaccaccuucaagagaaagcacuucagacccacccccgacgccugcagagccgccuacaacuggaagauggccggcgaccccagauacgaggagagccugcacaaccccuaccccgacuaccacuggcugagaaccgugaagaccaccaaggagagccuggugaucaucagccccagcgugagcgaccuggaccccuacgacaagagccugcacagcagaguguuccccagcggcaagugcagcggcaucaccgugagcagcaccuacugccccaccaaccacgacuacaccaucuggaugcccgagaaccccagacugggcaccagcugcgacaucuucaccaccagcagaggcaagagagccagcaagggcggcaagaccugcggcuucguggacgagagaggccuguacaagagccugaagggcgccugcaagcugaagcugugcggcgugcugggccugagacugauggacggcaccugggccgccauccagaccagcgacgaggccaaguggugcccccccgaccagcuggugaacauccacgacuucagaagcgacgagaucgagcaccuggugguggaggagcuggugaagaagagagaggagugccuggacgcccuggagagcaucaugaccaccaagagcgugagcuucagaagacugagccaccugagaaagcuggugcccggcuucggcaaggccuacaccaucuucaacaagacccugauggaggccgacgcccacuacaagagcgugagaaccuggaacgagaucauccccagcaagggcugccugagagugggcggcagaugccacccccacgugaacggcguguucuucaacggcaucauccugggccccgacggccacgugcugauccccgagaugcagagcagccugcugcagcagcacauggagcugcuggagagcagcgugaucccccugaugcacccccuggccgaccccagcaccguguucaaggacgacgacgaggccgaggacuucguggaggugcaccugcccgacgugcacaagcaggugagcggcguggaccugggccugcccagcuggggcaaguacgugcugaugagcgugggcgccaugaucgcccugacccugaugaucuuccugaccaccugcugcagaaaggccaacggcgccgagagcacccagcacagacugggcgagaccggcagaaaggugagcgugaccagccagagcggcagagugaucagcagcugggagagcuacaagagcggcggcgagaccaagcuguga

SEQ ID NO: 191972 - RNA, 1575 nt, Artificial Sequence
  derived and/or modified CDS sequence (opt4) from glycoprotein__RABV__LC071954.1
augaucccccaggcccugcuguucgugccccugcugguguucagccugugcuucggcaaguuccccaucuacaccauccccgacaagcugggccccuggagccccaucgacauccaccaccugagcugccccaacaaccuggugguggaggacgagggcugcaccaaccugagcggcuucagcuacauggagcugaaggugggcuacaucagcgccaucaaggugaacggcuucaccugcaccggcgugguggccgaggccgagaccuacaccaacuucgugggcuacgugaccaccaccuucaagagaaagcacuucagacccacccccgacgccugcagagccgccuacaacuggaagauggccggcgaccccagauacgaggagagccugcacaaccccuaccccgacuaccacuggcugagaaccgugaagaccaccaaggagagccuggugaucaucagccccagcgugagcgaccuggaccccuacgacaagagccugcacagcagaguguuccccagcggcaagugcagcggcaucaccgugagcagcaccuacugccccaccaaccacgacuacaccaucuggaugcccgagaaccccagacugggcaccagcugcgacaucuucaccaccagcagaggcaagagagccagcaagggcggcaagaccugcggcuucguggacgagagaggccuguacaagagccugaagggcgccugcaagcugaagcugugcggcgugcugggccugagacugauggacggcaccugggccgccauccagaccagcgacgaggccaaguggugcccccccgaccagcuggugaacauccacgacuucagaagcgacgagaucgagcaccuggugguggaggagcuggugaagaagagagaggagugccuggacgcccuggagagcaucaugaccaccaagagcgugagcuucagaagacugagccaccugagaaaguucgugcccggcuucggcaaggccuacaccaucuucaacaagacccugauggaggccgacgcccacuacaagagcgugagaaccuggaacgagaucauccccagcaagggcugccugagagugggcggcagaugccacccccacgugaacggcguguucuucaacggcaucauccugggccccgacggccacgugcugauccccgagaugcagagcagccugcugcagcagcacauggagcugcuggagagcagcgugaucccccugaugcacccccuggccgaccccagcaccguguucaaggacgacgacgaggccgaggacuucguggaggugcaccugcccgacgugcacaagcaggugagcggcguggaccugggccugcccagcuggggcaaguacgugcugaugagcgugggcgccaugaucgcccugaugcugaugaucuuccugaccaccugcugcagaaaggccaacggcgccgagagcacccagcacagacugggcgagaccggcagaaaggugagcgugaccagccagagcggcagagugaucagcagcugggagagcuacaagagcggcggcgagaccaagcuguga

SEQ ID NO: 191973 - RNA, 1575 nt, Artificial Sequence
  derived and/or modified CDS sequence (opt4) from glycoprotein__RABV__LC071955.1
augaucccccaggcccugcuguucgugccccugcugguguucagccugugcuucggcaaguuccccaucuacaccauccccgacaagcugggccccuggagccccaucgacauccaccaccugagcugccccaacaaccuggugguggaggacgagggcugcaccaaccugagcggcuucagcuacauggagcugaaggugggcuacaucagcgccaucaaggugaacggcuucaccugcaccggcguggugaccgaggccgagaccuacaccaacuucgugggcuacgugaccaccaccuucaagagaaagcacuucagacccacccccgacgccugcagagccgccuacaacuggaagauggccggcgaccccagauacgaggagagccugcacaaccccuaccccgacuaccacuggcugagaaccgugaagaccaccaaggagagccuggugaucaucagccccagcgugagcgaccuggaccccuacgacaagagccugcacagcagaguguuccccagcggcaagugcagcggcaucaccgugagcagcaccuacugccccaccaaccacgacuacaccaucuggaugcccgagaaccccagacugggcaccagcugcgacaucuucaccaccagcagaggcaagagagccagcaagggcggcaagaccugcggcuucguggacgagagaggccuguacaagagccugaagggcgccugcaagcugaagcugugcggcgugcugggccugagacugauggacggcaccugggccgccauccagaccagcgacgaggccaaguggugcccccccgaccagcuggugaacauccacgacuucagaagcgacgagaucgagcaccuggugguggaggagcuggugaagaagagagaggagugccuggacgcccuggagcccaucaugaccaccaagagcgugagcuucagaagacugagccaccugagaaagcuggugcccggcuucggcaaggccuacaccaucuucaacaagacccugauggaggccgacgcccacuacaagagcgugagaaccuggaacgagaucauccccagcaagggcugccugagagugggcggcagaugccacccccacgugaacggcguguucuucaacggcaucauccugggccccgacggccacgugcugauccccgagaugcagagcagccugcugcagcagcacauggagcugcuggagagcagcgugaucccccugaugcacccccuggccgaccccagcaccguguucaaggacgacgacgaggccgaggacuucguggaggugcaccugcccgacgugcacaagcaggugagcggcguggaccugggccugcccagcuggggcaaguacgugcugaugagcgugggcgccaugaucgcccugaugcugaugaucuuccugaccaccugcugcagaaaggccaacggcgccgagagcacccagcacagacugggcgagaccggcagaaaggugagcgugaccagccagagcggcagagugaucagcagcugggagagcuacaagagcggcggcgagaccaagcuguga

SEQ ID NO: 191974 - RNA, 1575 nt, Artificial Sequence
  derived and/or modified CDS sequence (opt4) from glycoprotein__RABV__LC071956.1
augaucccccaggcccugcuguucgugccccugcugguguucagccugugcuucggcaaguuccccaucuacaccauccccgacaagcugggccccuggagccccaucgacauccaccaccugagcugccccaacaaccuggugguggaggacgagggcugcaccaaccugagcggcuucagcuacauggagcugaaggugggcuacaucagcgccaucaaggugaacggcuucaccugcaccggcguggugaccgaggccgagaccuacaccaacuucgugggcuacgugaccaccaccuucaagagaaagcacuucagacccacccccgacgccugcagagccgccuacaacuggaagauggccggcgaccccagauacgaggagagccugcacaaccccuaccccgacuaccacuggcugagaaccgugaagaccaccaaggagagccuggugaucaucagccccagcgugagcgaccuggaccccuacgacaagagccugcacagcaagguguuccccagcggcaagugcagcggcaucaccgugagcagcaccuacugccccaccaaccacgacuacaccaucuggaugcccgagaaccccagacugggcaccagcugcgacaucuucaccaccagcagaggcaagagagccagcaagggcggcaagaccugcggcuucguggacgagagaggccuguacaagagccugaagggcgccugcaagcugaugcugugcggcgugcugggccugagacugauggacggcaccugggccgccauccagaccagcgacgaggccaaguggugcccccccgaccagcuggugaacauccacgacuucagaagcgacgagaucgagcaccuggugguggaggagcuggugaagaagagagaggagugccuggacgcccuggagagcaucaugaccaccaagagcgugagcuucagaagacugagccaccugagaaagcuggugcccggcuucggcaaggccuacaccaucuucaacaagacccugauggaggccgacgcccacuacaagagcgugagaaccuggaacgagaucauccccagcaagggcugccugagagugggcggcagaugccacccccacgugaacggcguguucuucaacggcaucauccugggccccgacggccacgugcugauccccgagaugcagagcagccugcugcagcagcacauggagcugcuggagagcagcgugaucccccugaugcacccccuggccgaccccagcaccguguucaaggacgacgacgaggccgaggacuucguggaggugcaccugcccgacgugcacaagcaggugagcggcguggaccugggccugcccagcuggggcaaguacgugcugaugagcgugggcgccaugaucgcccugaugcugaugaucuuccugaccaccugcugcagaaaggccaacggcgccgagagcacccagcacagacugggcgagaccggcagaaaggugagcgugaccagccagagcggcagagugaucagcagcugggagagcuacaagagcggcggcgagaccaagcuguga

SEQ ID NO: 191975 - RNA, 1575 nt, Artificial Sequence; identical to SEQ ID NO: 191974
  derived and/or modified CDS sequence (opt4) from glycoprotein__RABV__LC071957.1

SEQ ID NO: 191976 - RNA, 1575 nt, Artificial Sequence
  derived and/or modified CDS sequence (opt4) from glycoprotein__RABV__LC071958.1
augaucccccaggcccugcuguucgugccccugcugguguucagcagcugcuucggcaaguuccccaucuacaccauccccgacaagcugggccccuggagccccaucgacauccaccaccugagcugccccaacaaccugguggugggcgacgagggcugcaccaaccugagcggcuucagcuacauggagcugaaggugggcuacaucagcgccaucaaggugaacggcuucaccugcaccggcguggugaccgaggccgagaccuacaccaacuucgugggcuacgugaccaccaccuucaagagaaagcacuucagacccacccccgacgccugcagagccgccuacaacuggaagauggccggcgaccccagauacgaggagagccugcacaaccccuaccccgacuaccacuggcugagaaccgugaagaccaccaaggagagccuggugaucaucagccccagcgugagcgaccuggaccccuacgacaagagccugcacagcagaguguuccccagcggcaagugcagcggcaucaccgugagcagcaccuacugccccaccaaccacgacuacaccaucuggaugcccgagaaccccagacugggcaccagcugcgacaucuucaccaccagcagaggcaagagagccagcaagggcggcaagaccugcggcuucguggacgagagaggccuguacaagagccugaagggcgccugcaagcugaugcugugcggcgugcugggccugagacugaccgacggcaccugggccgccauccagaccagcgacgaggccaaguggugcccccccgaccagcuggugaacauccacgacuucagaagcgacgagaucgagcaccuggugguggaggagcuggugaagaagagagaggagugccuggacgcccuggagagcaucaugaccaccaagagcgugagcuucagaagacugagccaccugagaaagcuggugcccggcuucggcaaggccuacaccaucuucaacaagacccugauggaggccgacgcccacuacaagagcgugagaaccuggaacgagaucauccccagcaagggcugccugagagugggcggcagaugccacccccacgugaacggcguguucuucaacggcaucauccugggccccgacggccacgugcugauccccgagauccagagcagccugcugcagcagcacauggagcugcuggagagcagcgugaucccccugaugcacccccuggccgaccccagcaccguguucaaggacgacgacgaggccgaggacuucguggaggugcaccugcccgacgugcacaagcaggugagcggcguggaccugggccugcccagcuggggcaaguacgugcugaugagcgugggcgccaugaucgcccugaugcugaugaucuuccugaccaccugcugcagaaaggccaacggcgccgagagcacccagcacagacugggcgagaccggcagaaaggugagcgugaccagccagagcggcagagugaucagcagcugggagagcuacaagagcggcggcgagaccaagcuguga

SEQ ID NO: 191977 - RNA, 1575 nt, Artificial Sequence; identical to SEQ ID NO: 191965
  derived and/or modified CDS sequence (opt4) from glycoprotein__RABV__LC071959.1

SEQ ID NO: 191978 - RNA, 1575 nt, Artificial Sequence
  derived and/or modified CDS sequence (opt4) from glycoprotein__RABV__LC071960.1
augaucccccaggcccugcuguucgugccccugcugguguucagccugugcuucggcaaguuccccaucuacaccauccccgacaagcugggccccuggagccccaucgacauccaccaccugagcugccccaacaaccuggugguggaggacgagggcugcaccaaccugagcggcuucagcuacauggagcugaaggugggcuacaucagcgccaucaaggugaacggcuucaccugcaccggcguggugaccgaggccgagaccuacaccaacuucgugggcuacgugaccaccaccuucaagagaaagcacuucagacccacccccgacgccugcagagccgccuacaacuggaagauggccggcgaccccagauacgaggagagccugcacaaccccuaccccgacuaccacuggcugagaaccgugaagaccaccaaggagagccuggugaucaucagccccagcgugagcgaccuggaccccuacgacaagagccugcacagcagaguguuccccagcggcaagugcagcggcaucaccgugagcagcaccuacugccccaccaaccacgacuacaccaucuggaugcccgagaaccccagacugggcaccagcugcgacaucuucaccaccagcagaggcaagagagccagcaagggcggcaagaccugcggcuucguggacgagagaggccuguacaagagccugaagggcgccugcaagcugaagcugugcggcgugcugggccugagacugauggacggcaccuggggcgccauccagaccagcgacgaggccaaguggugcccccccgaccagcuggugaacauccacgacuucagaagcgacgagaucgagcaccuggugguggaggagcuggugaagaagagagaggagugccuggacgcccuggagagcaucaugaccaccaagagcgugagcuucagaagacugagccaccugagaaagcuggugcccggcuucggcaaggccuacaccaucuucaacaagacccugauggaggccgacgcccacuacaagagcgugagaaccuggaacgagaucauccccagcaagggcugccugagagugggcggcagaugccacccccacgugaacggcguguucuucaacggcaucauccugggccccgacggccacgugcugauccccgagaugcagagcagccugcugcagcagcacauggagcugcuggagagcagcgugaucccccugaugcacccccuggccgaccccagcaccguguucaaggacgacgacgaggccgaggacuucgccgaggugcaccugcccgacgugcacaagcaggugagcggcguggaccugggccugcccagcuggggcaaguacgugcugaugagcgugggcgccaugaucgcccugaugcugaugaucuuccugaccaccugcugcagaaaggccaacggcgccgagagcacccagcacagacugggcgagaccggcagaaaggugagcgugaccagccagagcggcagagugaucagcagcugggagagcuacaagagcggcggcgagaccaagcuguga

SEQ ID NO: 191979 - RNA, 1575 nt, Artificial Sequence
  derived and/or modified CDS sequence (opt4) from glycoprotein__RABV__LC071961.1
augaucccccaggcccugcuguucgugccccugcugguguucagccugugcuucggcaaguuccccaucuacaccauccccgacaagcugggccccuggagccccaucgacauccaccaccugagcugccccaacaaccuggugguggaggacgagggcugcaccaaccugagcggcuucagcuacauggagcugaaggugggcuacaucagcgccaucaaggugaacggcuucaccugcaccggcguggugaccgaggccgagaccuacaccaacuucgugggcuacgugaccaccaccuucaagagaaagcacuucagacccacccccgacgccugcagagccgccuacaacuggaagauggccggcgaccccagauacgaggagagccugcacaaccccuaccccgacuaccacuggcugagaaccgugaagaccaccaaggagagccuggacaucaucagccccagcgugagcgaccuggaccccuacgacaagagccugcacagcagaguguuccccagcggcaagugcagcggcaucaccgugagcagcaccuacugccccaccaaccacgacuacaccaucuggaugcccgagaaccccagacugggcaccagcugcgacaucuucaccaccagcagaggcaagagagccagcaagggcggcaagaccugcggcuucguggacgagagaggccuguacaagagccugaagggcgccugcaagcugaagcugugcggcgugcugggccugagacugauggacggcaccugggccgccauccagaccagcgacgaggccaaguggugcccccccgaccagcuggugaacauccacgacuucagaagcgacgagaucgagcaccuggugguggaggagcuggugaagaagagagaggagugccuggacgcccuggagagcaucaugaccaccaagagcgugagcuucagaagacugagccaccugagaaagcuggugcccggcuucggcaaggccuacaccaucuucaacaagacccugauggaggccgacgcccacuacaagagcgugagaaccuggaacgagaucauccccagcaagggcugccugagagugggcggcagaugccacccccacgugaacggcguguucuucaacggcaucauccugggccccgacggccacgugcugauccccgagaugcagagcagccugcugcagcagcacauggagcugcuggagagcagcgugaucccccugaugcacccccuggccgaccccagcaccguguucaaggacgacgacgaggccgaggacuucguggaggugcaccugcccgacgugcacaagcaggugagcggcguggaccugggccugcccagcuggggcaaguacgugcugaugagcgugggcgccaugaucgcccugaugcugaugaucuuccugaccaccugcugcagaaaggccaacggcgccgagagcacccagcacagacugggcgagaccggcagaaaggugagcgugaccagccagagcggcagagugaucagcagcugggagagcuacaagagcggcggcgagaccaagcuguga

SEQ ID NO: 191980 - RNA, 1575 nt, Artificial Sequence; identical to SEQ ID NO: 191965
  derived and/or modified CDS sequence (opt4) from glycoprotein__RABV__LC071962.1

SEQ ID NO: 191981 - RNA, 1575 nt, Artificial Sequence; identical to SEQ ID NO: 191965
  derived and/or modified CDS sequence (opt4) from glycoprotein__RABV__LC071963.1

SEQ ID NO: 191982 - RNA, 1575 nt, Artificial Sequence
  derived and/or modified CDS sequence (opt4) from glycoprotein__RABV__LC071965.1
augaucccccaggcccugcuguucgugccccugcugguguucagccugugcuucggcaaguuccccaucuacaccauccccgacaagcugggccccuggagccccaucgacauccaccaccugagcugccccaacaaccuggugguggaggacgagggcugcaccaaccugagcggcuucagcuacauggagcugaaggugggcuacaucagcgccaucaaggugaacggcuucaccugcaccggcguggugaccgaggccgagaccuacaccaacuucgugggcuacgugaccaccaccuucaagagaaagcacuucagacccacccccgacgccugcagagccgccuacaacuggaagauggccggcgaccccagauacgaggagagccugcacaaccccuaccccgacuaccacuggcugagaaccgugaagaccaccaaggagagccuggugaucaucagccccagcgugagcgaccuggaccccuacgacaagagccugcacagcagaguguuccccagcggcaagugcagcggcaucaccgugagcagcaccuacugccccaccaaccacgacuacaccaucuggaugcccgagaaccccagacugggcaccagcugcgacaucuucaccaccagcagaggcaagagagccagcaagggcggcaagaccugcggcuucguggacgagagaggccuguacaagagccugaagggcgccugcaagcugaagcugugcggcgugcugggccugagacugauggacggcaccugggccgccauccagaccagcgacgaggccaaguggugcccccccgaccagcuggugaacauccacgacuucagaagcgacgagaucgagcaccuggugguggaggagcuggugaagaagagagaggagugccuggacgcccuggagagcaucaugaccaccaagagcgugagcuucagaagacugagccaccugagaaagcuggugcccggcuucggcaaggccuacaccaucuucaacaagacccugauggaggccgacgcccacuacaagagcgugagaaccuggaacgagaucauccccagcaagggcugccugagagugggcggcagaugccacccccacgugaacggcguguucuucaacggcaucauccugggccccgacggccacgugcugauccccgagaugcagagcagccugcugcagcagcacauggagcugcuggagagcagcgugaucccccugaugcacccccuggccgaccccagcaccguguucaaggacgacgacgaggccgaggacuucguggaggugcaccugcccgacgugcacaagcaggugagcggcguggaccugggccugcccagcuggggcaaguacgugcugaugagcgugggcgccaugaucgcccugaugcugaugaucuuccugaccaugugcugcagaaaggccaacggcgccgagagcacccagcacagacugggcgagaccggcagaaaggugagcgugaccagccagagcggcagagugaucagcagcugggagagcuacaagagcggcggcgagaccaagcuguga

SEQ ID NO: 191983 - RNA, 1575 nt, Artificial Sequence
  derived and/or modified CDS sequence (opt4) from glycoprotein__RABV__LC071966.1
augaucccccaggcccugcuguucgugccccugcugguguucagccugugcuucggcaaguuccccaucuacaccauccccgacaagcugggccccuggagccccaucgacauccaccaccugagcugccccaacaaccuggugguggaggacgagggcugcaccaaccugagcggcuucagcuacauggagcugaaggugggcuacaucagcgccaucaaggugaacggcuucaccugcaccggcguggugaccgaggccgagaccuacaccaacuucgugggcuacgugaccaccaccuucaagagaaagcacuucagacccacccccgacgccugcagcgccgccuacaacuggaagauggccggcgaccccagauacgaggagagccugcacaaccccuaccccgacuaccacuggcugagaaccgugaagaccaccaaggagagccuggugaucaucagccccagcgugagcgaccuggaccccuacgacaagagccugcacagcagaguguuccccagcggcaagugcagcggcaucaccgugagcagcaccuacugccccaccaaccacgacuacaccaucuggaugcccgagaaccccagacugggcaccagcugcgacaucuucaccaccagcagaggcaagagagccagcaagggcggcaagaccugcggcuucgccgacgagagaggccuguacaagagccugaagggcgccugcaagcugaagcugugcggcgugcugggccugagacugauggacggcaccugggccgccauccagaccagcgacgaggccaaguggugcccccccgaccagcuggugaacauccacgacuucagaagcgacgagaucgagcaccuggugguggaggagcuggugaagaagagagaggagugccuggacgcccuggagagcaucaugaccaccaagagcgugagcuucagaagacugagccaccugagaaagcuggugcccggcuucggcaaggccuacaccaucuucaacaagacccugauggaggccgacgcccacuacaagagcgugagaaccuggaacgagaucauccccagcaagggcugccugagagugggcggcagaugccacccccacgugaacggcguguucuucaacggcaucauccugggccccgacggccacgugcugauccccgagaugcagagcagccugcugcagcagcacauggagcugcuggagagcagcgugaucccccugaugcacccccuggccgaccccagcaccguguucaaggacgacgacgaggccgaggacuucguggaggugcaccugcccgacgugcacaagcaggugagcggcguggaccugggccugcccagcuggggcaaguacgugcugaugagcgugggcgccaugaucgcccugaugcugaugaucuuccugaccaugugcugcagaaaggccaacggcgccgagagcacccagcacagacugggcgagaccggcagaaaggugagcgugaccagccagagcggcagagugaucagcagcugggagagcuacaagagcggcggcgagaccaagcuguga

SEQ ID NO: 191984 - RNA, 1575 nt, Artificial Sequence
  derived and/or modified CDS sequence (opt4) from glycoprotein__RABV__LC071967.1
augaucccccaggcccugcuguucgugccccugcugguguucagccugugcuucggcaaguuccccaucuacaccauccccgacaagcugggccccuggagccccaucgacauccaccaccugagcugccccaacaaccuggugguggaggacgagggcugcaccaaccugagcggcuucagcuacauggagcugaaggugggcuacaucagcgccaucaaggugaacggcuucaccugcaccggcguggugaccgaggccgagaccuacaccaacuucgugggcuacgugaccaccaccuucaagagaaagcacuucagacccacccccgacgccugcagagccgccuacaacuggaagauggccggcgaccccagauacgaggagagccugcacaaccccuaccccgacuaccacuggcugagaaccgugaagaccaccaaggagagccuggugaucaucagccccagcgugagcgaccuggaccccuacgacaagagccugcacagcagaguguuccccagcggcaagugcagcggcaucaccgugagcagcaccuacugccccaccaaccacgacuacaccaucuggaugcccgagaaccccagacugggcaccagcugcgacaucuucaccaccagcagaggcaagagagccagcaagggcggcaagaccugcggcuucguggacgagagaggccuguacaagagccugaagggcgccugcaagcugaagcugugcggcgugcugggccugagacugauggacggcaccugggccgccauccagaccagcgacgaggccaaguggugcccccccgaccagcuggugaacauccacgacuucagaagcgacgagaucgagcaccuggugguggaggagcuggugaagaagagagaggagugccuggacgcccuggagagcaucaugaccaccaagagcgugagcuucagaagauucagccaccugagaaagcuggugcccggcuucggcaaggccuacaccaucuucaacaagacccugauggaggccgacgcccacuacaagagcgugagaaccuggaacgagaucauccccagcaagggcugccugagagugggcggcagaugccacccccacgugaacggcguguucuucaacggcaucauccugggccccgacggccacgugcugauccccgagaugcagagcagccugcugcagcagcacauggagcugcuggagagcagcgugaucccccugaugcacccccuggccgaccccagcaccguguucaaggacgacgacgaggccgaggacuucguggaggugcaccugcccgacgugcacaagcaggugagcggcguggaccugggccugcccagcuggggcaaguacgugcugaugagcgugggcgccaugaucgcccugaugcugaugaucuuccugaccaugugcugcagaaaggccaacggcgccgagagcacccagcacagacugggcgagaccggcagaaaggugagcgugaccagccagagcggcagagugaucagcagcugggagagcuacaagagcggcggcgagaccaagcuguga

SEQ ID NO: 191985 - RNA, 1575 nt, Artificial Sequence; identical to SEQ ID NO: 191982
  derived and/or modified CDS sequence (opt4) from glycoprotein__RABV__LC071968.1

SEQ ID NO: 191986 - RNA, 1575 nt, Artificial Sequence
  derived and/or modified CDS sequence (opt4) from glycoprotein__RABV__LC071969.1
augaucccccaggcccugcuguucgugccccugcugguguucagcagcugcuucggcaaguuccccaucugcaccauccccgacaagcugggccccuggagccccaucgacauccaccaccugagcugccccaacaaccuggugguggaggacgagggcugcaccaaccugagcggcuucagcuacauggagcugaaggugggcuacaucagcgccaucaaggugaacggcuucaccugcaccggcguggugaccgaggccgagaccuacaccaacuucgugggcuacgugaccaccaccuucaagagaaagcacuucagacccacccccgacgccugcagagccgccuacaacuggaagauggccggcgaccccagauacgaggagagccugcacaaccccuaccccgacuaccacuggcugagaaccgugaagaccaccaaggagagccuggugaucaucagccccagcgugagcgaccuggaccccuacgacaagagccugcacagcagaguguuccccagcggcaagugcagcggcaucaccgugagcagcaccuacugccccaccaaccacgacuacaccguguggaugcccgagaaccccagacugggcaccagcugcgacaucuucaccaacagcagaggcaagagagccagcaagggcggcaagaccugcggcuucguggacgagagaggccuguacaagagccugaagggcgccugcaagcugaagcugugcggcgugcugggccugagacugauggacggcaccuggguggccauccagaccagcgacgaggccaaguggugcccccccgaccagcuggugaacauccacgacuucagaagcgacgagaucgagcaccuggugguggaggagcuggugaagaagagagaggagugccuggacgcccuggagagcaucaugaccaccaagagcgugagcuucagaagacugagccaccugagaaagcuggugcccggcuucggcaaggccuacaccaucuucaacaagacccugauggaggccgacgcccacuacaagagcgugagaaccuggaacgagaucauccccagcaagggcugccugagagugggcggcagaugccacccccacgugaacggcguguucuucaacggcaucauccugggccccgacggccacgugcugauccccgagaugcagagcagccugcugcagcagcacauggagcugcuggagagcagcgugaucccccugaugcacccccuggccgaccccagcaccguguucaaggacggcgacgaggccgaggacuucguggaggugcaccugcccgacgugcacaagcaggugagcggcguggaccugggccugcccagcuggggcaaguacgugcugaugagcgugggcgccaugaucgcccugaugcugaugaucuuccugaugaccugcugcagaaaggccaacggcgccgagaccauccagcacagacugggcgagaccggcagaaaggugagcgugaccagccagagcggcagagugaucagcagcugggagagcuacaagagcggcggcgagaccaagcuguga

SEQ ID NO: 191987 - RNA, 1575 nt, Artificial Sequence
  derived and/or modified CDS sequence (opt4) from glycoprotein__RABV__LC071970.1
augaucccccaggcccugcuguucgugccccugcugguguucagcagcugcuucggcaaguuccccaucuacaccauccccgacaagcugggccccuggagccccaucgacauccaccaccugagcugccccaacaaccuggugguggaggacgagggcugcaccaaccugagcggcuucagcuacauggagcugaaggugggcuacaucagcgccaucaaggugaacggcuucaccugcaccggcguggugaccgaggccgagaccuacaccaacuucgugggcuacgugaccaccaccuucaagagaaagcacuucagacccacccccgacgccugcagagccgccuacaacuggaagauggccggcgaccccagauacgaggagagccugcacaaccccuaccccgacuaccacuggcugagaaccgugaagaccaccaaggagagccuggugaucaucagccccagcgugagcgaccuggaccccuacgacaagagcuuccacagcagaguguuccccagcggcaagugcagcggcaucaccgugagcagcaccuacugccccaccaaccacgacuacaccaucuggaugcccgagaaccccagacugggcaccagcugcgacaucuucaccaacagcagaggcaagagagccagcaagggcggcaagaccugcggcuucguggacgagagaggccuguacaagagccugaagggcgccugcaagcugaagcugugcggcgugcugggccugagacugauggacggcaccuggguggccauccagaccagcgacgaggccaaguggugcccccccgaccagcuggugaacauccacgacuucagaagcgacgagaucgagcaccuggugguggaggagcuggugaagaagagagaggagugccuggacgcccuggagagcaucaugaccaccaagagcgugagcuucagaagacugagccaccugagaaagcuggugcccggcuucggcaaggccuacaccaucuucaacaagacccugauggaggccgacgcccacuacaagagcgugagaaccuggaacgagaucauccccagcaagggcugccugagagugggcggcagaugccacccccacgugaacggcguguucuucaacggcaucauccugggccccgacggccacgugcugauccccgagaugcagagcagccugcugcagcagcacauggagcugcuggagagcagcgugaucccccugaugcacccccuggccgaccccagcaccguguucaaggacggcgacgaggccgaggacuucguggaggugcaccugcccgacgugcacaagcaggugagcggcguggaccugggccugcccagcuggggcaaguacgugcugaugagcgugggcgccaugaucgcccugaugcugaugaucuuccugaugaccugcugcagaaaggccaacggcgccgagaccauccagcacagacugggcgagaccggcagaaaggugagcgugaccagccagagcggcagagugaucagcagcugggagagcuacaagagcggcggcgagaccaagcuguga

SEQ ID NO: 191988 - RNA, 1575 nt, Artificial Sequence
  derived and/or modified CDS sequence (opt4) from glycoprotein__RABV__LC071971.1
augaucccccaggcccugcuguucgugccccugcugguguucagcagcugcuucggcaaguuccccaucuacaccauccccgacaagcugggccccuggagccccaucgacauccaccaccugagcugccccaacaaccuggugguggaggacgagggcugcaccaaccugagcggcuucagcuacauggagcugaaggugggcuacaucagcgccaucaaggugaacggcuucaccugcaccggcguggugaccgaggccgagaccuacaccaacuucgugggcuacgugaccaccaccuucaagagaaagcacuucagacccacccccgacgccugcagagccgccuacaacuggaagauggccggcgaccccagauacgaggagagccugcacaaccccuaccccgacuaccacuggcugagaaccgugaagaccaccaaggagagccuggugaucaucagccccagcgugagcgaccuggaccccuacgacaagagccugcacagcagaguguuccccagcggcaagugcagcggcaucaccgugagcagcaccuacugccccaccaacagagacuacaccaucuggaugcccgagaaccccagacugggcaccagcugcgacaucuucaccaacagcagaggcaagagagccagcaagggcggcaagaccugcggcuucguggacgagagaggccuguacaagagccugaagggcgccugcaagcugaagcugugcggcgugcugggccugagacugauggacggcaccuggguggccauccagaccagcgacgaggccaaguggugcccccccgaccagcuggugaacauccacgacuucagaagcgacgagaucgagcaccuggugguggaggagcuggugaagaagagagaggagugccuggacgcccuggagagcaucaugaccaccaagagcgugagcuucagaagacugagccaccugagaaagcuggugcccggcuucggcaaggccuacaccaucuucaacaagacccugauggaggccgacgcccacuacaagagcgugagaaccuggaacgagaucauccccagcaagggcugccugagagugggcggcagaugccacccccacgugaacggcguguucuucaacggcaucauccugggccccgacggccacgugcugauccccgagaugcagagcagccugcugcagcagcacauggagcugcuggagagcagcgugaucccccugaugcacccccuggccgaccccagcaccguguucaaggacggcgacgaggccgaggacuucguggaggugcaccugcccgacgugcacaagcaggugagcggcguggaccugggccugcccagcuggggcaaguacgugcugaugagcgugggcgccaugaucgcccugaugcugaugaucuuccugaugaccugcugcagaaaggccaacggcgccgagaccauccagcacagacugggcgagaccggcagaaaggugagcgugaccagccagagcggcagagugaucagcagcugggagagcuacaagagcggcggcgagaccaagcuguga

SEQ ID NO: 191989 - RNA, 1575 nt, Artificial Sequence; identical to SEQ ID NO: 191088
  derived and/or modified CDS sequence (opt4) from glycoprotein__RABV__LC071972.1

SEQ ID NO: 191990 - RNA, 1575 nt, Artificial Sequence
  derived and/or modified CDS sequence (opt4) from glycoprotein__RABV__LC071973.1
augaucccccaggcccugcuguucgugccccugcugguguucagcagcugcuucggcaaguuccccaucuacaccauccccgacaagcugggccccuggagccccaucgacauccaccaccugagcugccccaacaaccuggugguggaggacgagggcugcaccaaccugagcggcuucagcuacauggagcugaaggugggcuacaucagcgccaucaaggugaacggcuucaccugcaccggcguggugaccgaggccgagaccuacaccaacuucgugggcuacgugaccaccaccuucaagagaaagcacuucagacccacccccgacgccugcagagccgccuacaacuggaagauggccggcgaccccagauacgaggagagccugcacaaccccuaccccgacuaccacuggcugagaaccgugaagaccaccaaggagagccuggugaucaucagccccagcgugagcgaccuggaccccuacgacaagagccugcacagcagaguguuccccagcggcaagugcagcggcaucaccgugagcagcaccuacugccccaccaaccacgacuacaccaucuggaugcccgagaaccccagacugggcaccagcugcgacaucuucaccaacagcagaggcaagagagccagcaagggcggcaagaccugcggcuucguggacgagagaggccuguacaagagccugaagggcgccugcaagcugaagcugugcggcgugcugggccugagacugauggacggcaccuggguggccauccagaccagcgacgaggccaaguggugcccccccgaccagcuggugaacauccacgacuucagaagcgacgagaucgagcaccuggugguggaggagcuggugaagaagagagaggagugccuggacgcccuggagagcaucaugaccaccaagagcgugagcuucagaagacugagccaccugagaaagcuggugcccggcuucggcaaggccuacaccaucuucaacaagacccugauggaggccgacgcccacuacaagagcgugagaaccuggaacgagaucauccccagcaagggcugccugagagugggcggcagaugccacccccacgugaacggcguguucuucaacggcaucauccugggccccgacggccacgugcugauccccgagaugcagagcagccugcugcagcagcacaugggccugcuggagagcagcgugaucccccugaugcacccccuggccgaccccagcaccguguucaaggacggcgacgaggccgaggacuucguggaggugcaccugcccgacgugcacaagcaggugagcggcguggaccugggccugcccagcuggggcaaguacgugcugaugagcgugggcgccaugaucgcccugaugcugaugaucuuccugaugaccugcugcagaaaggccaacggcgccgagaccauccagcacagacugggcgagaccggcagaaaggugagcgugaccagccagagcggcagagugaucagcagcugggagagcuacaagagcggcggcgagaccaagcuguga

SEQ ID NO: 191991 - RNA, 1575 nt, Artificial Sequence
  derived and/or modified CDS sequence (opt4) from glycoprotein__RABV__LC071974.1
augaucccccaggcccugcuguucgugccccugcugguguucagcagcugcuucggcaaguuccccaucuacaccauccccgacaagcugggccccuggagccccaucgacauccaccaccugagcugccccaacaaccuggugguggaggacgagggcugcaccaaccugagcggcuucagcuacauggagcugaaggugggcuacaucagcgccaucaaggugaacggcuucaccugcaccggcguggugaccgaggccgagaccuacaccaacuucgugggcuacgugaccaccaccuucaagagaaagcacuucagacccacccccgacgccugcagagccgccuacaacuggaagauggccggcgaccccagauacgaggagagccugcacaaccccuaccccgacuaccacuggcugagaaccgugaagaccaccaaggagagccuggugaucaucagccccagcgugagcgaccuggaccccuacgacaagagccugcacagcagaguguuccccagcggcaagugcagcggcaucaccgugagcagcaccuacugccccaccaaccacgacuacaccaucuggaugcccgagaaccccagacugggcaccagcugcgacaucuucaccaacagcagaggcaagagagccagcaagggcggcaagaccugcggcuucguggacgagagaggccuguacaagagccugaagggcgccugcaagcugaagcugugcggcgugcugggccugagacugauggacggcaccuggguggccauccagaccagcgacgaggccaaguggugcccccccgaccagcuggugaacauccacgacuucagaagcgacgagaucgagcaccuggugguggaggagcuggugaagaagagagaggagugccuggacgcccuggagagcaucaugaccaccaagagcgugagcuucggcagacugagccaccugagaaagcuggugcccggcuucggcaaggccuacaccaucuucaacaagacccugauggaggccgacgcccacuacaagagcgugagaaccuggaacgagaucauccccagcaagggcugccugagagugggcggcagaugccacccccacgugaacggcguguucuucaacggcaucauccugggccccgacggccacgugcugauccccgaggugcagagcagccugcugcagcagcacauggagcugcuggagagcagcgugaucccccugaugcacccccuggccgaccccagcaccguguucaaggacggcgacgaggccgaggacuucguggaggugcaccugcccgacgugcacaagcaggugagcggcguggaccugggccugcccagcuggggcaaguacgugcugaugagcgugggcgccaugaucgcccugaugcugaugaucuuccugaugaccugcugcagaaaggccaacggcgccgagaccauccagcacagacugggcgagaccggcagaaaggugagcgugaccagccagagcggcagagugaucagcagcugggagagcuacaagagcggcggcgagaccaagcuguga

SEQ ID NO: 191992 - RNA, 1575 nt, Artificial Sequence
  derived and/or modified CDS sequence (opt4) from glycoprotein__RABV__LC071975.1
augaucccccaggcccugcuguucgugccccugcugguguucagcagcugcuucggcaaguuccccaucuacaccauccccgacaagcugggccccuggagccccaucgacauccaccaccugagcugccccaacaaccuggugguggaggacgagggcugcaccaaccugagcggcuucagcuacauggagcugaaggugggcuacaucagcgccaucaaggugaacggcuucaccugcaccggcguggugaccgaggccgagaccuacaccaacuucgugggcuacgugaccaccaccuucaagagaaagcacuucagacccacccccgacgccugcagagccgccuacaacuggaagauggccggcgaccccagauacgaggagagccugcacaaccccuaccccgacuaccacuggcugagaaccgugaagaccaccaaggagagccuggugaucaucagccccagcgugagcgaccuggaccccuacgacaagagccugcacagcagaguguuccccagcggcaagugcagcggcaucaccgugagcagcaccuacugccccaccaaccacgacuacaccaucuggaugcccgagaaccccagacugggcaccagcugcgacaucuucaccaacagcagaggcaagagagccagcaagggcggcaagaccugcggcuucguggacgagagaggccuguacaagagccugaagggcgccugcaagcugaagcugugcggcgugcugggccugagacugauggacggcaccuggguggccauccagaccagcgacgaggccaaguggugcccccccgaccagcuggugaacauccacgacuucagaagcgacgagaucgagcaccuggugguggaggagcuggugaagaagagagaggagugccuggacgcccuggagagcgugaugaccaccaagagcgugagcuucagaagacugagccaccugagaaagcuggugcccggcuucggcaaggccuacaccaucuucaacaagacccugauggaggccgacgcccacuacaagagcgugagaaccuggaacgagaucauccccagcaagggcugccugagagugggcggcagaugccacccccacgugaacggcguguucuucaacggcaucauccugggccccgacggccacgugcugauccccgagaugcagagcagccugcugcagcagcacauggagcugcuggagagcagcgugaucccccugaugcacccccuggccgaccccagcaccguguucaaggacggcgacgaggccgaggacuucguggaggugcaccugcccgacgugcacaagcaggugagcggcguggaccugggccugcccagcuggggcaaguacgugcugaugagcgugggcgccaugaucgcccugaugcugaugaucuuccugaugaccugcugcagaaaggccaacggcgccgagaccauccagcacagacugggcgagaccggcagaaaggugagcgugaccagccagagcggcagagugaucagcagcugggagagcuacaagagcggcggcgagaccaagcuguga

SEQ ID NO: 191993 - RNA, 1575 nt, Artificial Sequence; identical to SEQ ID NO: 191088
  derived and/or modified CDS sequence (opt4) from glycoprotein__RABV__LC071976.1

SEQ ID NO: 191994 - RNA, 1575 nt, Artificial Sequence
  derived and/or modified CDS sequence (opt4) from glycoprotein__RABV__LC071977.1
augaucccccaggcccugcuguucgugccccugcugguguucagcagcugcuucggcaaguuccccaucuacaccauccccgacaagcugggccccuggagccccaucgacauccaccaccugagcugccccaacaaccuggugguggaggacgagggcugcaccaaccugagcggcuucagcuacauggagcugaaggugggcuacaucagcgccaucaaggugaacggcuucaccugcaccggcguggugaccgaggccgagaccuacaccaacuucgugggcuacgugaccaccaccuucaagagaaagcacuucagacccacccccgacgccugcagagccgccuacaacuggaagauggccggcgaccccagauacgaggagagccugcacaaccccuaccccgacuaccacuggcugagagccgugaagaccaccaaggagagccuggugaucaucagccccagcgugagcgaccuggaccccuacgacaagagccugcacagcagaguguuccccagcggcaagugcagcggcaucaccgugagcagcaccuacugccccaccaaccacgacuacaccaucuggaugcccgagaaccccagacugggcaccagcugcgacaucuucaccaacagcagaggcaagagagccagcaagggcggcaagaccugcggcuucguggacgagagaggccuguacaagagccugaagggcgccugcaagcugaagcugugcggcgugcugggccugagacugauggacggcaccuggguggccauccagaccagcgacgaggccaaguggugcccccccgaccagcuggugaacauccacgacuucagaagcgacgagaucgagcaccuggugguggaggagcuggugaagaagagagaggagugccuggacgcccuggagagcaucaugaccaccaagagcgugagcuucagaagacugagccaccugagaaagcuggugcccggcuucggcaaggccuacaccaucuucaacaagacccugauggaggccgacgcccacuacaagagcgugagaaccuggaacgagaucauccccagcaagggcugccugagagugggcggcagaugccacccccacgugaacggcguguucuucaacggcaucauccugggccccgacggccacgugcugauccccgagaugcagagcagccugcugcagcagcacauggagcugcuggagagcagcgugaucccccugaugcacccccuggccgaccccagcaccguguucaaggacggcgacgaggccgaggacuucguggaggugcaccugcccgacgugcacaagcaggugagcggcguggaccugggccugcccagcuggggcaaguacgugcugaugagcgugggcgccaugaucgcccugaugcugaugaucuuccugaugaccugcugcagaaaggccaacggcgccgagaccauccagcacagacugggcgagaccggcagaaaggugagcgugaccagccagagcggcagagugaucagcagcugggagagcuacaagagcggcggcgagaccaagcuguga

SEQ ID NO: 191995 - RNA, 1575 nt, Artificial Sequence; identical to SEQ ID NO: 191088
  derived and/or modified CDS sequence (opt4) from glycoprotein__RABV__LC071978.1

SEQ ID NO: 191996 - RNA, 1575 nt, Artificial Sequence
  derived and/or modified CDS sequence (opt4) from glycoprotein__RABV__LC071979.1
augaucccccaggcccugcuguucgugccccugcugguguucagcagcugcuucggcaaguuccccaucuacaccauccccgacaagcugggccccuggagccccaucgacauccaccaccugagcugccccaacaaccuggugguggaggacgagggcugcaccaaccugagcggcuucagcuacauggagcugaaggugggcuacaucagcgccaucaaggugaacggcuucaccugcaccggcguggugaccgaggccgagaccuacaccaacuucgugggcuacgugaccaccaccuucaagagaaagcacuucagacccacccccgacgccugcagagccgccuacaacuggaagauggccggcgaccccagauacgaggagagccugcacaaccccuaccccgacuaccacuggcugagaaccgugaagaccaccaaggagagccuggugaucaucagccccagcgugagcgaccuggaccccuacgacaagagccugcacagcagaguguuccccagcggcaagugcagcggcaucaccgugagcagcaccuacugccccaccaaccacgacuacaccaucuggaugcccgagaaccccagacugggcaccagcugcgacaucuucaccaacagcagaggcaagagagccagcaagggcggcaagaccugcggcuucguggacgagagaggccuguacaagagccugaagggcgccugcaagcugaagcugugcggcgugcugggccugagacugauggacggcaccuggguggccauccagaccagcgacgaggccaaguggugcccccccgaccagcuggugaacauccacgacuucagaagcgacgagaucgagcaccuggugguggaggagcuggugaagaagagagaggagugccuggacgcccuggagagcaucaugaccaccaagagcgugagcuucagaagacugagccaccugagaaagcuggugcccggcuucggcgaggccuacaccaucuucaacaagacccugauggaggccgacgcccacuacaagagcgugagaaccuggaacgagaucauccccagcaagggcugccugagagugggcggcagaugccacccccacgugaacggcguguucuucaacggcaucauccugggccccgacggccacgugcugauccccgagaugcagagcagccugcugcagcagcacauggagcugcuggagagcagcgugaucccccugaugcacccccuggccgaccccagcaccguguucaaggacggcgacgaggccgaggacuucguggaggugcaccugcccgacgugcacaagcaggugagcggcguggaccugggccugcccagcuggggcaaguacgugcugaugagcgugggcgccaugaucgcccugaugcugaugaucuuccugaugaccugcugcagaaaggccaacggcgccgagaccauccagcacagacugggcgagaccggcagaaaggugagcgugaccagccagagcggcagagugaucagcagcugggagagcuacaagagcggcggcgagaccaagcuguga

SEQ ID NO: 191997 - RNA, 1575 nt, Artificial Sequence; identical to SEQ ID NO: 191088
  derived and/or modified CDS sequence (opt4) from glycoprotein__RABV__LC071980.1

SEQ ID NO: 191998 - RNA, 1575 nt, Artificial Sequence
  derived and/or modified CDS sequence (opt4) from glycoprotein__RABV__LC071981.1
augaucccccaggcccugcuguucgugccccugcugguguucagcagcugcuucggcaaguuccccaucuacaccauccccgacaagcugggccccuggagccccaucgacauccaccaccugagcugccccaacaaccuggugguggaggacgagggcugcaccaaccugagcggcuucagcuacauggagcugaaggugggcuacaucagcgccaucaaggugaacggcuucaccugcaccggcguggugaccgaggccgagaccuacaccaacuucgugggcuacgugaccaccaccuucaagagaaagcacuucagacccacccccgacgccugcagagccgccuacaacuggaagauggccggcgaccccagauacgaggagagccugcacaaccccuaccccgacuaccacuggcugagaaccgugaagaccaccaaggagagccuggugaucaucagccccagcgugagcgaccuggaccccuacgacaagagccugcacagcagaguguuccccagcggcaagagaagcggcaucaccgugagcagcaccuacugccccaccaaccacgacuacaccaucuggaugcccgagaaccccagacugggcaccagcugcgacaucuucaccaacagcagaggcaagagagccagcaagggcggcaagaccugcggcuucguggacgagagaggccuguacaagagccugaagggcgccugcaagcugaagcugugcggcgugcugggccugagacugauggacggcaccuggguggccauccagaccagcgacgaggccaaguggugcccccccgaccagcuggugaacauccacgacuucagaagcgacgagaucgagcaccuggugguggaggagcuggugaagaagagagaggagugccuggacgcccuggagagcaucaugaccaccaagagcgugagcuucagaagacugagccaccugagaaagcuggugcccggcuucggcaaggccuacaccaucuucaacaagacccugauggaggccgacgcccacuacaagagcgugagaaccuggaacgagaucauccccagcaagggcugccugagagugggcggcagaugccacccccacgugaacggcguguucuucaacggcaucgugcugggccccgacggccacgugcugauccccgagaugcagagcagccugcugcagcagcacauggagcugcuggagagcagcgugaucccccugaugcacccccuggccgaccccagcaccguguucaaggacggcgacgaggccgaggacuucguggaggugcaccugcccgacgugcacaagcaggugagcggcguggaccugggccugcccagcuggggcaaguacgcccugaugagcgugggcgccaugaucgcccugaugcugaugaucuuccugaugaccugcugcagaaaggccaacggcgccgagaccaagcagcacagacugggcgagaccggcagaaaggugagcgugaccagccagagcggcagagugaucagcagcugggagagcuacaagagcggcggcgagaccaagcuguga

SEQ ID NO: 191999 - RNA, 1575 nt, Artificial Sequence
  derived and/or modified CDS sequence (opt4) from glycoprotein__RABV__LC071983.1
augaucccccaggcccugcuguucaucccccugagcguguucagccugugcuucggcaaguuccccaucuacaccauccccgacaagcugggccccuggagccccaucgacauccaccaccugagcugccccaacaaccuggugguggaggacgagggcugcaccaaccugagcggcuucagcuacauggagcugaaggugggcuacaucagcgccaucaaggugaacggcuucaccugcaccggcguggugaccgaggccgagaccuacaccaacuucgugggcuacgugaccaccaccuucaagagaaagcacuucagacccacccccgacgccugcagagccgccuacaacuggaagauggccggcgaccccagauacgaggagagccugcacaaccccuaccccgacuaccacuggcugagaaccgugaagaccaccaaggagagccuggugaucaucagccccagcgugagcgaccuggaccccuacgacaagagccugcacagcagaguguuccccagcggcaagugcagcggcaucaccgugagcagcaccuacugccccaccaaccacgacuacaccaucuggaugcccgagagccccagacugggcaccagcugcgacaucuucaccaacagcagaggcaagagagccagcaagggcagcaagaccugcggcuucguggacgagagaggccuguacaagagccugaagggcgccugcaagcugaagcugugcggcgugcugggccugagacugauggacggcaccugggccgccauccagacccccgacgaggugaaguggugcccccccgaccagcuggugaacauccacgacuucagaagcgacgagaucgagcaccuggugguggaggagcuggugaagaagagagaggagugccuggacgcccuggagagcaucaugaccaccaagagcgugagcuucagaagacugagccaccugagaaagcuggugcccggcuucggcaaggccuacaccaucuucaacaagacccugauggaggccgacgcccacuacaagagcgugagaaccuggaacgagaucauccccagcaagggcugccugagagugggcggcagaugccacccccacgugaacggcguguucuucaacggcaucauccugggccccgacggccacgugcugauccccgagaugcagagcagccugcugcagcagcacauggagcugcuggagagcagcgugaucccccugaugcacccccuggccgaccccagcaccguguucaaggacggcgacgaggccgaggacuucguggaggugcaccugcccgacgugcacaagcaggugagcggcguggaccugggccugcccagcuggggcaaguacgugcugaugagcgugggcgccaugaucgcccugaugcugaugaucuuccugaccaccugcugcagaaaggccaacggcgccgagagcauccagcacagaagaggcgagaccggcagaaaggugagcgugaccagccagagcggcagagugaucagcagcugggagagcuacaagagcggcggcgagaccaagcuguga

SEQ ID NO: 192000 - RNA, 1575 nt, Artificial Sequence
  derived and/or modified CDS sequence (opt4) from glycoprotein__RABV__LM645015.1
auggugccccaggcccugcuguucgugccccugcuggccuuccccaugugcuucggcaaguuccccaucuacaccauccccgacaagcugggccccuggagccccaucgacauccaccaccugagcugccccaacaaccuggugguggaggacgagggcugcaccaaccugagcggcuucagcuacauggagcugaaggugggcuacaucagcgccaucaaggugaacggcuucaccugcaccggcguggugaccgaggccgagaccuacaccaacuucgugggcuacgugaccaccaccuucaagagaaagcacuucagacccacccccgacgccugcagagccgccuacaacuggaagauggccggcgaccccagauacgaggagagccugcacaaccccuaccccgacuaccacuggcugagaaccgugaagaccaccaaggagagccugaucaucaucagccccagcguggccgaccuggaccccuacgacaagagccugcacagcagaguguuccccagcggcaagugccugggcaucaccaucagcagcaccuacugcagcaccaaccacgacuacaccaucuggaugcccgagaacgugagacugggcaccagcugcgacaucuucaccaacagcagaggcaagagagccagcaagggcagcaagaccugcggcuucguggacgagagaggccuguacaagagccugaagggcgccugcaagcugaagcugugcggcgugcugggccugagacugauggacggcaccuggguggccaugcccaccagcgacgagaccaaguggugcccccccgaccagcuggugaaccugcacgacuucagaagcgacgagaucgagcaccuggugguggaggagcuggugagaaagagagaggagugccuggacgcccuggagagcaucaugaccaccaagagcgugagcuucagaagacugagccaccugagaaagcuggugcccggcuucggcaaggccuacaccaucuucaacaagacccugauggaggccgacgcccacuacaagagcgugagaaccuggaacgagaucauccccagcaagggcugccugagagugggcggcagaugccacccccacgugaacggcguguucuucaacggcaucauccugggccccgacggccacgugcugauccccgagaugcagagcagccugcugcagcagcacauggagcugcuggagagcagcgugaucccccugaugcacccccuggccgaccccagcaccguguucaaggacggcgacgaggccgaggacuucguggaggugcaccugcccgacgugcacaagcaggugagcggcguggaccugggccugcccaacuggggcaaguacgugcugaucaucgccggcgugcugaucgccaugauccugaccaucuuccugaugaccugcugcggcagaggcaacagacccaagagcacccagcacagccugggcggcaucggcagaaaggugagcagcaccagccagagcggcaaggugaucagcagcugggagagcuacaagagcggcggcgagaccagacuguga

SEQ ID NO: 192001 - RNA, 1575 nt, Artificial Sequence
  derived and/or modified CDS sequence (opt4) from glycoprotein__RABV__LM645016.1
auggugccccaggcccugcuguucgugccccugcuggccuuccccaugugcuucggcaaguuccccaucuacaccauccccgacaagcugggccccuggagccccaucgacauccaccaccugagcugccccaacaaccuggugguggaggacgagggcugcaccaaccugagcggcuucagcuacauggagcugaaggugggcuacaucagcgccaucaaggugaacggcuucaccugcaccggcguggugaccgaggccgagaccuacaccaacuucgugggcuacgugaccaccaccuucaagagaaagcacuucagacccacccccgacgccugcagagccgccuacaacuggaagauggccggcgaccccagauacgaggagagccugcacaaccccuaccccgacuaccacuggcugagaaccgugaagaccaccaaggagagccugaucaucaucagccccagcguggccgaccuggaccccuacgacaagagccugcacagcagaguguuccccagcggcaagugccugggcaucaccaucagcagcaccuacugcagcaccaaccacgacuacaccaucuggaugcccgagaacgugagacugggcaccagcugcgacaucuucaccaacagcagaggcaagagagccagcaagggcagcaagaccugcggcuucguggacgagagaggccuguacaagagccugagaggcgccugcaagcugaagcugugcggcgugcugggccugagacugauggacggcaccuggguggccaugcccaccagcgacgagaccaaguggugcccccccgaccagcuggugaaccugcacgacuucagaagcgacgagaucgagcaccuggugguggaggagcuggugagaaagagagaggagugccuggacgcccuggagagcaucaugaccaccaagagcgugagcuucagaagacugagccaccugagaaagcuggugcccggcuucggcaaggccuacaccaucuucaacaagacccugauggaggccgacgcccacuacaagagcgugagaaccuggaacgagaucauccccagcaagggcugccugagagugggcggcagaugccacccccacgugaacggcguguucuucaacggcaucauccugggccccgacggccacgugcugauccccgagaugcagagcagccugcugcagcagcacauggagcugcuggagagcagcgugaucccccugaugcacccccuggccgaccccagcaccguguucaaggacggcgacgaggccgaggacuucguggaggugcaccugcccgacgugcacaagcagaucagcggcguggaccugggccugcccaacuggggcaaguacgugcugaucaucgccggcgugcugaucgccaugauccugaccaucuuccugaugaccugcugcggcagaggcaacagacccaagagcacccagcacagccugggcggcaucggcagaaaggugagcagcaccagccagagcggcaaggugaucagcagcugggagagcuacaagagcggcggcgagaccagacuguga

SEQ ID NO: 192002 - RNA, 1575 nt, Artificial Sequence
  derived and/or modified CDS sequence (opt4) from glycoprotein__RABV__LM645018.1
auggugccccaggcccugcuguucgugccccugcuggccuuccccaugugcuucggcaaguuccccaucuacaccauccccgacaagcugggccccuggagccccaucgacauccaccaccugagcugccccaacaaccuggugguggaggacgagggcugcaccaaccugagcggcuucagcuacauggagcugaaggugggcuacaucagcgccaucaaggugaacggcuucaccugcaccggcguggugaccgaggccgagaccuacaccaacuucgugggcuacgugaccaccaccuucaagagaaagcacuucagacccacccccgacgccugcagagccgccuacaacuggaagauggccggcgaccccagauacgaggagagccugcacaaccccuaccccgacuaccacuggcugagaaccgugaagaccaccaaggagagccugaucaucaucagccccagcguggccgaccuggaccccuacgacaagagccugcacagcagaguguuccccagcggcaagugccugggcaucaccaucagcagcaccuacugcagcaccaaccacgacuacaccaucuggaugcccgagaacgugagacugggcaccagcugcgacaucuucaccaacagcagaggcaagagagccagcaagggcagcaagaccugcggcuucguggacgagagaggccuguacaagagccugaagggcgccugcaagcugaagcugugcggcgugcugggccugagacugauggacggcaccuggguggccaugcccaccagcgacgagaccaaguggugcccccccgaccagcuggugaaccugcacgacuucagaagcgacgagaucgagcaccuggugguggaggagcuggugagaaagagagaggagugccuggacgcccuggagagcaucaugaccaccaagagcgugagcuucagaagacugagccaccugagaaagcuggugcccggcuucggcaaggccuacaccaucuucaacaagacccugauggaggccgacgcccacuacaagagcgugagaaccuggaacgagaucauccccagcaagggcugccugagagugggcggcagaugccacccccacgugaacggcguguucuucaacggcaucauccugggccccgacggccacgugcugauccccgagaugcagagcagccugcugcagcagcacauggagcugcuggagagcagcgugaucccccugaugcacccccuggccgaccccagcaccguguucaaggacggcgacgaggccgaggacuucguggaggugcaccugcccgacgugcacaagcagaucagcggcguggaccugggccugcccaacuggggcaaguacgugcugaucaucaccggcgugcugaucgccaugauccugaccaucuuccugaugaccugcugcggcagaggcaacagacccaagagcaagcagcacagccugggcggcaucggcagaaaggugagcagcaccagccagagcggcaaggugaucagcagcugggagagcuacaagagcggcggcgagaccagacuguga

SEQ ID NO: 192003 - RNA, 1575 nt, Artificial Sequence; identical to SEQ ID NO: 191869
  derived and/or modified CDS sequence (opt4) from glycoprotein__RABV__LM645019.1

SEQ ID NO: 192004 - RNA, 1575 nt, Artificial Sequence
  derived and/or modified CDS sequence (opt4) from glycoprotein__RABV__LM645021.1
auggugccccaggcccugcuguucgugccccugcuggccuuccccaugugcuucggcaaguuccccaucuacaccauccccgacaagcugggccccuggagccccaucgacauccaccaccugagcugccccaacaaccuggugguggaggacgagggcugcaccaaccugagcggcuucagcuacauggagcugaaggugggcuacaucagcgccaucaaggugaacggcuucaccugcaccggcguggugaccgaggccgagaccuacaccaacuucgugggcuacgugaccaccaccuucaagagaaagcacuucagacccacccccgacgccugcagagccgccuacaacuggaagauggccggcgaccccagauacgaggagagccugcacaaccccuaccccgacuaccacuggcugagaaccgugaagaccaccaaggagagccugaucaucaucagccccagcguggccgaccuggaccccuacgacaagagccugcacagcagaguguuccccagcggcaagugccugggcaucaccaucagcagcaccuacugcagcaccaaccacgacuacaccaucuggaugcccgagaacgugagacugggcaccagcugcgacaucuucaccaacagcagaggcaagagagccagcaagggcagcaagaccugcggcuucguggacgagagaggccuguacaagagccugaagggcgccugcaagcugaagcugugcggcgugcugggccugagacugauggacggcaccuggguggccaugcccaccagcgacgagaccaaguggugcagccccgaccagcuggugaaccugcacgacuucagaagcgacgagaucgagcaccuggugguggaggagcuggugagaaagagagaggagugccuggacgcccuggagagcaucaugaccaccaagagcgugagcuucagaagacugagccaccugagaaagcuggugcccggcuucggcaaggccuacaccaucuucaacaagacccugauggaggccgacgcccacuacaagagcgugagaaccuggaacgagaucauccccagcaagggcugccugagagugggcggcagaugccacccccacgugaacggcguguucuucaacggcaucauccugggccccgacggccacgugcugauccccgagaugcagagcagccugcugcagcagcacauggagcugcuggagagcagcgugaucccccugaugcacccccuggccgaccccagcaccguguucaaggacggcgacgaggccgaggacuucguggaggugcaccugcccgacgugcacaagcagaucagcggcguggaccugggccugcccaacuggggcaaguacgugcugaucaucgccggcgugcugaucgccaugauccugaccaucuuccugaugaccugcugcggcagaggcaacagacccaagagcaagcagcacagccugggcggcaucggcagaaaggugagcagcaccagccagagcggcaaggugaucagcagcugggagagcuacaagagcggcggcgagaccagacuguga

SEQ ID NO: 192005 - RNA, 1575 nt, Artificial Sequence
  derived and/or modified CDS sequence (opt4) from glycoprotein__RABV__LM645022.1
auggugccccaggcccugcuguucgugccccugcuggccuuccccaugugcuucggcaaguuccccaucuacaccauccccgacaagcugggccccuggagccccaucgacauccaccaccugagcugccccaacaaccuggugguggaggacgagggcugcaccaaccugagcggcuucagcuacauggagcugaaggugggcuacaucagcgccaucaaggugaacggcuucaccugcaccggcguggugaccgaggccgagaccuacaccaacuucgugggcuacgugaccaccaccuucaagagaaagcacuucagacccacccccgacgccugcagagccgccuacaacuggaagauggccggcgaccccagauacgaggagagccugcacaaccccuaccccgacuaccacuggcugagaaccgugaagaccaccaaggagagccugaucaucaucagccccagcguggccgaccuggaccccuacgacaagagccugcacagcagaguguuccccagcggcaagugccugggcaucaccaucagcagcaccuacugcagcaccaaccacgacuacaccaucuggaugcccgagaacgugagacugagaaccagcugcgacaucuucaccaacagcagaggcaagagagccagcaagggcagcaagaccugcggcuucguggacgagagaggccuguacaagagccugaagggcgccugcaagcugaagcugugcggcgugcugggccugagacugauggacggcaccuggguggccaugcccaccagcgacgagaccaaguggugcccccccgaccagcuggugaaccugcacgacuucagaagcgacgagaucgagcaccuggugguggaggagcuggugagaaagagagaggagugccuggacgcccuggagagcaucaugaccaccaagagcgugagcuucagaagacugagccaccugagaaagcuggugcccggcuucggcaaggccuacaccaucuucaacaagacccugauggaggccgacgcccacuacaagagcgugagaaccuggaacgagaucauccccagcaagggcugccugagagugggcggcagaugccacccccacgugaacggcguguucuucaacggcaucauccugggccccgacggccacgugcugauccccgagaugcagagcagccugcugcagcagcacauggagcugcuggagagcagcgugaucccccugaugcacccccuggccgaccccagcaccguguucaaggacggcgacgaggccgaggacuucguggaggugcaccugcccgacgugcacaagcagaucagcggcguggaccugggccugcccaacuggggcaaguacgugcugaucaucgccggcgugcugaucgccaugauccugaccaucuuccugaugaccugcugcggcagaggcaacagacccaagagcaagcagcacagccugggcggcaucggcagaaaggugagcagcaccagccagagcggcaaggugaucagcagcugggagagcuacaagagcggcggcgagaccagacuguga

SEQ ID NO: 192006 - RNA, 1575 nt, Artificial Sequence; identical to SEQ ID NO: 191869
  derived and/or modified CDS sequence (opt4) from glycoprotein__RABV__LM645024.1

SEQ ID NO: 192007 - RNA, 1575 nt, Artificial Sequence; identical to SEQ ID NO: 191869
  derived and/or modified CDS sequence (opt4) from glycoprotein__RABV__LM645026.1

SEQ ID NO: 192008 - RNA, 1575 nt, Artificial Sequence
  derived and/or modified CDS sequence (opt4) from glycoprotein__RABV__LM645027.1
auggugccccaggcccugcuguucgugccccugcuggccuuccccaugugcuucggcaaguuccccaucuacaccauccccgacaagcugggccccuggagccccaucgacauccaccaccugagcugccccaacaaccuggugguggaggacgagggcugcaccaaccugagcggcuucagcuacauggagcugaaggugggcuacaucagcgccaucaaggugaacggcuucaccugcaccggcguggugaccgaggccgagaccuacaccaacuucgugggcuacgugaccaccaccuucaagagaaagcacuucagacccacccccgacgccugcagagccgccuacaacuggaagauggccggcgaccccagauacgaggagagccugcacaaccccuaccccgacuaccacuggcugagaaccgugaagaccaccaaggagagccugaucaucaucagccccagcguggccgaccuggaccccuacgacaagagccugcacagcagaguguuccccagcggcaagugccugggcaucaccaucagcagcaccuacugcagcaccaaccacgacuacaccaucuggaugcccgagaacgugagacugggcaccagcugcgacaucuucaccaacagcagaggcaagagagccagcaagggcagcaagaccugcggcuucguggacgagagaggccuguacaagagccugaagggcgccugcaagcugaagcugugcggcgugcugggccugagacugauggacggcaccuggguggccaugcccaccagcgacgagaccaaguggugcccccccgaccagcuggugaaccugcacgacuucagaagcgacgagaucgagcaccuggugguggaggagcuggugagaaagagagaggagugccuggacgcccuggagagcaucaugaccaccaagagcgugagcuucagaagacugagccaccugagaaagcuggugcccggcuucggcaaggccuacaccaucuucaacaagacccugauggaggccgacgcccacuacaagagcgugagaaccuggaacgagaucauccccagcaagggcugccugagagugggcggcagaugccacccccacgugaacggcguguucuucaacggcaucauccugggccccgacggccacgugcugauccccgagaugcagagcagccugcugcagcagcacauggagcugcuggagagcagcgugaucccccugaugcacccccuggccgaccccagcaccguguucaaggacggcgacgaggccgaggacuucguggaggugcaccugcccgacgugcacaagcagaucagcggcguggaccugggccugcccaacuggggcaaguacgugcugaucaucgccggccugcugaucgccaugauccugaccaucuuccugaugaccugcugcggcagaggcaacagacccaagagcacccagcacagccugggcggcaucggcagaaaggugagcagcaccagccagagcggcaaggugaucagcagcugggagagcuacaagagcggcggcgagaccagacuguga

SEQ ID NO: 192009 - RNA, 1575 nt, Artificial Sequence
  derived and/or modified CDS sequence (opt4) from glycoprotein__RABV__LM645029.1
auggugccccaggcccugcuguucgugccccugcuggccuuccccaugugcuucggcaaguuccccaucuacaccauccccgacaagcugggccccuggagccccaucgacauccaccaccugagcugccccaacaaccuggugguggaggacgagggcugcaccaaccugagcggcuucagcuacauggagcugaaggugggcuacaucagcgccaucaaggugaacggcuucaccugcaccggcguggugaccgaggccgagaccuacaccaacuucgugggcuacgugaccaccaccuucaagagaaagcacuucagacccacccccgacgccugcagagccgccuacaacuggaagauggccggcgaccccagauacgaggagagccugcacaaccccuaccccgacuaccacuggcugagaaccgugaagaccaccaaggagagccugaucaucaucagccccagcguggccgaccuggaccccuacgacaagagccugcacagcagaguguuccccagcggcaagugccugggcaucaccaucagcagcaccuacugcagcaccaaccacgacuacaccaucuggaugcccgagaacgugagacugggcaccagcugcgacaucuucaccaacagcagaggcaagagagccagcaagggcagcaagaccugcggcuucguggacgagagaggccuguacaagagccugaagggcgccugcaagcugaagcugugcggcgugcugggccugagacugauggacggcaccuggguggccaugcccaccagcgacgagaccaaguggugcccccccgaccagcuggugaaccugcacgacuucagaagcgacgagaucgagcaccuggugguggaggagcuggugagaaagagagaggagugccuggacgcccuggagagcaucaucaccaccaagagcgugagcuucagaagacugagccaccugagaaagcuggugcccggcuucggcaaggccuacaccaucuucaacaagacccugauggaggccgacgcccacuacaagagcgugagaaccuggaacgagaucauccccagcaagggcugccugagagugggcggcagaugccacccccacgugaacggcguguucuucaacggcaucauccugggccccgacggccacgugcugauccccgagaugcagagcagccugcugcagcagcacauggagcugcuggagagcagcgugaucccccugaugcacccccuggccgaccccagcaccguguucaaggacggcgacgaggccgaggacuucguggaggugcaccugcccgacgugcacaagcagaucagcggcguggaccugggccugcccaacuggggcaaguacgugcugaucaucgccggcgugcugaucgccaugauccugaccaucuuccugaugaccugcugcggcagaggcaacagacccaagagcaagcagcacagccugggcggcaucggcagaaaggugagcagcaccagccagagcggcaaggugaucagcagcugggagagcuacaagagcggcggcgagaccagacuguga

SEQ ID NO: 192010 - RNA, 1575 nt, Artificial Sequence
  derived and/or modified CDS sequence (opt4) from glycoprotein__RABV__LM645031.1
auggugccccaggcccugcuguucgugccccugcuggccuuccccaugugcuucggcaaguuccccaucuacaccauccccgacaagcugggccccuggagccccaucgacauccaccaccugagcugccccaacaaccuggugguggaggacgagggcugcaccaaccugagcggcuucagcuacauggagcugaaggugggcuacaucagcgccaucaaggugaacggcuucaccugcaccggcguggugaccgaggccgagaccuacaccaacuucgugggcuacgugaccaccaccuucaagagaaagcacuucagacccacccccgacgccugcagagccgccuacaacuggaagauggccggcgaccccagauacgaggagagccugcacaaccccuaccccgacuaccacuggcugagaaccgugaagaccaccaaggagagccugaucaucaucagccccagcguggccgaccuggaccccuacgacaagagccugcacagcagaguguuccccagcggcaagugccugggcaucaccaucagcagcaccuacugcagcaccaaccacgacuacaccaucuggaugcccgagaacgugagacugggcaccagcugcgacaucuucaccaacagcagaggcaagagagccagcagaggcagcaagaccugcggcuucguggacgagagaggccuguacaagagccugaagggcgccugcaagcugaagcugugcggcgugcugggccugagacugauggacggcaccuggguggccaugcccaccagcgacgagaccaaguggugcccccccgaccagcuggugaaccugcacgacuucagaagcgacgagaucgagcaccuggugguggaggagcuggugagaaagagagaggagugccuggacgcccuggagagcaucaugaccaccaagagcgugagcuucagaagacugagccaccugagaaagcuggugcccggcuucggcaaggccuacaccaucuucaacaagacccugauggaggccgacgcccacuacaagagcgugagaaccuggaacgagaucauccccagcaagggcugccugagagugggcggcagaugccacccccacgugaacggcguguucuucaacggcaucauccugggccccgacggccacgugcugauccccgagaugcagagcagccugcugcagcagcacauggagcugcuggagagcagcgugaucccccugaugcacccccuggccgaccccagcaccguguucaaggacggcgacgaggccgaggacuucguggaggugcaccugcccgacgugcacaagcagaucagcggcguggaccugggccugcccaacuggggcaaguacgugcugaucaucgccggcgugcugaucgccaugauccugaccaucuuccugaugaccugcugcggcagaggcaacagacccaagagcaagcagcacagccugggcggcaucggcagaaaggugagcagcaccagccagagcggcaaggugaucagcagcugggagagcuacaagagcggcggcgagaccagacuguga

SEQ ID NO: 192011 - RNA, 1575 nt, Artificial Sequence; identical to SEQ ID NO: 191869
  derived and/or modified CDS sequence (opt4) from glycoprotein__RABV__LM645034.1

SEQ ID NO: 192012 - RNA, 1575 nt, Artificial Sequence; identical to SEQ ID NO: 191869
  derived and/or modified CDS sequence (opt4) from glycoprotein__RABV__LM645035.1

SEQ ID NO: 192013 - RNA, 1575 nt, Artificial Sequence
  derived and/or modified CDS sequence (opt4) from glycoprotein__RABV__LM645036.1
auggugccccaggcccugcuguucgugccccugcuggccuuccccaugugcuucggcaaguuccccaucuacaccauccccgacaagcugggccccuggagccccaucgacauccaccaccugagcugccccaacaaccuggugguggaggacgagggcugcaccaaccugagcggcuucagcuacauggagcugaaggugggcuacaucagcgccaucaaggugaacggcuucaccugcaccggcguggugaccgaggccgagaccuacaccaacuucgugggcuacgugaccaccaccuucaagagaaagcacuucagacccacccccgacgccugcagagccgccuacaacuggaagauggccggcgaccccagauacgaggagagccugcacaaccccuaccccgacuaccacuggcugagaaccgugaagaccaccaaggagagccugaucaucaucagccccagcguggccgaccuggaccccuacgacaagagccugcacagcagaguguuccccagcggcaagugccugggcaucaccaucagcagcaccuacugccugaccaaccacgacuacaccaucuggaugcccgagaacgugagacugggcaccagcugcgacaucuucaccaacagcagaggcaagagagccagcaagggcagcaagaccugcggcuucguggacgagagaggccuguacaagagccugaagggcgccugcaagcugaagcugugcggcgugcugggccugagacugauggacggcaccuggguggccaugcccaccagcgacgagaccaaguggugcccccccgaccagcuggugaaccugcacgacuucagaagcgacgagaucgagcaccuggugguggaggagcuggugagaaagagagaggagugccuggacgcccuggagagcaucaugaccaccaagagcgugagcuucagaagacugagccaccugagaaagcuggugcccggcuucggcaaggccuacaccaucuucaacaagacccugauggaggccgacgcccacuacaagagcgugagaaccuggaacgagaucauccccagcaagggcugccugagagugggcggcagaugccacccccacgugaacggcguguucuucaacggcaucauccugggccccgacggccacgugcugauccccgagaugcagagcagccugcugcagcagcacauggagcugcuggagagcagcgugaucccccugaugcacccccuggccgaccccagcaccguguucaaggacggcgacgaggccgaggacuucguggaggugcaccugcccgacgugcacaagcagaucagcggcguggaccugggccugcccaacuggggcaaguacgugcugaucaucgccggcgugcugaucgccaugauccugaccaucuuccugaugaccugcugcggcagaggcaacagacccaagagcaagcagcacagccugggcggcaucggcagaaaggugagcagcaccccccagagcggcaaggugaucagcagcugggagagcuacaagagcggcggcgagaccagacuguga

SEQ ID NO: 192014 - RNA, 1575 nt, Artificial Sequence; identical to SEQ ID NO: 191534
  derived and/or modified CDS sequence (opt4) from glycoprotein__RABV__LM645037.1

SEQ ID NO: 192015 - RNA, 1575 nt, Artificial Sequence
  derived and/or modified CDS sequence (opt4) from glycoprotein__RABV__LM645039.1
auggugccccaggcccugcuguucgugccccugcuggccuuccccaugugcuucggcaaguuccccaucuacaccauccccgacaagcugggccccuggagccccaucgacauccaccaccugagcugccccaacaaccuggugguggaggacgagggcugcaccaaccugagcggcuucagcuacauggagcugaaggugggcuacaucagcgccaucaaggugaacggcuucaccugcaccggcguggugaccgaggccgagaccuacaccaacuucgugggcuacgugaccaccaccuucaagagaaagcacuuccugcccacccccgacgccugcagagccgccuacaacuggaagauggccggcgaccccagauacgaggagagccugcacaaccccuaccccgacuaccacuggcugagaaccgugaagaccaccaaggagagccugaucaucaucagccccagcguggccgaccuggaccccuacgacaagagccugcacagcagaguguuccccagcggcaagugccugggcaucaccaucagcagcaccuacugcagcaccaaccacgacuacaccaucuggaugcccgagaacgugagacugggcaccagcugcgacaucuucaccaacagcagaggcaagagagccagcaagggcagcaagaccugcggcuucguggacgagagaggccuguacaagagccugaagggcgccugcaagcugaagcugugcggcgugcugggccugagacugauggacggcaccuggguggccaugcccaccagcgacgagaccaaguggugcccccccgaccagcuggugaaccugcacgacuucagaagcgacgagaucgagcaccuggugguggaggagcuggugagaaagagagaggagugccuggacgcccuggagagcaucaugaccaccaagagcgugagcuucagaagacugagccaccugagaaagcuggugcccggcuucggcaaggccuacaccaucuucaacaagacccugauggaggccgacgcccacuacaagagcgugagaaccuggaacgagaucauccccagcaagggcugccugagagugggcggcagaugccacccccacgugaacggcguguucuucaacggcaucauccugggccccgacggccacgugcugauccccgagaugcagagcagccugcugcagcagcacauggagcugcuggagagcagcgugaucccccugaugcacccccuggccgaccccagcaccguguucaaggacggcgacgaggccgaggacuucguggaggugcaccugcccgacgugcacaagcagaucagcggcguggaccugggccugcccaacuggggcaaguacgugcugaucaucgccggcgugcugaucgccaugauccugaccaucuuccugaugaccugcugcggcagaggcaacagacccaagagcacccagcacagccugggcggcaucggcagaaaggugagcagcaccagccagagcggcaaggugaucagcagcugggagagcuacaagagcggcggcgagaccagacuguga

SEQ ID NO: 192016 - RNA, 1575 nt, Artificial Sequence; identical to SEQ ID NO: 191534
  derived and/or modified CDS sequence (opt4) from glycoprotein__RABV__LM645041.1

SEQ ID NO: 192017 - RNA, 1575 nt, Artificial Sequence
  derived and/or modified CDS sequence (opt4) from glycoprotein__RABV__LM645042.1
auggugccccaggcccugcuguucgugccccugcuggccuuccccaugugcuucggcaaguuccccaucuacaccauccccgacaagcugggccccuggagccccaucgacauccaccaccugagcugccccaacaaccuggugguggaggacgagggcugcaccaaccugagcggcuucagcuacauggagcugaaggugggcuacaucagcgccaucaaggugaacggcuucaccugcaccggcguggugaccgaggccgagaccuacaccaacuucgugggcuacgugaccaccaccuucaagagaaagcacuuccugcccacccccgacgccugcagagccgccuacaacuggaagauggccggcgaccccagauacgaggagagccugcacaaccccuaccccgacuaccacuggcugagaaccgugaagaccaccaaggagagccugaucaucaucagccccagcguggccgaccuggaccccuacgacaagagccugcacagcagaguguuccccagcggcaagugccugggcaucaccaucagcagcaccuacugcagcaccaaccacgacuacaccaucuggaugcccgagaacgugagacugggcaccagcugcgacaucuucaccaacagcagaggcaagagagccagcaagggcagcaagaccugcggcuucguggacaagagaggccuguacaagagccugaagggcgccugcaagcugaagcugugcggcgugcugggccugagacugauggacggcaccuggguggccaugcccaccagcgacgagaccaaguggugcccccccgaccagcuggugaaccugcacgacuucagaagcgacgagaucgagcaccuggugguggaggagcuggugagaaagagagaggagugccuggacgcccuggagagcaucaugaccaccaagagcgugagcuucagaagacugagccaccugagaaagcuggugcccggcuucggcaaggccuacaccaucuucaacaagacccugauggaggccgacgcccacuacaagagcgugagaaccuggaacgagaucauccccagcaagggcugccugagagugggcggcagaugccacccccacgugaacggcguguucuucaacggcaucauccugggccccgacggccacgugcugauccccgagaugcagagcagccugcugcagcagcacauggagcugcuggagagcagcgugaucccccugaugcacccccuggccgaccccagcaccguguucaaggacggcgacgaggccgaggacuucguggaggugcaccugcccgacgugcacaagcagaucagcggcguggaccugggccugcccaacuggggcaaguacgugcugaucaucgccggcgugcugaucgccaugauccugaccaucuuccugaugaccugcugcggcagaggcaacagacccaagagcacccagcacagccugggcggcaucggcagaaaggugagcagcaccagccagagcggcaaggugaucagcagcugggagagcuacaagagcggcggcgagaccagacuguga

SEQ ID NO: 192018 - RNA, 1575 nt, Artificial Sequence; identical to SEQ ID NO: 191534
  derived and/or modified CDS sequence (opt4) from glycoprotein__RABV__LM645043.1

SEQ ID NO: 192019 - RNA, 1575 nt, Artificial Sequence
  derived and/or modified CDS sequence (opt4) from glycoprotein__RABV__LM645045.1
auggugccccaggcccugcuguucgugccccugcuggccuuccccaugugcuucggcaaguuccccaucuacaccauccccgacaagcugggccccuggagccccaucgacauccaccaccugagcugccccaacaaccuggugguggaggacgagggcugcaccaaccugagcggcuucagcuacauggagcugaaggugggcuacaucagcgccaucaaggugaacggcuucaccugcaccggcguggugaccgaggccgagaccuacaccaacuucgugggcuacgugaccaccaccuucaagagaaagcacuucagacccacccccgacgccugcagagccgccuacaacuggaagauggccggcgaccccagauacgaggagagccugcacaaccccuaccccgacuaccacuggcugagaaccgugaagaccaccaaggagagccugaucaucaucagccccagcguggccgaccuggaccccuacgacaagagccugcacagcagaguguuccccagcggcaagugccugggcaucaccaucagcagcaccuacugcagcaccaaccacgacuacaccaucuggaugcccgagaacgugagacugggcaccagcugcgacaucuucaccaacagcagaggcaagagagccagcaagggcagcaagaccugcggcuucguggacgagagaggccuguacaagagccugaagggcgccugcaagcugaagcugugcggcgugcugggccugagacugauggacggcaccuggguggccaugcccaccagcgacgagaccaaguggugcccccccgaccagcuggugaaccugcacgacuucagaagcgacgagaucgagcaccuggugguggaggagcuggugagaaagagagaggagugccuggacgcccuggagagcaucaugaccaccaagagcgugagcuucagaagacugagccaccugagaaagcuggugcccggcuucggcaaggccuacaccaucuucaacaagacccugauggaggccgacgcccacuacaagagcgugagaaccuggaacgagaucauccccagcaagggcugccugagagugggcggcagaugccacccccacgugaacggcguguucuucaacggcaucauccugggccccgacggccacgugcugauccccgagaugcagagcagccugcugcagcagcacauggagcugcuggagagcagcgugaucccccugaugcacccccuggccgaccccagcaccguguucaaggacggcgacgaggccgaggacuucguggaggugcacuuccccgacgugcacaagcagaucagcggcguggaccugggccugcccaacuggggcaaguacgugcugaucaucgccggcgugcugaucgccaugauccugaccaucuuccugaugaccugcugcggcagaggcaacagacccaagagcacccagcacagccugggcggcaucggcagaaaggugagcagcaccagccagagcggcaaggugaucagcagcugggagagcuacaagagcggcggcgagaccagacuguga

SEQ ID NO: 192020 - RNA, 1575 nt, Artificial Sequence; identical to SEQ ID NO: 192019
  derived and/or modified CDS sequence (opt4) from glycoprotein__RABV__LM645049.1

SEQ ID NO: 192021 - RNA, 1575 nt, Artificial Sequence; identical to SEQ ID NO: 191534
  derived and/or modified CDS sequence (opt4) from glycoprotein__RABV__LM645052.1

SEQ ID NO: 192022 - RNA, 1575 nt, Artificial Sequence; identical to SEQ ID NO: 191534
  derived and/or modified CDS sequence (opt4) from glycoprotein__RABV__LM645053.1

SEQ ID NO: 192023 - RNA, 1575 nt, Artificial Sequence; identical to SEQ ID NO: 191534
  derived and/or modified CDS sequence (opt4) from glycoprotein__RABV__LM645056.1

SEQ ID NO: 192024 - RNA, 1575 nt, Artificial Sequence
  derived and/or modified CDS sequence (opt4) from glycoprotein__RABV__LN713547.1
auggugccccaggcccugcuguucgugccccugcugguguucccccugugcuucggcaaguuccccaucuacaccauccccgacaagcugggccccuggagccccaucgacauccaccaccugagcugccccaacaaccuggugguggaggacgagggcugcaccaaccugagcggcuucagcuacauggagcugaaggugggcaacauccuggccaucaagaugaacggcuucaccugcaccggcguggugaccgaggccgagaccuacaccaacuucgugggcuacgugaccaccaccuucaagagaaagcacuucagacccacccccgacgccugcagagccgccuacaacuggaagauggccggcgaccccagauacgaggagagccugcacaaccccuaccccgacuacagauggcugagaaccgugaagaccaccaaggagagccuggugaucaucagccccagcguggccgaccuggaccccuacgacagaagccugcacagcagaguguuccccagcggcaagugcagcggcguggccgugagcagcaccuacugcagcaccaaccacgacuacaccaucuggaugcccgagagccccagacugggcaugagcugcgacaucuucaccaacagcagaggcaagagagccagcaagggcagcgagaccugcggcuucguggacgagagaggccuguacaagagccugaagggcgccugcaagcugaagcugugcggcgugcugggccugagacugauggacggcaccugggugagcaugcagaccagcaacgagaccaaguggugcccccccgaccagcuggugaaccugcacgacuucagaagcgacgagaucgagcaccuggugguggaggagcuggugagaaagagagaggagugccuggacgcccuggagagcaucaugaccaccaagagcgugagcuucagaagacugagccaccugagaaagcuggugcccggcuucggcaaggccuacaccauccugaacaagacccugauggaggccgacgcccacuacaagagcgugagaaccuggaacgagauccugcccagcaagggcugccugagagugggcggcagaugccacccccacgugaacggcguguucuucaacggcaucauccugggccccgacggcaacgugcugauccccgagaugcagagcagccugcugcagcagcacauggagcugcuggagagcagcgugaucccccuggugcacccccuggccgaccccagcaccguguucaaggacggcgacgaggccgaggacuucguggaggugcaccugcccgacgugcacaaccaggugagcggcguggaccugggccugcccaacuggggcaaguacgugcugcugagcgccggcgcccugaccgcccugaugcugaucaucuuccugaugaccugcugcagaagagugaacagaagcgagcccacccagcacaaccugagaggcaccggcagagaggugagcgugaccccccagagcggcaagaucaucagcagcugggagagccacaagagcggcggcgagaccagacuguga

SEQ ID NO: 192025 - RNA, 1575 nt, Artificial Sequence; identical to SEQ ID NO: 192024
  derived and/or modified CDS sequence (opt4) from glycoprotein__RABV__LN713552.1

SEQ ID NO: 192026 - RNA, 1575 nt, Artificial Sequence
  derived and/or modified CDS sequence (opt4) from glycoprotein__RABV__LN713556.1
auggugccccaggcccugcuguucgugccccugcugguguucccccugugcuucggcaaguuccccaucuacaccauccccgacaagcugggccccuggagccccaucgacauccaccaccugagcugccccaacaaccuggugguggaggacgagggcugcaccaaccugagcggcuucagcuacauggagcugaaggugggcaacauccuggccaucaagaugaacggcuucaccugcaccggcguggugaccgaggccgagaccuacaccaacuucgugggcuacgugaccaccaccuucaagagaaagcacuucagacccacccccgacgccugcagagccgccuacaacuggaagauggccggcgaccccagauacgaggagagccugcacaaccccuaccccgacuacagauggcugagaaccgugaagaccaccaaggagagccuggugaucaucagccccagcguggccgaccuggaccccuacgacagaagccugcacagcagaguguuccccagcggcaagugcagcggcguggccgugagcagcaccuacugcagcaccaaccacgacuacaccaucuggaugcccgagaaccccagacugggcaugagcugcgacaucuucaccaacagcagaggcaagagagccagcaagggcagcgagaccugcggcuucguggacgagagaggccuguacaagagccugaagggcgccugcaagcugaagcugugcggcgugcugggccugagacugauggacggcaccugggugagcaugcagaccagcaacgagaccaaguggugcccccccgacaagcuggugaaccugcacgacuucagaagcgacgagaucgagcaccuggugguggaggagcuggugagaaagagagaggagugccuggacgcccuggagagcaucaugaccaccaagagcgugagcuucagaagacugagccaccugagaaagcuggugcccggcuucggcaaggccuacaccauccugaacaagacccugauggaggccgacgcccacuacaagagcgugagaaccuggaacgagauccugcccagcaagggcugccugagagugggcggcagaugccacccccacgugaacggcguguucuucaacggcaucauccugggccccgacggcaacgugcugauccccgagaugcagagcagccugcugcagcagcacauggagcugcuggagagcagcgugaucccccuggugcacccccuggccgaccccagcaccguguucaaggacggcgacgaggccgaggacuucguggaggugcaccugcccgacgugcacaaccaggugagcggcguggaccugggccugcccaacuggggcaaguacgugcugcugagcgccggcgcccugaccgcccugaugcugaucaucuuccugaugaccugcugcagaagagugaacagaagcgagcccacccagcacaaccugagaggcaccggcagagaggugagcgugaccccccagagcggcaagaucaucagcagcugggagagccacaagagcggcggcgagaccagacuguga

SEQ ID NO: 192027 - RNA, 1575 nt, Artificial Sequence; identical to SEQ ID NO: 192024
  derived and/or modified CDS sequence (opt4) from glycoprotein__RABV__LN713559.1

SEQ ID NO: 192028 - RNA, 1575 nt, Artificial Sequence
  derived and/or modified CDS sequence (opt4) from glycoprotein__RABV__LN713560.1
auggugccccaggcccugcuguucgugccccugcugguguucccccugugcuucggcaaguuccccaucuacaccauccccgacaagcugggccccuggagccccaucgacauccaccaccugagcugccccaacaaccuggugguggaggacgagggcugcaccaaccugagcggcuucagcuacauggagcugaaggugggcaacauccuggccaucaaggugaacggcuucaccugcaccggcguggugaccgaggccgagaccuacaccaacuucgugggcuacgugaccaccaccuucaagagaaagcacuucagacccacccccgacgccugcagagccgccuacaacuggaagauggccggcgaccccagauacgaggagagccugcacaaccccuaccccgacuacagauggcugagaaccgugaagaccaccaaggagagccuggugaucaucagccccagcguggccgaccuggaccccuacgacagaagccugcacagcagaguguuccccagcggcaagugcagcggcguggccgugagcagcaccuacugcagcaccaaccacgacuacaccaucuggaugcccgagagccccagacugggcaugagcugcgacaucuucaccaacagcagaggcaagagagccagcaagggcagcgagaccugcggcuucguggacgagagaggccuguacaagagccugaagggcgccugcaagcugaagcugugcggcgugcugggccugagacugauggacggcaccugggugagcaugcagaccagcaacgagaccaaguggugcccccccgaccagcuggugaaccugcacgacuucagaagcgacgagaucgagcaccuggugguggaggagcuggugagaaagagagaggagugccuggacgcccuggagagcaucaugaccaccaagagcgugagcuucagaagacugagccaccugagaaagcuggugcccggcuucggcaaggccuacaccauccugaacaagacccugauggaggccgacgcccacuacaagagcgugagaaccuggaacgagauccugcccagcaagggcugccugagagugggcggcagaugccacccccacgugaacggcguguucuucaacggcaucauccugggccccgacggcaacgugcugauccccgagaugcagagcagccugcugcagcagcacauggagcugcuggagagcagcgugaucccccuggugcacccccuggccgaccccagcaccguguucaaggacggcgacgaggccgaggacuucguggaggugcaccugcccgacgugcacaaccaggugagcggcguggaccugggccugcccaacuggggcaaguacgugcugcugagcgccggcgcccugaccgcccugaugcugaucaucuuccugaugaccugcugcagaagagugaacagaagcgagcccacccagcacaaccugagaggcaccggcagagaggugagcgugaccccccagagcggcaagaucaucagcagcugggagagccacaagagcggcggcgagaccagacuguga

SEQ ID NO: 192029 - RNA, 1575 nt, Artificial Sequence
  derived and/or modified CDS sequence (opt4) from glycoprotein__RABV__LN713572.1
auggugccccaggcccugcuguucgugccccugcugguguucccccugugcuucggcaaguuccccaucuacaccauccccgacaagcugggccccuggagccccaucgacauccaccaccugagcugccccaacaaccuggugguggaggacgagggcugcaccaaccugagcggcuucagcuacauggagcugaaggugggcuacauccuggccaucaaggugaacggcuucaccugcaccggcguggugaccgaggccgagaccuacaccaacuucgugggcuacgugaccaccaccuucaagagaaagcacuucagacccacccccgacgccugcagagccgccuacaacuggaagauggccggcgaccccagauacgaggagagccugcacaaccccuaccccgacuacagauggcugagaaccgugaagaccaccaaggagagccuggugaucaucagccccagcguggccgaccuggaccccuacgacagaagccugcacagcagaguguuccccagcggcaagugcagcggcguggccgugagcagcaccuacugcagcaccaaccacgacuacaccaucuggaugcccgagaaccccagacugggcaugagcugcgacaucuucaccaacagcagaggcaagagagccagcaagggcagcgagaccugcggcuucguggacgagagaggccuguacaagagccugaagggcgccugcaagcugaagcugugcggcgugcugggccugagacugauggacggcaccugggugagcaugcagaccagcaacgagaccaaguggugcccccccgacaagcuggugaaccugcacgacuucagaagcgacgagaucgagcaccuggugguggaggagcuggugagaaagagagaggagugccuggacgcccuggagagcaucaugaccaccaagagcgugagcuucagaagacugagccaccugagaaagcuggugcccggcuucggcaaggccuacaccauccugaacaagacccugauggaggccgacgcccacuacaagagcgugagaaccuggaacgagauccugcccagcaagggcugccugagagugggcggcagaugccacccccacgugaacggcguguucuucaacggcaucauccugggccccgacggcaacgugcugauccccgagaugcagagcagccugcugcagcagcacauggagcugcuggagagcagcgugaucccccuggugcacccccuggccgaccccagcaccguguucaaggacggcgacgaggccgaggacuucguggaggugcaccugcccgacgugcacaaccaggugagcggcguggaccugggccugcccaacuggggcaaguacgugcugcugagcgccggcgcccugaccgcccugaugcugaucaucuuccugaugaccugcugcagaagagugaacagaagcgagcccacccagcacaaccugagaggcaccggcagagaggugagcgugaccccccagagcggcaagaucaucagcagcugggagagccacaagagcggcggcgagaccagacuguga

SEQ ID NO: 192030 - RNA, 1575 nt, Artificial Sequence
  derived and/or modified CDS sequence (opt4) from glycoprotein__RABV__LN713578.1
auggugccccaggcccugcuguucgugccccugcugguguucccccugugcuucggcaaguuccccaucuacaccauccccgacaagcugggccccuggagccccaucgacauccaccaccugagcugccccaacaaccuggugguggaggacgagggcugcaccaaccugagcggcuucagcuacauggagcugaaggugggcuacauccuggccaucaagaugaacggcuucaccugcaccggcguggugaccgaggccgagaccuacaccaacuucgugggcuacgugaccaccaccuucaagagaaagcacuucagacccacccccgacgccugcagagccgccuacaacuggaagauggccggcgaccccagauacgaggagagccugcacaaccccuaccccgacuacagauggcugagaaccgugaagaccaccaaggagagccuggugaucaucagccccagcguggccgaccuggaccccuacgacagaagccugcacagcagaguguuccccagcggcaagugcagcggcguggccgugagcagcaccuacugcagcaccaaccacgacuacaccaucuggaugcccgagaaccccagacugggcaugagcugcgacaucuucaccaacagcagaggcaagagagccagcaagggcagcgagaccugcggcuucguggacgagagaggccuguacaagagccugaagggcgccugcaagcugaagcugugcggcgugcugggccugagacugauggacggcaccugggugagcaugcagaccagcaacgagaccaaguggugcccccccgacaagcuggugaaccugcacgacuucagaagcgacgagaucgagcaccuggugguggaggagcuggugagaaagagagaggagugccuggacgcccuggagagcaucaugaccaccaagagcgugagcuucagaagacugagccaccugagaaagcuggugcccggcuucggcaaggccuacaccaucuucaacaagacccugauggaggccgacgcccacuacaagagcgugagaaccuggaacgagauccugcccagcaagggcugccugagagugggcggcagaugccacccccacgugaacggcguguucuucaacggcaucauccugggccccgacggcaacgugcugauccccgagaugcagagcagccugcugcagcagcacauggagcugcuggagagcagcgugaucccccuggugcacccccuggccgaccccagcaccguguucaaggacggcgacgaggccgaggacuucguggaggugcaccugcccgacgugcacaaccaggugagcggcguggaccugggccugcccaacuggggcaaguacgugcugcugagcgccggcgcccugaccgcccugaugcugaucaucuuccugaugaccugcugcagaagagugaacagaagcgagcccacccagcacaaccugagaggcaccggcagagaggugagcgugaccccccagagcggcaagaucaucagcagcugggagagccacaagagcggcggcgagaccagacuguga

SEQ ID NO: 192031 - RNA, 1575 nt, Artificial Sequence; identical to SEQ ID NO: 192028
  derived and/or modified CDS sequence (opt4) from glycoprotein__RABV__LN713589.1

SEQ ID NO: 192032 - RNA, 1575 nt, Artificial Sequence; identical to SEQ ID NO: 192024
  derived and/or modified CDS sequence (opt4) from glycoprotein__RABV__LN713600.1

SEQ ID NO: 192033 - RNA, 1575 nt, Artificial Sequence
  derived and/or modified CDS sequence (opt4) from glycoprotein__RABV__LN713602.1
auggugccccaggcccugcuguucgugccccugcugguguucccccugugcuucggcaaguuccccaucuacaccauccccgacaagcugggccccuggagccccaucgacauccaccaccugagcugccccaacaaccuggugguggaggacgagggcugcaccaaccugagcggcuucagcuacauggagcugaaggugggcaacauccuggccaucaagaugaacggcuucaccugcaccggcguggugaccgaggccgagaccuacaccaacuucgugggcuacgugaccaccaccuucaagagaaagcacuucagacccacccccgacgccugcagagccgccuacaacuggaagauggccggcgaccccagauacgaggagagccugcacaaccccuaccccgacuacagauggcugagaaccgugaagaccaccaaggagagccuggugaucaucagccccagcguggccgaccuggaccccuacgacagaagccugcacagcagaguguuccccagcggcaagugcagcggcguggccgugagcagcaccuacugcagcaccaaccacgacuacaccaucuggaugcccgagaaccccagacugggcaugagcugcgacaucuucaccaacagcagaggcaagagagccagcaagggcagcgagaccugcggcuucguggacgagagaggccuguacaagagccugaagggcgccugcaagcugaagcugugcggcgugcugggccugagacugauggacggcaccugggugagcaugcagaccagcaacgagaccaaguggugcccccccgaccagcuggugaaccugcacgacuucagaagcgacgagaucgagcaccuggugguggaggagcuggugagaaagagagaggagugccuggacgcccuggagagcaucaugaccaccaagagcgugagcuucagaagacugagccaccugagaaagcuggugcccggcuucggcaaggccuacaccauccugaacaagacccugauggaggccgacgcccacuacaagagcgugagaaccuggaacgagauccugcccagcaagggcugccugagagugggcggcagaugccacccccacgugaacggcguguucuucaacggcaucauccugggccccgacggcaacgugcugauccccgagaugcagagcagccugcugcagcagcacauggagcugcuggagagcagcgugaucccccuggugcacccccuggccgaccccagcaccguguucaaggacggcgacgaggccgaggacuucguggaggugcaccugcccgacgugcacaaccaggugagcggcguggaccugggccugcccaacuggggcaaguacgugcugcugagcgccggcgcccugaccgcccugaugcugaucaucuuccugaugaccugcugcagaagagugaacagaagcgagcccacccagcacaaccugagaggcaccggcagagaggugagcgugaccccccagagcggcaagaucaucagcagcugggagagccacaagagcggcggcgagaccagacuguga

SEQ ID NO: 192034 - RNA, 1575 nt, Artificial Sequence
  derived and/or modified CDS sequence (opt4) from glycoprotein__RABV__LN713608.1
auggugccccaggcccugcuguucgugccccugcugguguucccccugugcuucggcaaguuccccaucuacaccauccccgacaagcugggccccuggagccccaucgacauccaccaccugagcugccccaacaaccuggugguggaggacgagggcugcaccaaccugagcggcuucagcuacauggagcugaaggugggcuacauccuggccaucaaggugaacggcuucaccugcaccggcguggugaccgaggccgagaccuacaccaacuucgugggcuacgugaccaccaccuucaagagaaagcacuucagacccacccccgacgccugcagagccgccuacaacuggaagauggccggcgaccccagauacgaggagagccugcacaaccccuaccccgacuacagauggcugagaaccgugaagaccaccaaggagagccuggugaucaucagccccagcguggccgaccuggaccccuacgacagaagccugcacagcagaguguuccccagcggcaagugcagcggcguggccgugagcagcaccuacugcagcaccaaccacgacuacaccaucuggaugcccgagaaccccagacugggcaugagcugcgacaucuucaccaacagcagaggcaagagagccagcaagggcagcgagaccugcggcuucguggacgagagaggccuguacaagagccugaagggcgccugcaagcugaagcugugcggcgugcugggccugagacugauggacggcaccugggugagcaugcagaccagcaacgagaccaaguggugcccccccgaccagcuggugaaccugcacgacuucagaagcgacgagaucgagcaccuggugguggaggagcuggugagaaagagagaggagugccuggacgcccuggagagcaucaugaccaccaagagcgugagcuucagaagacugagccaccugagaaagcuggugcccggcuucggcaaggccuacaccaucuucaacaagacccugauggaggccgacgcccacuacaagagcgugagaaccuggaacgagauccugcccagcaagggcugccugagagugggcggcagaugccacccccacgugaacggcguguucuucaacggcaucauccugggccccgacggcaacgugcugauccccgagaugcagagcagccugcugcagcagcacauggagcugcuggagagcagcgugaucccccuggugcacccccuggccgaccccagcaccguguucaaggacggcgacgaggccgaggacuucguggaggugcaccugcccgacgugcacaaccaggugagcggcguggaccugggccugcccaacuggggcaaguacgugcugcugagcgccggcgcccugaccgcccugaugcugaucaucuuccugaugaccugcugcagaagagugaacagaagcgagcccacccagcacaaccugagaggcaccggcagagaggugagcgugaccccccagagcggcaagaucaucagcagcugggagagccacaagagcggcggcgagaccagacuguga

SEQ ID NO: 192035 - RNA, 1575 nt, Artificial Sequence
  derived and/or modified CDS sequence (opt4) from glycoprotein__RABV__LN713628.1
auggugccccaggcccugcuguucgugccccugcugguguucccccugugcuucggcaaguuccccaucuacaccauccccgacaagcugggccccuggagccccaucgacauccaccaccugagcugccccaacaaccuggugguggaggacgagggcugcaccaaccugagcggcuucagcuacauggagcugaaggugggcuacauccuggccaucaagaugaacggcuucaccugcaccggcguggugaccgaggccgagaccuacaccaacuucgugggcuacgugaccaccaccuucaagagaaagcacuucagacccacccccgacgccugcagagccgccuacaacuggaagauggccggcgaccccagauacgaggagagccugcacaaccccuaccccgacuacagauggcugagaaccgugaagaccaccaaggagagccuggugaucaucagccccagcguggccgaccuggaccccuacgacagaagccugcacagcagaguguuccccagcggcaagugcagcggcguggccgugagcagcaccuacugcagcaccaaccacgacuacaccaucuggaugcccgagaaccccagacugggcaugagcugcgacaucuucaccaacagcagaggcaagagagccagcaagggcagcgagaccugcggcuucguggacgagagaggccuguacaagagccugaagggcgccugcaagcugaagcugugcggcgugcugggccugagacugauggacggcaccugggugagcaugcagaccagcaacgagaccaaguggugcccccccgaccagcuggugaaccugcacgacuucagaagcgacgagaucgagcaccuggugguggaggagcuggugagaaagagagaggagugccuggacgcccuggagagcaucaugaccaccaagagcgugagcuucagaagacugagccaccugagaaagcuggugcccggcuucggcaaggccuacaccaucuucaacaagacccugauggaggccgacgcccacuacaagagcgugagaaccuggaacgagauccugcccagcaagggcugccugagagugggcggcagaugccacccccacgugaacggcguguucuucaacggcaucauccugggccccgacggcaacgugcugauccccgagaugcagagcagccugcugcagcagcacauggagcugcuggagagcagcgugaucccccuggugcacccccuggccgaccccagcaccguguucaaggacggcgacgaggccgaggacuucguggaggugcaccugcccgacgugcacaaccaggugagcggcguggaccugggccugcccaacuggggcaaguacgugcugcugagcgccggcgcccugaccgcccugaugcugaucaucuuccugaugaccugcugcagaagagugaacagaagcgagcccacccagcacaaccugagaggcaccggcagagaggugagcgugaccccccagagcggcaagaucaucagcagcugggagagccacaagagcggcggcgagaccagacuguga

SEQ ID NO: 192036 - RNA, 1575 nt, Artificial Sequence
  derived and/or modified CDS sequence (opt4) from glycoprotein__RABV__LN713639.1
auggugccccaggcccugcuguucgugccccugcugguguucccccugugcuucggcaaguuccccaucuacaccauccccgacaagcugggccccuggagccccaucgacauccaccaccugagcugccccaacaaccuggugguggaggacgagggcugcaccaaccugagcggcuucagcuacauggagcugaaggugggcuacauccuggccaucaaggugaacggcuucaccugcaccggcguggugaccgaggccgagaccuacaccaacuucgugggcuacgugaccaccaccuucaagagaaagcacuucagacccacccccgacgccugcagagccgccuacaacuggaagauggccggcgaccccagauacgaggagagccugcacaaccccuaccccgacuacagauggcugagaaccgugaagaccaccaaggagagccuggugaucaucagccccagcguggccgaccuggaccccuacgacagaagccugcacagcagaguguuccccagcggcaagugcagcggcguggccgugagcagcaccuacugcagcaccaaccacgacuacaccaucuggaugcccgagaaccccagacugggcaugagcugcgacaucuucaccaacagcagaggcaagagagccagcaagggcagcgagaccugcggcuucguggacgagagaggccuguacaagagccugaagggcgccugcaagcugaagcugugcggcgugcugggccugagacugauggacggcaccugggugagcaugcagaccagcaacgagaccaaguggugcccccccgaccagcuggugaaccugcacgacuucagaagcgacgagauggagcaccuggugguggaggagcuggugagaaagagagaggagugccuggacgcccuggagagcaucaugaccaccaagagcgugagcuucagaagacugagccaccugagaaagcuggugcccggcuucggcaaggccuacaccauccugaacaagacccugauggaggccgacgcccacuacaagagcgugagaaccuggaacgagauccugcccagcaagggcugccugagagugggcggcagaugccacccccacgugaacggcguguucuucaacggcaucauccugggccccgacggcaacgugcugauccccgagaugcagagcagccugcugcagcagcacauggagcugcuggagagcagcgugaucccccuggugcacccccuggccgaccccagcaccguguucaaggacggcgacgaggccgaggacuucguggaggugcaccugcccgacgugcacaaccaggugagcggcguggaccugggccugcccaacuggggcaaguacgugcugcugagcgccggcgcccugaccgcccugaugcugaucaucuuccugaugaccugcugcagaagagugaacagaagcgagcccacccagcacaaccugagaggcaccggcagagaggugagcgugaccccccagagcggcaagaucaucagcagcugggagagccacaagagcggcggcgagaccagacuguga

SEQ ID NO: 192037 - RNA, 1575 nt, Artificial Sequence
  derived and/or modified CDS sequence (opt4) from glycoprotein__RABV__LN713660.1
auggugccccaggcccugcuguucgugccccugcugguguucccccugugcuucggcaaguuccccaucuacaccauccccgacaagcugggccccuggagccccaucgacauccaccaccugagcugccccaacaaccuggugguggaggacgagggcugcaccaaccugagcggcuucagcuacauggagcugaaggugggcuacaucagcgccaucaagaugaacggcuucaccugcaccggcguggugaccgaggccgagaccuacaccaacuucgugggcuacgugaccaccaccuucaagagaaagcacuucagacccacccccgacgccugcagagccgccuacaacuggaagauggccggcgaccccagauacgaggagagccugcacaaccccuaccccgacuacagauggcugagaaccgugaagaccaccaaggagagccuggugaucaucagccccagcguggccgaccuggaccccuacgacagaagccugcacagcagaguguuccccagcggcaagugcagcggcguggccgugagcagcaccuacugcagcaccaaccacgacuacaccaucuggaugcccgagaaccccagacugggcaugagcugcgacaucuucaccaacagcagaggcaagagagccagcaagggcagcgagaccugcggcuucguggacgagagaggccuguacaagagccugaagggcgccugcaagcugaagcugugcggcgugcugggccugagacugauggacggcaccuggguggccaugcagaccagcaacgagaccaaguggugcccccccgaccagcuggugaaccugcacgacuucagaagcgacgagaucgagcaccuggugguggaggagcuggugagaaagagagaggagugccuggacgcccuggagagcaucaugaccaccaagagcgugagcuucagaagacugagccaccugagaaagcuggugcccggcuucggcaaggccuacaccaucuucaacaagacccugauggaggccgacgcccacuacaagagcgugagaaccuggaacgagauccugcccagcaagggcugccugagagugggcggcagaugccacccccacgugaacggcguguucuucaacggcaucauccugggccccgacggcaacgugcugauccccgagaugcagagcagccugcugcagcagcacauggagcugcuggagagcagcgugaucccccugaugcacccccuggccgaccccagcaccguguucaaggacggcgacgaggccgaggacuucguggaggugcaccugcccgacgugcacgagcaggugagcggcguggaccugggccugcccaacuggggcaaguacgugcugcugagcgccggcgcccugaccgcccugaugcugaucaucuuccugaugaccugcugcagaagagugaacagaagcgagcccacccagcacaaccugagaggcaccggcagagaggugagcgugaccccccagagcggcaagaucaucagcagcugggagagcuacaagagcggcggcgagaccagacuguga

SEQ ID NO: 192038 - RNA, 1575 nt, Artificial Sequence
  derived and/or modified CDS sequence (opt4) from glycoprotein__RABV__LN713663.1
auggugccccaggcccugcuguucgugccccugcugguguucccccugugcuucggcaaguuccccaucuacaccauccccgacaagcugggccccuggagccccaucgacauccaccaccugagcugccccaacaaccuggugguggaggacgagggcugcaccaaccugagcggcuucagcuacauggagcugaaggugggcuacauccuggccaucaaggugaacggcuucaccugcaccggcguggugaccgaggccgagaccuacaccaacuucgugggcuacgugaccaccaccuucaagagaaagcacuucagacccacccccgacgccugcagagccgccuacaacuggaagauggccggcgaccccagauacgaggagagccugcacaaccccuaccccgacuacagauggcugagaaccgugaagaccaccaaggagagccuggugaucaucagccccagcguggccgaccuggaccccuacgacagaagccugcacagcagaguguuccccagcggcaagugcagcggcguggccgugagcagcaccuacugcagcaccaaccacgacuacaccaucuggaugcccgagaaccccagacugggcaugagcugcgacaucuucaccaacagcagaggcaagagagccagcaagggcagcgagaccugcggcuucguggacgagagaggccuguacaagagccugaagggcgccugcaagcugacccugugcggcgugcugggccugagacugauggacggcaccugggugagcaugcagaccagcaacgagaccaaguggugcccccccgacaagcuggugaaccugcacgacuucagaagcgacgagaucgagcaccuggugguggaggagcuggugagaaagagagaggagugccuggacgcccuggagagcaucaugaccaccaagagcgugagcuucagaagacugagccaccugagaaagcuggugcccggcuucggcaaggccuacaccaucuucaacaagacccugauggaggccgacgcccacuacaagagcguggagaccuggaacgagauccugcccagcaagggcugccugagagugggcggcagaugccacccccacgugaacggcguguucuucaacggcaucauccugggccccgacggcaacgugcugauccccgagaugcagagcagccugcugcagcagcacauggagcugcuggagagcagcgugaucccccuggugcacccccuggccgaccccagcaccguguucaaggacggcgacgaggccgaggacuucguggaggugcaccugcccgacgugcacaaccaggugagcggcguggaccugggccugcccaacuggggcaaguacgugcugcugagcgccggcgcccugaccgcccugaugcugaucaucuuccugaugaccugcugcagaagagugaacagaagcgagcccacccagcacaaccugagaggcaccggcagagaggugagcgugaccccccagagcggcaagaucaucagcagcugggagagccacaagagcggcggcgagaccauccuguga

SEQ ID NO: 192039 - RNA, 1575 nt, Artificial Sequence
  derived and/or modified CDS sequence (opt4) from glycoprotein__RABV__LN713666.1
auggugccccaggcccugcuguucgugccccugcugguguucccccugugcuucggcaaguuccccaucuacaccauccccgacaagcugggccccuggagccccaucgacauccaccaccugagcugccccaacaaccuggugguggaggacgagggcugcaccaaccugagcggcuucagcuacauggagcugaaggugggcuacauccuggccaucaaggugaacggcuucaccugcaccggcguggugaccgaggccgagaccuacaccaacuucgugggcuacgugaccaccaccuucaagagaaagcacuucagacccacccccgacgccugcagagccgccuacaacuggaagauggccggcgaccccagauacgaggagagccugcacaaccccuaccccgacuacagauggcugagaaccgugaagaccaccaaggagagccuggugaucaucagccccagcguggccgaccuggaccccuacgacagaagccugcacagcagaguguuccccagcggcaagugcagcggcguggccgugagcagcaccuacugcagcaccaaccacgacuacaccaucuggaugcccgagaaccccagacugggcaugagcugcgacaucuucaccaacagcagaggcaagagagccagcaagggcagcgagaccugcggcuucguggacgagagaggccuguacaagagccugaagggcgccugcaagcugaugcugugcggcgugcugggccugagacugauggacggcaccugggugagcaugcagaccagcaacgagaccaaguggugcccccccgacaagcuggugaaccugcacgacuucagaagcgacgagaucgagcaccuggugguggaggagcuggugagaaagagagaggagugccuggacgcccuggagagcaucaugaccaccaagagcgugagcuucagaagacugagccaccugagaaagcuggugcccggcuucggcaaggccuacaccaucuucaacaagacccugauggaggccgacgcccacuacaagagcguggagaccuggaacgagauccugcccagcaagggcugccugagagugggcggcagaugccacccccacgugaacggcguguucuucaacggcaucauccugggccccgacggcaacgugcugauccccgagaugcagagcagccugcugcagcagcacauggagcugcuggagagcagcgugaucccccuggugcacccccuggccgaccccagcaccguguucaaggacggcgacgaggccgaggacuucguggaggugcaccugcccgacgugcacaaccaggugagcggcguggaccugggccugcccaacuggggcaaguacgugcugcugagcgccggcgcccugaccgcccugaugcugaucaucuuccugaugaccugcugcagaagagugaacagaagcgagcccacccagcacaaccugagaggcaccggcagagaggugagcgugaccccccagagcggcaagaucaucagcagcugggagagccacaagagcggcggcgagaccauccuguga

SEQ ID NO: 192040 - RNA, 1575 nt, Artificial Sequence
  derived and/or modified CDS sequence (opt4) from glycoprotein__RABV__LN879481.2
auggugccccaggcccugcuguucgugccccugcugggcuucagccugugcgugggcaaguuccccaucuacaccauccccgacaagcugggccccuggagccccaucgacauccaccaccugagcugccccaacaaccuggugguggaggacgagggcugcaccaaccugagcggcuucagcuacauggagcugaaggugggcuacaucagcgccaucaaggugaacggcuucaccugcaccggcguggugaccgaggccgagaccuacaccaacuucgugggcuacgugaccaccaccuucaagagaaagcacuucagacccacccccgacgccugcagagccgccuacaacuggaagauggccggcgaccccagauacgaggagagccugcacaaccccuaccccgacuaccacuggcugagaaccgugaagaccaccaaggagagccuggugaucaucagccccagcguggccgaccuggaccccuacgacaagagccugcacagcagaguguuccccggcggcaagugcagcggcaucaccgugagcagcaccuacugcagcaccaaccacgacuacaccaucuggcugcccgagaaccccagacugggcaccagcugcgacaucuucaccaacagcagaggcaagagagccagcaagggcagcaagaccugcggcuucguggacgagagaggccuguacaagagccugaagggcgccugcaagcugaagcugugcggcgugcugggccugagacugaucgacggcaccuggguggccaugcagaccagcaacgagaccaaguggugcccccccgaccagcuggugaaccugcacgacuucagaagcgacgagaucgagcaccuggugguggaggagcuggugaagaagagagaggagugccuggacgcccuggagagcaucaugaccaccaagagcgugagcuucagaagacugagccaccugagaaagcuggugcccggcuucggcaaggccuacaccaucuucaacaagacccugauggaggccgacgcccacuacaagagcgugagaaccuggaacgagaucauccccagcaagggcugccugagagugggcggcagaugccaccaccacgugaacggcguguucuucaacggcaucauccugggccccgacggccacgugcugauccccgagaugcagagcagccugcugcagcagcacauggagcugcuggagagcagcgugaucccccugaugcacccccuggccgaccccagcaccguguucaaggacggcgacgaggccgaggacuucguggaggugcaccugcccgacgugcacaagcaggugagcggcguggaccugggccugcccaacuggggcaaguacgugcugcugagcgccggcgcccugaucgcccugaugcugaucaucuuccugaugaccugcugcagaagagugaacagacccgagagcacccagcccagcuucagaggcaccgagagaaaggugagcaucaccccccagagcggcaaggugaucagcagcugggagagcuacaagagcggcggcgagaccagacuguga

SEQ ID NO: 192041 - RNA, 1575 nt, Artificial Sequence; identical to SEQ ID NO: 191534
  derived and/or modified CDS sequence (opt4) from glycoprotein__RABV__LT598537.1

SEQ ID NO: 192042 - RNA, 1575 nt, Artificial Sequence; identical to SEQ ID NO: 191841
  derived and/or modified CDS sequence (opt4) from glycoprotein__RABV__LT598538.1

SEQ ID NO: 192043 - RNA, 1575 nt, Artificial Sequence
  derived and/or modified CDS sequence (opt4) from glycoprotein__RABV__LT598540.1
auggugccccaggcccugcuguucgugccccugcuggccuuccccaugugcuucggcaaguuccccaucuacaccauccccgacaagcugggccccuggagccccaucgacauccaccaccugagcugccccaacaaccuggugguggaggacgagggcugcaccaaccugagcggcuucagcuacauggagcugaaggugggcuacaucagcgccaucaaggugaacggcuucaccugcaccggcguggugaccgaggccgagaccuacaccaacuucgugggcuacgugaccaccaccuucaagagaaagcacuucagacccacccccgacgccugcagagccgccuacaacuggaagauggccggcgaccccagauacgaggagagccugcacaaccccuaccccgacuaccacuggcugagaaccgugaagaccaccaaggagagccugaucaucaucagccccagcguggccgaccuggaccccuacgacaagagccugcacagcagaguguuccccagcggcaagugccugggcaucaccaucagcagcaccuacugcagcaccaaccacgacuacaccaucuggaugcccgagaacgugagacugggcaccagcugcgacaucuucaccaacagcagaggcaagagagccagcaagggcagcaagaccugcggcuucguggacgagagaggccuguacaagagccugaagggcgccugcaagcugaagcugugcggcgugcugggccugagacugauggacggcaccuggguggccaugcccaccagcgacgagaccaaguggugcccccccgaccagcuggugaaccugcacgacuucagaagcgacgagaucgagcaccuggugguggaggagcuggugagaaagagagaggagugccuggacgcccuggagagcaucaugaccaccaagagcgugagcuucagaagacugagccaccugagaaagcuggugcccggcuucggcaaggccuacaccaucuucaacaagacccugauggaggccgacgcccacuacaagagcgugagaaccuggaacgagaucauccccagcaagggcugccugagagugggcggcagaugccacccccacgugaacggcguguucuucaacggcaucauccugggccccgacggccacgugcugauccccgagaugcagagcagccugcugcagcagcacauggagcugcuggagagcagcgugaucccccugaugcacccccuggccgaccccagcaccguguucaaggacggcgacgaggccgaggacuucguggaggugcaccugcccgacgugcacaagcagaucagcggcguggaccugggccugcccaacuggggcaaguacgugcugaugaucgccggcgugcugaucgccaugauccugaccaucuuccugaugaccugcugcggcagaggcaacagacugaagagcacccagcacagccugggcggcaucggcagaaaggugagcagcaccagccagagcggcaaggugaucagcagcugggagagcuacaagagcggcggcgagaccagacuguga

SEQ ID NO: 192044 - RNA, 1575 nt, Artificial Sequence
  derived and/or modified CDS sequence (opt4) from glycoprotein__RABV__LT598541.1
auggugccccaggcccugcuguucgugccccugcuggccuuccccaugugcuucggcaaguuccccaucuacaccauccccgacaagcugggccccuggagccccaucgacauccaccaccugagcugccccaacaaccuggugguggaggacgagggcugcaccaaccugagcggcuucagcuacauggagcugaaggugggcuacaucagcgccaucaaggugaacggcuucaccugcaccggcguggugaccgaggccgagaccuacaccaacuucgugggcuacgugaccaccaccuucaagagaaagcacuucagacccacccccgacgccugcagagccgccuacaacuggaagauggccggcgaccccagauacgaggagagccugcacaaccccuaccccgacuaccacuggcugagaaccgugaagaccaccaaggagagccugaucaucaucagccccagcguggccgaccuggaccccuacgacaagagccugcacagcagaguguuccccagcggcaagugccugggcaucaccaucagcagcaccuacugcagcaccaaccacgacuacaccaucuggaugcccgagaacgugagacugggcaccagcugcgacaucuucaccaacagcagaggcaagagagccagcaagggcagcaagaccugcggcuucguggacgagagaggccuguacaagagccugaagggcgccugcaagcugaagcugugcggcgugcugggccugagacugauggacggcaccugggugagcaugcccaccagcgacgagaccaaguggugcccccccgaccagcuggugaaccugcacgacuucagaagcgacgagaucgagcaccuggugguggaggagcuggugagaaagagagaggagugccuggacgcccuggagagcaucaugaccaccaagagcgugagcuucagaagacugagccaccugagaaagcuggugcccggcuucggcaaggccuacaccaucuucaacaagacccugauggaggccgacgcccacuacaagagcgugagaaccuggaacgagaucauccccagcaagggcugccugagagugggcggcagaugccacccccacgugaacggcguguucuucaacggcaucauccugggccccgacggccacgugcugauccccgagaugcagagcagccugcugcagcagcacauggagcugcuggagagcagcgugaucccccugaugcacccccuggccgaccccagcaccguguucaaggacggcgacgaggccgaggacuucguggaggugcaccugcccgacgugcacaagcagaucagcggcguggaccugggccugcccaacuggggcaaguacgugcugaucaucgccggcgugcugaucgccaugauccugaccaucuuccugaccaccugcugcggcagaggcaacagacccaagagcacccagcacagccugggcggcaucggcagaaaggugagcagcaccagccagagcggcaaggugaucagcagcugggagagcuacaagagcggcggcgagaccagacuguga

SEQ ID NO: 192045 - RNA, 1575 nt, Artificial Sequence; identical to SEQ ID NO: 191869
  derived and/or modified CDS sequence (opt4) from glycoprotein__RABV__LT598543.1

SEQ ID NO: 192046 - RNA, 1575 nt, Artificial Sequence; identical to SEQ ID NO: 191491
  derived and/or modified CDS sequence (opt4) from glycoprotein__RABV__M13215.1

SEQ ID NO: 192047 - RNA, 1575 nt, Artificial Sequence
  derived and/or modified CDS sequence (opt4) from glycoprotein__RABV__M32751.1
auggugccccaggugcugcuguucgccccccugcugguguucccccugugcuucggcaaguuccccaucuacaccauccccgacaagcugggccccuggagccccaucgaccugcaccaccugagcugccccaacaaccuggugguggaggacgagggcugcaccaaccugagcggcuucagcuacauggagcugaaggugggcuacaucagcgccaucaaggugaacggcuucaccugcaccggcguggugaccgaggccgagaccuacaccaacuucgugggcuacgugaccaccaccuucaagagaaagcacuucagacccacccccgacgccugcagagccgccuacaacuggaagauggccggcgaccccagauacgaggagagccugcacaaccccuaccccgacuaccacuggcugagaaccgugaagaccaccaaggagagccuggugaucaucagccccagcgugaccgaccuggaccccuacgacaagagccugcacagcagaguguuccccggcggcaacugcagcggcaucaccgugagcagcaccuacugcagcaccaaccacgacuacaccaucuggaugcccgagaaccugagacugggcaccagcugcgacaucuucacccacagcagaggcaagagagccagcaagggcgacaagaccugcggcuucguggacgagagaggccuguacaagagccugaagggcgccugcaagcugaagcugugcggcgugcugggccugagacugauggacggcaccuggguggccaugcagaccagcgacgagaccaaguggugcccccccggccagcuggugaaccugcacgacuucagaagcgacgagaucgagcaccugguggaggaggagcuggugaagaagagagaggagugccuggacgcccuggagagcaucaugaccaccaagagcgugagcuucagaagacugagccaccugagaaagcuggugcccggcuucggcaaggccuacaccaucuucaacaagacccugauggaggccgacgcccacuacaagagcgugcagaccuggaacgagaucauccccagcaagggcugccugagagugggcgagagaugccacccccacgugaacggcguguucuucaacggcaucauccugggcagcgacggccacgugcugauccccgagaugcagagcagccugcugcagcagcacauggagcugcuggagagcagcgugaucccccugaugcacccccuggccgaccccagcaccguguucaaggacggcgacgagguggaggacuucguggaggugcaccugcccgacgugcacaagcaggugagcggcguggaccugggccugcccaaguggggcaaguacgugcugaugaucgccggcgcccugaucgcccugaugcugaucaucuuccugaugaccugcugcagaagagugaacagacccgagagcacccagagcaaccugggcggcaccggcagaaacgugagcgugcccagccagagcggcaaggugaucagcagcugggagagcuacaagagcggcggcgagaccagacuguga

SEQ ID NO: 192048 - RNA, 1575 nt, Artificial Sequence
  derived and/or modified CDS sequence (opt4) from glycoprotein__RABV__M81058.1
auggugccccaggcccugcuguucgugccccugcugguguucccccugugcuucggcaaguuccccaucuacaccauccccgacaagcugggccccuggagccccaucgacauccaccaccugagaugccccaacaaccuggugguggaggacgagggcugcaccaaccugagcggcuucagcuacauggagcugaaggugggcuacaucagcgccaucaaggugaacggcuucaccugcaccggcguggugaccgaggccgagaccuacaccaacuucgugggcuacgugaccaccaccuucaagagaaagcacuucagacccacccccgacgccugcagagccgccuacaacuggaagauggccggcgaccccagauacgaggagagccugcacaaccccuaccccgacuaccacuggcugagaaccgugaagaccaccaaggagagccuggugaucaucagccccagcguggccgaccuggaccccuacgacaagagccugcacagcagaguguuccccagcggcaacugcagcggcaucaccgugagcagcaccuacugcagcaccaaccacgacuacaccaucuggaugcccgagaaccccagacuggagaccagcugcgacaucuucaccaacagcagaggcaagagagccagcaagggcagcaagaccugcggcuucguggacgagagaggccuguacaagagccugaagggcgccugcaagcugaagcugugcggcgugcugggccugagacugauggacggcaccuggguggccaugcagaccagcgacgagaccaaguggugcccccccgaccagcuggugaaccugcacgacuucagaagcgacgagaucgagcaccuggugguggaggagcuggugaagaagagagaggagugccuggacgcccuggagagcaucaugaccaccaagagcgugagcuucagaagacugagccaccugagaaagcuggugcccggcuucggcaaggccuacaccaucuucaacaagacccugauggaggccgacgcccacuacaagagcgugagaaccuggaacgagaucauccccagcaagggcugccugagagugggcggcagaugccacccccacgugaacggcguguucuucaacggcaucauccugggccccgacggccacgugcugauccccgagaugcagagcagccugcugcagcagcacauggagcugcuggagagcagcgugaucccccugaugcacccccuggccgaccccagcaccguguucaaggacggcgacgaggccgaggacuucguggaggugcaccugcccgacgugcacaagcaggugagcggcguggaccugggccugcccaacuggggcaaguacgugcugcugagcgccggcacccugaucgcccugaugcugaucaucuuccugaugaccugcugcagaagagugaacagacccaagagcaccgagagaagccugggcgagaccggcagaaaggugagcgugaccagccagagcggcaaggugaucagcagcugggagagcuacaagagcggcggcgagaccagaagauga

SEQ ID NO: 192049 - RNA, 1575 nt, Artificial Sequence
  derived and/or modified CDS sequence (opt4) from glycoprotein__RABV__M81059.1
auggugccccaggcccugcuguucgugccccugcugguguucccccugugcuucggcaaguuccccaucuacaccauccccgacaagcugggccccuggagccccaucgacauccaccaccugagaugccccaacaaccuggugguggaggacgagggcugcaccaaccugagcggcuucagcuacauggagcugaaggugggcuacaucagcgccaucaaggugaacggcuucaccugcaccggcguggugaccgaggccgagaccuacaccaacuucgugggcuacgugaccaccaccuucaagagaaagcacuucagacccacccccgacgccugcagagccgccuacaacuggaagauggccggcgaccccagauacgaggagagccugcacaaccccuaccccgacuaccacuggcugagaaccgugaagaccaccaaggagagccuggugaucaucagccccagcguggccgaccuggaccccuacgacaagagccugcacagcagaguguuccccagcggcaacugcagcggcaucaccgugagcagcaccuacugcagcaccaaccacgacuacaccaucuggaugcccgagaaccccagacuggagaccagcugcgacaucuucaccaacagcagaggcaagagagccagcaagggcagcaagaccugcggcuucguggacgagagaggccuguacaagagccugaagggcgccugcaagcugaagcugugcggcgugcugggccugagacugauggacggcaccuggguggccaugcagaccagcgacgagaccaaguggugcccccccgaccagcuggugaaccugcacgacuucagaagcgacgagaucgagcaccuggugguggaggagcuggugaagaagagagaggagugccuggacgcccuggagagcaucaugaccaccaagagcgugagccugagaagacugagccaccugagaaagcuggugcccggcuucggcaaggccuacaccaucuucaacaagacccugauggaggccgaggcccacuacaagagcgugcagaccuggaacgagaucauccccagcaagggcugccugagagugggcggcagaugccacccccacgugaacggcguguucuucaacggcaucauccugggccccgacggccacgugcugauccccgagaugcagagcagccugcugcagcagcacauggagcugcuggagagcagcgugaucccccugaugcacccccuggccgaccccagcaccguguucaaggacggcgacgaggccgaggacuucguggaggugcaccugcccgacgugcacaagcaggugagcggcguggaccugggccugcccaacuggggcaaguacgugcugcugagcgccggcacccugaucgcccugaugcugaucaucuuccugaugaccugcugcagaagagugaacagacccaagagcaccgagagaagccugggcgagaccggcagaaaggugagcgugaccagccagagcggcaaggugaucagcagcugggagagcuacaagagcggcggcgagaccagaagauga

SEQ ID NO: 192050 - RNA, 1575 nt, Artificial Sequence
  derived and/or modified CDS sequence (opt4) from glycoprotein__RABV__M81060.1
auggugccccaggcccugcuguucgugccccugcugguguucagccugugcuucggcaaguuccccaucuacaccauccccgacaagcugggccccuggagccccaucgacauccaccaccugagcugccccaacaaccuggugguggaggacgagggcugcaccaaccugagcggcuucagcuacauggagcugaaggugggcuacaucagcgccaucaaggugaacggcuucaccugcaccggcguggugaccgaggccgagaccuacaccaacuucgugggcuacgugaccaccaccuucaagagaaagcacuucagacccacccccgacgccugcagagccgccuacaacuggaagauggccggcgaccccagauacgaggagagccugcacaaccccuaccccgacuaccacuggcugagaaccgugaagaccaccaaggagagccuggugaucaucagccccagcguggccgaccuggaccccuacgacaagagccugcacagcagaguguuccccagcggcaacugcagcggcaucaccgugagcagcaccuacugcagcaccaaccacgacuacaccaucuggaugcccgagaaccccagacuggagaccagcugcgacaucuucaccaacagcagaggcaagagagccagcaagggcagcaagaccugcggcuucguggacgagagaggccuguacaagagccugaagggcgccugcaagcugaagcugugcggcgugcugggccugagacugauggacggcaccuggguggccaugcagaccagcgacgagaccaaguggugcccccccgaccagcuggugaaccugcacgacuucagaagcgacgagaucgagcaccuggugguggaggagcuggugaagaagagagaggagugccuggacgcccuggagagcaucaugaccaccaagagcgugagcuucagaagacugagccaccugagaaagcuggugcccggcuucggcaaggccuacaccaucuucaacaagacccugauggaggccgacgcccacuacaagagcgugagaaccuggaacgagaucauccccagcaagggcugccugagagugggcggcagaugccacccccacgugaacggcguguucuucaacggcaucauccugggccccgacggccacgugcugauccccgagaugcagagcagccugcugcagcagcacauggagcugcuggagagcagcgugaucccccugaugcacccccuggccgaccccagcaccguguucaaggacggcgacgagggcgaggacuucguggaggugcaccugcccgacgugcacaagcaggugagcggcguggaccugggccugcccaacuggggcaaguacgugcugcugagcgccggcacccugaucgcccugaugcugaucaucuuccugaugaccugcugcagaagagugaacagacccaagagcaccgagagaagccugggcgagaccggcagagaggugagcgugaccagccagagcggcaagaucaucagcagcugggagagcuacaagagcggcggcgagaccagaagauga

SEQ ID NO: 192051 - RNA, 1575 nt, Artificial Sequence
  derived and/or modified CDS sequence (opt4) from glycoprotein__RABV__S72465.1
auggugccccaggcccugcugcuggugcccauccugggcuucagcagcugcuucggcaaguuccccaucuacaccauccccgacacccugggccccuggagccccaucgacauccaccaccugagcugccccaacaaccuggugguggaggacgagggcugcaccaaccugagcggcuucagcuacauggagcugaaggugggccacaucagcgccaucaaggugaacggcuucaccugcaccggcguggugaccgaggccgagaccuacaccaacuucgugggcuacgugaccaccaccuucaagagaaagcacuucagacccacccccgacgccugcagagccgccuacaacuggaagauggccggcgaccccagauacgaggagagccugcacagccccuaccccgacuaccacuggcugagaaccgugaagaccaccaaggagagccuggugaucaucagccccagcguggccgaccuggaccccuacgacaacagccugcacagcagaguguuccccagcggcaagugcagcggcaucaccgugagcagcguguacugcagcaccaaccacgacuacaccguguggaugcccgagagccugagacugggcaccagcugcgacaucuucaccaacagcagaggcaagagagugagcaagggcagcaagaccugcggcuucguggacgagagaggccuguacaagagccugaagggcgccugcaagcugaagcugugcggcgugagaggccugagacugauggacggcaccuggguggccaugcagaccagcaacgagaccaaguggugcccccccgaccagcuggugaaccugcacgaccugagaagcgacgagaucgagcaccuggugaucgaggagcuggugaagaagagagaggagugccuggacgcccuggagagcaucaucaccaccaagagcgugagcuucagaagacugagcuaccugagaaagcuggugcccggcuucggcaaggccuacaccaucuucaacaagacccugauggaggccgaggcccacuacaagagcgugagaaccuggaacgagaucauccccagcaagggcugccugagagugggcggcagaugccacccccacgugaacggcguguucuucaacggcaucauccugggccccgacggccacgugcugauccccgagaugcagagcagccugcugcagcagcacaucgagcugcuggagagcagcgugaucccccugaugcacccccuggccgaccccuucaccguguucaaggacggcgacgagaccgaggacuucaucgaggugcaccugcccgacgugcacgagcaggugagcggcguggaccugggccugcccaacuggggcgaguacgugcugcugagcgccggcacccugaucgcccugaugcugaucaucuuccugaugaccugcugcagaaagguggacagacccgagagcacccagagaagccugagaggcaccggcagaaacgugagcgugaccagccagagcggcaaguucauccccagcugggagagcuacaagagcggcggcgagaccggccuguga

SEQ ID NO: 192052 - RNA, 1575 nt, Artificial Sequence
  derived and/or modified CDS sequence (opt4) from glycoprotein__RABV__U03764.1
auggugccccaggcccugcuguucgugccccugcuggccuuccccaugugcuucggcaaguuccccaucuacaccauccccgacaagcugggccccuggagccccaucgacauccaccaccugagcugccccaacaaccuggugguggaggacgagggcugcaccaaccugagcggcuucagcuacauggagcugaaggugggcuacaucagcgccaucaaggugaacggcuucaccugcaccggcguggugaccgaggccgagaccuacaccaacuucgugggcuacgugaccaccaccuucaagagaaagcacuucagacccacccccgacgccugcagagccgccuacaacuggaagauggccggcgaccccagauacgaggagagccugcacaaccccuaccccgacuaccacuggcugagaaccgugaagaccaccaaggagagccugaucaucaucagccccagcguggccgaccuggaccccuacgacaagagccugcacagcagaguguuccccagcggcaagugccugggcaucaccaucagcagcaccuacugcagcaccaaccacgacuacaccaucuggaugcccgagaaccugagacugggcaccagcugcgacaucuucaccaacagcagaggcaagagagccagcaagggcagcaagaccugcggcuucguggacgagagaggccuguacaagagccugaagggcgccugcaagcugaagcugugcggcgugcugggccugagacugauggacggcaccuggguggccaugcagaccagcgacgagaccaaguggugcccccccgaccagcuggugaaccugcacgacuucagaagcgacgagaucgagcaccuggugguggaggagcuggugaagaagagagaggagugccuggacgcccuggagagcaucaugaccaccaagagcgugagcuucagaagacugagccaccugagaaagcuggugcccggcuucggcaaggccuacaccaucuucaacaagacccugauggaggccgacgcccacuacaagagcgugagaaccuggaacgagaucauccccagcaagggcugccugagagugggcggcagaugccacccccacgugaacggcgugguguucaacggcaucauccugggccccgacggccacgugcugauccccgagaugcagagcagccugcugcagcagcacauggagcugcuggagagcagcgugaucccccugaugcacccccuggccgaccccagcaccguguucaaggacggcgacgaggccgaggacuucguggaggugcaccugcccgacgugcacaagcagaucagcggcguggaccugggccugcccaacuggggcaaguacgugcugaucaucgccggcgugcugaucgccaugauccugaccaucuuccugaugaccugcugcggcagaggcaacagacccaagagcacccagcacagccugggcggcaucggcagaaaggugagcgccaccagccagagcggcaaggugaucagcagcugggagagcuacaagagcggcggcgagaccagacuguga

SEQ ID NO: 192053 - RNA, 1575 nt, Artificial Sequence
  derived and/or modified CDS sequence (opt4) from glycoprotein__RABV__U03765.1
auggugccccaggcccugcuguucgugccccugcuggccuuccccaugugcuucggcaaguuccccaucuacaccauccccgacaagcugggccccuggagccccaucgacauccaccaccugagcugccccaacaaccuggugguggaggacgagggcugcaccaaccugagcggcuucagcuacauggagcugaaggugggcuacaucagcgccaucaaggugaacggcuucaccugcaccggcguggugaccgaggccgagaccuacaccaacuucgugggcuacgugaccaccaccuucaagagaaagcacuucagacccacccccgacgccugcagagccgccuacaacuggaagauggccggcgaccccagauacgaggagagccugcacaaccccuaccccgacuaccacuggcugagaaccgugaagaccaccaaggagagccugaucaucaucagccccagcguggccgaccuggaccccuacgacaagagccugcacagcagaguguuccccagcggcaagugccugggcaucaccaucagcagcaccuacugcagcaccaaccacgacuacaccaucuggaugcccgagaacgugagacugggcaccagcugcgacaucuucaccaacagcagaggcaagagagccagcaagggcagcaagaccugcggcuucguggacgagagaggccuguacaagagccugaagggcgccugcaagcugaagcugugcggcgugcugggccugagacugauggacggcaccuggguggccaugcccaccagcgacgagaccaaguggugcccccccgaccagcuggugaaccugcacgacuucagaagcgacgagaucgagcaccuggugguggaggagcuggugagaaagagagaggagugccuggacgcccuggagagcaucaugaccaccaagagcgugagcuucagaagacugagccaccugagaaagcuggugcccggcuucggcaaggccuacaccaucuucaacaagacccugauggaggccgacgcccacuacaagagcgugagaaccuggaacgagaucauccccagcaagggcugccugagagugggcggcagaugccacccccacgugaacggcgugguguucaacggcaucauccugggccccgacggccacgugcugauccccgagaugcagagcagccugcugcagcagcacauggagcugcuggagagcagcgugaucccccugaugcacccccuggccgaccccagcaccguguucaaggacggcgacgaggccgaggacuucguggaggugcaccugcccgacgugcacaagcagaucagcggcguggaccugggccugcccaacuggggcaaguacgugcugaccaucgccggcgugcugaucgccaugauccugaccaucuuccugaugaccugcugcggcagaggcaacagacccaagagcacccagcacagccugggcggcaucggcagaaaggugagcagcaccagccagagcggcaaggugaucagcagcugggagagcuacaagagcggcggcgagaccagacuguga

SEQ ID NO: 192054 - RNA, 1575 nt, Artificial Sequence
  derived and/or modified CDS sequence (opt4) from glycoprotein__RABV__U03766.1
auggugccccaggcccugcuguucgugccccugcuggccuuccccaugugcuucggcaaguuccccaucuacaccauccccgacaagcugggccccuggagccccaucgacauccaccaccugagcugccccaacaaccuggugguggaggacgagggcugcaccaaccugagcggcuucagcuacauggagcugaaggugggcuacaucagcgccaucaaggugaacggcuucaccugcaccggcguggugaccgaggccgagaccuacaccaacuucgugggcuacgugaccaccaccuucaagagaaagcacuucagacccacccccgacgccugcagagccgccuacaacuggaagauggccggcgaccccagauacgaggagagccugcacaaccccuaccccgacuaccacuggcugagaaccgugaagaccaccaaggagagccugaucaucaucagccccagcguggccgaccuggaccccuacgacaagagccugcacagcagaguguuccccagcggcaagugccugggcaucaccaucagcagcaccuacugcagcaccaaccacgacuacaccaucuggaugcccgagaacgugagacugggcaccagcugcgacaucuucaccaacagcagaggcaagagagccagcaagggcagcaagaccugcggcuucguggacgagagaggccuguacaagagccugaagggcgccugcaagcugaagcugugcggcgugcugggccugagacugauggacggcaccuggguggccaugcccaccagcgacgagaccaaguggugcccccccgaccagcuggugaaccugcacgacuucagaagcgacgagaucgagcaccuggugguggaggagcuggugagaaagagagaggagugccuggacgcccuggagagcaucaugaccaccaagagcgugagcuucagaagacugagccaccugagaaagcuggugcccggcuucggcaaggccuacaccaucuucaacaagacccugauggaggccgacgcccacuacaagagcgugagaaccuggaacgagaucauccccagcaagggcugccugagagugggcggcagaugccacccccacgugaacggcgugguguucaacggcaucauccugggccccgacggccacgugcugauccccgagaugcagagcagccugcugcagcagcacauggagcugcuggagagcagcgugaucccccugaugcacccccuggccgaccccagcaccguguucaaggacggcgacgaggccgaggacuucguggaggugcaccugcccgacgugcacaagcagaucagcggcguggaccugggccugcccaacuggggcaaguacgugcugaucaucgccggcgugcugaucgccaugauccugaccaucuuccugaugaccugcugcggcagaggcaacagacccaagagcacccagcacagccugggcggcaucggcagaaaggugagcagcaccagccagagcggcaaggugaucagcagcugggagagcuacaagagcggcggcgagaccagacuguga

SEQ ID NO: 192055 - RNA, 1575 nt, Artificial Sequence
  derived and/or modified CDS sequence (opt4) from glycoprotein__RABV__U03767.1
auggugccccaggcccugcuguucgugccccugcuggccuuccccaugugcuucggcaaguuccccaucuacaccauccccgacaagcugggccccuggagccccaucgacauccaccaccugagcugccccaacaaccuggugguggaggacgagggcugcaccaaccugagcggcuucagcuacauggagcugaaggugggcuacaucagcgccaucaaggugaacggcuucaccugcaccggcguggugaccgaggccgagaccuacaccaacuucgugggcuacgugaccaccaccuucaagagaaagcacuucagacccacccccgacgccugcagagccgccuacaacuggaagauggccggcgaccccagauacgaggagagccugcacaaccccuaccccgacuaccacuggcugagaaccgugaagaccaccaaggagagccugaucaucaucagccccagcguggccgaccuggaccccuacgacaagagccugcacagcagaguguuccccagcggcaagugccugggcaucaccaucagcagcaccuacugcagcaccaaccacgacuacaccaucuggaugcccgacaacgugagacugggcaccagcugcgacaucuucaccaacagcagaggcaagagagccagcaagggcagcaagaccugcggcuucguggacgagagaggccuguacaagagccugaagggcgccugcaagcugaagcugugcggcgugcugggccugagacugauggacggcaccuggguggccaugcccaccagcgacgagaccaaguggugcccccccggccagcuggugaaccugcacgacuucagaagcgacgagaucgagcaccuggugguggaggagcuggugagaaagagagaggagugccuggacgcccuggagagcaucaugaccaccaagagcgugagcuucagaagacugagccaccugagaaagcuggugcccggcuucggcaaggccuacaccaucuucaacaagacccugauggaggccgacgcccacuacaagagcgugagaaccuggaacgagaucauccccagcaagggcugccugagagugggcggcagaugccacccccacgugaacggcgugguguucaacggcaucauccugggccccgacggccacgugcugauccccgagaugcagagcagccugcugcagcagcacauggagcugcuggagagcagcgugaucccccugaugcacccccuggccgaccccagcaccguguucaaggacggcgacgaggccgaggacuucguggaggugcaccugcccgacgugcacaagcagaucagcggcguggaccugggccugcccaacuggggcaaguacgugcugaucaucgccggcgugcugaucgccaugauccugaccaucuuccugaugaccugcugcggcagaggcaacagacccaagagcacccagcacagccugggcggcaucggcagaaaggugagcagcaccagccagagcggcaaggugaucagcagcugggagagcuacaagagcggcggcgagaccagacuguga

SEQ ID NO: 192056 - RNA, 1575 nt, Artificial Sequence
  derived and/or modified CDS sequence (opt4) from glycoprotein__RABV__U11736.2
auggugccccaggcccugcugcuggugccccugcuggccuuccccaugugcuucggcaaguuccccaucuacaccauccccgacaagcugggccccuggagccccaucgacauccaccaccugagcugccccaacaaccuggugguggaggacgagggcugcaccaaccugagcggcuucagcuacauggagcugaaggugggcuacaucagcgccaucaaggugaacggcuucaccugcaccggcguggugaccgaggccgagaccuacaccaacuucgugggcuacgugaccaccaccuucaagagaaagcacuucagacccacccccgacgccugcagagccgccuacaacuggaagauggccggcgaccccagauacgaggagagccugcacaaccccuaccccgacuaccacuggcugagaaccgugaagaccaugaaggagagccugaucaucaucagccccagcguggccgaccuggaccccuacgacaagagccugcacagcagaguguuccccagcggcaagugccugggcaucaccaucagcagcaccuacugcagcaccaaccacgacuacaccaucuggaugcccgagaaccugagacugggcaccagcugcgacaucuucaccaacagcagaggcaagagagccagcaagggcagcaagaccugcggcuucguggacgagagaggccuguacaagagccugaagggcgccugcaagcugaagcugugcggcgugcugggccugagacugauggacggcaccuggguggccaugcagaccagcgacgagaccaaguggugcccccccgaccagcuggugaaccugcacgacuucagaagcgacgagaucgagcaccuggugguggaggagcuggugaagaagagagaggagugccuggacgcccuggagagcaucaugaccaccaagagcgugagcuucagaagacugagccaccugagaaagcuggugcccggcuucggcaaggccuacaccaucuucaacaagacccugauggaggccgacgcccacuacaagagcgugagaaccuggaacgagaucauccccagcaagggcugccugagagugggcggcagaugccacccccacgugaacggcgugguguucaacggcaucauccugggccccgacggccacgugcugauccccgagaugcagagcagccugcugcagcagcacauggagcugcuggagagcagcgugaucccccugaugcacccccuggccgaccccagcaccguguucaaggacggcgacgaggccgaggacuucguggaggugcaccugcccgacgugcacaagcagaucagcggcguggaccugggccugcccaacuggggcaaguacgugcugaucaucgccggcgugcugaucgccaugauccugaccaucuuccugaugaccugcugcggcagaggcaacagaagcaagagcacccagcacagccugggcggcaucggcagaaaggugagcgccaccagccagagcggcaaggugaucagcagcugggagagcuacaagagcggcagcgagaccagacuguga

SEQ ID NO: 192057 - RNA, 1575 nt, Artificial Sequence
  derived and/or modified CDS sequence (opt4) from glycoprotein__RABV__U11743.2
auggugccccaggcccugcuguucgugccccugcuggccuuccccaugugcuucggcaaguuccccaucuacaccauccccgacaagcugggccccuggagccccaucgacauccaccaccugagcugccccaacaaccuggugguggaggacgagggcugcaccaaccugagcggcuucagcuacauggagcugaaggugggcuacaucagcgccaucaaggugaacggcuucaccugcaccggcguggugaccgaggccgagaccuacaccaacuucgugggcuacgugaccaccaccuucaagagaaagcacuucagacccacccccgacgccugcagagccgccuacaacuggaagauggccggcgaccccagauacgaggagagccugcacaaccccuaccccgacuaccacuggcugagaaccgugaagaccaccaaggagagccugaucaucaucagccccagcguggccgaccuggaccccuacgacaagagccugcacagcagaguguuccccagcggcaagugccugggcaucaccaucagcagcaccuacugcagcaccaaccacgacuacaccaucuggaugcccgagaaccugagacugggcaccagcugcgacaucuucaccaacagcagaggcaagagagccagcaagggcagcaagaccugcggcuucguggacgagagaggccuguacaagagccugaagggcgccugcaagcugaagcugugcggcgugcugggccugagacugauggacggcaccuggguggccaugcagaccagcgacgagaccaaguggugcccccccgaccagcuggugaaccugcacgacuucagaagcgacgagaucgagcaccuggugguggaggagcuggugaagaagagagaggagugccuggacgcccuggagagcaucaugaccaccaagagcgugagcuucagaagacugagccaccugagaaagcuggugcccggcuucggcaaggccuacaccaucuucaacaagacccugauggaggccgacgcccacuacaagagcgugagaaccuggaacgagaucauccccagcaagggcugccugagagugggcggcagaugccacccccacgugaacggcgugguguucaacggcaucauccugggccccgacggccacgugcugauccccgagaugcagagcagccugcugcagcagcacauggagcugcuggagagcagcgugaucccccugaugcacccccuggccgaccccagcaccguguucaaggacggcgacgaggccgaggacuucguggaggugcaccugcccgacgugcacaagcagaucagcggcguggaccugggccugcccaacuggggcaaguacgugcugaucaucgccggcgugcugaucgccaugauccugaccaucuuccugaugaccugcugcggcagaggcaacagacccaagagcacccagcacagccugggcggcaucggcagaaaggugagcgccaccagccagagcagaaaggugaucagcagcugggagagcuacaagagcggcggcgagaccagacuguga

SEQ ID NO: 192058 - RNA, 1575 nt, Artificial Sequence; identical to SEQ ID NO: 192057
  derived and/or modified CDS sequence (opt4) from glycoprotein__RABV__U11747.2

SEQ ID NO: 192059 - RNA, 1575 nt, Artificial Sequence; identical to SEQ ID NO: 192052
  derived and/or modified CDS sequence (opt4) from glycoprotein__RABV__U11748.2

SEQ ID NO: 192060 - RNA, 1575 nt, Artificial Sequence
  derived and/or modified CDS sequence (opt4) from glycoprotein__RABV__U11750.2
auggugccccaggcccugcuguucgugccccugcuggccuuccccaugugcuucggcaaguuccccaucuacaccauccccgacaagcugggccccuggagccccaucgacauccaccaccugagcugccccaacaaccuggugguggaggacgagggcugcaccaaccugagcggcuucagcuacauggagcugaaggugggcuacaucagcgccaucaaggugaacggcuucaccugcaccggcguggugaccgaggccgagaccuacaccaacuucgugggcuacgugaccaccaccuucaagagaaagcacuucagacccacccccgacgccugcagagccgccuacaacuggaagauggccggcgaccccagauacgaggagagccugcacaaccccuaccccgacuaccacuggcugagaaccgugaagaccaccaaggagagccugaucaucaucagccccagcguggccgaccuggaccccuacgacaagagccugcacagcagaguguuccccagcggcaagugccugggcaucaccaucagcagcaccuacugcagcaccaaccacgacuacaccaucuggaugcccgagaaccugagacugggcaccagcugcgacaucuucaccaacagcagaggcaagagagccagcaagggcagcaagaccugcggcuucguggacgagagaggccuguacaagagccugaagggcgccugcaagcugaagcugugcggcgugcugggccugagacugauggacggcaccuggguggccaugcagaccagcgaggagaccaaguggugcccccccgaccagcuggugaaccugcacgacuucagaagcgacgagaucgagcaccuggugguggaggagcuggugaagaagagagaggagugccuggacgcccuggagagcaucaugaccaccaagagcgugagcuucagaagacugagccaccugagaaagcuggugcccggcuucggcaaggccuacaccaucuucaacaagacccugauggaggccgacgcccacuacaagagcgugagaaccuggaacgagaucauccccagcaagggcugccugagagugggcggcagaugccacccccacgugaacggcgugguguucaacggcaucauccugggccccgacggcagagugcugauccccgagaugcagagcagccugcugcagcagcacauggagcugcuggagagcagcgugaucccccugaugcacccccuggccgaccccagcaccguguucaaggacggcgacgaggccgaggacuucguggaggugcaccugcccgacgugcacaagcagaucagcggcguggaccugggccugcccaacuggggcaaguacgugcugaucaucgccggcgugcugaucgccaccauccugaccaucuuccugauggccugcugcggcagaggcaacagacccaagagcacccagcacagccugggcggcaucggcagaaaggugagcgccaccagccagagcggcaaggugaucagcagcugggagagcuacaagagcggcggcgagaccagacuguga

SEQ ID NO: 192061 - RNA, 1575 nt, Artificial Sequence
  derived and/or modified CDS sequence (opt4) from glycoprotein__RABV__U11752.2
auggugccccaggcccugcuguucgugccccugcuggccuuccccaugugcuucggcaaguuccccaucuacaccauccccgacaagcugggccccuggagccccaucgacauccaccaccugagcugccccaacaaccuggugguggaggacgagggcugcaccaaccugagcggcuucagcuacauggagcugaaggugggcuacaucagcgccaucaaggugaacggcuucaccugcaccggcguggugaccgaggccgagaccuacaccaacuucgugggcuacgugaccaccaccuucaagagaaagcacuucagacccacccccgacgccugcagagccgccuacaacuggaagauggccggcgaccccagauacgaggagagccugcacaaccccuaccccgacuaccacuggcugagaaccgugaagaccaccaaggagagccugaucaucaucagccccagcguggccgaccuggaccccuacgacaagagccugcacagcagaguguuccccagcggcaagugccugggcaucaccaucagcagcaccuacugcagcaccaaccacgacuacaccaucuggaugcccgagaaccugagacugggcaccagcugcgacaucuucaccaacagcagaggcaagagagccagcaagggcagcaagaccugcggcuucguggacgagagaggccuguacaagagccugaagggcgccugcaagcugaagcugugcggcgugcugggccugagacugauggacggcaccuggguggccaugcagaccagcgacgagaccaaguggugcccccccgaccagcuggugaaccugcacgacuucagaagcgacgagaucgagcaccuggugguggaggagcuggugaagaagagagaggagugccuggacgcccuggagagcaucaugaccaccaagagcgugagcuucagaagacugagccaccugagaaagcuggugcccggcuucggcaaggccuacaccaucuucaacaagacccugauggaggccgacgcccacuacaagagcgugagaaccuggaacgagaucauccccagcaagggcugccugagagugggcggcagaugccacccccacgugaacggcgugguguucaacggcaucauccugggccccgacggccacgugcugauccccgagaugcagagcagccugcugcagcagcacauggagcugcuggagagcagcgugaucccccugaugcacccccuggccgaccccagcaccguguucaaggacggcgacgaggccgaggacuucguggaggugcaccugcccgacgugcacaagcagaucagcggcguggaccugggccugcccaacuggggcaaguacgugcugaucaucgccggcgugcugaucgugaugauccugaccaucuuccugaugaccugcugcggcagaggcaacagacccaagagcacccagcacagccugggcggcaucggcagaaaggugagcgccaccagccagagcggcaaggugaucagcagcugggagagcuacaagagcggcggcgagaccagacuguga

SEQ ID NO: 192062 - RNA, 1575 nt, Artificial Sequence
  derived and/or modified CDS sequence (opt4) from glycoprotein__RABV__U11753.1
auggugccccaggcccugcuguucgugccccugcuggccuuccccaugugcuucggcaaguuccccaucuacaccauccccgacaagcugggccccuggagccccaucgacauccaccaccugagcugccccaacaaccuggugguggaggacgagggcugcaccaaccugagcggcuucagcuacauggagcugaaggugggcuacaucagcgccaucaaggugaacggcuucaccugcaccggcguggugaccgaggccgagaccuacaccaacuucgugggcuacgugaccaccaccuucaagagaaagcacuucagacccacccccgacgccugcagagccgccuacaacuggaagauggccggcgaccccagauacgaggagagccugcacaaccccuaccccgacuaccacuggcugagaaccgugaagaccaccaaggagagccugaucaucaucagccccagcguggccgaccuggaccccuacgacaagagccugcacagcagaguguuccccagcggcaagugccugggcaucaccaucagcagcaccuacugcagcaccaaccacgacuacaccaucuggaugcccgagaaccugagacugggcaccagcugcgacaucuucaccaacagcagaggcaagagagccagcaagggcagcaagaccugcggcuucguggacgagagaggccuguacaagagccugaagggcgccugcaagcugaagcugugcggcgugcugggccugagacugauggacggcaccuggguggccaugcagaccagcgacgagaccaaguggugcccccccgaccagcuggugaaccugcacgacuucagaagcgacgagaucgagcaccuggugguggaggagcuggugaagaagagagaggagugccuggacgcccuggagagcaucaugaccaccaagagcgugagcuucagaagacugagccaccugagaaagcuggugcccggcuucggcaaggccuacaccaucuucaacaagacccugauggaggccgacgcccacuacaagagcgugagaaccuggaacgagaucauccccagcaagggcugccugagagugggcggcaagugccacccccacgugaacggcguguucuucaacggcaucauccugggccccgacggccacgugcugauccccgagaugcagagcagccugcugcagcagcacauggagcugcuggagagcagcgugaucccccugaugcacccccuggccgaccccagcaccguguucaaggacggcgacgaggccgaggacuucguggaggugcaccugcccgacgugcacaagcagaucagcggcguggaccugggccugcccaacuggggcaaguacgugcugaucaucgccggcgugcugaucgccaugauccugaccaucuuccugaugaccugcugcggcagaggcaacagacccaagagcacccagcacagccugggcggcaucggcagaaaggugagcgccaccagccagagcggcaaggugaucagcagcugggagagcuacaagagcggcggcgagaccagacuguga

SEQ ID NO: 192063 - RNA, 1575 nt, Artificial Sequence
  derived and/or modified CDS sequence (opt4) from glycoprotein__RABV__U11754.1
auggugccccaggcccugcuguucgugccccugcuggccuuccccaugugcuucggcaaguuccccaucuacaccauccccgacaagcugggccccuggagccccaucgacauccaccaccugagcugccccaacaaccuggugguggaggacgagggcugcaccaaccugagcggcuucagcuaccuggagcugaaggugggcuacaucagcgccaucaaggugaacggcuucaccugcaccggcguggugaccgaggccgagaccuacaccaacuucgugggcuacgugaccaccaccuucaagagaaagcacuucagacccacccccgacgccugcagagccgccuacaacuggaagauggccggcgaccccagauacgaggagagccugcacaaccccuaccccgacuaccacuggcugagaaccgugaagaccaccaaggagagccccaucaucaucagccccagcguggccgaccuggaccccuacgacaagagccugcacagcagaguguuccccagcggcaagugccugggcaucaccaucagcagcaccuacugcagcaccaaccacgacuacaccaucuggaugcccgagaaccugagacugggcaccagcugcgacaucuucaccaacagcagaggcaagagagccagcaagggcagcaaggccugcggcuucguggacgagagaggccuguacaagagccugaagggcgccugcaagcugaagcugugcggcgugcugggccugagacugauggacggcaccuggguggccaugcagaccagcgacgagaccaaguggugcccccccgaccagcuggugaaccugcacgacuucagaagcgacgagaucgagcaccuggugguggaggagcuggugaagaagagagaggagugccuggacgcccuggagagcaucaugaccaccaagagcgugagcuucagaagacugagccaccugagaaagcuggugcccggcuucggcaaggccuacaccaucuucaacaagacccugauggaggccgacgcccacuacaagagcgugagaaccuggaacgagaucauccccagcaagggcugccugagagugggcggcagaugccacccccacgugaacggcguguucuucaacggcaucauccugggccccgacggccacgugcugauccccgagaugcagagcagccugcugcagcagcacauggagcugcuggagagcagcgugaucccccugaugcacccccuggccgaccccagcaccguguucaaggacggcgacgaggccgaggacuucguggaggugcaccugcccgacgugcacaagcagaucagcggcguggaccugggccugcccaacuggggcaaguacgugcugaucaucgccggcgugcugaucgccaugcugcugaccguguuccugaugaccugcugcggcaagggcaacagacccaagagcauccagcacagccugggcggcaucggcagaaaggugagcgccaccagccagagcggcaaggugaucagcagcugggagagcuacaagagcggcggcgagaccagacuguga

SEQ ID NO: 192064 - RNA, 1575 nt, Artificial Sequence
  derived and/or modified CDS sequence (opt4) from glycoprotein__RABV__U11755.1
auggugccccaggcccugcugcuggugccccugcuggccuuccccaugugcuucggcaaguuccccaucuacaccauccccgacaagcugggccccuggagccccaucgacauccaccaccugagcugccccaacaaccuggugguggaggacgagggcugcaccaaccugagcggcuucagcuacauggagcugaaggugggcuacaucagcgccaucaaggugaacggcuucaccugcaccggcguggugaccgaggccgagaccuacaccaacuucgugggcuacgugaccaccaccuucaagagaaagcacuucagacccacccccgacgccugcagagccgccuacaacuggaagauggccggcgaccccagauacgaggagagccugcacaaccccuaccccgacuaccacuggcugagaaccgugaagaccaccaaggagagccugaucaucaucagccccagcguggccgaccuggaccccuacgacaagagccugcacagcagaguguuccccagcggcaagugccugggcaucaccaucagcagcaccuacugcagcaccaaccacgacuacaccaucuggaugcccgagaaccugagacugggcaccagcugcgacaucuucaccaacagcagaggcaagagagccagcaagggcagcaagaccugcggcuucguggacgagagaggccuguacaagagccugaagggcgccugcaagcugaagcugugcggcgugcugggccugagacugauggacggcaccuggguggccaugcagaccagcgacgagaccaaguggugcccccccgaccagcuggugaaccugcacgacuucagaagcgacgagaucgagcaccuggugguggaggagcuggugaagaagagagaggagugccuggacgcccuggagagcaucaugaccaccaagagcgugagcuucagaagacugagccaccugagaaagcuggugcccggcuucggcaaggccuacaccaucuucaacaagacccugauggaggccgacgcccacuacaagagcgugagaaccuggaacgagaucauccccagcaagggcugccugagagugggcggcagaugccacccccacgugaacggcgugguguucaacggcaucauccugggccccgacggccacgugcugauccccgagaugcagagcagccugcugcagcagcacauggagcugcuggagagcagcgugaucccccugaugcacccccuggccgaccccagcaccguguucaaggacggcgacgaggccgaggacuucguggaggugcaccugcccgacgugcacaagcagaucagcggcguggaccugggccugcccaacuggggcaaguacgugcugaucaucgccggcgugcugaucgccaugauccugaccaucuuccugaugaccugcugcggcagaggcaacagacccaagagcacccagcacagccugggcggcaucggcagaaaggugagcgccaccagccagagcggcaaggugaucagcagcugggagagcuacaagagcggcagcgagaccagacuguga

SEQ ID NO: 192065 - RNA, 1575 nt, Artificial Sequence
  derived and/or modified CDS sequence (opt4) from glycoprotein__RABV__U11756.1
auggugccccaggcccugcuguucgugccccugcuggccuuccccaugugcuucggcaaguuccccaucuacaccauccccgacaagcugggccccuggagccccaucgacauccaccaccugagcugccccaacaaccuggugguggaggacgagggcugcaccaaccugagcggcuucagcuacauggagcugaaggugggcuacaucagcgccaucaaggugaacggcuucaccugcaccggcguggugaccgaggccgagaccuacaccaacuucgugggcuacgugaccaccaccuucaagagaaagcacuucagacccacccccgacgccugcagaguggccuacaacuggaagauggccggcgaccccagauacgaggagagccugcacaaccccuaccccgacuaccacuggcugagaaccgugaagaccaccaaggagagccugaucaucaucagccccagcguggccgaccuggaccccuacgacaagagccugcacagcagaguguuccccagcggcaagugccugggcaucaccaucagcagcaccuacugcagcaccaaccacgacuacaccaucuggaugcccgagaaccugagacugggcaccagcugcgacaucuucaccaacagcagaggcaagagagccagcaagggcagcaagaccugcggcuucguggacgagagaggccuguacaagagccugaagggcgccugcaagcugaagcugugcggcgugcugggccugagacugauggacggcaccuggguggccaugcagaccagcgacgagaccaaguggugcccccccgaccagcuggugaaccugcacgacuucagaagcgacgagaucgagcaccuggugguggaggagcuggugaagaagagagaggagugccuggacgcccuggagagcaucaugaccaccaagagcgugagcuucagaagacugagccaccugagaaagcuggugcccggcuucggcaaggccuacaccaucuucaacaagacccugauggaggccgacgcccacuacaagagcgugagaaccuggaacgagaucauccccagcaagggcugccugagagugggcggcaagugccacccccacgugaacggcgugguguucaacggcaucauccugggccccgacggccacgugcugauccccgagaugcagagcagccugcugcagcagcacauggagcugcuggagagcagcgugaucccccugaugcacccccuggccgaccccagcaccguguucaaggacggcgacgaggccgaggacuucguggaggugcaccugcccgacgugcacaagcagaucagcggcguggaccugggccugcccaacuggggcaaguacgugcugaucaucgccggcgugcugaucgccaugauccugaccaucuuccugaugaccugcugcggcagaggcaacagacccaagagcacccagcacagccugggcggcaucggcagaaaggugagcgccaccagccagagcggcaaggugaucagcagcugggagagcuacaagagcggcggcgagaccagacuguga

SEQ ID NO: 192066 - RNA, 1575 nt, Artificial Sequence
  derived and/or modified CDS sequence (opt4) from glycoprotein__RABV__U11757.1
auggugccccaggcccugcuguucgugccccugcuggccuuccccaugugcuucggcaaguuccccaucuacaccauccccgacaagcugggccccuggagccccaucgacauccaccaccugagcugccccaacaaccuggugguggaggacgagggcugcaccaaccugagcggcuucagcuacauggagcugaaggugggcuacaucagcgccaucaaggugaacggcuucaccugcaccggcguggugaccgaggccgagaccuacaccaacuucgugggcuacgugaccaccaccuucaagagaaagcacuucagacccacccccgacgccugcagagccgccuacaacuggaagauggccggcgaccccagauacgaggagagccugcacaaccccuaccccgacuaccacuggcugagaaccgugaagaccaccaaggagagccugaucaucaucagccccagcguggccgaccuggaccccuacgacaagagccugcacagcagaguguuccccagcggcaagugccugggcaucaccaucagcagcaccuacugcagcaccaaccacgacuacaccaucuggaugcccgagaaccugagacugggcaccagcugcgacaucuucaccaacagcagaggcaagagagccagcaagggcagcaagaccugcggcuucguggacgagagaggccuguacaagagccugaagggcgccugcaagcugaagcugugcggcgugcugggccugagacugauggacggcaccuggguggccaugcagaccagcgacgagaccaaguggugcccccccgaccagcuggugaaccugcacgacuucagaagcgacgagaucgagcaccuggugguggaggagcuggugaagaagagagaggagugccuggacgcccuggagagcaucaugaccaccaagagcgugagcuucagaagacugagccaccugagaaagcuggugcccggcuucggcaaggccuacaccaucuucaacaagacccugauggaggccgacgcccacuacaagagcgugagaaccuggaacgagaucauccccagcaagggcugccugagagugggcggcagaugccacccccacgugaacggcgugguguucaacggcaucauccugggccccgacggccacgugcugauccccgagaugcagagcagccugcugcagcagcacauggagcugcuggagagcagcgugaucccccugaugcacccccuggccgaccccagcaccguguucaaggacggcgacgaggccgaggacuucguggaggugcaccugcccgacgugcacaagcagaucagcggcguggaccugggccugcccaacuggggcaaguacgugcugaucaucgccggcgugcugaucgccaugauccugaccguguuccugaugaccugcugcggcagaggcaacagacccaagagcauccagcacagccugggcggcaucggcagaaaggugagcgccaccagccagagcggcaaggugaucagcagcugggagagcuacaagagcggcggcgagaccagacuguga

SEQ ID NO: 192067 - RNA, 1575 nt, Artificial Sequence; identical to SEQ ID NO: 192052
  derived and/or modified CDS sequence (opt4) from glycoprotein__RABV__U11758.1

SEQ ID NO: 192068 - RNA, 1575 nt, Artificial Sequence
  derived and/or modified CDS sequence (opt4) from glycoprotein__RABV__U27214.1
auggugcccugggcccugcuguucgugcccuuccugaucagcagccugugcuucggcaaguuccccaucuacaccauccccgacaagcugggccccuggagccccaucgacauccaccaccugagcugccccaacaaccuggugguggaggacgagggcugcaacagccugagcggcuucagcuacauggagcugaaggugggcuacaucagcgccaucaaggugaacggcuucaccugcaccggcguggugaccgaggccgagaccuacaccaacuucgugggcuacgugaccaccaccuucaagagaaagcacuucugccccaugcccgacgccugcagaagcgccuacaacuggaagauggccggcgaccccagauacgaggagagccugcacaaccccuaccccgacuaccacuggcugagaaccgugaagaccaccaaggagagccuggugaucaucagccccagcguggccgaccuggaccccuacgacaagagccugcacagcagaaucuuccccggcggcaagugcaccggccugaccgugagcagcaccuacugcagcaccaaccacgacuacaccaucuggaugcccgagaaggccggccugggcaccagcugcgacaucuucaccaacagcaagggcaagagagccagcaagggcggcaagaccugcggcuucguggacgagagaggccuguacaagagccugaagggcgccugcaagcugaagcugugcggcgugagcggccugagacugauggacggcaccuggguggccauccagacccuggacgagaccaaguggugcagccccgaccagcuggugaaccugcacgacuuccacagcgacgagcuggagcaccuggugguggaggagcuggugagaaagagagaggagugccuggacgcccuggagagcaucaugaccaccaagagcgugagcuucagaagacugagccaccugagaaagcuggugcccggcuucggcaaggccuacaccaucuucaacaagacccugauggaggccgacgcccacuacaagagcgugagaaccuggagcgagaucauccccagcaagggcugccugagagugggcggcagaugccacccccacgugaacggcguguucuucaacggcaucauccugggccccgacggccacgugcugauccccgagaugcagagcagccugcugcagcagcacguggagcugcuggagagcagcgugaucccccugaugcacccccuggccgaccccagcgccguguucaaggacggcgacgaggccgaggacuucguggaggugcaccugcccgacgugcacaagcagaucagcggcguggaccugggccugcccagcuggggcaaguacaugcugaugaucgccggcgcccugaccacccugaugcuguucaucuuccugaugaccugcugcaagagagugaacagaaccaagagcaucagacagggccccagagagaucgagagaaaggugagcuucaccccccagaacaagaagguggugagcagcugggagagcuacaagagcggcggcgagaccaagcuguga

SEQ ID NO: 192069 - RNA, 1575 nt, Artificial Sequence
  derived and/or modified CDS sequence (opt4) from glycoprotein__RABV__U27215.1
auggugcccugggcccugcuguucgugcccuuccugaucagcagccugugcuucggcaaguuccccaucuacaccauccccgacaagcugggccccuggagccccaucgacauccaccaccugagcugccccaacaaccuggugguggaggacgagggcugcaacagccugagcggcuucagcuacauggagcugaaggugggcuacaucagcgccaucaaggugaacggcuucaccugcaccggcguggugaccgaggccgagaccuacaccaacuucgugggcuacgugaccaccaccuucaagagaaagcacuucugccccaugcccgacgccugcagaagcgccuacaacuggaagauggccggcgaccccagauacgaggagagccugcacaaccccuaccccgacuaccacuggcugagaaccgugaagaccaccaaggagagccugaucaucaucagccccagcguggccgaccuggaccccuacgacaagagccugcacagcagaaucuuccccggcggcaagugcaccggccugaccgugagcagcaccuacugcagcaccaaccacgacuacaccaucuggaugcccgagaaggccggccugggcaccagcugcgacaucuucaccaacagcaagggcaagagagccagcaagggcggcaagaccugcggcuucguggacgagagaggccuguacaagagccugaagggcgccugcaagcugaagcugugcggcgugagcggccugagacugauggacggcaccuggguggccauccagacccuggacgagaccaaguggugcagccccgaccagcuggugaaccugcacgacuuccacagcgacgagcuggagcaccuggugguggaggagcuggugagaaagagagaggagugccuggacgcccuggagagcaucaugaccaccaagagcgugagcuucagaagacugagccaccugagaaagcuggugcccggcuucggcaaggccuacaccaucuucaacaagacccugauggaggccgacgcccacuacaagagcgugagaaccuggagcgagaucauccccagcaagggcugccugagagugggcggcagaugccacccccacgugaacggcguguucuucaacggcaucauccugggccccgacggccacgugcugauccccgagaugcagagcagccugcugcagcagcacguggagcugcuggagagcagcgugaucccccugaugcacccccuggccgaccccagcgccguguucaaggacggcgacgaggccgaggacuucguggaggugcaccugcccgacgugcacaagcagaucagcggcguggaccugggccugcccagcuggggcaaguacaugcugaugaucgccggcgcccugaccacccugaugcuguucaucuuccugaugaccugcugcaagagagugaacagaaccaagagcaucagacagggccccagagagaucgagagaaaggugagcuucaccccccagaacaagaagguggugagcagcugggagagcuacaagagcggcggcgagaccaagcuguga

SEQ ID NO: 192070 - RNA, 1575 nt, Artificial Sequence
  derived and/or modified CDS sequence (opt4) from glycoprotein__RABV__U27216.1
auggugcccugggcccugcuguucgugcccuuccugaucagcagccugugcuucggcaaguuccccaucuacaccauccccgacaagcugggccccuggagccccaucgacauccaccaccugagcugccccaacaaccuggugguggaggacgagggcugcaacagccugagcggcuucagcuacauggagcugaaggugggcuacaucagcgccaucaaggugaacggcuucaccugcaccggcguggugaccgaggccgagaccuacaccaacuucgugggcuacgugaccaccaccuucaagagaaagcacuucugccccaugcccgacgccugcagaagcgccuacaacuggaagauggccggcgaccccagauacgaggagagccugcacaaccccuaccccgacuaccacuggcugagaaccgugaagaccaccaaggagagccugaucaucaucagccccagcguggccgaccuggaccccuacgacagaagccugcacagcagaaucuuccccggcggcaagugcaccggccugaccgugagcagcaccuacugcagcaccaaccacgacuacaccaucuggaugcccgagaaggccggccugggcaccagcugcgacaucuucaccaacagcaagggcaagagagccagcaagggcggcaagaccugcggcuucguggacgagagaggccuguacaagagccugaagggcgccugcaagcugaagcugugcggcgugagcggccugagacugauggacggcaccuggguggccauccagacccuggacgagaccaaguggugcagccccgaccagcuggugaaccugcacgacuuccacagcgacgagcuggagcaccuggugguggaggagcuggugagaaagagagaggagugccuggacgcccuggagagcaucaugaccaccaagagcgugagcuucagaagacugagccaccugagaaagcuggugcccggcuucggcaaggccuacaccaucuucaacaagacccugauggaggccgacgcccacuacaagagcgugagaaccuggagcgagaucauccccagcaagggcugccugagagugggcggcagaugccacccccacgugaacggcguguucuucaacggcaucauccugggccccgacggccacgugcugauccccgagaugcagagcagccugcugcagcagcacguggagcugcuggagagcagcgugaucccccugaugcacccccuggccgaccccagcgccguguucaaggacggcgacgaggccgaggacuucguggaggugcaccugcccgacgugcacaagcagaucagcggcguggaccugggccugcccagcuggggcaaguacaugcugaugaucgccggcgcccugaccacccugaugcuguucaucuuccugaugaccugcugcaagagagugaacagaaccgagagcaucagacagggccccagagagcuggagagcaaggugagcgugaccccccagaacaagaaggugaucagcagcugggagagcuacaagagcggcggcgagaccaagcuguga

SEQ ID NO: 192071 - RNA, 1575 nt, Artificial Sequence
  derived and/or modified CDS sequence (opt4) from glycoprotein__RABV__U27217.1
auggugcccugggcccugcuguucgugcccuuccugaucagcagccugugcuucggcaaguuccccaucuacaccauccccgacaagcugggccccuggagccccaucgacauccaccaccugagcugccccaacaaccuggugguggaggacgagggcugcaacagccugagcggcuucagcuacauggagcugaaggugggcuacaucagcgccaucaaggugaacggcuucaccugcaccggcguggugaccgaggccgagaccuacaccaacuucgugggcuacgugaccaccaccuucaagagaaagcacuucugccccaugcccgacgccugcagaagcgccuacaacuggaagauggccggcgaccccagauacgaggagagccugcacaaccccuaccccgacuaccacuggcugagaaccgugaagaccaccaaggagagccugaucaucaucagccccagcguggccgagcuggaccccuacgacaagagccugcacagcagaaucuuccccggcggcaagugcaccggccugaccgugagcagcaccuacugcagcaccaaccacgacuacaccaucuggaugcccgagaaggccggccugggcaccagcugcgacaucuucaccaacagcaagggcaagagagccagcaagggcggcaagaccugcggcuucguggacgagagaggccuguacaagagccugaagggcgccugcaagcugaagcugugcggcgugagcggccugagacugauggacggcaccuggguggccauccagacccuggacgagaccaaguggugcagccccgaccagcuggugaaccugcacgacuuccacagcgacgagcuggagcaccuggugguggaggagcuggugagaaagagagaggagugccuggacgcccuggagagcaucaugaccaccaagagcgugagcuucagaagacugagccaccugagaaagcuggugcccggcuucggcaaggccuacaccaucuucaacaagacccugauggaggccgacgcccacuacaagagcgugagaaccuggagcgagaucauccccagcaagggcugccugagagugggcggcagaugccacccccacgugaacggcguguucuucaacggcaucauccugggccccgacggccacgugcugauccccgagaugcagagcagccugcugcagcagcacguggagcugcuggagagcagcgugaucccccugaugcacccccuggccgaccccagcgccguguucaaggacggcgacgaggccgaggacuucguggaggugcaccugcccgacgugcacaagcagaucagcggcguggaccugggccugcccagcuggggcaaguacaugcugaugaucgccggcgcccugaccacccugaugcuguucaucuuccugaugaccugcugcaagagagugaacagaaccaagagcaucagacagggccccagagagaucgagagaaaggugagcuucaccccccagaacaagaagguggugagcagcugggagagcuacaagagcggcggcgagaccaagcuguga

SEQ ID NO: 192072 - RNA, 1575 nt, Artificial Sequence
  derived and/or modified CDS sequence (opt4) from glycoprotein__RABV__X71879.1
auggugccccaggcccugcuguucgugccccugcugguguucccccugugcuucggcaaguuccccaucuacaccauccccgacaagcugggccccuggagccccaucgacauccaccaccugagcugccccaacaaccuggugguggaggacgagggcugcaccaaccugagcggcuucagcuacauggagcugaaggugggcuacauccuggccaucaagaugaacggcuucaccugcaccggcguggugaccgaggccgagaacuacaccaacuucgugggcuacgugaccaccaccuucaagagaaagcaccugagacccacccccgacgccugcagagccgccuacaacuggaagauggccggcgaccccagauacgaggagagccugcacaaccccuaccccgacuacagcuggcugagaaccgugaagaccaccaaggagagccuggugaucaucagccccagcguggccgaccuggaccccuacgacagaagccugcacagcagaguguuccccagcggcaagugcagcggcguggccgugagcagcaccuacugcagcaccaaccacgacuacaccaucuggaugcccgagaaccccagacugggcaagagcugcgacaucuucaccaacagcagaggcaagagagccagcaagggcagcgagaccugcggcuucguggacgagagaggccuguacaagagccugaagggcgccugcaagcugaagcugugcggcgugcugggccugagacugauggacggcaccuggguggccaugcagaccagcaacgagaccaaguggugcccccccgaccagcuggugaaccugcacgacuucagaagcgacgagaucgagcaccuggugguggaggagcuggugagaaagagagaggagugccuggacgcccuggagagcaucaugaccaccaagagcgugagcuucagaagacugagccaccugagaaagcuggugcccggcuucggcaaggccuacaccaucuucaacaagacccugauggaggccgacgcccacuacaagagcgugagaaccuggaacgagauccugcccagcaagggcugccugagagugggcggcagaugccacccccacgugaacggcguguucuucaacggcaucauccugggccccgacggcaacgugcugauccccgagaugcagagcagccugcugcagcagcacauggagcugcuggagagcagcgugaucccccuggugcacccccuggccgaccccagcaccguguucaaggacggcgacgaggccgaggacuucguggaggugcaccugcccgacgugcacaaccaggugagcggcguggaccugggccugcccaacuggggcaaguacgugcugcugagcgccggcgcccugaccgcccugaugcugaucaucuuccugaugaccugcugcagaagagugaacagaagcgagcccacccagcacaaccugagaggcaccggcagagaggugagcgugaccccccagaccuggaagaucaucagcagcugggagagccacaagagcggcggcgagaccagacuguga

SEQ ID NO: 192073 - RNA, 1701 nt, Artificial Sequence
  derived and/or modified CDS sequence (opt5) from hemagglutinin__InfluenzaA__AAA16879
auggaggccaagcuguucgugcucuuuugcaccuucacaguccugaaagcugacacgaucuguguuggcuaccacgccaacaauagcaccgauacaguggacaccgugcuugaaaagaacgucacagugacccauuccguuaaucugcucgaggauucucacaacgggaaacugugcagccuuaauggaauugcgccccugcagcucggcaaguguaacguggcuggguggcugcugggaaauccugaaugcgaccuccugcuuacagccaacuccuggucuuauaucauugagaccagcaauuccgaaaacggcacguguuacccgggggaguuuaucgauuaugaggaacugagagagcaacucucuagcgucuccagcuucgaaaaauuugagauuuuccccaaggccucuuccuggccuaaucaugagaccacaaagggagugaccgcugccugcagcuacucuggcgcuuccagcuuuuaucggaaccugcuuuggaucaccaaaaagggcaccucuuaccccaaacuguccaagagcuauacgaauaacaaagggaaggaaguucucgugcuguggggaguccaccauccucccacaaccuccgagcagcagucucuguaccagaaugccgacgcguacgugagcgugggcuccagcaaguauaaccgcagauucacaccugaaaucgccgcucggccgaaaguccgcgggcaagccggaagaaugaacuacuauuggacccuccuggaucagggcgacaccauuacauuugaggcuacggggaaucuuaucgcccccugguacgcguucgcccugaacaagggaucugauuccggcauuaucaccagcgacgcuccuguucacaauugugauacacggugccagacaccccacggcgcccucaacucuagccugccuuuucagaaugugcaucccauuacaaucggggaauguccgaaauauauuaaguccaccaaacuucgcauggcuacgggacugagaaacgugccuucuauccaaagccggggccucuucggggccaucgccggauuuauugagggcggguggacaggaaugaucgacggcugguacggcuaucaccaucagaaugagcagggguccggauacgcugcggaucaaaagagcacccagaacgccauugacggcaucaccaauaaagucaacucugugauugaaaagaugaauacacaguucaccgcuguugggaaggaguucaacaaucuggaacgcagaaucgagaaccugaauaaaaagguggacgauggauuucucgacgucuggacauacaacgccgaacugcuugugcugcucgagaacgagcggacgcuggauuuccacgacuccaauguucgcaaccuuuaugaaaaagucaagagccagcugagaaauaacgccaaagagcucggcaaugggugcuuugaguucuaccacaagugugaugacgaaugcauggaacgggagaagaacggcaccuaugauuaccccaaauauucugaggaauccaagcugaaucgcgaggaaaucgacggagugaaacuggagagcaugggcguguaccaaauucucgcuaucuauuccacagucgccucuagccuggugcuucugguuucccucggggcgauuucuuuuuggaugugcagcaacggaucccugcaguguagaaucugcauuuga

SEQ ID NO: 192074 - RNA, 1701 nt, Artificial Sequence
  derived and/or modified CDS sequence (opt5) from hemagglutinin__InfluenzaA__AAA16880
auggaggccaagcuguucgugcucuuuugcaccuucacaguccugaaagcugacacgaucuguguuggcuaccacgccaacaauagcaccgauacaguggacaccgugcuugaaaagaacgucacagugacccauuccguuaaucugcucgaggauucucacaacgggaaacugugcagccuuaauggaauugcgccccugcagcucggcaaguguaacguggcuggguggcugcugggaaauccugaaugcgaccuccugcuuacagccaacuccuggucuuauaucauugagaccagcaauuccgaaaacggcacguguuacccgggggaguuuaucgauuaugaggaacugagagagcaacucucuagcgucuccagcuucgaaaaauuugagauuuuccccaaggccucuuccuggccuaaucaugagaccacaaagggagugaccgcugccugcagcuacucuggcgcuuccagcuuuuaucggaaccugcuuuggaucaccaaaaagggcaccucuuaccccacgcuguccaaaagcuauacaaauaacaaggggaaagaaguucucgugcuguggggaguccaccauccucccaccgugaaugagcagcagucccuguaccagaacgccgacgcguacgugucugucggcagcuccaaguauaaccgcagauucacaccugaaaucgccgcucggccgaagguucgcgggcaagccggaagaaugaauuaccacuggacccuccuggaucagggcgacaccauuacauuugaggcuacggggaaccuuaucgcccccugguaugcguucgcccugaauaaaggaagcgauucuggcauuaucaccuccgacgcuccugugcacaacugugauacacggugccagacaccccauggcgcccucaauagcucucugccuuuucagaacgugcaccccauuacaaucggggaauguccgaaguacgucaaaagcaccaaacuucgcauggcuacgggacugagaaaugugccuuccauucaaucucggggccucuucggggccaucgccggauuuaucgagggcggguggacaggaaugauugacggcugguauggcuaccaucaccagaacgagcaggggagcggauaugcugcggaucagaaauccacccaaaaugccaucgacggcauuaccaacaagguuaauagcgugaucgaaaagaugaacacaaaguucaccgcugucgggaaggaguucaauaaccuggaacgcagaauugagaaucugaacaaaaagguggacgauggauuucucgacguuuggacauacaacgccgaacugcuugugcugcucgagaaugagcggacgcuggauuuccacgacucuaacguccgcaaucuuuacgaaaaagugaagucccagcugagaaacaaugccaaagagcucggcaacgggugcuuugaguucuaucauaagugugaugacgaaugcaucgaaagcgucaagaauggcaccuacgauuaucccaaauacucugaggaguccaagcugaaccgggaagagaucgacggagugaaacuggaaagcaugggcguuuaucagauucucgcuaucuacuccacaguggccucuagccugguccuucuggugucccucggggcgauuucuuuuuggaugugcagcaauggaucccugcaaugucgcaucugcauuuga

SEQ ID NO: 192075 - RNA, 1689 nt, Artificial Sequence
  derived and/or modified CDS sequence (opt5) from hemagglutinin__InfluenzaA__AAA64362
auggccaucauuuaccugauccuccuguucaccgcugugagaggcgaccagauuugcaucggguaucacgccaacaauagcacagagaaggucgauacgauucuugaacggaacguuaccgugacacaugcgaaagacauccuggagaagacccacaauggaaaacucuguaagcugaacggcauucccccucuugaacugggggauugcuccaucgcuggauggcuccugggcaauccggagugugaccgccugcucucugugcccgaauggagcuacaucauggagaaagagaacccuagagaugggcugugcuaucccggauccuuuaaugacuacgaagaacuuaaguaucugcucucuagcgucaagcauuucgaaaaagugaagauucugccuaaagaucgguggacacaacacaccacaaccggcggcucccgcgccugugccguuucugggaaccccagcuuuuucagaaauaugguguggcuuacgaagaaaggauccgacuacccugucgcuaagggcagcuauaacaauaccucuggggagcagaugcugaucauuuggggagugcaucacccgaacgaugagacagaacagcggacccucuaccagaauguuggcacauacguguccgucgggaccagcacgcugaacaagcgcucuacacccgagaucgccaccagaccuaaagugaauggacugggcucccggauggaauuuagcuggacacuccuggacaugugggauaccauuaacuucgagucuaccggcaaccuuaucgcucccgaauauggguuuaagaucuccaaacgcggaagcuccggcauuaugaagacagaggggacgcuggagaauugcgaaaccaaaugucaaacaccucucggagccaucaacaccacacugcccuuccacaaugugcauccgcuuaccauuggcgagugcccuagauacgucaagucugaaaaacugguucucgcgacggggcugcggaacgugccccagaucgagagccgcggacuguuuggcgccauugcuggcuucaucgaagggggauggcagggcaugguggacgggugguauggauaccaccauuccaaugaucagggcagcggguaugccgcugacaaggagucuacacaaaaggccuuugacggcaucaccaacaaagucaauuccgugauugagaagaugaacacccaguucgaagcgguuggaaaagaguuuagcaaucucgaaagacggcuggagaaccuuaauaagaaaauggaagauggcuuccuggacguguggacauacaacgccgagcuccugguccuuauggagaaugaacgcacccuggauuuccacgacucuaacgugaagaaucucuaugauaagguuagaaugcagcugcgggacaacgugaaagagcuggggaacggauguuuugaguucuaccacaagugcgaugacgaguguaugaauagcgucaaaaacggcacauacgauuauccuaaguacgaggaagaguccaaacucaauagaaacgaaaucaagggggugaagcugucuagcaugggagucuaucagauucuugcuaucuacgccacgguggcuggcucccugagccucgccauuaugauggccgggaucucuuuuuggaugugcuccaauggcagccugcaaugccgcaucuguauuuga

SEQ ID NO: 192076 - RNA, 1689 nt, Artificial Sequence
  derived and/or modified CDS sequence (opt5) from hemagglutinin__InfluenzaA__AAA64363
auggccaucauuuaccugauccuccuguucaccgcugugagaggcgaccagauuugcaucggguaucacgccaacaauagcacagagaaggucgauacgauucuugaacggaacguuaccgugacacaugcgaaagacauccuggagaagacccacaauggaaaacucuguaagcugaacggcauucccccucuugaacugggggauugcuccaucgcuggauggcuccugggcaauccggagugugaccgccugcucucugugcccgaauggagcuacaucauggagaaagagaacccuagagaugggcugugcuaucccggauccuuuaaugacuacgaggaacuuaagcaucugcucucuagcgucaagcacuucgaaaaagugaagauucugccuaaagaucgguggacacaacauaccacaaccggcggcucccgcgccugugccguuucugggaaccccagcuuuuucagaaauaugguguggcuuacgaagaaaggauccaacuauccugucgcuaagggcagcuacaauaacaccucuggggagcagaugcugaucauuuggggagugcaccacccgaaugacgagacagaacagcggacccucuaucagaacguuggcacauacguguccgucgggaccagcacgcugaauaagcgcucuacacccgauaucgccaccagaccuaaagugaacggacaaggcggccggauggaguuuuccuggacacugcucgacaugugggauaccauuaacuucgaaagcaccgggaaucugaucgcucccgaguacggauuuaagaucucuaaacgcggcuccagcgggauuaugaagacagaaggaacgcuuggcaacugcgagaccaaaugucagacaccucugggggccaucaauaccacacuccccuuccauaacgugcacccgcugaccauuggagagugcccuaaguaugucaaauccgaaaaacuuguucuggcgacgggccucagaaaugugccccagaucgagucucggggccuguuuggggccauugcuggauucaucgaaggcggguggcagggaaugguggacggcugguacggguaucaucacagcaacgaucaaggcuccggauacgccgcugacaaggagagcacacagaaagccuuugacggcaucaccaauaaggucaacucugugauugaaaagaucaauacccaguucgaggcgguugagaaggaauuuuccaaccuggagcgcagacucgaaaaucugaacaaaaagauggaggauggguuccuugacguguggacauauaaugccgaacugcucguccugauggagaacgagcggacccuugauuuccacgacagcucugugaagaaucuguacgauaaaguucgcaugcagcucagagacaacgugaaggaacugggaaacggcuguuuugaguucuaucauaaaugcgaugacgaauguaugaauagcgucaagaacgggacauacgauuacccuaaauaugaggaggaauccaagcugaaucggaacgagauuaagggagugaaacucucuagcaugggcaucuaccaaauucuggcuaucuaugccacggucgcugggucccuuagccuggccaucaugauggccggcauuucuuuuuggaugugcuccaauggaagccuccagugcagaaucuguauuuga

SEQ ID NO: 192077 - RNA, 1689 nt, Artificial Sequence
  derived and/or modified CDS sequence (opt5) from hemagglutinin__InfluenzaA__AAA64365
auggccaucauuuaccugauccuccuguucaccgcugugagaggcgaccagauuugcaucggguaucacgccaacaauagcacagagaaggucgauacgauucuugaacggaacguuaccgugacacaugcgaaagacauccuggagaagacccacaauggaaaacucuguaagcugaacggcauucccccucuugaacugggggauugcuccaucgcuggauggcuccugggcaauccggagugugaccgccugcucucugugcccgaauggagcuacaucauggagaaagagaacccuagagaugggcugugcuaucccggauccuuuaaugacuacgaagaacuuaagcaucugcucucuagcgucaagcacuucgaaaaagugaagauucugccuaaagaucgguggacacaacauaccacaaccggcggcucccgcgccugugccguuucugggaaccccagcuuuuucagaaauaugguguggcuuacgaagaaaggauccaacuauccugucgcuaagggcagcuacaauaacaccucuggggagcagaugcugaucauuuggggagugcaccacccgaaugacgagacagaacagcggacccucuaucagaacguuggcacauacguguccgucgggaccagcacgcugaauaagcgcucuacacccgauaucgccaccagaccuaaaguggacggacugggcucccggauggaguuuagcuggacacuccuggauaugugggacaccauuaacuucgaaucuaccggcaaccuuaucgcucccgaguacggguuuaagaucuccaaacgcggaagcuccggcauuaugaagacagaagggacgcugggaaauugcgagaccaaaugucaaacaccucucggcgccaucaacaccacacugcccuuccauaaugugcacccgcuuaccauuggggagugcccuaaguaugucaaaucugaaaagcugguucucgcgacgggacugagaaacgugccccagaucgagagccggggccuguuuggcgccauugcuggguucaucgaaggaggcuggcaggggaugguggauggaugguacggcuaucaucacuccaaugaccaggggagcggcuacgccgcugacaaggagucuacacaaaaagccuuugauggaaucaccaacaaggucaauuccgugauugagaaaaugaacacccaguucgaggcgguugagaaggaauuuagcaaucucgagcgcagacuggaaaaccuuaauaaaaagauggaggacggcuuccuggauguguggacauauaacgccgaacuccugguccuuauggagaaugagcggacccuggacuuccacgauucuaacgugaagaaucucuacaacaaaguucgcaugcagcugagagacaacgugaaggaacuggggaauggauguuuugaguucuaucauaaaugcgaugacgaauguaugaacagcgucaagaauggcacauacgauuacccuaaauaugaggaggaauccaagcucaaccggaaugagaucaagggggugaaacugucuagcaugggaauuuaccagauccuugcuauuuaugccacggucgcuggcucccugagccucgccaucaugauggccgggaucucuuuuuggaugugcuccaacggcagccugcaaugcagaauuuguaucuga

SEQ ID NO: 192078 - RNA, 1689 nt, Artificial Sequence
  derived and/or modified CDS sequence (opt5) from hemagglutinin__InfluenzaA__AAA64366
auggccaucauuuaccugauccuccuguucaccgcugugagaggcgaccagauuugcaucggguaucacgccaacaauagcacagagaaggucgauacgauucuugaacggaacguuaccgugacacaugcgaaagacauccuggagaagacccacaauggaaaacucuguaagcugaacggcauucccccucuugaacugggggauugcuccaucgcuggauggcuccugggcaauccggagugugaccgccugcucucugugcccgaauggagcuacaucauggagaaagagaacccuagagaugggcugugcuaucccggauccuuuaaugacuacgaagaacuuaagcaucugcucucuagcgucaagcacuucgaaaaagugaagauucugccuaaagaucgguggacacaacauaccacaaccggcggcucccgcgccugugccguuucugggaaccccagcuuuuucagaaauaugguguggcuuacgaagaaagaguccaacuauccugucgcuaagggaagcuacaauaacaccucuggcgagcagaugcugaucauuuggggagugcaccacccgaaugacgaaacagagcagcggacccucuaucagaacguugggacauacguguccgucggcaccagcacgcugaauaagcgcucuacacccgauaucgccaccagaccuaaagugaacgggcugggaucccggauggaauuuagcuggacacuccuggacaugugggauaccauuaacuucgagucuaccggcaaucuuaucgcucccgaauacggcuuuaagaucuccaaacgcgggagcuccggaauuaugaagacagagggcacgcuggagaacugcgaaaccaaaugucaaacaccucucggggccaucaauaccacacugcccuuccauaacgugcacccgcuuaccauuggagagugcccuaaguaugucaaaucugaaaagcugguucucgcgacgggccugagaaaugugccccagaucgagagccgggggcuguuuggagccauugcuggcuucaucgaaggcggguggcagggaaugguggacggcugguacggguaucaucacuccaacgaucagggaagcggcuacgccgcugacaaggagucuacacaaaaagccuuugacgggaucaccaauaaggucaacuccgugauugagaaaaugaauacccaguucgaagcgguuggcaaggaguuuagcaaccucgaacgcagacuggagaaucuuaacaaaaagauggaagauggauuccuggacguguggacauauaaugccgagcuccugguccuuauggagaacgaacggacccuggauuuccacgacucuaaugugaagaaccucuacgauaaaguucgcaugcagcugagagacaacgugaaggagcugggcaauggguguuuugaguucuaucauaaaugcgaugacgaguguaugaacagcgucaagaauggaacauacgauuacccuaaauaugaggaagaguccaagcucaaccggaaugaaaucaagggcgugaaacugucuagcaugggggucuaccagauucuugcuaucuaugccacgguggcuggaucccugagccucgccauuaugauggccggcaucucuuuuuggaugugcuccaacgggagccugcaaugcagaaucuguauuuga

SEQ ID NO: 192079 - RNA, 1701 nt, Artificial Sequence
  derived and/or modified CDS sequence (opt5) from hemagglutinin__InfluenzaA__AAA85781
augaagaccaucauugcccugagcuacaucuucugccucguguuugcucaggaccugcccggcaacgauaauuccacagccacgcuuugucuggggcaccaugcggucccuaacggaacccucguuaaaacaauuaccaaugaccaaaucgaggugacaaacgcuaccgaacuggugcagucuagcuccacaggcaagauuugcgauaauccgcacagaauccuugacgggaucaacuguacccugauugaugcccuccugggagacccccauugcgauggcuuccagaaugagaaaugggaccuguuugucgaacggucuaaggccuucagcaacuguuauccuuacgaugugcccgacuaugcuucccuccgcucucugguugccagcuccgggacgcuugaguuuaucaaugaaggauucaacuggaccggcgugacacagaauggcgggagcucugcuugcaaaagaggaccugauaacggcuuuuucucccggcugaauuggcucuacaagagcgggucuaccuaucccguccaaaacgugacaaugccuaauaacgacaacuccgauaagcuguacauuuggggaguucaccauccgagcaccgacaaagagcagacgaaucuuuaugugcaggccucuggcaaggucacaguguccaccaaacgcagccagcaaacagugauccccaacgucggguccagaccuuggguucggggacugucuagccgcguguccauuuacuggaccaucgugaagcccggcgacauucucgucaucaauagcaacggcaaucugaucgcgccuagaggguacuauaaaaugcggaccggaaagucuuccauuaugcgcagcgaugcccccaucggcacauguucuagcgagugcauuacgccgaacggguccaucccuaaugacaagcccuuucagaacgugaauaaaauuaccuacggagcuuguccuaaguauguuaaacagaacacacugaagcucgccaccggcaugagaaaugugcccgaaaaacagauccgggggaucuucggagcuauugccggcuuuaucgagaacggcugggaagggaugauugauggaugguacggcuuccgccaccaaaauucugaggggacaggacaggcggccgaccuuaagagcacccaggcugccaucgaucaaauuaacggcaaacugaauagagucaucgagaagacgaacgaaaaguuucaccagaucgagaaagaguucuccgaaguggaagggcggauucaggaccuggagaaguauguugaggauacaaaaaucgaccucuggagcuacaacgcugaacugcuuguggcccuggagaaucagcauaccauugaucucaccgacucugaaaugaacaagcuguucgagaaaacacgcagacaacugcgggaaaaugccgaggauaugggcaacggaugcuuuaagaucuaucacaagugugacaaucccugcauuggcuccaucagaaacgggaccuacgaccaugaugucuaccgcgacgaggcucucaauaaccgguuccagauuaaaggaguggaacuuaagagcggcuauaaagauuggauccuguggaucucuuuugcgauuuccugcuuccugcucugugucgugcugcuuggguuuaucaugugggccugccagaagggaaauauuagauguaacaucugcauuuga

SEQ ID NO: 192080 - RNA, 1707 nt, Artificial Sequence
  derived and/or modified CDS sequence (opt5) from hemagglutinin__InfluenzaA__AAC14418
auggagagaaucgugcugcuccuggccaccgucagccuuguuaaguccgaccagauuugcaucggcuaccacgcuaacaauucuacagaacaaguggauacgauuauggagaaaaacgugaccgucacacaugcccaggacauccuggaacggacccacaaugggaagcucugugaucugaacggagugaaaccccuuauucugcgcgacugcagcguugcgggcuggcuccuggggaauccuaugugugaugaguucaucaacgugccggaaugguccuauaucgucgagaaggcuucucccgccaaugaccugugcuacccuggaaacuuuaaugauuaugaggaacucaaacaucugcuuagcagaauuaaccacuucgagaagauccagauuauccccaaguccucuuggagcaaucaugacgccuccagcggcgugucuuccgcuuguccuuaccuggggcggagcuccuuuuuccgcaacguuguguggcucauuaaaaagaacucuacauaucccaccaucaaaagaagcuacaauaauacaaaccaggaagaucugcuuguccuguggggcauucaccacccuaacgacgccgcugagcaaaccaagcucuaucagaauccgacgaccuacaucucugugggaacauccacccugaaccagcggcuggugcccgagaucgccacacgcccuaaagucaauggccagagcgggagaauggaauuuuucuggaccauucucaagcccaacgaugcgaucaauuuugaguccaacggaaauuucauugccccugaauacgcuuauaagaucguuaaaaagggcgacucuacgauuaugaaaagcgagcuggaauacgggaacugcaauacaaagugucaaacccccaugggagccaucaacuccagcaugccguuucauaauauccacccucuuacaauuggcgagugccccaaauaugugaagucuaaccggcuggugcucgcuaccgggcugcgcaaugccccucagagagagcggcgccggaaaaagagaggacuuuucggcgcgaucgccggcuuuauugaagggggauggcagggcauggucgaugggugguacggauaucaucacuccaacgagcagggcagcggguacgcugccgaccaagaaucuacccagaaggcuaucgacggagugacaaauaaaguuaacagcauuaucaacaagaugaauacgcaguucgaggccgugggccgcgaauuuaacaaucuggagagacggaucgagaaccucaauaaaaagauggaagauggcuuccuggacgucuggaccuauaacgccgagcugcucgugcugauggaaaaugagagaacacuugauuuccacgacuccaacguuaaaaaucuguacgauaaggugcgccuccaacugcgggacaacgcuaaggaacuugggaauggauguuuugaguucuaccauaaaugcgauaacgaguguauggaaucugucaagaauggcaccuaugacuacccccaguauagcgaggaagcgagacugaaccgcgaggagauuuccggggugaaacucgaaagcaugggaacauaccagauccugucuauuuauuccaccgucgccagcucucuggcucucgccaucaugguggccggccugucccuuuggaugugcagcaaugggucccugcagugccggauuuguaucuga

SEQ ID NO: 192081 - RNA, 1707 nt, Artificial Sequence
  derived and/or modified CDS sequence (opt5) from hemagglutinin__InfluenzaA__AAC40508
auggagagaaccgugcugcuccuggccacagucagccuuguuaaguccgaccagaucugcauuggcuaccacgcuaacaauucuacggaacaaguggauaccaucauggagaaaaacgugacagucacccaugcccaggacauucuggaacggacacacaaugggaagcucugugaucugaacggagugaaaccccuuauccugcgcgacugcagcguugcgggcuggcuccuggggaauccuaugugugaugaguucauuaacgugccggaaugguccuauaucgucgagaaggcuucucccgccaaugaccugugcuacccuggaaacuuuaaugauuaugaggaacucaaacaucugcuuagcagaaucaaccacuucgagaagauucagaucauucccaaguccucuuggagcaaucaugacgccuccagcggcgugucuuccgcuuguccuuaccuggggcggagcuccuuuuuccgcaacguuguguggcucaucaaaaagaacucugccuaucccaccauuaaaagaagcuacaauaauacaaaccaggaagaucugcuuguccuguggggagugcaccacccuaacgacgcugccgagcaaaccaagcucuaucagaauccgacgaccuacaucucugugggcacauccacccugaaccagcggcugguccccgagauugcgacacgcccuaaaguuaauggccagagcgggagaauggaauuuuucuggaccauccucaagcccaacgaugccaucaauuuugaguccaacggaaauuucauugcuccugaauacgccuauaagaucgugaaaaagggcgacucuacgauuaugaaaagcgagcuggaauacgggaacugcaauacaaagugucaaacccccaugggagcuaucaacuccagcaugccguuucauaauauucacccucuuacaaucggcgagugccccaaauaugugaagucuaaccggcugguccucgccaccgggcugcgcaauaccccucagagagagcggcgccggaaaaagagaggacuuuucggcgcgaucgccggcuuuauugaagggggauggcagggcaugguggaugggugguacggauaucaucacuccaacgagcagggcagcuguuacucugcugacaaggaaagcacacaaaaagccaucgacgggguuacgaauaaggugaacuccauuaucaacaaaaugaauacccaguucgaggcugucggacgcgaauuuaacaaucuggagagacggauugagaaccucaauaagaaaauggaagauggcuuccuggacguguggacauauaacgccgagcugcucguucugauggaaaaugagagaacccuugauuuccacgacucuaacgugaagaaucuguacgauaagguccgccuccagcugcgggacaacgccaaagaacuuggcaaugggugcuuugaguucuaccauaagugugauaacgagugcauggaaagcgugaaaaauggaacauaugacuacccccaauauuccgaggaagcuagacugaaccgcgaggagaucagcggcgucaagcucgaaucuauggggaccuaccagauccuguccauuuauagcacgguggcgucuucccuggcccucgcuaucaugguugccggacugagccuuuggaugugcuccaauggcucucugcagugucggauuugcaucuga

SEQ ID NO: 192082 - RNA, 1701 nt, Artificial Sequence
  derived and/or modified CDS sequence (opt5) from hemagglutinin__InfluenzaA__AAF87274
augaaggccauccuggugguccuccuguacaccuucacaacggcuaacgccgacacccuuugcauuggcuaucacgcgaauaacagcacagauaccguugacacagugcuggagaaaaaugugaccgucacacauuccgugaaccuccuggaaaauagacacaacgggaaacuuuguaagcugaagggaguugcuccccuccaucugggcaaaugcaauaucgccggguggcugcucggaaacccugagugugaacugcuuuuuaccgccucuagcugguccuacauuguggagacgucuaauagcgauaacggaaccugcuauccgggggacuucaucaauuacgaagaacugcgggagcagcucuccucugucagcuccuuugaacgcuucgagauuuuucccaaggcuaacagcuggccuaaucacgaaacaaacagaggagugaccucugccugucccuaugcuggcgccaauuccuucuaccggaaccugaucuggcuuguuaagaaaggcaacagcuauccuaagcugucuaaauccuacaucaauaacaaggggaaagaggugcucguccuguggggcauucaucaucccccuacaagcaaugaucaacagucucuguaccagaacgcggacgccuauguguuugugggcuccagcaaguacaauaagaaauucaugccggagaucgcuacccgccccaaggucagagggcaggccggacggaugaacuauuacuggacgcucauugaaccuggcgauacaaucaccuuugaggcuacagggaaucugguugcgccccgcuaugccuucgccauggaaagaggauccggcucuggcauuaucauuagcgacaccccugugcacgauugcaacgcuaccugucaaacacccaaaggggccaucaauacgaaccuuccguuucagaauauccacccugugaccauuggagagugccccaaguacgucaaauccacacggcugcgcauggcuaccggccucagaaacaucccuagcauucagucucgggggcuguucggagccaucgccggcuuuauugaagggggauggacaggcaugaucgacggcugguauggguaccaccaucagaaugagcaaggauccggcuacgcugcggaucgcaagagcacccagaacgccaucgacgggauuacgaauaaagugaacucuguuaucgagaagaugaacacacaguucaccgcugugggaaaggaguucaaucaccuugagaaaagaauuaagaaccugaauaaaaaggucgaugacggcuuucucgacguguggaccuauaacgccgaacugcugguucuccuggagaaugaacggacacuugauuaccacgacagcaacgugaaaaaucuguaugagaagguccgcucccagcucagaaacaaugccaaggagaucgggaacggcuguuucgaauuuuaccauaaaugcgaugacaccuguauggagucuauuaagaauggaacauaugauuaccccaaauauagcgaagaggcuaagcugacgcgggaagagaucgacggcgugaaacuugaguccaccagaaucuaccaaauucuggccaucuacagcacaauugcgucuucccucguccugcuggugagccucggggcuaucucuuucuggaugugcuccaacggaagccugcagugccgcauuuguaucuga

SEQ ID NO: 192083 - RNA, 1701 nt, Artificial Sequence
  derived and/or modified CDS sequence (opt5) from hemagglutinin__InfluenzaA__AAF87275
augaaggccauccuggugguccuccuguacaccuucacaacggcuaacgccgacacccuuugcauuggcuaucacgcgaauaacagcacagauaccguugacacagugcuggagaagaaugugaccgucacacauuccgugaaccuccuggaaaauagacacaacgggaaacuuuguaagcugaagggaguugcuccccuccaucugggcaaaugcaauaucgccggguggcugcucggaaacccugagugugaacugcuuuuuaccgccucuagcugguccuacauuguggagacgucuaauagcgauaacggaaccugcuauccgggggacuucaucaauuacgaagaacugcgggagcagcucuccucugucagcuccuuugaacgcuucgagauuuuucccaaggcuaacagcuggccuaaucacgaaacaaacagaggagugaccucugccugucccuaugcuggcgccaauuccuucuaccggaaccugaucuggcuuguuaagaaaggcaacagcuauccuaagcugucuaaauccuacaucaauaacaaggggaaagaggugcucguccuguggggcauucaucaucccccuacaagcaaugaucaacagucucuguaccagaacgcggacgccuauguguuugugggcuccagcaaguacaauaagaaauucaugccggagaucgcuacccgccccaaggucagagggcaggccggacggaugaacuauuacuggacgcucauugaaccuggcgauacaaucaccuuugaggcuacagggaaucugguugcgccccgcuaugccuucgccauggaaagaggauccggcucuggcauuaucauuagcgacaccccugugcacgauugcaacgcuaccugucaaacacccaaaggggccaucaauacgaaccuuccguuucagaauauccacccugugaccauuggagagugccccaaguacgucaaauccacacggcugcgcauggcuaccggccucagaaacaucccuagcauucagucucgggggcuguucggagccaucgccggcuuuauugaagggggauggacaggcaugaucgacggcugguauggguaccaccaucagaaugagcaaggauccggcuacgcugcggaucgcaagagcacccagaacgccaucgacgggauuacgaauaaagugaacucuguuaucgagaagaugaacacacaguucaccgcugugggaaaggaguucaaucaccuugagaaaagaauugaaaaccugaauaagaaagucgaugacggcuuucucgacguguggaccuauaacgccgagcugcugguucuccuggaaaaugagcggacacuugauuaccacgacagcaacgugaagaaucuguaugagaaaguccgcucccagcucagaaacaaugccaaggaaaucgggaacggcuguuucgaguuuuaccauaagugcgaugacaccuguauggaaucuauuaaaaauggaacauaugauuaccccaaguauagcgaggaagcuaaacugacgcgggaggagaucgacggcgugaaacuugaauccaccagaaucuaccaaauucuggccaucuacagcacaauugcgucuucccucguccugcuggugagccucggggcuaucucuuucuggaugugcuccaacggaagccugcagugccgcauuuguaucuga

SEQ ID NO: 192084 - RNA, 1701 nt, Artificial Sequence
  derived and/or modified CDS sequence (opt5) from hemagglutinin__InfluenzaA__AAF87277
augaaggccauccugcucgugcugcuuuacaccuucacagcugccaacgcggacacgcugugcauuggcuaucacgcuaauaacagcaccgauacagucgacaccguucucgagaagaaugugacagugacccauuccgucaaccugcuugaagauagacacaaugggaagcuguguaaacuccggggaaucgcuccccugcaucugggcaagugcaacauugccggguggcuccugggaaauccugagugugaacuucuguuuacagccucuagcugguccuacaucguggagaccucuaacagcgacaauggcacgugcuauccgggggauuucauuaacuacgaagaacuccgcgagcagcuguccucuguuagcuccuuugaaagauucgagaucuuucccaaagccagcucuuggccugaccacgaaaccaaucggggagugacagcugccugucccuaugcgggcgccaacuccuucuaccgcaaucuuaucuggcuggucaagaagggcaacagcuauccuaaacucucuaaguccuacauuaauaacaaagagaaggaggugcugguucugugggggauccaucaucccccuaccagcacagaucaacagucucucuaccagaacgcugacgccuauguguuugucggauccagcaaauacaauaagaaguucaaaccggaaauugcuuccagacccaaggugcggggccaggccgggcgcauggauuauuacuggacccugguggagccuggagacacgaucacauuugaagcgaccggcaaccuugucguucccagauaugccuucgcuaugaaacgggggucuggaagcggcauuaucauuuccgauacaccugugcacgacugcaauaccaccugucaaacacccaagggcgccaucaacacgagccugccguuucagaauauccacccugugaccauuggggagugccccaaauacgucaagucuacaaaacuccgcauggcuaccggacugagaaacaucccuuccauucagagccggggccuuuucggggccaucgccggauuuauugaaggcggguggacaggaaugaucgauggcugguauggcuaccaccaucagaaugagcaagggucuggauacgcugcggaccgcaagagcacccagaacgccaucgacggcgugacgaauaagguuaacuccgugauugagaaaaugaauacacaguucaccgcugucgggaaggaguucaaccaccuggagaaaagaaucgaaaaucucaacaagaaaguggaugacggauuucuggauguuuggaccuauaaugccgagcugcucgugcugcuugaaaacgagcggacacuggacuaccacgauucuaacgucaagaaucucuaugagaaggugcgcagccagcugaaaaacaaugccaaggaaauuggcaacggguguuucgaguuuuaccauaaaugcgacgauaccuguauggaauccgucaagaauggcacauaugacuaccccaaauauagcgaggaaucuaaacuuaacagagaggagaucgauggagugaagcuggaauccacgcggauuuaccaaauccucgcuaucuacagcaccguugccucuucccugauucugcucgugagccugggcgcgaucuccuucuggaugugcucuaaugggagccuucagugcagaauuuguaucuga

SEQ ID NO: 192085 - RNA, 1701 nt, Artificial Sequence
  derived and/or modified CDS sequence (opt5) from hemagglutinin__InfluenzaA__AAF87278
augaaggccauccugcucgugcugcuuuacaccuucacagcugccaacgcggacacgcugugcauuggcuaucacgcuaauaacagcaccgauacagucgacaccguucucgagaagaaugugacagugacccauuccgucaaccugcuugaagauagacacaaugggaagcuguguaaacuccggggaaucgcuccccugcaucugggcaagugcaacauugccggguggcuccugggaaauccugagugugaacuucuguuuacagccucuagcugguccuacaucguggagaccucuaacagcgacaauggcacgugcuauccgggggauuucauuaacuacgaagaacuccgcgagcagcuguccucuguuagcuccuuugaaagauucgagaucuuucccaaagccagcucuuggccuaaucacgaaaccaaccggggagugacagcugccugucccuaugcgggcgccaauuccuucuaccgcaaccuuaucuggcuggucaagaagggcaauagcuauccuaaacucucuaaguccuacauuaacaacaaagagaaggaggugcugguucugugggggauccaucaucccccuaccagcacagaccaacagucucucuaccagaaugcugaugccuauguguuugucggauccagcaaauacaacaagaaguucaaaccggaaauugcuuccagacccaaggugcggggccaggccgggcgcauggacuauuacuggacccugguggagccuggagauacgaucacauuugaagcgaccggcaaucuugucguucccagauaugccuucgcuaugaaacgggggucuggaagcggcauuaucauuuccgacacaccugugcacgauugcaacaccaccugucaaacacccaagggcgccaucaauacgagccugccguuucagaacauccacccugugaccauuggggagugccccaaauacgucaagucuacaaaacuccgcauggcuaccggacugagaaauaucccuuccauucagagccggggccuuuucggggccaucgccggauuuauugaaggcggguggacaggaaugaucgacggcugguauggcuaccaccaucagaacgagcaagggucuggauacgcugcggaucgcaagagcacccagaaugccaucgacggcgugacgaacaagguuaauuccgugauugagaaaaugaacacacaguucaccgcugucgggaaggaguucaaucaccuggagaaaagaaucgaaaaccucaauaagaaaguggacgauggauuucuggacguuuggaccuauaacgccgagcugcucgugcugcuugaaaacgagcgggcccuggauuaccacgacucuaaugucaagaaccucuaugagaaggugcgcagccagcugaaaaauaacgcuaaggaaauuggcaauggguguuucgaguuuuaccauaaaugcgaugacacauguauggaauccgucaagaacggcaccuaugauuaccccaaauauagcgaggaaucuaaacuuaauagagaggagaucgacggagugaagcuggaauccacacggauuuaccaaauccucgccaucuacagcacgguugcgucuucccugauucugcucgugagccugggcgcuaucuccuucuggaugugcucuaacgggagccuucagugcagaauuuguaucuga

SEQ ID NO: 192086 - RNA, 1701 nt, Artificial Sequence
  derived and/or modified CDS sequence (opt5) from hemagglutinin__InfluenzaA__AAF87279
augaaggccauccugcucgugcugcuuuacaccuucacagcugccaacgcggacacgcugugcauuggcuaucacgcuaauaacagcaccgauacagucgacaccguucucgagaagaaugugacagugacccauuccgucaaccugcuugaagauagacacaaugggaagcuguguaaacuccggggaaucgcuccccugcaucugggcaagugcaacauugccggguggcuccugggaaauccugagugugaacuucuguuuacagccucuagcugguccuacaucguggagaccucuaacagcgacaauggcacgugcuauccgggggauuucauuaacuacgaagaacuccgcgagcagcuguccucuguuagcuccuuugaaagauucgagaucuuucccaaagccagcucuuggccuaaucacgaaaccaaccggggagugacagcugccugucccuaugcgggcgccaauuccuucuaccgcaaccuuaucuggcuggucaagaagggcaauagcuauccuaaacucucuaaguccuacauuaacaacaaagagaaggaggugcugguucugugggggauccaucaucccccuaccagcacagaccaacagucucucuaccagaaugcugaugccuauguguuugucggauccagcaaauacaacaagaaguucaaaccggaaauugcuuccagacccaaggugcggggccaggccgggcgcauggacuauuacuggacccugguggagccuggagauacgaucacauuugaagcgaccggcaaucuugucguucccagauaugccuucgcuaugaaacgggggucuggaagcggcauuaucauuuccgacacaccugugcacgauugcaacaccaccugucaaacacccaagggcgccaucaauacgagccugccguuucagaacauccacccugugaccauuggggagugccccaaauacgucaagucuacaaaacuccgcauggcuaccggacugagaaauaucccuuccauucagagccggggccuuuucggggccaucgccggauuuauugaaggcggguggacaggaaugaucgacggcugguauggcuaccaccaucagaacgagcaagggucuggauacgcugcggaucgcaagagcacccagaaugccaucgacggcgugacgaacaagguuaauuccgugauugagaaaaugaacacacaguucaccgcugucgggaaggaguucaaucaccuggagaaaagaaucgaaaaccucaauaagaaaguggacgauggauuucuggacguuuggaccuauaacgccgagcugcucgugcugcuugaaaacgagcggacacuggauuaccacgacucuaaugucaagaaccucuaugagaaggugcgcagccagcugaaaaauaacgccaaggaaauuggcaauggguguuucgaguuuuaccauaaaugcgaugacaccuguauggaauccgucaagaacggcacauaugauuaccccaaauauagcgaggaaucuaaacuuaauagagaggagaucgacggagugaagcuggaauccacgcggauuuaccaaauccucgcuaucuacagcaccguugccucuucccugauucugcucgugagccugggcgcgaucuccuucuggaugugcucuaacgggagccuucagugcagaauuuguaucuga

SEQ ID NO: 192087 - RNA, 1701 nt, Artificial Sequence
  derived and/or modified CDS sequence (opt5) from hemagglutinin__InfluenzaA__AAF87281
augaaggccauccuggugguccuccuguacaccuucacaacggcuaacgccgacacccuuugcauuggcuaucacgcgaauaacagcacagauaccguugacacagugcuggagaaaaaugugaccgucacacauuccgugaaccuccuggaagauagacacaaugggaaacuuuguaagcugaagggaaucgcuccccuccaucugggcaaaugcaacauugccggguggcugcucggaaauccugagugugaacugcuuuuuaccgccucuagcugguccuacaucguugagacgucuaacagcgacaaugggaccugcuauccgggcgauuucauuaacuacgaggagcugcgggagcagcucuccucugugagcuccuuugaacgcuucgagaucuuucccaaggcuagcucuuggccuaaucacgaaacaaacagaggagucaccuccgccugucccuaugcuggcgccaauagcuucuaccggaaccugaucuggcuugugaagaaaggcaauucuuauccuaagcuguccaaaagcuacauuaacaacaaggggaaaaagguucucgugcuguggggaauccaucaucccccuacaucuaccgaccaacagucccuguaccagaaugcggaugccuaugucuuugugggcagcuccaaguacaacaaaaaguucaugccggagauugcuacgcgccccaaagugagagggcaggccggacggaugaauuauuacuggacacucaucgagccuggcgacaccauuacauuugaagcuaccgggaaccuggucguuccccgcuaugccuucgcgauggagagaggauacggcucuggcaucauuaucagcgauaccccugugcacgacugcaauacaacgugucaaacccccaagggggccaucaacacaucccuuccguuucagaauauucacccugugaccaucggagaaugccccaaauaugucaagagcacaaaacugcggauggcuaccggccuccgcaacauuccuucuauccaguccagagggcuguucggagccauugcuggcuuuaucgaagggggauggacgggcaugaucgauggcugguacggguaccaccaucagaaugaacaaggaagcggcuaugccgccgaccggaagucuacacagaacgcuauugaugggaucaccaauaaggugaacagcguuauugagaaaaugaauacccaguucacagcggugggaaaggaguucaaccaccuugaaaaacgcaucgagaaucugaacaagaaagucgacgacggcuuucucgauguguggaccuacaacgccgaacugcugguucuccuggagaaugaaagaacacuugacuaucacgauuccaacgugaagaaucuguacgagaaggucaaaucucagcucaagaacaaugcuaaagagauugggaacggcuguuucgaauuuuaucauaagugcgacgauacguguauggagagcgugaaaaauggaaccuacgacuaucccaaguacuccgaagaggccaagcugaaccgggaagagaucgauggcgucaaacuugagagcacacgcaucuaccaaauucuggccaucuauucuaccauugcuuccagccucgugcugcugguuucucucggggccaucuccuucuggaugugcagcaauggaucccugcagugcagaauuuguaucuga

SEQ ID NO: 192088 - RNA, 1701 nt, Artificial Sequence; identical to SEQ ID NO: 192086
  derived and/or modified CDS sequence (opt5) from hemagglutinin__InfluenzaA__AAF87282

SEQ ID NO: 192089 - RNA, 1701 nt, Artificial Sequence
  derived and/or modified CDS sequence (opt5) from hemagglutinin__InfluenzaA__AAF87283
augaaggccauccuggugguccuccuguacgcuuucaccacagccaacgcggacacgcuuugcauuggcuaucacgcuaauaacagcaccgauacaguugacaccgugcuggagaaaaaugugacagucacccauuccgugaaccuccuggaagauagacacaaugggaaacuuuguaagcugaagggaguugcuccccuccaucugggcaaaugcaacaucgccggguggcugcucggaaauccugagugugaacugcuuuuuacagccucuagcugguccuacauuguggagaccucuaacagcgacaauggcacgugcuauccgggggauuucaucaacuacgaagaacugcgggagcagcucuccucugucagcuccuuugaacgcuucgagauuuuucccaaggccagcucuuggccuaaucacgaaaccaacagaggagugacauccgcuugucccuauagcggcgccaauucuuucuaccggaaccugaucuggcuuguuaagaaaggcaauuccuauccuaagcugagcaaaucuuacaucaacaacaaggggaaagaggugcucguccuguggggcauucaucaucccccuaccuccacagaccaacagagccuguaccagaaugcggaugccuauguguuugugggauccucuaaguacaacaagaaauucaugccggagaucgcuacccgccccaaggucagagggcaggccggacggaugaauuauuacuggacgcucauugaaccuggcgacacaaucaccuuugaggcuacagggaaccugguugcgccccgcuaugccuucgccauggaaagaggaagcggcuccggcauuaucauuagcgauaccccuguguacgacugcaauaccgcuugucaaacacccaaaggggccaucaacacgucucuuccguuucagaauauccacccugugaccauuggagagugccccaaguaugucaaauccacaaagcugcggauggcuaccggccuccgcaacaucccuagcauucagucuagagggcuguucggagccaucgccggcuuuauugaagggggauggacaggcaugaucgauggcugguacggguaccaccaccagaaugagcaaggaagcggcuaugcucccgaccggaaauccacccagaacgcgaucgaugggauuacgaauaaggugaacucuguuaucgagaagaugaauacacaguucaccgccgugggaaaagaguucaaccaucuugagaagcgcauugaaaaucugaacaaaaaggucgacgacggcuuucucaacguguggaccuacaaugcugagcugcugguucuccuggaaaacgagagaacacuugauuaucacgacagcaaugugaaaaaccuguacgagaagguccggucccagcucaagaauaacgccaaagaaaucgggaauggcuguuucgaguuuuaucacaagugcgaugacaccuguauggaaagcgugaaaaacggaacauacgauuaucccaaguacucugaggaagcccgccugaauagagaggagauugacggcgucaaacuugaauccacgcggaucuaccaaauccuggcuauuuauagcaccaucgccucuucccucgugcugcugguuagccucggggcgauuuccuucuggaugugcucuaacggaagccugcagugcagaaucuguauuuga

SEQ ID NO: 192090 - RNA, 1701 nt, Artificial Sequence
  derived and/or modified CDS sequence (opt5) from hemagglutinin__InfluenzaA__AAF87284
augaaggccauccuggugguccuccuguacgcuuucaccacagccaacgcggacacgcuuugcauuggcuaucacgcuaauaacagcaccgauacaguugacaccgugcuggagaaaaaugugacagucacccauuccgugaaccuccuggaagauagacacaaugggaagcucuguaaacugaagggaguugcuccccuccaucugggcaaaugcaacaucgccggguggcugcucggaaauccugagugugaacugcuuuuuacagccucuagcugguccuacauuguggagaccucuaacagcgacaauggcacgugcuauccgggggauuucaucaacuacgaagaacugcgggagcagcucuccucugucagcuccuuugaacgcuucgagauuuuucccaaggccagcucuuggccuaaucacgaaaccaacagaggagugacauccgcuugucugcuuuucuggagcaagcaacugcuccagaaacugaauauggccggcaagaaaggcaacucuuaucccaagcuguccaaaagcuacaucaauaacaaggggaaggagguucucgugcuguggggaauccaucacccucccaccucuacagaccagcagucccuuuaucaaaacgcggaugccuacgucuuugugggcagcuccaaauacaauaagaaauucaugccugagauugcuacccggccgaaggugcgcgggcaggccggaagaaugaacuauuacuggacgcugaucgaacccggcgacacaauuaccuuugaggcuacagggaaucucgucgccccucgguaugcguucgccauggaacgcggaucuggcagcggcaucauuaucuccgauacccccguuuacgacugcaacaccgcuugucagacaccuaaaggggccauuaauacgagccugcccuuucagaacauccacccggugaccaucggagagugcccuaaguaugugaaaucuacaaaacuuagaauggcuaccggccugcggaauauucccuccauccaaagccgcgggcuuuucggagccauugccggcuuuaucgaagggggauggacaggcaugauugauggcugguacggguaucaucaccagaacgagcagggaucuggcuacgcugcggacagaaagagcacccagaaugccaucgaugggaucacgaacaaggucaauuccgugauugagaagaugaacacacaauucaccgcuguuggaaaagaguucaaucaucuggagaagcggaucgaaaaccugaauaaaaagguggacgacggcuuucucaacgucuggaccuacaacgccgagcugcuugugcugcucgaaaaugagcgcacacuggauuaucacgacucuaacguuaagaaucuuuacgagaaagugagaagccagcugaagaacaaugccaaagaaauugggaacggcuguuucgaguuuuaucacaagugcgaugacaccuguauggaauccgucaaaaauggaacauacgauuauccuaaguacagcgaggaagcucggcucaaccgcgaggagaucgacggcgugaagcuggaaucuacgagaauuuaucagauccuggccaucuacuccaccauugcgagcucucucguccugcuugugucccugggggcuaucagcuucuggaugugcuccaauggaucucuccaaugccggauuuguaucuga

SEQ ID NO: 192091 - RNA, 1701 nt, Artificial Sequence
  derived and/or modified CDS sequence (opt5) from hemagglutinin__InfluenzaA__AAG01749
augagcaccaucauugcccuguccuacauccucugccugguguucgcucagaaacuucccggcaacgacaauucuacagccacgcugugucucgggcaccaugcggucccuaacggaacccugguuaaaacaauuaccaaugaucaaaucgaggugacaaacgcuaccgaacuugugcagagcuccucuacaggcagaauuugcgacagcccgcaccggauccuggaugggaagaauuguacccucaucgacgcccugcugggagauccccauugcgacggcuuucagaacaaagagugggaucucuucgucgaacgcuccaaggccuauucuaauuguuacccuuaugacgugcccgauuacgcuagccugagaucccuuguugccagcucugggacgcuggaguuuaccaacgaaggauucaauuggacaggcguggcucaggacggcaccuccuaugccugcaaacgggggagcgucaaguccuuuuucucucgccucaacuggcugcacaaacuugaguacaaguauccugcgcugaaugugacaaugcccaacaaugauaaguuugacaaacucuacauuuggggaguucaucacccuagcaccgauucugaccaaacgucccuguacgugcaggccagcggcagagucacaguguccaccaagcggucucagcagacagugaucccgaacauugggagccgccccugggucagaggaaucuccagccggauuucuaucuauuggaccauuguuaaaccuggcgacauccugcucaucaauuccaccgggaaccugauugcuccccgcggauacuucaagaucagaagcggcaagucuagcauuaugcgguccgaugccccuaucgacaacuguaauucugagugcauuacacccaacggcagcaucccgaaugaaaaaccuuuucaaaacgugaaucgcaucacguauggggcuugucccagauacgugaagcagaacacccuuaaacuggccacaggaaugcggaaugucccugagaagcagacccgcggcauuuucggggcgaucgccggauuuauugaaaacggcugggaggggaugguggauggaugguauggcuucagacaccaaaauuccgagggcacagggcaggcugccgaccucaaaagcacccaggcugccaucaaccagauuaauggaaagcugaaccggcuuaucgaaaagacgaaugagaaguuucaucaaaucgaaaaggaguucucugaaguugagggccgcauucaggaucuggagaaauacguggaagacacaaagaucgaucucugguccuauaacgccgagcugcuggucgcucucgaaaaucagcacaccauugaccugaccgauagcgagaugaacaaacuuuucgaaagaacacggaagcagcugagagagaacgcggaggacauggggaauggaugcuuuaaaaucuaccauaagugugauaacgccugcauuggcucuauccgcaaugggaccuacgaccacgacguguaucgggaugaagcucucaacaauagauuccaaauuaagggcguugagcugaaauccggauacaaggacuggauccuuuggaucagcuuugccauuuccugcuuccugcucugugugguccugcugggcuuuaucaugugggccugccagaaagggaacauucgcuguaauaucugcauuuga

SEQ ID NO: 192092 - RNA, 1701 nt, Artificial Sequence
  derived and/or modified CDS sequence (opt5) from hemagglutinin__InfluenzaA__AAG01767
augaacaccaucauugcccugagcuacauccucugccugguguucgcucagaagcugcccggcaaugacaacuccacagccacgcugugucucgggcaccaugcggucccuaauggaacccugguuaaaacaauuaccaacgaucaaaucgaggugacaaaugcuaccgaacuugugcagucuagcuccacaggcagaauuugcgacucuccgcaccggauccuggaugggaagaacuguacccucaucgacgcccugcugggagauccccauugcgacggcuuucagaauaaagagugggaucucuucauugaacgcagcaaggccuauuccaacuguuacccuuaugacguccccgauuacucuagccugagaucccuuguggcuagcucugggacgcuggaguuuaccaaugaagacuucaacuggacaggaguugcccaggauggcggcuccuauagcugcaaacgggagucugugaaguccuuuuucagccgccucaauuggcugcacaaacuugaguacaaguauccugcucugaacgucaccaugcccaauaacgacaaguuugauaaacucuacaucuggggagugcaucacccuucuacagacuccgaacaaaccagccuguacguucaggccauugggagagugacggucuccacaaagucuagccagcagaccgugaucccgaauauuggcucccggcccugggugcgcgggaucagcucuagaauuuccaucuauuggacaaucgucaaaccuggagacauucugcucaucagcucuaccggcaaccugauugcgccccggggguacuucaagauccgcaacggaaagagcuccauuaugagaucugaugccccuaucgacaauuguuauagcgagugcaucacccccaacggcuccauuccgaaugauaaaccuuuucaaaacguuaaucggaucacauacggcgcuugucccaaguaugugaaacagaagacgcuuaaacuggccaccgggaugcgcaacgugccugaaaagcagacaagaggaauuuucggcgcuaucgccggguuuauugagaauggaugggagggcauggucgacgggugguacggauuccggcaccagaacagcgaaggcaccggccaagcggccgaucucaaaucuacacaggcugccaucgaccaggugaaugggaagcugaaccgccuuaucgagaagaccaaugaaaaauuucaucaaauugagaaggaguucuccgaaguugagggaagaauccaggaucuggaaaaauauguggaggacacgaagauugaucucuggagcuacaacgcugaacugcuggucgcccucgagaaucagcacacaaucgaccugaccgauucugaaaugaacaaacuuuucgagaagacccggaagcagcugagagagaaugccgaagacaugggcaacgggugcuuuaaaauuuaccauaagugugacaacgcuugcaucggauccauucgcaauggcacauaugaucacgacguguaccgggaugaggcgcucaacaauagauuccaaaucaaagggguugaacuuaagagcggcuauaaagacuggauccuuuggauuuccuuugccaucucuugcuuccugcucugugugguccugcugggauuuauuaugugggcuugccagaagggcaacauccgcuguaauauuugcaucuga

SEQ ID NO: 192093 - RNA, 1701 nt, Artificial Sequence
  derived and/or modified CDS sequence (opt5) from hemagglutinin__InfluenzaA__AAG01776
augaacaccaucauugcccugagcuacauccucugccugguguucgcucagaagcugcccggcaaugacaacuccacagccacgcugugucucgggcaccaugcggucccuaauggaacccugguuaaaacaauuaccaacgaucaaaucgaggugacaaaugcuaccgaacuugugcagucuagcuccacaggcagaauuugcgacucuccgcaccggauccuggaugggaagaacuguacccucaucgacgcccugcugggagauccccauugcgacggcuuucagaauaaagagugggaucucuucauugaacgcagcaaggccuauuccaacuguuacccuuaugacguccccgauuacucuagccugagaucccuuguggcuagcucugggacgcuggaguuuaccaaugaagacuucaacuggacaggaguugcccaggauggcggcuccuauagcugcaaacgggagucugugaaguccuuuuucagccgccucaauuggcugcacaaacuugaguacaaguauccugcucugaacgucaccaugcccaauaacgacaaguuugauaaacucuacaucuggggagugcaucacccuucuacagacuccgaacaaaccagccuguacguucaggccauugggagagugacggucuccacaaagucuagccagcagaccgugaucccgaauauuggcucccggcccugggugcgcgggaucagcucuagaauuuccaucuauuggacaaucgucaaaccuggagacauucugcucaucagcucuaccggcaaccugauugcgccccggggguacuucaagauccgcaacggaaagagcuccauuaugagaucugaugccccuaucgacaauuguuauagcgagugcaucacccccaacggcuccauuccgaaugauaaaccuuuucaaaacguuaaucggaucacauacggcgcuugucccaaguaugugaaacagaagacgcuuaaacuggccaccgggaugcgcaacgugccugaaaagcagacaagaggaauuuucggcgcuaucgccggguuuauugagaauggaugggagggcauggucgacgggugguacggauuccggcaccagaacagcgaaggcaccggccaagcggccgaucucaaaucuacacaggcugccaucgaccaggugaaugggaagcugaacuggcuuaucgagaagaccaaugaaaaauuucaucaaauugagaaggaguucuccgaaguugagggacgcauccaggaucuggaaaaauauguggaggacacgaagauugaucucuggagcuacaacgcugaacugcuggucgcccucgagaaucagcacacaaucgaccugaccgauucugaaaugaacaaacuuuucgagaagaccagaaagcagcugcgggagaaugccgaagacaugggcaacgggugcuuuaaaauuuaccauaagugugacaacgcuugcaucggauccauuagaaauggcacauaugaucacgacguguaccgcgaugaggcgcucaacaaucgguuccaaaucaaagggguugaacuuaagagcggcuauaaagacuggauccuuuggauuuccuuugccaucucuugcuuccugcucugugugguccugcugggauuuauuaugugggcuugccagaagggcaacaucagauguaauauuugcaucuga

SEQ ID NO: 192094 - RNA, 1701 nt, Artificial Sequence
  derived and/or modified CDS sequence (opt5) from hemagglutinin__InfluenzaA__AAG01785
augaagaccaucauugcccugagcuacauccucugccugguguucgcucagaaacuucccggcaacgacaauuccacagccacgcugugucucgggcaccaugcggucccuaacggaacccugguuaagacaauuaccaaugaucaaaucgaggugacaaacgcuaccgaacuugugcagucuagcuccacaggcagaauuugcgacucuccgcaccggauccuggaugggaaaaauuguacccucaucgacgcccugcugggagauccccauugcgacggcuuucagaacaaggagugggaucucuucauugaacgcagcaaagccuauuccaauuguuacccuuaugacguccccgauuacucuagccugagaucccuuguggcuagcucugggacgcuggaguuuaccaacgaagacuucaauuggacaggaguugcccaggauggcggcuccuauagcugcaagcgggagucugugaaguccuuuuucagccgccucaacuggcugcacaaacuugaguacaaguauccugcucugaaugucaccaugcccaacaaugacaaauuugauaagcucuacaucuggggagugcaucacccuucuacagacuccgaacaaaccagccuguacguucaggccauugggagagugacggucuccacaaaaucuagccagcagaccgugaucccgaacauuggcucccggcccugggugcgcgggaucagcucuagaauuuccaucuauuggacaaucgucaagccuggagacauucugcucaucagcucuaccggcaaucugauugcgccccggggguacuucaagauccgcaacggaaaaagcuccauuaugagaucugaugccccuaucgacaacuguuauagcgagugcaucacccccaauggcuccauuccgaacgauaagccuuuucaaaauguuaaccggaucacauacggcgcuugucccaaauaugugaagcagaaaacgcuuaagcuggccaccgggaugcgcaaugugccugaaaaacagacaagaggaauuuucggcgcuaucgccggguuuauugagaacggaugggagggcauggucgacgggugguacggauuccggcaccagaauagcgaaggcaccggccaagcggccgaucucaagucuacacaggcugccaucgaccaggugaacgggaagcugaaucgccuuaucgagaaaaccaacgaaaaguuucaucaaauugagaaagaguucuccgaaguugagggaagaauccaggaucuggaaaaguauguggaggacacgaaaauugaucucuggagcuacaaugcugaacugcuggucgcccucgagaaccagcacacaaucgaccugaccgauucugaaaugaauaaacuuuucgagaagacccggaagcagcugagagagaacgccgaagacaugggcaaugggugcuuuaagauuuaccauaaaugugacaacgcuugcaucggauccauucgcaacggcacauaugaucacgacguguaccgggaugaggcgcucaauaacagauuccaaaucaaggggguugaacugaaaagcggcuauaaggacuggauccuuuggauuuccuuugccaucucuugcuuccugcucugugugguccugcugggauuuauuaugugggcuugccagaagggcaauauccgcuguaacauuugcaucuga

SEQ ID NO: 192095 - RNA, 1701 nt, Artificial Sequence
  derived and/or modified CDS sequence (opt5) from hemagglutinin__InfluenzaA__AAK52911
augaagaccaucauugcccugagcuacauccucugccugguguucgcucagaaacuucccggcaacgacaauuccacagccacgcugugucucgggcaccaugcggucccuaacggaacccugguuaagacaauuaccaaugaucaaaucgaggugacaaacgcuaccgaacuugugcagucuagcuccacaggcagaauuugcgacucuccgcaccagauccuggaugggaaaaauuguacccucaucgacgcccugcugggagauccccauugcgacggcuuucagaacaaggagugggaucucuucgucgaacggagcacggccuauuccaauuguuacccuuaugacgugcccgauuacgcuucucugcgcagccuuguugccuccagcgggacccuggaguuuacaaaagaaggauucaacuggaccggcguggcucaagacggcacaucuuaugccugcaagagaggguccgucaagagcuuuuucucucggcucaauuggcugcacaaacuugaguacaaguauccugcgcugaacgugaccaugcccaauaacgauaaauuugacaagcucuacauuuggggaguucaucacccuuccacggauagcgaccagacaucucuguacgugcaggccuccggccgcgucaccgugagcacaaaaagaucccagcaaaccgugaucccgaauauugggucucggcccuggguccgcggaguuagcuccagaaucagcauuuauuggaccaucgugaagccuggcgacauucugcucaucaacucuacagggaaucugaucgcuccccggggauacuucaagauucgcuccggcaaaagcucuaucaugagaagcgaugccccuauugacaacuguaacuccgagugcaucacgcccaauggcucuauuccgaacgauaagccuuuucagaaugugaaccggaucaccuauggggcuuguccccgcuacgucaaacagaauacacuuaagcuggccaccggaaugagaaacgugccugaaaaacagacacggggcaucuucggggcgauugccggauuuaucgagaauggcugggaagggaugguugacggaugguauggcuuccgccaccaaaacagcgagggcaccgggcaggcugccgaucucaaguccacgcaggcugccauuaaucaaaucaacggaaaacugaauagacuuauugagaagacaaacgaaaaguuucaucagaucgagaaagaguucagcgaaguggaaggccggauccaggaccuggagaaguacgucgaggauaccaaaauugaccucuggucuuauaaugccgaacugcugguggcucucgagaaccagcacaccaucgaucugacagacuccgaaaugaauaaacuuuucgagagaacccgcaagcaacugcgggaaaacgcggaggauauggggaacggaugcuuuaagauuuaccauaagugugacaaugccugcaucggcagcauuagaaacgggacauacgaccacgauguuuaucgcgacgaggcucucaauaaccgguuccagaucaaaggcguggaacugaagucuggauacaaagauuggauucuuuggaucuccuuugccaucagcugcuuccugcucugugucgugcugcugggcuuuauuaugugggccugccagaaggggaauaucagauguaacauuugcaucuga

SEQ ID NO: 192096 - RNA, 1701 nt, Artificial Sequence
  derived and/or modified CDS sequence (opt5) from hemagglutinin__InfluenzaA__AAK52912
augaagaccaucauugcccugagcuacauccucugccugguguucgcucagaaacuucccggcaacgacaauuccacagccacgcugugucucgggcaccaugcggucccuaacggaacccugguuaagacaauuaccaaugaucaaaucgaggugacaaacgcuaccgaacuugugcagucuagcuccacaggcagaauuugcgacucuccgcaccggauccuggaugggaaaaauuguacccucaucgacgcccugcugggagauccccauugcgacggcuuucagaacaaggagugggaucucuucgucgaacgcacgaaagccuauagcaauuguuacccuuaugacgugcccgauuacgcuucccugagaucucuuguugccagcuccgggacccuggaguuuacaaacgaaggauucaauuggaccggcguggcucagaacggcacaagcuaugccugcaagcgggggucugucaaguccuuuuucagccgccucaauuggcugcacaaacuugaguacaaguauccugcgcugaacgugaccaugcccaauaacgacaaauuugauaagcucuacauuuggggaguucaucacccuucuacggacuccgaucaaacaagccuguacgugcaggccucuggcagagucaccguguccacaaaacggagccagcagaccgugaucccgaauauugggucccgccccugggucagaggaguuucuagccggaucuccauuuauuggaccaucgugaagccuggcgacauucugcucaucaacagcacagggaaccugaucgcuccccgcggauacuucaagauuagaucuggcaaauccagcaucaugcggucugacgccccuauuggcaauuguaacagcgagugcaucacgcccaauggguccauuccgaacgauaagccuuuucaaaaugugaaccgcaucaccuauggagcuugucccagauacgucaaacagaauacacuuaagcuggccaccggcaugcggaacgugccugaaaaacagacacgcgggaucuucggagcgauugccggcuuuaucgagaaugggugggaaggaaugguugacggcugguauggcuucagacaccagaacucugaggggaccggacaagcugccgaucucaagagcacgcaggcugccauuaaucagaucaacggcaaacugaaucggcuuauugagaagacaaacgaaaaguuucaucaaaucgagaaagaguucuccgaaguggaagggagaauccaggaccuggagaaguacgucgaggauaccaaaauugaccucuggagcuauaaugccgaacugcugguggcucucgagaaccagcacaccaucgaucugacagacucugaaaugaacaagcuguucgagcgcacccggaaacagcugagagaaaaugcggaggauaugggaaacggcugcuuuaagauuuaccauaagugugacaaugccugcaucggguccauucgcaacggcacauacgaucacgacguuuaucgggacgaggcucucaauaacagauuccaaaucaaaggaguggaacuuaagagcggcuacaaagauuggauucuuuggaucucuuuugccaucuccugcuuccugcucugugucgugcugcugggguuuauuaugugggccugccagaagggaaauauccgcuguaacauuugcaucuga

SEQ ID NO: 192097 - RNA, 1701 nt, Artificial Sequence
  derived and/or modified CDS sequence (opt5) from hemagglutinin__InfluenzaA__AAK71687
augaaggccauccuggugguccuccuguacaccuucacaacggcuaacgccgacacccuuugcauuggcuaucacgcgaauaacagcacagauaccguugacacagugcuggagaagaaugugaccgucacacauuccgugaaccuccuggaagauagacacaaugggaaacuuuguaagcugcggggaguugcuccccuccaucugggcaagugcaacaucgccggguggcugcucggaaauccugagugugaaucucuguuuaccgccagcuccuggucuuacauuguggagacgagcaacuccgacaauggaaccugcuauccgggggauuucaucaacuacgaagaacuucgcgagcagcugucuagcgucuccagcuuugaaagauucgagauuuuucccgaaacaucuuccuggccuaaucacgacaccaaccggggagugacagcugccuguccccaugcuggcgccaauagcuucuaucgcaaccucaucuggcuggcgaaaaagggcgauucuuacccuaaacuuuccaagagcuauaucaauaacaaggggaaagagguucuggugcucuggggcauucaccaucccccuaccucugccgaccaacagucccuguaccagaacgcugaugccuacgucuuugugggcagcuccagauauucuaagaaauucaagccggagaucgcuacgcggcccaaggugcgcgggcaggccggaagaaugaauuacuauuggacacuggucgaaccuggcgacaaaauuaccuuugaggcgacagggaaccucguugugccccgguacgccuucgcuaugaagcgcaauagcgaauccggaaucauuaucagcgauauuucugugcacgacugcaacaccaccugucaaacaccuaaaggcgccaucaauacgucccugcccuuucagaacauccacccggucaccauuggcgagugcccuaaguaugugaaaagcacaaaacuuagaauggcuaccgggcugcggaauguucccucuauccagagccgcggacucuucggcgccauugccggguuuaucgaaggaggcuggacagggaugauugauggaugguacggcuaucaucaccagaacgagcaaggcuccggguacgcugcggaccugaagucuacccagaaugccaucgacggaaucacgaacaaggugaauagcgucauugagaagaugaacacacaguucaccgugguuggcaaagaguucaaucaccuugagaagagaaucgaaaaccugaauaaaaagguggaugacggguuucucgauauuuggaccuacaacgcugagcugcugguccuccuggaaaacgagcggacacuugacuaucaugauuccaaugugaaaaaccuguacgagaagguccgcagccagcucaagaauaacgccaaagaaaucggaaauggcuguuucgaguuuuaucacaagugcgacgauaccuguauggaaucugugaaaaacgggacauacgacuauccuaaguacuccgaggaagccaaacugaauagagaggagauugauggcguuaaacuugaaagcacgcggaucuaucaaauccuggcuauuuacucuaccguggccuccagccucguccuggugguuucccugggaacaaucucuuucuggaugugcagcaacggcucccuccagugcagaauuuguaucuga

SEQ ID NO: 192098 - RNA, 1707 nt, Artificial Sequence
  derived and/or modified CDS sequence (opt5) from hemagglutinin__InfluenzaA__AAS65618
auggagaagaucgugcuccuguucgccauugucagccugguuaaauccgaccagaucugcauuggcuaccacgcuaacaauucuaccgaacaaguggauacaaucauggagaagaacgugacggucacccaugcccaggacauucuugaaaagacacacaaugggaagcugugugaucucgacggagugaaaccccugauccuuagagauugcagcguugcgggcuggcugcucgggaacccuaugugugacgaguuuaucaaugugccggaaugguccuauauugucgagaaggcuaaccccgugaaugaucugugcuacccuggagacuucaacgauuaugaggaacugaagcaucuccugucucggaucaaucacuuugagaaaauucagaucauucccaagagcuccuggucuagccaugaaguuucccuuggcgugagcucugccuguccuuaccaggggaaauccagcuucuuucgcaacgucguguggcugaucaagaaaaauucuaccuaucccacaauuaagagauccuacaacaauaccaaccaagaggaccuccuggugcuuuggggaauccaccacccuaaugaugccgcugagcagacaaagcuguaucagaacccgaccacguacaucagcgucggcaccucuacacucaaccagcggcugguuccccgcauugccaccagauccaaagugaauggccaaagcgggcggauggaguucuuuuggacaauccugaagccuaacgacgcuauuaauuucgaauccaacggaaauuuuaucgcccccgaauacgcguauaaaauugugaagaaaggcgauucuaccaucaugaaaagcgagcucgaauacgggaacugcaauacgaaaugucagacaccuaugggagccaucaacuccagcaugcccuuccauaauauucacccgcugaccaucggcgagugcccuaaguaugucaagucuaaccgccuugugcuggcuacagggcucagaaauagcccccagcgggagcgcagacggaaaaagcgcggacuguuuggcgccauugcuggcuucaucgaagggggauggcagggcaugguugacgggugguacggauaucaucacuccaacgagcaaggcucuggguacgccgcggccaaagaaagcacccagaaggcuauugacggagugaccaauaaagucaacuccaucaucgauaagaugaauacacaguuugaggccgugggcagagaguucaacaaccuugaacggcgcauugagaaucugaacaagaaaauggaagacggcuuccucgauguuuggacguauaaugcugagcugcuggugcucauggaaaacgagagaacccuggacuuucacgauucuaaugucaagaaccuuuacgacaaagugcggcugcaacucaaggauaaugccaaagaacuggggaacggauguuucgaguuuuaccauaagugcgacaaugaguguauggaaagcgucagaaacggcacauaugauuacccucaguauuccgaggaagcccgccuuaagcgggaggagaucagcggggugaaacuggaaucuauuggaaucuaccagauucucuccaucuauagcaccguugcuucuucccuggcgcuggccauuaugguggcuggccucagccuguggaugugcuccaaugggucucuucagugcagaaucuguaucuga

SEQ ID NO: 192099 - RNA, 1704 nt, Artificial Sequence
  derived and/or modified CDS sequence (opt5) from hemagglutinin__InfluenzaA__AAT38819
augaacacccagauccuggccuucauugcuugcaugcucaucggcacaaagggggacaaaauuugucugggacaccaugccguggcgaauggcacgaaggucaacacccuuacagagagagggaucgaaguugugaaugcuaccgagacaguggaaaccgucaacauuaaaaagaucugcacacaaggaaaacggcccaccgaucugggccagugugggcuccugggaacgcuuaucggcccuccgcagugcgaccaguuucuggaguucgaugccaaucucauuaucgaacgcagagagggcaccgacguguguuaccccgggaaguuuacaaacgaggaaagccugcggcaaauucugcgcggauccggcgggaucgauaaggagucuaugggauucaccuauagcggcauuagaacaaauggggccaccuccgcuugccggcgcucuggaagcuccuuuuacgccgaaaugaaauggcuccugucuaacagcgacaaugcugccuucccucagaugacgaaguccuauagaaacccccggaauaaaccugcgcuuaucauuuggggcguucaccauagcggcucugccacagagcagaccaagcuguacggguccggaaacaaacucaucacagugggcagcucuaaguaucagcaauccuuuacccccagcccuggggcucgcccgcaggucaauggacagucuggcagaaucgauuuccacuggcugcuucuggaccccaacgauaccgugacauuuacguucaauggggccuuuauugcuccugaccgggccuccuucuuucgcggagagagccucggcguucaguccgaugugccccuggacucuggcugugaaggggauugcuuccauagcggaggcaccaucgucuccagccugccuuuccaaaacauuaaccccagaacaguggggaaguguccgcgguacgugaaacagaccucucuccugcuugcgacaggaaugcgcaaugucccugagaaccccaagcaggccuaucaaaaacagaugaccagaggccuguuuggggcuaucgccggcuucauugaaaauggaugggagggccucaucgacgggugguacggauuucggcaccagaacgcucagggcgaagggacggccgccgacuacaaguccacacaaagcgcuaucgaucagauuaccggaaaacugaauagacuuaucgacaagaccaaccagcaguucgagcugauugauaaugaguuuucugaaaucgagcaacagauuggcaacguuaucaauuggacacgcgacagcaugaccgaagugugguccuauaacgcggagcuccugguggccauggaaaaucagcacacaaucgaucuggcugacucugagaugaacaaacucuacgagcgggucagaaagcagcugcgcgaaaaugccgaggaagaugggacgggcugcuucgagauuuuucauaagugugacgaucaaugcauggaaagcauccggaacaauaccuaugaccacacacaguacagaaccgagucccuucagaaccgcauucagaucgauccugugaaacugagcucuggauauaaggacauuauccucugguucuccuuuggcgccagcugcuuccugcuucuggcuauugccauggggcucguuuuuaucuguaucaaaaacggaaauaugcggugcacaauuuguaucuga

SEQ ID NO: 192100 - RNA, 1707 nt, Artificial Sequence
  derived and/or modified CDS sequence (opt5) from hemagglutinin__InfluenzaA__AAV32636
auggagaagaucgugcuccuguucgccauugucagccugguuaaauccgaccagaucugcauuggcuaccacgcuaacaauucuaccgaacaaguggauacaaucauggagaagaacgugacggucacccaugcccaggacauucuugaaaagacacacaaugggaagcugugugaucucgacggagugaaaccccugauccuuagagauugcagcguugcgggcuggcugcucgggaacccuaugugugacgaguuuaucaaugugccggaaugguccuauauugucgagaaggcuaaccccgugaaugaucugugcuacccuggagacuucaacgauuaugaggaacugaagcaucuccugucucggaucaaucacuuugagaaaauucagaucauucccaagagcuccuggucuagccaugaagccucccuuggcguuagcucugccuguccuuaccaggggaaauccagcuucuuucgcaacguggucuggcugaucaagaaaaauucuaccuaucccacaauuaagagauccuacaacaauaccaaccaagaggaccuccuggugcuuuggggaauccaccacccuaaugaugcugccgagcagacaaagcuguaucagaacccgaccacguacaucagcgugggcaccucuacacucaaccagcggcuggucccccgcauugcuaccagauccaaaguuaauggccaaagcgggcggauggaguucuuuuggacaauccugaagccuaacgacgccauuaauuucgaauccaacggaaauuuuaucgcgcccgaauacgccuauaaaauugugaagaaaggcgauucuaccaucaugaaaagcgagcucgaauacgggaacugcaauacgaaaugucagacaccuaugggagcuaucaacuccagcaugcccuuccauaauauucacccgcugaccaucggcgagugcccuaaguaugugaagucuaaccgccuuguccuggccacagggcucagaaauagcccccagcgggagcgcagacggaaaaagcgcggacuguuuggcgcuauugccggcuucaucgaagggggauggcagggcaugguggacgggugguacggauaucaucacuccaacgagcaaggcucuggguacgcggccgacaaagaaagcacccagaaggcuauugauggaguuaccaauaaagugaacuccaucaucgacaagaugaauacacaguuugaggccgucggcagagaguucaacaaccuugaacggcgcauugagaaucugaacaagaaaauggaagauggcuuccucgacguguggacguauaaugcugagcugcugguucucauggaaaacgagagaacccuggauuuucacgacucuaaugugaagaaccuuuacgauaaaguccggcugcaacucagagacaaugccaaggaacuggggaacggauguuucgaguuuuaccauaaaugcgauaaugaguguauggaaagcgugcgcaacggcacauaugacuacccucaguauuccgaggaagcccggcuuaagagagaggagaucagcggggucaagcuggaaucuauuggaaucuaccagauucucuccaucuauagcaccguggcuucuucccuggcgcuggccauuaugguugcuggccucagccuguggaugugcuccaaugggucucuucagugccgcaucuguaucuga

SEQ ID NO: 192101 - RNA, 1707 nt, Artificial Sequence; identical to SEQ ID NO: 192100
  derived and/or modified CDS sequence (opt5) from hemagglutinin__InfluenzaA__AAV34704

SEQ ID NO: 192102 - RNA, 1707 nt, Artificial Sequence
  derived and/or modified CDS sequence (opt5) from hemagglutinin__InfluenzaA__AAV65826
auggagaagaucgugcuccuguucgccauugucagccugguuaaauccgaccagaucugcauuggcuaccacgcuaacaauucuaccgaacaaguggauacaaucauggagaagaacgugacggucacccaugcccaggacauucuugaaaagacacacaaugggaagcugugugaucucgacggagugaaaccccugauccuuagagauugcagcguugcgggcuggcugcucgggaacccuaugugugacgaguuuaucaaugugccggaaugguccuauauugucgagaaggcuaaccccgugaaugaucugugcuacccuggagacuucaacgauuaugaggaacugaagcaucuccugucucggaucaaucacuuugagaaaauucagaucauucccaagagcuccuggucuagccaugaagccucccuuggcguuagcucugccuguccuuaccaggggaaauccagcuucuuucgcaacguggucuggcugaucaagaaaaauucuaccuaucccacaauuaagagauccuacaacaauaccaaccaagaggaccuccuggugcuuggaggcauccaccacccuaaugaugcugccgagcagacaaagcuguaucagaacccgaccacguacaucagcgugggcaccucuacacucaaccagcggcuggucccccgcauugcuaccagauccaaaguuaaugggcaaagcggacggauggaguucuuuuggacaauccugaagccuaacgacgccauuaauuucgaauccaacggcaauuuuaucgcgcccgaauacgccuauaaaauugugaagaaaggggauucuaccaucaugaaaagcgagcucgaauacggaaacugcaauacgaaaugucagacaccuaugggcgcuaucaacuccagcaugcccuuccauaauauucacccgcugaccaucggggagugcccuaaguaugugaagucuaaccgccuuguccuggccacaggacucagaaauagcccccagcgggagcgcagacggaaaaagcgcggccuguuuggcgcuauugccggguucaucgaaggaggcuggcaggggaugguggacggaugguacggcuaucaucacuccaacgagcaagggucuggauacgcggccgacaaagaaagcacccagaaggcuauugauggcguuaccaauaaagugaacuccaucaucgacaagaugaauacacaguuugaggccgucggcagagaguucaacaaccuugaacggcgcauugagaaucugaacaagaaaauggaagauggguuccucgacguguggacguauaaugcugagcugcugguucucauggaaaacgagagaacccuggauuuucacgacucuaaugugaagaaccuuuacgauaaaguccggcugcaacucagagacaaugccaaggaacugggaaacggcuguuucgaguuuuaccauaaaugcgauaaugaguguauggaaagcgugcgcaacgggacauaugacuacccucaguauuccgaggaagcccggcuuaagagagaggagaucagcggagucaagcuggaaucuauuggcaucuaccagauucucuccaucuauagcaccguggcuucuucccuggcgcuggccauuaugguugcugggcucagccuguggaugugcuccaauggcucucuucagugccgcaucuguaucuga

SEQ ID NO: 192103 - RNA, 1701 nt, Artificial Sequence
  derived and/or modified CDS sequence (opt5) from hemagglutinin__InfluenzaA__AAX11505
augaagaccaucauugcccugagcuacauccucugccugguguucgcucagaaacuucccggcaacgacaauuccacagccacgcugugucucgggcaccaugcggucccuaacggaaccauuguuaagacaaucaccaaugaucaaauugaggugacaaacgcuaccgaacuggugcagucuagcuccacaggcgggaucugcgacucuccgcaccagauccuugauggagagaauuguacccugauugacgcccuccugggcgauccccagugcgacggguuucaaaacaaaaagugggaucuguucgucgaaagaagcaaagccuauuccaauuguuacccuuaugacgugcccgauuacgcuucucuccggagccugguugccuccagcggaacgcuugaguuuaacaaugaaucuuucaacuggaccggcgugacacagaauggcaccuccagcgcuugcgagcgcagaucuaacaaguccuuuuucagccggcugaauuggcucacacaucugaaguauaaauacccugcccuuaacgucaccaugcccaauaacgagaaguuugacaaacuguauaucuggggagugcaccauccugggacggauucugaccagauuucccucuacgcgcaggccagcggccgcaucacaguuuccaccaagagaucucaacagacagugauuccgaacaucgggagccggccccgcgucagagauguguccagccggauuucuaucuacuggaccaucgugaaaccuggagacauucugcugaucaauuccaccggcaaccucauugcuccccgcggguauuucaagaucagaagcggaaagucuagcauuaugcgguccgacgccccuaucggcaaauguaauucugaaugcaucacacccaacggcagcauuccgaaugauaagccuuuucagaacgucaaucgcaucacguacggggcuugucccagauauguuaaacagaacacccugaaacuugccacaggaaugcggaaugugccugagaaacaaacccgcggcauuuucggggcgaucgccggauuuauugaaaacggcugggaggggaugguggacggaugguacggcuucagacaccagaauagcgagggcacagggcaggcugccgaucugaaguccacccaagcugccaucaaccagaucaauggaaaacucaaccggcugauuggcaagacgaaugaaaaguuucaccagaucgagaaagaguucucugaagucgaagggcgcauucaggaccuugagaaguauguggaggauacaaaaaucgaccugugguccuacaacgccgaacuccugguugcucuggagaaccaacauaccauugaucucaccgacagcgaaaugaauaagcuguucgagagaacaaagaagcagcuucgggaaaacgcggaggauaugggaaauggcugcuuuaagaucuaucacaaaugugacaacgccugcauugggucuaucagaaauggcaccuacgaucaugacguguaccgcgacgaggcucugaacaaucgguuccagaucaagggagucgaacucaaauccggcuauaaggauuggauucuguggaucagcuuugccauuuccugcuuccuucuguguguggcccuccugggguuuaucaugugggcuugccagaaaggaaacauuagaugugacaucugcaucuga

SEQ ID NO: 192104 - RNA, 1701 nt, Artificial Sequence
  derived and/or modified CDS sequence (opt5) from hemagglutinin__InfluenzaA__AAX11525
augaagaccaucauugcccugagcuacauccucugccugguguucgcucagaaacuucccggcaacgacaauuccacagccacgcugugucucgggcaccaugcggucccuaacggaaccauuguuaagacaaucaccaaugaucaaauugaggugacaaacgcuaccgaacuggugcagucuagcuccacaggcgggaucugcgacucuccgcaccagauccuugauggagagaauuguacccugauugacgcccuccugggcgauccccagugcgacggguuucaaaacaaaaagugggaucuguucgucgaaagaagcaaagccuauuccaauuguuacccuuaugacgugcccgauuacgcuucucuccggagccugguugccuccagcggaacgcuugaguuuaacaaugaaucuuucgacuggaccggcgugacacagaacggcaccuccagcgcuugcaagcgcagaucuaauaaguccuuuuucagccggcugaacuggcucacacaucugaaauauaaguacccugcccuuaaugucaccaugcccaacaaugagaaauuugauaagcuguauaucuggggagugcaccauccugggacggacucugaucagauuucccucuacgcgcaggccagcggccgcaucacaguuuccaccaaaagaucucaacagacagugauuccgaacaucgggagccggccccgcgucagagacguguccagccggauuucuaucuacuggaccaucgugaagccuggagacauucugcugaucaacuccaccggcaaucucauugcuccccgcggguauuucaagaucagaagcggaaaaucuagcauuaugcgguccgaugccccuaucggcaaguguaacucugagugcaucacacccaauggcagcauuccgaacgacaaaccuuuucagaaugucaaccgcaucacguacggggcuugucccagauauguuaagcagaauacccugaaacuugccacaggaaugcggaacgugccugaaaagcaaacccgcggcauuuucggggcgaucgccggauuuauugagaauggcugggaagggaugguggauggaugguacggcuucagacaccagaacuccgagggcacagggcaggcugccgaccugaaaagcacccaagcugccaucaaucagaucaacggaaagcucaaucggcugauuggcaagacgaacgagaaauuucaccagaucgaaaaggaguucucugaagucgaggggcgcauucaggaucuugaaaaauauguggaggacacaaagaucgaucugugguccuacaaugccgagcuccugguugcucuggaaaaccaacauaccauugaccucaccgauagcgagaugaacaaacuguucgaaagaacaaagaagcagcuucgggagaaugcggaagacaugggaaacggcugcuuuaaaaucuaucacaagugugauaaugccugcauugggucuaucagaaacggcaccuacgaccaugacguguaccgcgaugaggcucugaauaaccgguuccagaucaaaggagucgagcucaaguccggcuauaaagacuggauucuguggaucagcuuugccauuuccugcuuccuucuguguguggcccuccugggguuuaucaugugggcuugccagaagggaaauauuagauguaacaucugcaucuga

SEQ ID NO: 192105 - RNA, 1701 nt, Artificial Sequence; identical to SEQ ID NO: 192104
  derived and/or modified CDS sequence (opt5) from hemagglutinin__InfluenzaA__AAX11535

SEQ ID NO: 192106 - RNA, 1701 nt, Artificial Sequence; identical to SEQ ID NO: 192104
  derived and/or modified CDS sequence (opt5) from hemagglutinin__InfluenzaA__AAX11545

SEQ ID NO: 192107 - RNA, 1701 nt, Artificial Sequence; identical to SEQ ID NO: 192103
  derived and/or modified CDS sequence (opt5) from hemagglutinin__InfluenzaA__AAX11555

SEQ ID NO: 192108 - RNA, 1701 nt, Artificial Sequence; identical to SEQ ID NO: 192104
  derived and/or modified CDS sequence (opt5) from hemagglutinin__InfluenzaA__AAX11565

SEQ ID NO: 192109 - RNA, 1701 nt, Artificial Sequence
  derived and/or modified CDS sequence (opt5) from hemagglutinin__InfluenzaA__AAX11585
augaagaccaucauugcccugagcuacauccucugccugguguucgcucagaaacuucccggcaacgacaauuccacagccacgcugugucucgggcaccaugcggucccuaacggaaccauuguuaagacaaucaccaaugaucaaauugaggugacaaacgcuaccgaacuggugcagaucucuagcacaggcgggaucugcgacuccccgcaccagauucuugauggagagaauuguacccugaucgacgcccuccugggcgauccccagugcgacggguuucaaaacaaaaagugggaucuguucgucgaaagaucuaaagccuauagcaauuguuacccuuaugacgugcccgauuacgcuucccuccggucucugguugccagcuccggaacgcuugaguuuaacaaugaaucuuucgacuggaccggcgugacacagaacggcaccucuuccgcuugcaagcgcagaagcaauaagagcuuuuucucccggcugaacuggcucacacaucugaaauauaaguacccugcccuuaaugucaccaugcccaacaaugagaaauuugauaagcuguauauuuggggagugcaccauccugggacggacaacgaucagaucagccucuacgcgcaggccucuggccgcauuacaguuuccaccaaaagaagccaacagacagugaucccgaacauugggucccggccccgcgucagagacgugucuagccagaucuccaucuacuggaccauugugaagccuggagacauccugcugauuaauagcaccggcaaccucaucgcuccccggggguauuucaagauucgcucuggaaaauccagcaucaugagaucugaugccccuaucggcaaguguaauagcgagugcauuacacccaacggcuccaucccgaaugacaaaccuuuucagaacgucaaucggauuacguacggggcuuguccccgcuauguuaagcaaaacacccugaaacuugccacaggaaugagaaaugugccugaaaagcagacccggggcaucuucggggcgauugccggauuuaucgagaacggcugggaagggaugguggauggaugguacggcuuccgccaccaaaauucugagggcacagggcaggcugccgaccugaaaagcacccaggcugccaucaaccagauuaauggaaagcucaacagacugaucggcaagacgaaugagaaauuucaccagauugaaaaggaguucuccgaagucgaggggcggauccaagaucuugaaaaauauguggaggacacaaagauugaucuguggagcuacaacgccgagcuccugguugcucuggaaaaccagcauaccaucgaccucaccgauucugagaugaauaaacuguucgaaagaacaaagaagcagcuucgcgagaacgcggaagacaugggaaauggcugcuuuaaaauuuaucacaagugugauaacgccugcaucggguccauccggaauggcaccuacgaccaugacguguacagagaugaggcucugaacaaucgcuuccagauuaaaggagucgagcucaagagcggcuauaaagacuggauccuguggauuucuuuugccaucuccugcuuccuucuguguguggcccuccugggguuuauuaugugggcuugccaaaagggaaacauccgguguaauaucugcauuuga

SEQ ID NO: 192110 - RNA, 1701 nt, Artificial Sequence; identical to SEQ ID NO: 192104
  derived and/or modified CDS sequence (opt5) from hemagglutinin__InfluenzaA__AAX11605

SEQ ID NO: 192111 - RNA, 1701 nt, Artificial Sequence; identical to SEQ ID NO: 192104
  derived and/or modified CDS sequence (opt5) from hemagglutinin__InfluenzaA__AAX11615

SEQ ID NO: 192112 - RNA, 1701 nt, Artificial Sequence
  derived and/or modified CDS sequence (opt5) from hemagglutinin__InfluenzaA__AAX11625
augaagaccaucauugcccugagcuacauccucugccugguguucgcucagaaacuucccggcaacgacaauuccacagccacgcugugucucgggcaccaugcggucccuaacggaacccugguuaagacaauuaccaaugaucaaaucgaggugacaaacgcuaccgaacuugugcagucuagcuccacaucuagaauuugcgacagcccgcaccagauccuggauggcgagaauuguacccucaucgacgcccugcugggggauccccauugcgacggauuucagaacaaagaaugggaucucuucgucgagcgguccaaggccuauucuaauuguuacccuuaugacgugcccgauuacguuagccugcgcucccuuguggcuagcucuggcacgcuggaauuuaacaaugaguccuucaacuggaccggggucgcccaaaauggaacaagcucugcuugcaaaagacgguccgacaagagcuuuuucucucgccucaacuggcugcaccagcuuaaguauaaauacccugcccugaaugugaccaugcccaacaaugagaaguuugauaaacucuauauuuggggcguucaucacccuggcacagacuccgaucagaucagccuguacgcgcaggccuccgggagagugaccgucucuacgaagcggagccaacagacagugauuccgaacaucggauccggccccugggugcgcggggucagcucuagaauuuccaucuacuggaccauuguuaaaccuggagacauccugcucaucaacagcacaggcaaucugauugcuccccggggguauuucaagauccgcucuggaaagagcuccauuaugagaucugacgccccuaucggcaaauguaacagcgaaugcauuacccccaauggcuccaucccgaacgauaagccuuuucagaaugugaaccggaucaccuacggggcuuguccccgcuaugugaaacagaauacacuuaagcuggccacgggaaugagaaacgucccugagaaacaagcgcggggcauuuucggggccaucgcuggauuuauugaaaauggcugggaggggaugauggacggaugguacggcuuccgccaccagaacagcgagggcaccgggcaggccgcugaucucaagucuacacaagccgccaucaaucagauuaacggaaaacugaauagacuuaucgaaaagaccaacgagaaguuucaucagaucgaaaaagaguucuccgaaguggagggccggauucaggaccuggagaaguauguugaagauacaaaaaucgaccucuggagcuacaaugcugagcugcugguggcgcucgaaaaccaacacaccauugaucugacggacucugagaugaacaaacuuuucgaaagaacaaagaagcagcugcgcgagaaugccgaggauauggggaacggaugcuuuaagaucuaucauaaaugugacaaugcuugcauuggcuccauccggaacgggaccuacgaucacgacgucuacagagacgaagcccucaauaaccgcuuccagauuaagggcguggagcugaaaagcggauauaaggauuggauccuuuggaucuccuuugccauuucuugcuuccugcucuguaucguucugcugggcuuuauuaugugggcuugccagaaagggaauauccgguguaacauuugcaucuga

SEQ ID NO: 192113 - RNA, 1701 nt, Artificial Sequence; identical to SEQ ID NO: 192104
  derived and/or modified CDS sequence (opt5) from hemagglutinin__InfluenzaA__AAX12731

SEQ ID NO: 192114 - RNA, 1701 nt, Artificial Sequence
  derived and/or modified CDS sequence (opt5) from hemagglutinin__InfluenzaA__AAX12741
augaagaccaucauugcccugagcuacauccucugccugguguucgcucagaaacuucccggcaacgacaauuccacagccacgcugugucucgggcaccaugcggucccuaacggaaccauuguuaagacaaucaccaaugaucaaauugaggugacaaacgcuaccgaacuggugcagucuagcuccacaggcgggaucugcgacucuccgcaccagauccuugauggagagaauuguacccugauugacgcccuccugggcgauccccagugcgacggguuucaaaacaaaaagugggaucuguucgucgaaagaagcaaagccuauuccaauuguuacccuuaugacgugcccgauuacgcuucucuccggagccugguugccuccagcggaacgcuugaguuuaacaaugaaucuuucgacuggaccggcgugacacagaacggcaccuccagcgcuugcaagcgcagaucuaauaaguccuuuuucagccggcugaacuggcucacacaucugaaauauaaguacccugcccuuaaugucaccaugcccaacaaugagaaauuugauaagcuguauaucuggggagugcaccauccugggacggacucugaucagauuucccucuacgcgcaggccagcggccgcaucacaguuuccaccaaaagaucucaacagacagugauuccgaacaucgggagccggccccgcgucagagacguguccagccggauuucuaucuacuggaccaucgugaagccuggagacauucugcugaucaacuccaccggcaaucucauugcuccccgcggguauuucaagaucagaagcggaaaaucuagcauuaugcgguccgaugccccuaucggcaaguguaacucugagugcaucacacccaauggcagcauuccgaacgacaaaccuuuucagaaugucaaccgcaucacguacggggcuugucccagauauguuaagcagaauacccugaaacuugccacaggaaugcggaacgugccugaaaagcaaacccgcggcauuuucggggcgaucgccggauuuauugagaauggcugggaagggaugguggauggaugguacggcuucagacaccagaacuccgagggcacagggcaggcugccgaccugaaaagcacccaagcugccaucaaucagaucaacggaaagcucaaucggcugauuggcaagacgaacgagaaauuucaccagaucgaaaaggaguucucugaagucgaggggcgcauucaggaucuugaaaaauauguggaggacacaaagaucgaucugugguccuacaaugccgagcuccugguugcucuggaaaaccaacauaccauugaccucaccgauagcgagaugaacaaacuguucgaaagaacaaagaagcagcuucgggagaaugcggaagacaugggaaacggcugcuuuaaaaucuaucacaagugugauaaugccugcauugggucuaucagaaacggcaccuacgaccaugacguguaccgcgaugaggcucugaauaaccgguuccagaucaaaggagucgagcucaaguccggcuauaaagacuggauucuguggaucagcuuugccacauccugcuuccuucuguguguggcccuccugggguuuauuaugugggcuugccagaagggaaauaucagauguaacauuugcaucuga

SEQ ID NO: 192115 - RNA, 1701 nt, Artificial Sequence; identical to SEQ ID NO: 192104
  derived and/or modified CDS sequence (opt5) from hemagglutinin__InfluenzaA__AAX12751

SEQ ID NO: 192116 - RNA, 1701 nt, Artificial Sequence
  derived and/or modified CDS sequence (opt5) from hemagglutinin__InfluenzaA__AAX12761
augaagaccaucauugcccugagcuacauccucugccugguguucgcucagaaacuucccggcaacgacaauuccacagccacgcugugucucgggcaccaugcggucccuaacggaacccugguuaagacaauuaccaaugaucaaaucgaggugacaaacgcuaccgaacuugugcagucuagcuccacaggcagaauuugcgacucuccgcaccagauccuggauggggagaauuguacccucaucgacgcccugcugggagauccccauugcgacggcuuucagaacaaagaaugggaucucuucgucgagcggagcaaggccuauuccaauuguuacccuuaugacgugcccgauuacguuucucugcgcagccuuguggcuuccagcgggacgcuggaauuuaacaaugagucuuucaacuggaccggagucgcccaaaauggcacauccagcgcuugcaaaagacggucugacaaguccuuuuucagccgccucaacuggcugcaccagcuuaaguauaaauacccugcccugaaugugaccaugcccaacaaugagaaguuugauaaacucuauauuuggggcguucaucacccugggacagacucugaucagaucucccuguacgcgcaggccagcggaagagugaccgucuccacgaagcggucucaacagacagugauuccgaacaucggcagccgccccugggugagaggggucuccagccggauuucuaucuacuggaccauuguuaaaccuggagacauccugcucaucaacuccacaggcaaucugauugcuccccgcggguauuucaagaucagaagcggaaagucuagcauuaugcgguccgacgccccuaucggcaaauguaacucugaaugcauuacccccaauggcagcaucccgaacgauaagccuuuucagaaugugaaccgcaucaccuacgggcccuguccuagauaugugaaacagaauacacuuaagcuggcuacgggaaugcggaacguccccgagaaacaaacccgcggcauuuucggggccaucgcgggauuuauugaaaauggcugggaggggaugauggacggaugguacggcuucagacaccagaacuccgagggcacagggcaggccgcugaucucaagagcacccaagccgcuaucaaucagauuaacggaaaacugaaucggcuuaucgaaaagacaaacgagaaguuucaucagaucgaaaaagaguucucugaaguggagggccgcauucaggaccuggagaaguauguugaagauaccaaaaucgaccucugguccuacaaugccgagcugcugguggcccucgaaaaccaacacacgauugaucugacagacagcgagaugaacaaacuuuucgaaagaaccaagaagcagcugcgggagaaugcugaggauauggggaacggaugcuuuaagaucuaucauaaaugugacaaugucugcauuggcucuaucagaaacgggaccuacgaucacgacguguaccgcgacgaagcgcucaauaaccgguuccagauuaagggcguugagcugaaauccggauauaaggauuggauccuuuggaucagcuuugccauuuccugcuuccugcucuguaucgugcugcugggcuuuauuaugugggcuugccagaaagggaauaucagauguaacauuugcaucuga

SEQ ID NO: 192117 - RNA, 1701 nt, Artificial Sequence
  derived and/or modified CDS sequence (opt5) from hemagglutinin__InfluenzaA__AAX12791
augaagaccaucauugcccugagcuacauccucugccugguguucgcucagaaacuucccggcaacgacaauuccauggccacacugugucucgggcaccaugcggucccuaacggaacgcugguuaagaccauuacaaaugaucaaaucgaggugaccaacgcuacagaacuugugcagucuagcuccaccggcagaauuugcgacucuccgcaccagauccuggauggggagaauuguacacucaucgacgcccugcugggagauccccauugcgacggcuuucagaacaaagaaugggaucucuucgucgagcggagcaaggccuauuccaauuguuacccuuaugacgugcccgauuacguuucucugcgcagccuuguggcuuccagcgggacccuggaauuuaacaaugagucuuucaacuggacgggagucgcccaaaauggcaccuccagcgcuugcaaaagacggucugacaaguccuuuuucagccgccucaacuggcugcaccagcuuaaguauaaauacccugcccugaaugugacaaugcccaacaaugagaaguuugauaaacucuauauuuggggcguucaucacccugggaccgacucugaucagaucucccuguacgcgcaggccagcggaagagugacagucuccaccaagcggucucaacagacggugauuccgaacaucggcagcgggcccugggugcgcggagucuccagcagaauuucuaucuacuggacaauuguuaaaccuggcgacauccugcucaucaacuccaccgggaaucugauugcuccccggggauauuucaagauccgcagcggcaagucuagcauuaugagauccgacgccccuaucgauaaauguaacucugaaugcauuacacccaauggcagcaucccgaacgacaagccuuuucagaaugugaaccggaucaccuacgggcuuuguccccgcuaugugaaacagaauacccugaagcucgcuacaggaaugagaaacgucccugagaaacaaacgcggggcauuuucggggccaucgcgggauuuauugaaaauggcugggaggggaugauggauggaugguacggcuuccgccaccagaacuccgagggcaccgggcaggccgcugaccugaaaagcacacaagccgcuaucaaucagauuaacggaaaacuuaauagacugaucgaaaagaccaacgagaaguuucaucagaucgaaaaagaguucucugaaguggagggccggauucaggaucucgagaaguauguugaagacacaaaaaucgaucugugguccuacaaugccgagcugcucguggcccuggaaaaccaacacaccauugaccuuacggauagcgagaugaacaagcuguucgaaagaacaaagaagcagcuccgcgagaaugcugaggacauggggaacggaugcuuuaagaucuaucauaaaugugauaaugcgugcauuggcucuauccggaacgggaccuacgaccacgacgucuacagagaugaagcccugaauaaccgcuuccagauuaagggcguggagcuuaaauccggauauaaggacuggauccuguggaucagcuuugcuauuuccugcuuccuccuguguaucguucugcucggcuuuauuaugugggccugccagaaagggaauauccgguguaacauuugcaucuga

SEQ ID NO: 192118 - RNA, 1701 nt, Artificial Sequence
  derived and/or modified CDS sequence (opt5) from hemagglutinin__InfluenzaA__AAX12801
augaagaccaucauugcccugagcuacauccucugccugguguucgcucagaaauuucccggcaacgacaauuccacagccacgcuuugucuggggcaccaugcggucccuaacggaacccucguuaagacaauuaccaaugaucaaaucgaggugacaaacgcuaccgaacuggugcagucuagcuccacagacagaauuugcgauucuccgcaccagauccuugacggcgagaauuguacccugaucgaugcccuccugggggacccccauugcgauggauuccagaacaaagaaugggaccuguuugucgagcggagcaaggccuauuccaauuguuacccuuaugaugugcccgacuacguuucucuccgcagccugguggcuuccagcggcacgcuugaguucaacaaugaaucuuuuaacuggaccggggucgcccaaaauggaacauccagcgcuugcaaaagacggucugauaaguccuucuuuagccgccugaacuggcuccaccagcugaaguauaaauacccugcccuuaaugugaccaugcccaacaaugagaaguucgacaaacuguauauuuggggcguucaucacccuggcacagauucugaccagaucucccucuacgcgcaggccagcgggagagugaccgucuccacgaagcggucucaacagacagugauuccgaacaucggaagccgccccugggugagaggcgucuccagccggauuucuaucuacuggaccauuguuaaaccuggggacauccugcugaucaacuccacaggaaaucucauugcuccccgcggcuauuuuaagaucagaagcgggaagucuagcauuaugcgguccgaugccccuaucggaaaauguaacucugaaugcauuacccccaauggcagcaucccgaacgacaagccuuuccagaaugugaaccgcaucaccuacggcgcuugucccagauaugugaaacagaauacacugaagcuggccacggggaugcggaacgucccugagaaacaaacccgcggaauuuuuggcgcgaucgccggguucauugaaaauggaugggagggcaugauggaugggugguacggauuuagacaccagaacuccgagggcacaggccaggcugccgaccuuaagagcacccaagcugccaucaaucagauuaacgggaaacucaaucggcugaucgaaaagacaaacgagaaguuccaucagaucgaaaaagaguucucugaaguggagggacgcauucaggaucuugagaaguauguugaagacaccaaaaucgaucugugguccuacaaugccgagcuccugguggcucuggaaaaccaacacacgauugaccucacagauagcgagaugaacaagcuguuugaaagaaccaaaaagcagcuucgggagaaugcggaggacaugggcaacgggugcuucaagaucuaucauaaaugugauaaugccugcauuggaucuaucagaaacggcaccuacgaccacgacgucuaccgcgaugaagcucugaauaaccgguuucagauuaaggggguggagcucaaauccggcuauaaggacuggauccuguggaucagcuucgccauuuccugcuuucuucuguguaucguucuccugggauucauuaugugggccugccagaaaggcaauaucagauguaacauuugcaucuga

SEQ ID NO: 192119 - RNA, 1701 nt, Artificial Sequence
  derived and/or modified CDS sequence (opt5) from hemagglutinin__InfluenzaA__AAX12811
augaagaccaucauugcccugagcuacauccucugccugguguucgcucagaaacuucccggcaacgacaauuccacagccacgcugugucucgggcaccaugcggucccuaacggaacccugguuaagacaauuaccaaugaucaaaucgaggugacaaacgcuaccgaacuugugcagucuagcuccacaucuagaauuugcgacagcccgcaccagauccuggauggcgagaauuguacccucaucgacgcccugcugggggauccccauugcgacggauuucagaacaaagaaugggaucucuucgucgagcgguccaaggccuauucuaauuguuacccuuaugacgugcccgauuacguuagccugcgcucccuuguggcuagcucuggcacgcuggaauuuaacaaugaguccuucaacuggaccggggucgcccaaaauggaacaagcucugcuugcaaaagacgguccgacaagagcuuuuucucucgccucaacuggcugcaccagcuuaaguauaaauacccugcccugaaugugaccaugcccaacaaugagaaguuugauaaacucuauauuuggggcguucaucacccuggcacagacuccgaucagaucagccuguacgcgcaggccuccgggagagugaccgucucuacgaagcggagccaacagacagugauuccgaacaucggaucccgccccugggugagaggcgucagcucucggauuuccaucuacuggaccauuguuaaaccuggggacauccugcucaucaacagcacaggaaaucugauugcuccccgcggcuauuucaagaucagaucuggaaagagcuccauuaugcggucugacgccccuaucgggaaauguaacagcgaaugcauuacccccaauggcuccaucccgaacgauaagccuuuucagaaugugaaccgcaucaccuacggcgcuugucccagauaugugaaacagaauacacuuaagcuggccacggggaugcggaacgucccugagaaacaaacccgcggaauuuucggcgcgaucgccggguuuauugaaaauggaugggagggcaugauggacgggugguacggauucagacaccagaacagcgagggcacaggccaggcugccgaucucaagucuacccaagcugccaucaaucagauuaacgggaaacugaaucggcuuaucgaaaagacaaacgagaaguuucaucagaucgaaaaagaguucuccgaaguggagggacgcauucaggaccuggagaaguauguugaagauaccaaaaucgaccucuggagcuacaaugccgagcugcugguggcucucgaaaaccaacacacgauugaucugacagacucugagaugaacaaacuuuucgaaagaaccaagaagcagcugcgggagaaugcggaggauaugggcaacgggugcuuuaagaucuaucauaaaugugacaaugccugcauuggauccaucagaaacggcaccuacgaucacgacgucuaccgcgacgaagcucucaauaaccgguuccagauuaaggggguggagcugaaaagcggcuauaaggauuggauccuuuggaucuccuuugccauuucuugcuuccugcucuguaucguucugcugggauuuauuaugugggccugccagaaaggcaauaucagauguaacauuugcaucuga

SEQ ID NO: 192120 - RNA, 1701 nt, Artificial Sequence
  derived and/or modified CDS sequence (opt5) from hemagglutinin__InfluenzaA__AAX34061
augaagaccaucauugcccugagcuacauccucugccugguguucgcucagaaacuucccggcaacgacaauuccacagccacgcugugucucgggcaccaugcggucccuaacggaaccauuguuaagacaaucaccaaugaucaaauugaggugacaaacgcuaccgaacuggugcagucuagcuccacaggcgagaucugcgacucuccgcaccagauccuugauggggaaaauuguacccugauugacgcccuccugggagauccccagugcgacggcuuucaaaacaaaaagugggaucuguucgucgagagaagcaaagccuauuccaauuguuacccuuaugacgugcccgauuacgcuucucuccggagccugguugccuccagcgggacgcuugaauuuaacaaugagucuuucgacuggaccggagugacacagaacggcaccuccagcgcuugcaagcgcagaucuaauaaguccuuuuucagccggcugaacuggcucacacaucugaaauauaaguacccugcccuuaaugucaccaugcccaacaaugagaaauuugauaagcuguauaucuggggcgugcaccauccugggacggacucugaucagauuucccucuacgcgcaggccagcggacgcaucacaguuuccaccaaaagaucucaacagacagugauuccgaacaucggcagccggccccgcgucagagacguguccagccggauuucuaucuacuggaccaucgugaagccuggggacauucugcugaucaacuccaccggaaaucucauugcuccccgcggcuauuucaagaucagaagcgggaaaucuagcauuaugcgguccgaugccccuaucggaaaguguaacucugaaugcaucacacccaauggcagcauuccgaacgacaaaccuuuucagaaugucaaccgcaucacguacggcgcuugucccagauauauuaagcagaauacccugaaacuugccacagggaugcggaacguuccugagaagcaaacccgcggaaucuucggcgcgauugccggguuuaucgaaaauggaugggagggcaugguggaugggugguacggauucagacaccagaacuccgagggcacaggccaggcugccgaccugaaaagcacccaagcugccaucaaucagauuaacgggaagcucaaucggcugaucggaaagacgaacgaaaaauuucaccagauugagaaggaguucucugaaguggaaggcagaauccaggaucuugagaaauaugucgaggacacaaagauugaucugugguccuacaaugccgaacuccugguggcucuggagaaccaacauaccaucgaccucaccgauagcgaaaugaacaaacuguucgagcgcacaaagaagcagcuucgggaaaaugcggaggacauggggaacggaugcuuuaaaauuuaucacaagugugauaaugccugcaucggcucuaucagaaacgggaccuacgaccaugacguuuaccgcgaugaggcucugaauaaccgguuccagauuaaaggcguggaacucaaguccggauauaaagacuggauccuguggauuagcuuugccaucuccugcuuccuucugugugucgcccuccugggcuuuauuaugugggcuugccagaaggggaauaucagauguaacaucugcauuuga

SEQ ID NO: 192121 - RNA, 1701 nt, Artificial Sequence
  derived and/or modified CDS sequence (opt5) from hemagglutinin__InfluenzaA__AAX35821
augaagaccaucauugcccugagcuacauccucugccugguguucgcucagaaacuucccggcaacgacaauuccacagccacgcugugucucgggcaccaugcggucccuaacggaaccauuguuaagacaaucaccaaugaucaaauugaggugacaaacgcuaccgaacuggugcagucuagcuccacaggcgggaucugcgacucuccgcaccagauccuugauggagagaauuguacccugauugacgcccuccugggcgauccccagugcgacggguuucaaaacaaaaagugggaucuguucgucgaaagaagcaaagccuauuccaauuguuacccuuaugacgugcccgauuacgcuucucuccggagccugguugccuccagcggaacgcuugaguuuaacaaugaaucuuucaacuggaccggcgugacacagaauggcaccuccagcgcuugcaagcgcaagucuaacaaauccuuuuucagcagacugaauuggcucacacaucugaaguauaaauacccugcccuuaacgucaccaugcccaauaacgagaaguuugacaaacuguauaucuggggagugcaccauccugggacggauaacgaccagauuucucucuacgcgcaggccuccggccggaucacaguuagcaccaagcgcucccaacagacagugauuccgaauaucgggucuagaccccggguccgcgaugugagcuccagaauuagcaucuacuggaccaucgugaagccuggagacauucugcugaucaacucuaccggcaaucucauugcuccccggggguauuucaaaauccgcuccggaaagagcucuauuaugagaagcgacgccccuaucggcaaauguaacuccgagugcaucacacccaauggcucuauuccgaacgauaagccuuuucagaaugucaaccggaucacguacggggcuuguccccgcuauguuaaacagaauacccugaaacuugccacaggaaugagaaacgugccugaacggcaaacccgcggcauuuucggggcgaucgccggauuuauugagaauggcugggaagggaugguggacggaugguacggcuucagacaccagaacagcgagggcacagggcaggcugccgaucugaaguccacccaagcugccaucaaucagaucaacggaaagcucaaucggcugauuggcaagacgaacgagaaauuucaccagaucgaaaaggaguucagcgaagucgaggggcgcauucaggaccuugaaaaauauguggaggauacaaagaucgaccuguggucuuacaacgccgagcuccugguugcucuggaaaaucaacauaccauugaucucaccgacuccgagaugaacaaacuguucgaaagaacaaagaagcagcuucgggagaaugcggaagauaugggaaacggcugcuuuaaaaucuaucacaagugugacaaugccugcauugggagcaucagaaacggcaccuacgaucaugacguguaccgcgacgaggcucugaauaaccgguuccagaucaaaggagucgagcucaagucuggcuauaaagauuggauucuguggaucuccuuugccauuagcugcuuccuucuguguguggcccuccugggguuuaucaugugggcuugccagaagggaaauauuagauguaacaucugcaucuga

SEQ ID NO: 192122 - RNA, 1701 nt, Artificial Sequence; identical to SEQ ID NO: 192103
  derived and/or modified CDS sequence (opt5) from hemagglutinin__InfluenzaA__AAX35831

SEQ ID NO: 192123 - RNA, 1701 nt, Artificial Sequence
  derived and/or modified CDS sequence (opt5) from hemagglutinin__InfluenzaA__AAX35851
augaagaccaucauugcccugagcuacauccucugccugguguucgcucagaaacuucccggcaacgacaauuccacagccacgcugugucucgggcaccaugcggucccuaacggaacccugguuaagacaauuaccaaugaucaaaucgaggugacaaacgcuaccgaacuugugcagucuagcuccacaggcagaauuugcgacucuccgcaccagauccuggauggggagaauuguacccucaucgacgcccugcugggagauccccauugcgacggcuuucagaacaaagaaugggaucucuucgucgagcggagcaaggccuauuccaauuguuacccuuaugacgugcccgauuacguuucucugcgcagccuuguggcuuccagcgggacgcuggaauuuaacaaugagucuuucaacuggaccggagucgcccaaaauggcacauccagcgcuugcaaaagacggucugacaaguccuuuuucagccgccucaacuggcugcaccagcuuaaguauaaauacccugcccugaaugugaccaugcccaacaaugagaaguuugauaaacucuauauuuggggcguucaucacccugggacagacucugaucagaucucccuguacgcgcaggccagcggaagagugaccgucuccacgaagcggucucaacagacagugauuccgaacaucggcagccgccccugggugagaggggucuccagccggauuucuaucuacuggaccauuguuaaaccuggagacauccugcucaucaacuccacaggcaaucugauugcuccccgcggguauuucaagaucagaagcggaaagucuagcauuaugcgguccgacgccccuaucggcaaauguaacucugaaugcauuacccccaauggcagcaucccgaacgauaagccuuuucagaaugugaaccgcaucaccuacgggcccuguccuagauaugugaaacagaauacacuuaagcuggcuacgggaaugcggaacguccccgagaaacaaacccgcggcauuuucggggccaucgcgggauuuauugaaaauggcugggaggggaugauggacggaugguacggcuucagacaccagaacuccgagggcacagggcaggccgcugaucucaagagcacccaagccgcuaucaaucagauuaacggaaaacugaaucggcuuaucgaaaagacaaacgagaaguuucaucagaucgaaaaagaguucucugaaguggagggccgcauucaggaccuggagaaguauguugaagauaccaaaaucgaccucugguccuacaaugccgagcugcugguggcccucgaaaaccaacacacgauugaucugacagacagcgagaugaacaaacuuuucgaaagaaccaagaagcagcugcgggagaaugcugaggauauggggaacggaugcuuuaagaucuaucauaaaugugacaaugcgugcauuggcucuaucagaaacgggaccuacgaucacgacgucuaccgcgacgaagcccucaauaaccgguuccagauuaagggcguggagcugaaauccggauauaaggauuggauccuuuggaucagcuuugcuauuuccugcuuccugcucuguaucguucugcugggcuuuauuaugugggccugccagaaagggaauaucagauguaacauuugcaucuga

SEQ ID NO: 192124 - RNA, 1701 nt, Artificial Sequence
  derived and/or modified CDS sequence (opt5) from hemagglutinin__InfluenzaA__AAX35861
augaagaccaucauugcccugagcuacauccucugccugguguucgcucagaaacuucccggcaacgacaauuccacagccacgcugugucucgggcaccaugcggucccuaacggaacccugguuaagacaauuaccaaugaucaaaucgaggugacaaacgcuaccgaacuugugcagucuagcuccacaucuagaauuugcgacagcccgcaccagauccuggauggcgagaauuguacccucaucgacgcccugcugggggauccccauugcgacggauuucagaacaaagaaugggaucucuucgucgagcgguccaaggccuauucuaauuguuacccuuaugacgugcccgauuacguuagccugcgcucccuuguggcuagcucuggcacgcuggaauuuaacaaugaguccuucaacuggaccggggucgcccaaaauggaacaagcucugcuugcaaaagacgguccgacaagagcuuuuucucucgccucaacuggcugcaccagcuuaaguauaaauacccugcccugaaugugaccaugcccaacaaugagaaguuugauaaacucuauauuuggggcguucaucacccuggcacagacuccgaucagaucagccuguacgcgcaggccuccgggagaauuaccgugucuacgaagcggagccaacagacagucaucccgaacauuggauccggccccugggugcgcggggugagcucuagaaucuccauuuacuggaccaucgucaaaccuggagacauccugcucauuaacagcacaggcaaucugaucgcuccccggggguauuucaagauucgcucuggaaagagcuccaucaugagaucugacgccccuauuggcaaauguaacagcgaaugcaucacccccaauggcuccaucccgaacgauaagccuuuucagaauguuaaccggauuaccuacggggcuuguccccgcuaugugaaacagaauacacuuaagcuggccacgggaaugagaaacgugccugagaaacaaacccggggcaucuucggggcgauugccggauuuaucgaaaauggcugggaggggaugauggacggaugguacggcuuccgccaccagaacagcgagggcacagggcaggcugccgaucucaagucuacccaagcugccauuaaucagaucaacggaaaacugaauagacuuaucgaaaagacaaacgagaaguuucaucagauugaaaaagaguucuccgaagucgagggccggauccaggaccuggagaaguauguggaagauaccaaaauugaccucuggagcuacaaugccgagcugcugguugcucucgaaaaccaacacacgaucgaucugacagacucugagaugaacaaacuuuucgaaagaaccaagaagcagcugcgcgagaaugcggaggauauggggaacggaugcuuuaagauuuaucauaaaugugacaaugccugcaucggcuccauucggaacgggaccuacgaucacgacguguacagagacgaagcucucaauaaccgcuuccagaucaagggcgucgagcugaaaagcggauauaaggauuggauccuuuggauuuccuuugccaucucuugcuuccugcucuguauugugcugcugggcuuuaucaugugggccugccagaaagggaauauucgguguaacaucugcaucuga

SEQ ID NO: 192125 - RNA, 1701 nt, Artificial Sequence
  derived and/or modified CDS sequence (opt5) from hemagglutinin__InfluenzaA__AAX35871
augaagaccaucauugcccugagcuacauccucugccugguguucgcucagaaacuucccggcaacgacaauuccacagccacgcugugucucgggcaccaugcggucccuaacggaacccugguuaagacaauuaccaaugaucaaaucgaggugacaaacgcuaccgaacuugugcagucuagcuccgccucuagaauuugcgacagcccgcaccagauccuggauggcgagaauuguacacucaucgacgcccugcugggggauccccauugcgacggauuucagaacaaagaaugggaucucuucgucgagcgguccaaggcuuauucuaauuguuacccuuaugacgugcccgauuacguuagccugcgcucccuuguggccagcucuggcacccuggaauuuaacaaugaguccuucaacuggacgggggucgcucaaaauggaaccagcuuugccugcaaaagacggucugacaaguccuucuuuagccgccucaacuggcugcaccagcuuaaguauaaauacccugcgcugaaugugacaaugcccaacaaugagaaguucgauaaacucuauauuuggggcguucaucacccuggcaccgacucugaucagaucucccuguacgcccaggcuagcgggagagugacagucuccaccaagcggucucaacagacggugauuccgaacaucggaagcggccccugggugcgcggggucuccagcagaauuucuaucuacuggacaauuguuaaaccuggagacauccugcucaucaacuccaccggcaaucugauugcuccccggggguauuuuaagauccgcagcggaaagucuagcauuaugagauccgacgccccuaucggcaaauguaacucugaaugcauuacacccaauggcagcaucccgaacgauaagccuuuccagaaugugaaccggaucaccuacggggccuguccccgcuaugugaaacagaauacccuuaagcuggcgacaggaaugagaaacgucccugagaaacaaacgcggggcauuuuuggggccaucgcuggauucauugaaaauggcugggaggggaugauggacggaugguacggcuuucgccaccagaacuccgagggcaccgggcaggccgcugaucucaagagcacacaagccgccaucaaucagauuaacggaaaacugaauagacuuaucgaaaagaccaacgagaaguuccaucagaucgaaaaagaguucucugaaguggagggccggauucaggaccuggagaaguauguugaagauacaaaaaucgaccucugguccuacaaugcugagcugcugguggcgcucgaaaaccaacacaccauugaucugacggacagcgagaugaacaaacuuuuugaaagaacaaagaagcagcugcgcgagaaugccgaggauauggggaacggaugcuucaagaucuaucauaaaugugacaaugcuugcauuggcucuauccggaacgggaccuacgaucacgacgucuacagagacgaagcccucaauaaccgcuuucagauuaagggcguggagcugaaauccggauauaaggauuggauccuuuggaucagcuucgccauuuccugcuuucugcucuguaucguucugcugggcuucauuaugugggcuugccagaaagggaauauccgguguaacauuugcaucuga

SEQ ID NO: 192126 - RNA, 1701 nt, Artificial Sequence; identical to SEQ ID NO: 192119
  derived and/or modified CDS sequence (opt5) from hemagglutinin__InfluenzaA__AAX38237

SEQ ID NO: 192127 - RNA, 1701 nt, Artificial Sequence
  derived and/or modified CDS sequence (opt5) from hemagglutinin__InfluenzaA__AAX47515
augaaggccaucauugcucugagcuacauccucugccugguguucgcccagaaacuucccggcaacgacaauuccaccgcgacacugugucucgggcaccaugcugucccuaacggaacgcugguuaagaccauuacaaaugaucaaaucgaggugaccaacgccacagaacuugugcagucuagcuccaccggcagaauuugcgacucuccgcaccagauccuggauggggagaauuguacacucaucgacgcccugcugggagauccccauugcgacggcuuucagaacaaagaaugggaucucuucgucgagcggagcaaggcuuauuccaauuguuacccuuaugacgugcccgauuacguuucucugcgcagccuuguggccuccagcgggacccuggaauuuaacaaugagucuuucaacuggacgggagucgcucaaaauggcaccuccagcgccugcaaaagacggucugacaaguccuuuuucagccgccucaacuggcugcaccagcuuaaguauaaauacccugcgcugaaugugacaaugcccaacaaugagaaguuugauaaacucuauauuuggggcguucaucacccugggaccgacucugaucagaucucccuguacgcccaggcuagcggaagagugacagucuccaccaagcggucucaacagacggugauuccgaacaucggcagccgccccugggugagaggggucuccagccggauuucuaucuacuggacaauuguuaaaccuggagacauccugcucaucaacuccaccggcaaucugauugcccccagaggguauuucaagaucagaagcggaaagucuagcauuaugcgguccgacgcuccuaucggcaaauguaacucugaaugcauuacacccaauggcagcaucccgaacgauaagccuuuucagaaugugaaccgcaucaccuacggggccugucccagauaugugaaacagaauacccuuaagcuggcgacaggaaugcggaacgucccugagaaacaaacgcgcggcauuuucggggccaucgcuggauuuauugaaaauggcugggaggggaugauggacggaugguacggcuucagacaccagaacuccgagggcaccgggcaggccgcugaucucaagagcacacaagccgccaucaaucagauuaacggaaaacugaaucggcuuaucgaaaagaccaacgagaaguuucaucagaucgaaaaagaguucucugaaguggagggccgcauucaggaccuggagaaguauguugaagauacaaaaaucgaccucugguccuacaaugcugagcugcugguggcgcucgaaaaccaacacaccauugaucugacggacagcgagaugaacaaacuuuucgaacgcacaaagaagcagcugcgggagaaugccgaggauauggggaacggaugcuuuaagaucuaucauaaaugugacaaugcuugcauuggcucuaucagaaacgggaccuacgaucacgacgucuaccgcgacgaagcccucaauaaccgguuccagauuaagggcguggagcugaaauccggauauaaggauuggauccuuuggaucagcuuugccauuuccugcuuccugcucuguaucguucugcugggcuuuauuaugugggcuugccagaaagggaauaucagauguaacauuugcaucuga

SEQ ID NO: 192128 - RNA, 1701 nt, Artificial Sequence
  derived and/or modified CDS sequence (opt5) from hemagglutinin__InfluenzaA__AAX47525
augaagaccaucauugcccugagcuacauccucugccugguguucgcucagaaacuucccggcaacgacaauuccacagccacgcuguguauggggcaccaugcggucccuaacggaacccucguuaagacaauuaccaaugaucaaaucgaggugacaaacgcuaccgaacuggugcagucuagcuccacaggcagaauuugcgacucuccgcaccagauccuugauggggagaauuguacccugaucgacgcccuccugggagauccccauugcgacggcuuucagaacaaagaaugggaucuguucgucgagcggagcaaggccuauuccaauuguuacccuuaugacgugcccgauuacguuucucuccgcagccugguggcuuccagcgggacgcuugaauuuaacaaugagucuuucaacuggaccggagucgcccaaaauggcacauccagcgcuugcaaaagacggucuaacaaguccuuuuucagccgccugaauuggcuccaccagcugaaguauaaauacccugcccuuaacgugaccaugcccaauaacgagaaguuugacaaacuguauauuuggggcguucaucacccugauacagacucuaaccagaucucccucuacgcgcaggccagcgggagagugaccgucuccacgaagcggucucaacagacagugauuccgaauaucggaagcggccccugggugcgcggggucuccagcagaauuucuaucuacuggaccauuguuaaaccuggagauauccugcugaucaacuccacaggcaaucucauugcuccccggggguauuucaagauccgcagcggaaagucuagcauuaugagauccgacgccccuaucggcaaauguaacucugaaugcauuacccccaauggcagcaucccgaacgacaagccuuuucagaaugugaaccggaucaccuacggggcuuguccccgcuaugugaaacagaauacacugaagcuggccacgggaaugagaaacgucccugagaaacaaacccggggcauuuucggggcgaucgccggauuuauugaaaauggcugggaggggaugauggauggaugguacggcuuccgccaccagaacuccgagggcacagggcaggcugccgaccuuaagagcacccaagcugccaucaaucagauuaacggaaaacucaauagacugaucgaaaagacaaacgagaaguuucaucagaucgaaaaagaguucucugaaguggagggccggauucaggaucuugagaaguauguugaagacaccaaaaucgaucugugguccuacaacgccgagcuccugguggcucuggaaaaucaacacacgauugaccucacagauagcgagaugaacaagcuguucgaaagaaccaaaaagcagcuucgcgagaaugcggaggacauggggaacggaugcuuuaagaucuaucauaaaugugauaaugccugcauuggcucuauccggaacgggaccuacgaccacgaugucuacagagacgaagcucugaauaaccgcuuccagauuaagggcguggagcucaaauccggauauaaggacuggauccuguggaucagcuuugccauuuccugcuuccuucuguguaucguucuccugggcuuuauuaugugggccugccagaaagggaauauccgguguaacauuugcaucuga

SEQ ID NO: 192129 - RNA, 1701 nt, Artificial Sequence; identical to SEQ ID NO: 192119
  derived and/or modified CDS sequence (opt5) from hemagglutinin__InfluenzaA__AAX47535

SEQ ID NO: 192130 - RNA, 1701 nt, Artificial Sequence; identical to SEQ ID NO: 192103
  derived and/or modified CDS sequence (opt5) from hemagglutinin__InfluenzaA__AAX56380

SEQ ID NO: 192131 - RNA, 1701 nt, Artificial Sequence; identical to SEQ ID NO: 192103
  derived and/or modified CDS sequence (opt5) from hemagglutinin__InfluenzaA__AAX56390

SEQ ID NO: 192132 - RNA, 1701 nt, Artificial Sequence
  derived and/or modified CDS sequence (opt5) from hemagglutinin__InfluenzaA__AAX56400
augaagaccaucauugcccugagcuacauccucugccugguguucgcucagaaacuucccggcaacgacaauuccacagccacgcugugucucgggcaccaugcggucccuaacggaaccauuguuaagacaaucaccaaugaucaaauugaggugacaaacgcuaccgaacuggugcagucuagcuccacaggcgggaucugcgacucuccgcaccagauccuugauggagagaauuguacccugauugacgcccuccugggcgauccccagugcgacggguuucaaaacaaaaagugggaucuguucgucgaaagaagcaaagccuauuccaauuguuacccuuaugacgugcccgauuacgcuucucuccggagccugguugccuccagcggaacgcuugaguuuaacaaugaaucuuucaacuggaccggcgugacacagaauggcaccuccagcgcuugcgagcgcagaucuaacaaguccuuuuucagccggcugaauuggcucacacaucugaaguauaaauacccugcccuuaacgucaccaugcccaauaacgagaaguuugacaaacuguauaucuggggagugcaccauccugggacggauucugaccagauuucccucuacgcgcaggccagcggccgcaucacaguuuccaccaagagaucucaacagacagugauuccgaacaucgggagccggccccgcgucagagauauuuccagccggaucucuaucuacuggaccauugugaaaccuggagacauccugcugauuaauuccaccggcaaccucaucgcuccccgcggguauuucaagauuagaagcggaaagucuagcaucaugcgguccgacgccccuaucggcaaauguaauucugaaugcauuacacccaacggcagcaucccgaaugauaagccuuuucagaacgugaaucgcauuacguacggggcuugucccagauaugucaaacagaacacccugaaacuugccacaggaaugcggaauguuccugagaaacaaacccgcggcaucuucggggcgauugccggauuuaucgaaaacggcugggaggggaugguggacggaugguacggcuucagacaccagaauagcgagggcacagggcaggcugccgaucugaaguccacccaagcugccaucaaccagauuaauggaaaacucaaccggcugaucggcaagacgaaugaaaaguuucaccagauugagaaagaguucucugaaguggaagggagaauccaggaccuugagaaguaugucgaggauacaaaaauugaccugugguccuacaacgccgaacuccugguggcucuggagaaccaacauaccaucgaucucaccgacagcgaaaugaauaagcuguucgagcgcacaaagaagcagcuucgggaaaacgcggaggauaugggaaauggcugcuuuaagauuuaucacaaaugugacaacgccugcaucgggucuaucagaaauggcaccuacgaucaugacguuuaccgcgacgaggcucugaacaaucgguuccagauuaagggaguggaacucaaauccggcuauaaggauuggauccuguggauuagcuuugccaucuccugcuuccuucugugugucgcccuccugggguuuauuaugugggcuugccagaaaggaaacaucagaugugacaucugcauuuga

SEQ ID NO: 192133 - RNA, 1701 nt, Artificial Sequence; identical to SEQ ID NO: 192103
  derived and/or modified CDS sequence (opt5) from hemagglutinin__InfluenzaA__AAX56410

SEQ ID NO: 192134 - RNA, 1701 nt, Artificial Sequence
  derived and/or modified CDS sequence (opt5) from hemagglutinin__InfluenzaA__AAX56420
augaagaccaucauugcccugagcuacuuccucugccugguguuugcucagaaacuucccggcaacgacaauuccacagccacgcugugucucgggcaccaugcggucccuaacggaaccaucguuaagacaauuaccaaugaucaaaucgaggugacaaacgcuaccgaacuggugcagucuagcuccacaggcgggauuugcgacucuccgcaccagauccuugauggagagaauuguacccugaucgacgcccuccugggcgauccccagugcgacggguuccaaaacaaaaagugggaucuguuugucgaaagaagcaaagccuauuccaauuguuacccuuaugacgugcccgauuacgcuucucuccggagccugguugccuccagcggaacgcuugaguucaacaaugaaucuuuugacuggaccggcgugacacagaacggcaccuccagcgcuugcaagcgcagaucuaauaaguccuucuuuagccggcugaacuggcucacacaucugaaauauaaguacccugcccuuaaugucaccaugcccaacaaugagaaauucgauaagcuguauauuuggggagugcaccauccugggacggacucugaucagaucucccucuacgcgcaggccagcggccgcauuacaguuuccaccaaaagaucucaacagacagugaucccgaacauugggagccggccccgcgucagagacguguccagccggaucucuauuuacuggaccaucgugaagccuggagacauccugcugauuaacuccaccggcaaucucaucgcuccccgcggguauuuuaagauuagaagcggaaaaucuagcaucaugcgguccgaugccccuauuggcaaguguaacucugagugcaucacacccaauggcagcaucccgaacgacaaaccuuuccagaaugucaaccgcauuacguacggggcuugucccagauauguuaagcagaauacccugaaacuugccacaggaaugcggaacgugccugaaaagcaaacccgcggcaucuuuggggcgauugccggauucaucgagaauggcugggaagggaugguggauggaugguacggcuuuagacaccagaacuccgagggcacagggcaggcugccgaccugaaaagcacccaagcugccauuaaucagaucaacggaaagcucaaucggcugaucggcaagacgaacgagaaauuccaccagauugaaaaggaguucucugaagucgaggggagaauccaggaucuugaaaaauauguggaggacacaaagauugaucugugguccuacaaugccgagcuccugguugcucuggaaaaccaacauaccaucgaccucaccgauagcgagaugaacaaacuguuugaacgcacaaagaagcagcuucgggagaaugcggaagacaugggaaacggcugcuucaaaauuuaucacaagugugauaaugccugcaucgggucuauuagaaacggcaccuacgaccaugacguguaccgcgaugaggcucugaauaaccgguuucagaucaaaggagucgagcucaaguccggcuauaaagacuggauccuguggauuagcuucgccaucuccugcuuucuucuguguguggcccuccugggguucauuaugugggcuugccagaagggaaauaucagauguaacauuugcaucuga

SEQ ID NO: 192135 - RNA, 1701 nt, Artificial Sequence
  derived and/or modified CDS sequence (opt5) from hemagglutinin__InfluenzaA__AAX56430
augaagaccaucauugcccugagcuacauccucugccugguguucacacagaaacuucccggcaacgacaauuccacggcuacccugugucucgggcaccaugccgucccuaacggaacaauuguuaagaccaucacaaaugaucaaauugaggugaccaacgcgacagaacuggugcagucuagcuccaccggcgggaucugcgacucuccgcaccagauccuugauggagagaauuguacgcugauugacgcucuccugggcgauccccagugcgacggguuucaaaacaaaaagugggaucuguucgucgaaagaagcaaagccuauuccaauuguuacccuuaugacgugcccgauuacgccucucuccggagccugguugcuuccagcggaacccuugaguuuaacaaugaaucuuucaacuggacaggcgugacccagaauggcacauccagcgccugcgagcgcagaucuaacaaguccuuuuucagccggcugaauuggcucacccaucugaaguauaaauacccugcucuuaacgucacgaugcccaauaacgagaaguuugacaaacuguauaucuggggagugcaccauccugggacagauucugaccagauuucccucuacgcccaggcgagcggccgcaucaccguuuccacaaagagaucucaacagaccgugauuccgaacaucgggagccggccccgcgucagagauguguccagccggauuucuaucuacuggaccaucgugaaaccuggagacauucugcugaucaauuccacaggcaaccucauugcccccagaggguauuucaagaucagaagcggaaagucuagcauuaugcgguccgacgcuccuaucggcaaauguaauucugaaugcaucacgcccaacggcagcauuccgaaugauaagccuuuucagaacgucaaucgcaucaccuacggggccugucccagauauguuaaacagaacacacugaagcuggcuaccggaaugcggaaugugccugagaaacaaacacgcggcauuuucggggccaucgcgggauuuauugaaaacggcugggaggggaugguggacggaugguacggcuucagacaccaaaauuccgagggcaccgggcaggccgcugaucuuaagagcacgcaggccgcuaucaaccagaucaauggaaaacucaaccggcugauuggcaagacaaaugaaaaguuucaccagaucgagaaagaguucucugaagucgaagggcgcauucaggaccuugagaaguauguggaggauaccaaaaucgaccugugguccuacaacgccgaacuccugguugcccuggagaaccaacauaccauugaucucacagacagcgaaaugaauaagcuguucgagcgcaccaaaaagcagcuucgggaaaacgcugaggauaugggaaauggcugcuuuaagaucuaucacaaaugugacaacgcgugcauugggucuaucagaaauggcacauacgaucaugacguguaccgcgacgaggcccugaacaaucgguuccagaucaagggagucgaacucaaauccggcuauaaggauuggauucuguggaucagcuuugcuauuuccugcuuccuucuguguguggcccuccugggguuuaucaugugggccugccagaaaggaaacauuagaugugacaucugcaucuga

SEQ ID NO: 192136 - RNA, 1701 nt, Artificial Sequence
  derived and/or modified CDS sequence (opt5) from hemagglutinin__InfluenzaA__AAX56440
augaagaccaucauugcccugagcuacauccucugccugguguucgcucagaaacuucccggcaacgacaauuccacagccacgcugugucucgggcaccaugcggucccuaacggaacccugguuaagacaauuaccaaugaucaaaucgaggugacaaacgcuaccgaacuugugcaaaauucuagcacaggcagaauuugcgacuccccgcaccagauccuggauggggagaacuguacccucaucgacgcccugcugggagauccccauugcgacggcuuucagaauaaagaaugggaucucuucgucgagcggucuaaggccuauagcaacuguuacccuuaugacgugcccgauuacguuucccugcgcucucuuguggcuagcuccgggacgcuggaauuuaauaacgagagcuucaauuggaccggagucgcccagaacggcacaucuuccgcuugcaaaagacggagcgacaaguccuuuuucucucgccucaauuggcugcaccagcuuaaguauaaauacccugcccugaacgugaccaugcccaauaacgagaaguuugauaaacucuauauuuggggcguucaucacccugggacagacaacgaucagaucagccuguacgcgcaggccucuggaagagugaccgucuccacgaagcggagccaacagacagugauuccgaauaucggcuccgggcccugggugcgcggagucucuagcagaauuuccaucuacuggaccauuguuaaaccuggcgacauccugcucaucaacagcacagggaaucugauugcuccccggggauauuucaagauccgcucuggcaaguccagcauuaugagaucugacgccccuaucggcaaauguaacagcgaaugcauuacccccaauggguccaucccgaacgauaagccuuuucagaaugugaaccggaucaccuacggacccuguccucgcuaugugaaacagaauacacuuaagcuggcuacgggcaugagaaacguccccgagaaacaaacccgggggauuuucggagccaucgcgggcuuuauugaaaaugggugggagggaaugauggacggcugguacggcuuccgccaccagaacucugaggggacaggacaggccgcugaucucaagagcacccaagccgcuaucaaucagauuaacggcaaacugaauagacuuaucgaaaagacaaacgagaaguuucaucagaucgaaaaagaguucuccgaaguggaggggcggauucaggaccuggagaaguauguugaagauaccaaaaucgaccucuggagcuacaacgccgagcugcugguggcccucgaaaaucaacacacgauugaucugacagacucugagaugaacaaacuuuucgaaagaaccaagaagcagcugcgcgagaaugcugaggauaugggaaacggcugcuuuaagaucuaucauaaaugugacaaugcgugcauuggguccauccggaacggcaccuacgaucacgacgucuacagagacgaagcccucaauaaccgcuuccagauuaagggaguggagcugaaaagcggcuauaaggauuggauccuuuggaucucuuuugcuauuuccugcuuccugcucuguaucguucugcugggguuuauuaugugggccugccagaaaggaaauauccgguguaacauuugcaucuga

SEQ ID NO: 192137 - RNA, 1701 nt, Artificial Sequence; identical to SEQ ID NO: 192119
  derived and/or modified CDS sequence (opt5) from hemagglutinin__InfluenzaA__AAX56450

SEQ ID NO: 192138 - RNA, 1701 nt, Artificial Sequence
  derived and/or modified CDS sequence (opt5) from hemagglutinin__InfluenzaA__AAX56460
augaagaccaucauugcccugagcuacauccucugccugguguucgcucagaaacuucccgagaacgacaauuccacagccacgcugugucucggccaccaugcggucccuaacgggacccugguuaagacaauuaccaaugaucaaaucgaagugacaaacgcuaccgagcuugugcagucuagcuccacaggaagaauuugcgacucuccgcaccagauccuggauggcgaaaauuguacccucaucgacgcccugcugggggauccccauugcgacggauuucagaacaaagagugggaucucuucgucgaacggagcaaggccuauuccaauuguuacccuuaugacgugcccgauuacguuucucugcgcagccuuguggcuuccagcggcacgcuggaguuuaacaaugagucuuucaacuggaccggggucgcccaaaauggaacauccagcgcuugcaaaagacggucugacaaguccuuuuucagccgccucaacuggcugcaccagcuuaaguauaaauacccugcccugaaugugaccaugcccaacaaugaaaaguuugauaaacucuauauuuggggcguucaucacccuggcacagacucugaucagaucucccuguacgcgcaggccagcgggagagugaccgucuccacgaagcggucucaacagacagugauuccgaacaucggaagccgccccugggugagaggcgucuccagccggauuucuaucuacuggaccauuguuaaaccuggggacauccugcucaucaacuccacaggaaaucugauugcuccccgcggcuauuucaagaucagaagcgggaagucuagcauuaugcgguccgacgccccuaucggaaaauguaacucugagugcauuacccccaauggcagcaucccgaacgauaagccuuuucagaaugugaaccgcaucacccacggccccuguccuagauacgugaaacagaauacacuuaagcuggcuacggggaugcggaacguccccgaaaaacaaacccgcggaauuuucggcgccaucgcgggguuuauugagaauggaugggagggcaugauggacgggugguauggauucagacaucagaacuccgaaggcacaggccaggccgcugaucucaagagcacccaagccgcuaucaaucagauuaacgggaaacugaaucggcuuaucgagaagacaaacgaaaaguuucaccagaucgagaaagaguucucugaaguggagggacgcauucaggaccuggaaaaguacguugaggauaccaaaaucgaccucugguccuauaaugccgaacugcugguggcccucgagaaccaacauacgauugaucugacagacagcgaaaugaacaaacuuuucgagagaaccaagaagcagcugcgggagaaugcugaagauaugggcaacgggugcuuuaagaucuaccacaaaugugacaaugcgugcauuggaucuaucagaaacggcaccuaugaucacgacgucuaccgcgacgaggcccucaauaaccgguuccagauuaaggggguggaacugaaauccggcuacaaggauuggauccuuuggaucagcuuugcuauuuccugcuuccugcucuguaucguucugcugggauuuauuaugugggccugccagaaaggcaauaucagauguaacauuugcaucuga

SEQ ID NO: 192139 - RNA, 1701 nt, Artificial Sequence
  derived and/or modified CDS sequence (opt5) from hemagglutinin__InfluenzaA__AAX56470
augaagaccaucauugcccugagcuacauccucugccugguguucgcucagaaacuucccggcaacgacaauuccacagccacgcugugucucgggcaccaugcggucccuaacggaacccugguuaagacaauuaccaaugaucaaaucgaggugacaaacgcuaccgaacuugugcagucuagcuccacaggcagaauuugcgacucuccgcaccagauccuggauggggagaauuguacccucaucgacgcccugcugggagauccccauugcgacggcuuucagaacaaagaaugggaucucuucgucgagcggagcaaggccuauuccaauuguuacccuuaugacgugcccgauuacguuucucugcgcagccuuguggcuuccagcgggacgcuggaauuuaacaaugagucuuucaacuggaccggagucgcccaaaauggcacauccagcgcuugcaaaagacggucugacaaguccuuuuucagccgccucaacuggcugcaccagcuuaaguauaaauacccugcccugaaugugaccaugcccaacaaugagaaguuugauaaacucuauauuuggggcguucaucacccugggacagacucugaucagaucucccuguacgcgcaggccagcggaagagugaccgucuccacgaagcggucucaacagacagugauuccgaacaucggcagccgccccugggugagaggggucuccagccggauuucuaucuacuggaccauuguuaaaccuggagacauccugcucaucaacuccacaggcaaucugauugcuccccgcggguauuucaagaugagaagcggaaagucuagcaucaugcgguccgacgccccuauuggcaaauguaacucugaaugcaucacccccaauggcagcauuccgaacgauaagccuuuucagaaugugaaccgcaucaccuacgggcccuguccuagauaugugaaacagaauacacuuaagcuggcuacgggaaugcggaacguccccgagaaacaaacccgcggcaucuucggggccauugcgggauuuaucgaaaauggcugggaggggaugauggacggaugguacggcuucagacaccagaacuccgagggcacagggcaggccgcugaucucaagagcacccaagccgcuauuaaucagaucaacggaaaacugaaucggcuuauugaaaagacaaacgagaaguuucaucagaucgaaaaagaguucucugaaguggagggcagaauccaggaccuggagaaguauguugaagauaccaaaauugaccucugguccuacaaugccgagcugcugguggcccucgaaaaccaacacacgaucgaucugacagacagcgagaugaacaaacuuuucgaacgcaccaagaagcagcugcgggagaaugcugaggauauggggaacggaugcuuuaagauuuaucauaaaugugacaaugcgugcaucggcucuauuagaaacgggaccuacgaucacgacgucuaccgcgacgaagcccucaauaaccgguuccagaucaagggcguggagcugaaauccggauauaaggauuggauucuuuggaucagcuuugcuaucuccugcuuccugcucuguauuguucugcugggcuuuaucaugugggccugccagaaagggaauauuagauguaacaucugcauuuga

SEQ ID NO: 192140 - RNA, 1701 nt, Artificial Sequence; identical to SEQ ID NO: 192123
  derived and/or modified CDS sequence (opt5) from hemagglutinin__InfluenzaA__AAX56480

SEQ ID NO: 192141 - RNA, 1701 nt, Artificial Sequence
  derived and/or modified CDS sequence (opt5) from hemagglutinin__InfluenzaA__AAX56510
augaagaccaucauugcccugagcuacauccucugccugguguucgcucagaaacuucccggcaacgacaauuccacagccacgcugugucucgggcaccaugcggucccuaacggaacccugguuaagacaauuaccaaugaucaaaucgaggugacaaacgcuaccgaacuugugcagucuagcuccacaggcagaauuugcgacucuccgcaccagauccuggauggggagaauuguacccucaucgacgcccugcugggagauccccauugcgacggcuuucagaacaaagaaugggaucucuucgucgagcggagcaaggccuauuccaauuguuacccuuaugacgugcccgauuacguuucucugcgcagccuuguggcuuccagcgggacgcuggaauuuaacaaugagucuuucaacuggaccggagucgcccaaaauggcacauccagcgcuugcaaaagacggucugacaaguccuuuuucagccgccucaacuggcugcaccagcuuaaguauaaauacccugcccugaaugugaccaugcccaacaaugagaaguuugauaaacucuauauuuggggcguucaucacccugggacagacucugaucagaucucccuguacgcgcaggccagcggaagagugaccgucuccacgaagcggucucaacagacagugauuccgaacaucggcagccgccccugggugagaggggucuccagcaaaauuucuaucuacuggaccauuguuaagccuggagacauccugcucaucaacuccacaggcaaucugauugcuccccggggguauuucaagauccgcagcggaaaaucuagcauuaugagauccgacgccccuaucggcaaguguaacucugaaugcauuacccccaauggcagcaucccgaacgauaaaccuuuucagaaugugaaccggaucaccuacggggcuuguccccgcuaugugaagcagaauacacuuaaacuggccacgggaaugagaaacgucccugagaagcaaacccggggcauuuucggggcgaucgccggauuuauugaaaauggcugggaggggaugauggacggaugguacggcuuccgccaccagaacuccgagggcacagggcaggcugccgaucucaaaagcacccaagcugccaucaaucagauuaacggaaagcugaauagacuuaucgaaaagacaaacgagaaauuucaucagaucgaaaaggaguucucugaaguggagggccggauucaggaccuggagaaauauguugaagauaccaagaucgaccucugguccuacaaugccgagcugcugguggcucucgaaaaccaacacacgauugaucugacagacagcgagaugaacaaacuuuucgaaagaaccaagaagcagcugcgcgagaaugcggaggauauggggaacggaugcuuuaaaaucuaucauaagugugacaaugccugcauuggcucuauccggaacgggaccuacgaucacgacgucuacagagacgaagcucucaauaaccgcuuccagauuaaaggcguggagcugaaguccggauauaaagauuggauccuuuggaucagcuuugccauuuccugcuuccugcucuguaucguucugcugggcuuuauuaugugggccugccagaaggggaauauccgguguaacauuugcaucuga

SEQ ID NO: 192142 - RNA, 1701 nt, Artificial Sequence; identical to SEQ ID NO: 192119
  derived and/or modified CDS sequence (opt5) from hemagglutinin__InfluenzaA__AAX56520

SEQ ID NO: 192143 - RNA, 1701 nt, Artificial Sequence
  derived and/or modified CDS sequence (opt5) from hemagglutinin__InfluenzaA__AAX56530
augaaggccaaacugcucgugcugcuuugcgcuuucaccgccacauacgcggacacgaucuguauuggcuaucacgcuaacaauagcaccgauacagucgacaccguucuggagaagaacgugacagugacccauuccgucaaucuccuggaagauucucacaacgggaaacuuugcagacugaagggaacagcuccccuccagcugggcaauuguagcaucgccggguggauucugggaaacccugagugcgaaucccucuuuucuaaagagagcugguccuacaucgccgaaaccccgaaucccaagaacggcacguguuauccuggguacuucgccgacuaugaggagcugcgggaacaacuuucuagcguguccagcuuugagcgcuucgaaauuuuucccaaggauucuuccuggccuaaucauaccguuacaaaaggagugaccgcuagcugcucucacaacggcaaguccagcuucuacaaaaaucugcucuggcugacagagaagaacggccuuuaucccaaucugucuaaauccuacgucaacaagaaggggaaagaggugcucguucuguggggagugcaucacccuagcaauaugggcgaccagagagccaucuaccacaaggaaaacgcguaugucuccgugcugucuagccauuacucccggcgcuuuaccccggagaucgccaaaagacccaaggugcgggaucaggaagggcgcauuaacuauuacuggacgcuccuggagccuggagacacaaucauuuucgaagcuaauggcaaccuuaucgcccccugguaugcuuuugcccugagcagaggguucggaucuggcauuaucauuuccaaugcgagcaugggcgagugugaugccaaaugccagaccccucaaggggcuaucaacucuagccuccccuuucagaauguccacccgguuacaaucggagaguguccuaaguacgugcgguccaccaaacugcgcauggugaccggccuuagaaacguccccucuauucagagccgggggcuguucggagccaucgcuggcuuuauugaagggggauggacaggcaugaucgacggcugguauggguaccaucaccagaaugagcaaggauccggcuacgccgccgaucagaaaagcacgcagaacgcuauuaaugggaucaccaacaagguuaauucuaucauugaaaagaugaacacacaguucaccgcggugggaaaggaguucaauaaacucgaaaagcgcauggagaaccugaauaaaaagguggacgauggcuuucuggacaucuggacauauaacgccgagcuccugguccuucuggaaaacgagagaacccucgacuuccacgaucugaaugugaagaaccuuuacgaaaaaguuaagaaucaacugaaaaacaaugcuaaggagauugggaacggcugcuuugaguucuaucauaaauguaauaacgaaugcauggaguccgugaagaauggaacguacgacuauccuaaguacagcaaagaaucuaagcucaaccgggagaaaaucgauggcgucaagcuggaauccauggggguguaucagauucuggccaucuacagcacagucgccuccucucucgugcugcuuguuagccugggagcuaucuccuuuuggaugugcucuaauggcagccuccagugucgcauuugcaucuga

SEQ ID NO: 192144 - RNA, 1701 nt, Artificial Sequence
  derived and/or modified CDS sequence (opt5) from hemagglutinin__InfluenzaA__AAX56550
augaagaccaucauugcccugagcuacauccucugccugguguucgcucagaaacuucccgucaacgacaauuccacagccacgcugugucucggccaccaugcgguuccuaacgggacccuggugaagacaauuaccaaugaucacaucgaggugacaaacgcuaccgaacuuguccaaucuagcuccacaggaagaauuugcgacucuccgcaucagauccuggauggcgagaauuguacccucaucgacgcccugcugggggauccccacugcgacggauuucagaacaaagaaugggaucucuucguggagcggagcacggccuauuccaauuguuacccuuaugacguucccgauuacgcuucucugcgcagccuuguggccuccagcggcacccuggaauuuaacaaugagucuuucaacuggacaggggucgcucagaauggaaccuccagcgccugcaagagacggucuauuaaauccuuuuucagccgccucaacuggcugcaucaacuuaaguauaaguacccugcgcugaaugugacaaugcccaacaaugagaaauuugacaagcucuauaucuggggcguucaccacccuucuaccgauuccgaccagauuagccuguacgcccaggcuuccggcagagugacggucucuacaaaacggagccagcaaaccgugaucccgaacauugggucccgccccugggugagaggagucagcucucggaucuccauuuacuggacaaucguuaagccuggcgauauccugcucauuaacagcaccgggaaucugaucgcuccccgcggauauuucaaaauuagaucuggcaagagcuccaucaugcggucuaacgccccuauugggaaguguaauagcgaaugcaucacccccaacggauccaucccgaaugacaaaccuuuucagaacgugaaucgcauuacauacggcgccugucccagauaugugaagcagaacacgcuuaaacuggcgaccggcaugcggaaugucccugagaagcagacacgcgggaucuucggagccauugcuggcuuuaucgaaaacgggugggagggaaugguggacggcugguacggguucagacaucaaaauagcgagggaaccggccaggccgcugaucucaaaucuacacaggccgccauuaaccaaaucaauggcaagcugaaccggcuuaucgagaaaaccaaugaaaaguuucaccagauugaaaaggaguucuccgaaguugaggggagaauccaggaccuggagaaauauguggaagauacgaagauugaccucuggagcuacaacgcugagcugcuggucgcgcucgaaaaccagcauacaaucgaucugaccgacucugagaugaauaaacuuuucgaacgcacccggaagcaacugagagagaacgccgaggauaugggaaauggcugcuuuaaaauuuaucacaagugugacaacgcuugcaucggguccauucgcaauggaacauacgaucacgacguguaccgggaugaagcccucaacaauagauuccagaucaagggcguugagcugaaaagcggguauaaggacuggauccuuuggauuuccuuugccaucucuugcuuccugcucugugugguccugcugggcuuuauuaugugggcuugccagaaaggaaacauccgcuguaauauuugcaucuga

SEQ ID NO: 192145 - RNA, 1701 nt, Artificial Sequence
  derived and/or modified CDS sequence (opt5) from hemagglutinin__InfluenzaA__AAX56560
augaagaccaucauugcccugagcuacauccucugccugguguucgcucagaaacuucccggcaacgacaauuccacagccacgcugugucucgggcaccaugcggucccuaacggaaccauuguuaagacaaucaccaaugaucaaauugaggugacaaacgcuaccgaacuggugcagaucucuagcacaggcgggaucugcgacuccccgcaccagauucuugauggagagaauuguacccugaucgacgcccuccugggcgauccccagugcgacggguuucaaaacaaaaagugggaucuguucgucgaaagaucuaaagccuauagcaauuguuacccuuaugacgugcccgauuacgcuucccuccggucucugguugccagcuccggaacgcuugaguuuaacaaugaaucuuucgacuggaccggcgugacacagaacggcaccucuuccgcuugcaagcgcagaagcaauaagagcuuuuucucccggcugaacuggcucacacaucugaaauauaaguacccugcccuuaaugucaccaugcccaacaaugagaaauuugauaagcuguauauuuggggagugcaccauccugggacggacagcgaucagaucucucucuacgcgcaggccuccggccgcauuacaguuagcaccaaaagaucccaacagacagugaucccgaacauugggucucggccccgcgucagagacgugagcucccggaucagcaucuacuggaccauugugaagccuggagacauccugcugauuaacucuaccggcaaucucaucgcuccccgcggguauuucaagauuagauccggaaaaagcucuaucaugcggagcgaugccccuaucggcaaguguaacuccgagugcauuacacccaauggcucuaucccgaacgacaaaccuuuucagaaugucaaccgcauuacguacggggcuugucccagauauguuaagcagaauacccugaaacuugccacaggaaugcggaacgugccugaaaagcaaacccgcggcaucuucggggcgauugccggauuuaucgagaauggcugggaagggaugguggauggaugguacggcuucagacaccagaacagcgagggcacagggcaggcugccgaccugaaauccacccaagcugccaucaaucagauuaacggaaagcucaaucggcugaucggcaagacgaacgagaaauuucaccagauugaaaaggaguucagcgaagucgaggggagaauccaggaucuugaaaaauauguggaggacacaaagauugaucuguggucuuacaaugccgagcuccugguugcucuggaaaaccaacauaccaucgaccucaccgauuccgagaugaacaaacuguucgaacgcacaaagaagcagcuucgggagaaugcggaagacaugggaaacggcugcuuuaaaauuuaucacaagugugauaaugccugcaucgggagcaucagaaacggcaccuacgaccaugacguguaccgcgaugaggcucugaauaaccgguuccagauuaaaggagucgagcucaagucuggcuauaaagacuggauccuguggauuuccuuugccaucagcugcuuccuucuguguguggcccuccugggguuuauuaugugggcuugccagaagggaaauaucagauguaacaucugcauuuga

SEQ ID NO: 192146 - RNA, 1701 nt, Artificial Sequence
  derived and/or modified CDS sequence (opt5) from hemagglutinin__InfluenzaA__AAX56570
augaagaccaucauugcccugagcuacauccucugccugguguucgcucagaaacuucccggcaacgacaauuccacagccacgcugugucucgggcaccaugcggucccuaacggaacccugguuaagacaauuaccaaugaucaaaucgaggugacaaacgcuaccgaacuugugcagucuagcuccacaucuagaauuugcgacagcccgcaccagauccuggauggcgagaauuguacccucaucgacgcccugcugggggauccccauugcgacggauuucagaacaaagaaugggaucucuucgucgagcgguccaaggccuauucuaauuguuacccuuaugacgugcccgauuacguuagccugcgcucccuuguggcuagcucuggcacgcuggaauuuaacaaugaguccuucaacuggaccggggucgcccaaaauggaacaagcucugcuugcaaaagacgguccgacaagagcuuuuucucucgccucaacuggcugcaccagcuuaaguauaaauacccugcccugaaugugaccaugcccaacaaugagaaguuugauaaacucuauauuuggggcguucaucacccuggcacagacuccgaucagaucagccuguacgcgcaggccuccgggagagugaccgucucuacgaagcggagccaacagacagugauuccgaacaucggaucccgccccugggugagaggcgucagcucugggauuuccaucuacuggaccauuguuaaaccuggagacauccugcucaucaacagcacaggcaaucugauugcuccccggggguauuucaagauccgcucuggaaagagcuccauuaugagaucugacgccccuaucggcaaauguaacagcgaaugcauuacccccaauggcuccaucccgaacgauaagccuuuucagaaugugaaccggaucaccuacggggcuuguccccgcuaugugaaacagaauacacuuaagcuggccacgggaaugagaaacgucccugagaaacaaacccggggcauuuucggggcgaucgccggauuuauugaaaauggcugggaggggaugauggacggaugguacggcuuccgccaccagaacagcgagggcacagggcaggcugccgaucucaagucuacccaagcugccaucaaucagauuaacggaaaacugaauagacuuaucgaaaagacaaacgagaaguuucaucagaucgaaaaagaguucuccgaaguggagggccggauucaggaccuggagaaguauguugaagauaccaaaaucgaccucuggagcuacaaugccgagcugcugguggcucucgaaaaccaacacacgauugaucugacagacucugagaugaacaaacuuuucgaaagaaccaagaagcagcugcgcgagaaugcggaggauauggggaacggaugcuuuaagaucuaucauaaaugugacaaugccugcauuggcuccauccggaacgggaccuacgaucacgacgucuacagagacgaagcucucaauaaccgcuuccagauuaagggcguggagcugaaaagcggauauaaggauuggauccuuuggaucuccuuugccauuucuugcuuccugcucuguaucguucugcugggcuuuauuaugugggccugccagaaagggaauauccgguguaacauuugcaucuga

SEQ ID NO: 192147 - RNA, 1701 nt, Artificial Sequence
  derived and/or modified CDS sequence (opt5) from hemagglutinin__InfluenzaA__AAX56590
augaagaccaucauugcccugagcuacauccucugccugguguucgcucagaaacuucccggcaacgacaauuccacagccacgcugugucucgggcaccaugcggucccuaacggaacccugguuaagacaauuaccaaugaucaaaucgaggugacaaacgcuaccgaacuugugcagucuagcuccacaucuagaauuugcgacagcccgcaccagauccuggauggcgagaauuguacccucaucgacgcccugcugggggauccccauugcgacggauuucagaacaaagaaugggaucucuucgucgagcgguccaaggccuauucuaauuguuacccuuaugacgugcccgauuacguuagccugcgcucccuuguggcuagcucuggcacgcuggaauuuaacaaugaguccuucaacuggaccggggucgcccaaaauggaacaagcucugcuugcaaaagacgguccgacaagagcuuuuucucucgccucaacuggcugcaccagcuuaaguauaaauacccugcccugaaugugaccaugcccaacaaugagaaguuugauaaacucuauauuuggggcguucaucacccuuccacagacagcgaucagaucucccuguacgcgcaggccucuggcagagugaccgucagcacgaagcggucccaacagacagugauuccgaacaucgggagccgccccugggugagaggagucucuucccggauuagcaucuacuggaccauuguuaaaccuggcgacauccugcucaucaacucuacagggaaucugauugcuccccgcggauauuucaagaucagaagcggcaaguccucuauuaugcggagcgacgccccuaucgggaaauguaacuccgaaugcauuacccccaauggaagcaucccgaacgauaagccuuuucagaaugugaaccgcaucaccuacggcgcuugucccagauaugugaaacagaauacacuuaagcuggccacgggcaugcggaacgucccugagaaacaaacccgcgggauuuucggagcgaucgccggcuuuauugaaaaugggugggagggaaugauggacggcugguacggguucagacaccagaacucugagggaacaggccaggcugccgaucucaaguccacccaagcugccaucaaucagauuaacggcaaacugaaucggcuuaucgaaaagacaaacgagaaguuucaucagaucgaaaaagaguucagcgaaguggaggggcgcauucaggaccuggagaaguauguugaagauaccaaaaucgaccucuggucuuacaaugccgagcugcugguggcucucgaaaaccaacacacgauugaucugacagacuccgagaugaacaaacuuuucgaaagaaccaagaagcagcugcgggagaaugcggaggauaugggaaacggcugcuuuaagaucuaucauaaaugugacaaugccugcauugggagcaucagaaacggaaccuacgaucacgacgucuaccgcgacgaagcucucaauaaccgguuccagauuaagggcguggagcugaaauccggguauaaggauuggauccuuuggaucucuuuugccauuagcugcuuccugcucuguaucguucugcugggcuuuauuaugugggccugccagaaaggaaauaucagauguaacauuugcaucuga

SEQ ID NO: 192148 - RNA, 1701 nt, Artificial Sequence; identical to SEQ ID NO: 192145
  derived and/or modified CDS sequence (opt5) from hemagglutinin__InfluenzaA__AAX56600

SEQ ID NO: 192149 - RNA, 1701 nt, Artificial Sequence
  derived and/or modified CDS sequence (opt5) from hemagglutinin__InfluenzaA__AAX57644
augaagaccaucauugcccugagcuacauccucugccugguguucgcucagaaacuucccggcaacgacaauuccacagccacgcugugucucgggcaccaugcggucccuaacggaaccauuguuaagacaaucaccaaugaucaaauugaggugacaaacgcuaccgaacuggugcagucuagcuccacaggcgggaucugcgacucuccgcaccagauccuugauggagagaauuguacccugauugacgcccuccugggcgauccccagugcgacggguuucaaaacaaaaagugggaucuguucgucgaaagaagcaaagccuauuccaauuguuacccuuaugacgugcccgauuacgcuucucuccggagccugguugccuccagcggaacgcuugaguuuaacaaugaaucuuucgacuggaccggcgugacacagaacggcaccuccagcgcuugcaagcgcagaucuaauaaguccuuuuucagccggcugaacuggcucacacaucugaaauauaaguacccugcccuuaaugucaccaugcccaacaaugagaaauuugauaagcuguauaucuggggagugcaccauccugggacggacucugaucagauuucccucuacgcgcaggccagcggccgcaucacaguuuccaccaaaagaucucaacagacagugauuccgaacaucgggagccggccccgcgucagagacguguccagccggauuucuaucuacuggaccguggucaagccuggagacauccugcugauuaacuccaccggcaaucucaucgcuccccgcggguauuucaagaugagaagcggaaaaucuagcauuaugcgguccgaugccccuaucggcaaguguaacucugagugcauuacacccaauggcagcaucccgaacgacaaaccuuuucagaauguuaaccgcaucacguacggggcuugucccagauaugugaagcagaauacccugaaacuugccacaggaaugcggaacgugccugaaaagcaaacccgcggcauuuucggggcgaucgccggauuuauugagaauggcugggaagggauggucgauggaugguacggcuucagacaccagaacuccgagggcacagggcaggcugccgaccugaaaagcacccaagcugccaucaaucagauuaacggaaagcucaaucggcugaucggcaagacgaacgagaaauuucaccagaucgaaaaggaguucucugaaguggaggggcgcauucaggaucuugaaaaauauguugaggacacaaagaucgaucugugguccuacaaugccgagcuccugguggcucuggaaaaccaacauaccauugaccucaccgauagcgagaugaacaaacuguucgaaagaacaaagaagcagcuucgggagaaugcggaagacaugggaaacggcugcuuuaaaaucuaucacaagugugauaaugccugcauugggucuaucagaaacggcaccuacgaccaugacgucuaccgcgaugaggcucugaauaaccgguuccagauuaaaggaguggagcucaaguccggcuauaaagacuggauccuguggaucagcuuugccauuuccugcuuccuucuguguguugcccuccugggguuuaucaugugggcuugccagaagggaaauauuagauguaacaucugcauuuga

SEQ ID NO: 192150 - RNA, 1701 nt, Artificial Sequence; identical to SEQ ID NO: 192103
  derived and/or modified CDS sequence (opt5) from hemagglutinin__InfluenzaA__AAX57654

SEQ ID NO: 192151 - RNA, 1701 nt, Artificial Sequence; identical to SEQ ID NO: 192119
  derived and/or modified CDS sequence (opt5) from hemagglutinin__InfluenzaA__AAX57664

SEQ ID NO: 192152 - RNA, 1701 nt, Artificial Sequence
  derived and/or modified CDS sequence (opt5) from hemagglutinin__InfluenzaA__AAX57684
augaagaccaucauugcccugagcuacauccucugccugguguucgcucagaaacuucccggcaacgacaauuccacagccacgcugugucucgggcaccaugcggucccuaacggaacccugguuaagacaauuaccaaugaucaaaucgaggugacaaacgcuaccgaacuugugcagucuagcuccacaucuagaauuugcgacagcccgcaccagauccuggauggcgagaauuguacccucaucgacgcccugcugggggauccccauugcgacggauuucagaacaaagaaugggaucucuucgucgagcgguccaaggccuauucuaauuguuacccuuaugacgugcccgauuacguuagccugcgcucccuuguggcuagcucuggcacgcuggaauuuaacaaugaguccuucaacuggaccggggucgcccaaaauggaacaagcucugcuugcaaaagacgguccgacaagagcuuuuucucucgccucaacuggcugcaccagcuuaaguauaaauacccugcccugaaugugaccaugcccaacaaugagaaguuugauaaacucuauauuuggggcguucaucacccuggcacagacuccgaucagaucagccuguacgcgcaggccuccgggagagugaccgucucuacgaagcggagccaacagacagugauuccgaacaucggauccggccccugggugcgcggggucagcucuagaauuuccaucuacuggaccauuguuaaaccuggagacauccugcucaucaacagcacaggcaaucugauugcuccccggggguauuucaagauccgcucuggaaagagcuccauuaugagaucugacgccccuaucggcaaauguaacagcgaaugcauuacccccaauggcuccaucccgaacgauaagccuuuucagaaugugaaccggaucaccuacggggcuuguccccgcuaugugaaacagaauacacuuaagcuggccacgggaaugagaaacgucccugagaaacaaacccggggcauuuucggggcgaucgccggauuuauugaaaauggcugggaggggaugauggacggaugguacggcuuccgccaccagaacagcgagggcacagggcaggcugccgaucucaagucuacccaagcugccaucaaucagauuaacggaaaacugaauagacuuaucgaaaagacaaacgagaaguuucaucagaucgaaaaagaguucuccgaaguggagggccggauucaggaccuggagaaguauguugaagauaccaaaaucgaccucuggagcuacaaugccgagcugcugguggcucucgaaaaccaacacacgauugaucugacagacucugagaugaacaaacuuuucgaaagaaccaagaagcagcugcgcgagaaugcggaggauauggggaacggaugcuuuaagaucuaucauaaaugugacaaugccugcauuggcuccauccggaacgggaccuacgaucacgacgucuacagagacgaagcucucaauaaccgcuuccagauuaagggcguggagcugaaaagcggauauaaggauuggauccuuuggaucuccuuugccauuucuugcuuccugcucuguaucguucugcugggcuuuauuaugugggccugccagaaagggaauauccgguguaacauuugcaucuga

SEQ ID NO: 192153 - RNA, 1701 nt, Artificial Sequence; identical to SEQ ID NO: 192123
  derived and/or modified CDS sequence (opt5) from hemagglutinin__InfluenzaA__AAX57694

SEQ ID NO: 192154 - RNA, 1701 nt, Artificial Sequence; identical to SEQ ID NO: 192145
  derived and/or modified CDS sequence (opt5) from hemagglutinin__InfluenzaA__AAX57704

SEQ ID NO: 192155 - RNA, 1701 nt, Artificial Sequence; identical to SEQ ID NO: 192123
  derived and/or modified CDS sequence (opt5) from hemagglutinin__InfluenzaA__AAX57714

SEQ ID NO: 192156 - RNA, 1701 nt, Artificial Sequence; identical to SEQ ID NO: 192152
  derived and/or modified CDS sequence (opt5) from hemagglutinin__InfluenzaA__AAX57733

SEQ ID NO: 192157 - RNA, 1701 nt, Artificial Sequence
  derived and/or modified CDS sequence (opt5) from hemagglutinin__InfluenzaA__AAX57734
augaagaccaucauugcccugagcuacauccucugccugguguucgcucagaaacuucccggcaacgacaauuccacagccacgcugugucucgggcaccaugcggucccuaacggaacccugguuaagacaauuaccaaugaucaaaucgaggugacaaacgcuaccgaacuugugcagucuagcuccacaucuagaauuugcaauagcccgcaccagauccuggacggcgagaacuguacccucaucgaugcccugcugggggacccccauugcgauggauuucagaauaaagaaugggaccucuucgucgagcgguccaaggccuauucuaacuguuacccuuaugaugugcccgacuacguuagccugcgcucccuuguggcuagcucuggcacgcuggaauuuaauaacgaguccuucaauuggaccggggucgcccaaaacggaacaagcucugcuugcaaaagacgguccgauaagagcuuuuucucucgccucaauuggcugcaccagcuuaaguauaaauacccugcccugaacgugaccaugcccaauaacgagaaguuugacaaacucuauauuuggggcguucaucacccuggcacagauuccgaccagaucagccuguacgcgcaggccuccgggagagugaccgucucuacgaagcggagccaacagacagugauuccgaacaucggauccggccccugggugcgcggggucagcucuagaauuuccaucuacuggaccauuguuaaaccuggagauauccugcucaucaauagcacaggcaaccugauugcuccccggggguauuucaagauccgcucuggaaagagcuccauuaugagaucugacgccccuaucggcaaauguaauagcgaaugcauuacccccaacggcuccaucccgaaugacaagccuuuucagaacgugaaucggaucaccuacggggcuuguccccgcuaugugaaacagaacacacuuaagcuggccacgggaaugagaaaugucccugagaaacaaacccggggcauuuucggggcgaucgccggauuuauugaaaacggcugggaggggaugauggauggaugguacggcuuccgccaccagaauagcgagggcacagggcaggcugccgaccucaagucuacccaagcugccaucaaccagauuaauggaaaacugaacagacuuaucgaaaagacaaaugagaaguuucaucagaucgaaaaagaguucuccgaaguggagggccggauucaggaucuggagaaguauguugaagacaccaaaaucgaucucuggagcuacaacgccgagcugcugguggcucucgaaaaccaacacacgauugaccugacagauucugagaugaauaaacuuuucgaaagaaccaagaagcagcugcgcgagaacgcggaggacauggggaauggaugcuuuaagaucuaucauaaaugugauaacgccugcauuggcuccauccggaaugggaccuacgaccacgaugucuacagagacgaagcucucaacaaucgcuuccagauuaagggcguggagcugaaaagcggauauaaggacuggauccuuuggaucuccuuugccauuucuugcuuccugcucuguaucguucugcugggcuuuauuaugugggccugccagaaagggaacauccgguguaauauuugcaucuga

SEQ ID NO: 192158 - RNA, 1701 nt, Artificial Sequence; identical to SEQ ID NO: 192144
  derived and/or modified CDS sequence (opt5) from hemagglutinin__InfluenzaA__AAX57744

SEQ ID NO: 192159 - RNA, 1701 nt, Artificial Sequence; identical to SEQ ID NO: 192144
  derived and/or modified CDS sequence (opt5) from hemagglutinin__InfluenzaA__AAX57764

SEQ ID NO: 192160 - RNA, 1701 nt, Artificial Sequence; identical to SEQ ID NO: 192144
  derived and/or modified CDS sequence (opt5) from hemagglutinin__InfluenzaA__AAX57774

SEQ ID NO: 192161 - RNA, 1701 nt, Artificial Sequence
  derived and/or modified CDS sequence (opt5) from hemagglutinin__InfluenzaA__AAX57784
augaagaccaucauugcccugagcuacauccucugccugguguucgcucagaaacuucccggcaacgacaauuccacagccacgcugugucucgggcaccaugcggucccuaacggaacccugguuaagacaauuaccaaugaucaaaucgaggugacaaacgcuaccgaacuugugcaaaauucuagcacauccagaauuugcgacucuccgcaccagauccuggauggcgagaacuguacccucaucgacgcccugcugggggauccccauugcgacggauuucagaauaaagaaugggaucucuucgucgagcggagcaaggccuauuccaacuguuacccuuaugacgugcccgauuacguuucucugcgcagccuuguggcuuccagcggcacgcuggaauuuaauaacgagucuuucaauuggaccggggucgcccagaacggaacauccagcgcuugcaaaagacggucugacaaguccuuuuucagccgccucaauuggcugcaccagcuuaaguauaaauacccugcccugaacgugaccaugcccaauaacgagaaguuugauaaacucuauauuuggggcguucaucacccuggcacagacucugaucagaucucccuguacgcgcaggccagcgggagagugaccgucuccacgaagcggucucaacagacagugauuccgaacaucggaagccgccccugggugagaggcgucuccagccggauuucuaucuacuggaccauuguuaaaccuggggacauccugcucaucaauuccacaggaaaccugauugcuccccgcggcuauuucaagaucagaagcgggaagucuagcauuaugcgguccgacgccccuaucggaaaauguaauucugaaugcauuacccccaacggcagcaucccgaaugauaagccuuuucagaacgugaaucgcaucaccuacggcgcuugucccagauaugugaaacagaacacacuuaagcuggccacggggaugcggaaugucccugagaaacaaacccgcggaauuuucggcgcgaucgccggguuuauugaaaacggaugggagggcaugauggacgggugguacggauucagacaccaaaauuccgagggcacaggccaggcugccgaucucaagagcacccaggcugccaucaaccagauuaaugggaaacugaaccggcuuaucgaaaagacaaaugagaaguuucaucagaucgaaaaagaguucucugaaguggagggacgcauucaggaccuggagaaguauguugaagauaccaaaaucgaccucugguccuacaacgccgagcugcugguggcucucgaaaaccaacacacgauugaucugacagacagcgagaugaauaaacuuuucgaaagaaccaagaagcagcugcgggagaacgcggaggauaugggcaaugggugcuuuaagaucuaucauaaaugugacaacgccugcauuggaucuaucagaaauggcaccuacgaucacgacgucuaccgcgacgaagcucucaacaaucgguuccagauuaaggggguggagcugaaauccggcuauaaggauuggauccuuuggaucagcuuugccauuuccugcuuccugcucuguaucguucugcugggauuuauuaugugggccugccagaaaggcaacaucagauguaauauuugcaucuga

SEQ ID NO: 192162 - RNA, 1701 nt, Artificial Sequence
  derived and/or modified CDS sequence (opt5) from hemagglutinin__InfluenzaA__AAX57794
augaagaccaucauugcccugagcuacauccucugccugguguucgcucagaaacuucccgucaacgacaauuccacagccacgcugugucucggccaccaugcgguuccuaacgggacccuggugaagacaauuaccaaugaucacaucgaggugacaaacgcuaccgaacuuguccaaucuagcuccacaggaagaauuugcgacucuccgcaucagauccuggauggcgagaauuguacccucaucgacgcccugcugggggauccccacugcgacggauuucagaacaaagaaugggaucucuucguggagcggagcacggccuauuccaauuguuacccuuaugacguucccgauuacgcuucucugcgcagccuuguggccuccagcggcacccuggaauuuaacaaugagucuuucaacuggacaggggucgcucagaauggaaccuccagcgccugcaagagacggucuauuaaauccuuuuucagccgccucaacuggcugcaucaacuuaaguauaaguacccugcgcugaaugugacaaugcccaacaaugagaaauuugacaagcucuauaucuggggcguucaccacccuucuaccgauuccgaccagauuagccuguacgcccaggcuuccggcagagugacggucucuacaaaacggagccagcaaaccgugaucccgaacauugggucccgccccugggugagaggagucagcucucggaucuccauucauuggacaaucguuaagccuggcgauauccugcucauuaacagcaccgggaaucugaucgcuccccgcggauacuucaaaauuagaucuggcaagagcuccaucaugcggucuaacgccccuauugggaaguguaauagcgaaugcaucacccccaacggauccaucccgaaugacaaaccuuuucagaacgugaaucgcauuacauauggcgccugucccagauacgugaagcagaacacgcuuaaacuggcgaccggcaugcggaaugucccugagaagcagacacgcgggaucuucggagccauugcuggcuuuaucgaaaacgggugggagggaaugguggacggcugguauggguucagacaccaaaauagcgagggaaccggccaggccgcugaucucaaaucuacacaggccgccauuaaccaaaucaauggcaagcugaaccggcuuaucgagaaaaccaaugaaaaguuucaucagauugaaaaggaguucuccgaaguugaggggagaauccaggaccuggagaaauacguggaagauacgaagauugaccucuggagcuauaacgcugagcugcuggucgcgcucgaaaaccagcacacaaucgaucugaccgacucugagaugaauaaacuuuucgaacgcacccggaagcaacugagagagaacgccgaggauaugggaaauggcugcuuuaaaauuuaccacaagugugacaacgcuugcaucggguccauucgcaauggaacauaugaucaugacguguaccgggaugaagcccucaacaauagauuccagaucaagggcguugagcugaaaagcggguacaaggacuggauccuuuggauuuccuuugccaucucuugcuuccugcucugugugguccugcugggcuuuauuaugugggcuugccagaaaggaaacauccgcuguaauauuugcaucuga

SEQ ID NO: 192163 - RNA, 1701 nt, Artificial Sequence; identical to SEQ ID NO: 192144
  derived and/or modified CDS sequence (opt5) from hemagglutinin__InfluenzaA__AAX57814

SEQ ID NO: 192164 - RNA, 1701 nt, Artificial Sequence
  derived and/or modified CDS sequence (opt5) from hemagglutinin__InfluenzaA__AAX57824
augaagaccaucauugcccugagcuacauccucugcaugguguucgcucagaaacugcccgucaacgacaauuccacagccacgcuuugucugggccaccaugcgguuccuaacgggacccucgugaagacaauuaccaaugaucacaucgaggugacaaacgcuaccgaacugguccaaucuagcuccacaggaagaauuugcgacucuccgcaucagauccuugauggcgagaauuguacccugaucgacgcccuccugggggauccccacugcgacggauuucagaacaaagaaugggaucuguucguggagcggagcacggccuauuccaauuguuacccuuaugacguucccgauuacgcuucucuccgcagccugguggccuccagcggcacccuugaauuuaacaaugagucuuucaacuggacaggggucgcucagaauggaaccuccagcgccugcaagagacggucuauuaaauccuuuuucagccgccugaacuggcuccaucaacugaaguauaaguacccugcgcuuaaugugacaaugcccaacaaugagaaauuugacaagcuguauaucuggggcguucaccacccuucuaccgauuccgaccagauuagccucuacgcccaggcuuccggcagagugacggucucuacaaaacggagccagcaaaccgugaucccgaacauugggucccgccccugggugagaggagucagcucucggaucuccauuuacuggacaaucguuaagccuggcgauauccugcugauuaacagcaccgggaaucucaucgcuccccgcggauauuucaaaauuagaucuggcaagagcuccaucaugcggucuaacgccccuauugggaaguguaauagcgaaugcaucacccccaacggauccaucccgaaugacaaaccuuuucagaacgugaaucgcauuacauacggcgccugucccagauaugugaagcagaacacgcugaaacuugcgaccggcaugcggaaugucccugagaagcagacacgcgggaucuucggagccauugcuggcuuuaucgaaaacgggugggagggaaugguggacggcugguacggguucagacaucaaaauagcgagggaaccggccaggccgcugaucugaaaucuacacaggccgccauuaaccaaaucaauggcaagcucaaccggcugaucgagaaaaccaaugaaaaguuucaccagauugaaaaggaguucuccgaaguugaggggagaauccaggaccuugagaaauauguggaagauacgaagauugaccuguggagcuacaacgcugagcuccuggucgcgcuggaaaaccagcauacaaucgaucucaccgacucugagaugaauaaacuguucgaacgcacccggaagcaacuuagagagaacgccgaggauaugggaaauggcugcuuuaaaauuuaucacaagugugacaacgcuugcaucggguccauucgcaauggaacauacgaucacgacguguaccgggaugaagcccugaacaauagauuccagaucaagggcguugagcucaaaagcggguauaaggacuggauccuguggauuuccuuugccaucucuugcuuccuucugugugugguccuccugggcuuuauuaugugggcuugccagaaaggaaacauccgcuguaauauuugcaucuga

SEQ ID NO: 192165 - RNA, 1701 nt, Artificial Sequence; identical to SEQ ID NO: 192144
  derived and/or modified CDS sequence (opt5) from hemagglutinin__InfluenzaA__AAX57834

SEQ ID NO: 192166 - RNA, 1701 nt, Artificial Sequence; identical to SEQ ID NO: 192144
  derived and/or modified CDS sequence (opt5) from hemagglutinin__InfluenzaA__AAX57844

SEQ ID NO: 192167 - RNA, 1701 nt, Artificial Sequence
  derived and/or modified CDS sequence (opt5) from hemagglutinin__InfluenzaA__AAX57864
augaagaccaucauugcccugagcuacuuccucugccugguguuugcucagaaacuucccgucaacgacaauuccacagccacgcugugucucggccaccaugcgguuccuaacgggacccuggugaagacaaucaccaaugaucacauugaggugacaaacgcuaccgaacuuguccaaucuagcuccacaggaagaaucugcgacucuccgcaucagauucuggauggcgagaauuguacccucaucgacgcccugcugggggauccccacugcgacggauuccagaacaaagaaugggaucucuuuguggagcggagcacggccuauuccaauuguuacccuuaugacguucccgauuacgcuucucugcgcagccuuguggccuccagcggcacccuggaguucaacaaugaaucuuuuaacuggacaggggucgcucagaauggaaccuccagcgccugcaagagacggucuaucaaauccuucuuuagccgccucaacuggcugcaucaacuuaaguauaaguacccugcgcugaaugugacaaugcccaacaaugagaaauucgacaagcucuauauuuggggcguucaccacccuucuaccgauuccgaccagaucagccuguacgcccaggcuuccggcagagugacggucucuacaaaacggagccagcaaaccgugauuccgaacaucgggucccgccccugggugagaggagucagcucucggauuuccaucuacuggacaauuguuaagccuggcgauauccugcucaucaacagcaccgggaaucugauugcccccagaggauauuuuaaaaucagaucuggcaagagcuccauuaugcggucuaacgcuccuaucgggaaguguaauagcgaaugcauuacccccaacggauccaucccgaaugacaaaccuuuccagaacgugaaucgcaucacauacggcgccugucccagauaugugaagcagaacacgcuuaaacuggcgaccggcaugcggaaugucccugagaagcagacacgcgggauuuuuggagccaucgcuggcuucauugaaaacgggugggagggaaugguggacggcugguacggguuuagacaucaaaauagcgagggaaccggccaggccgcugaucucaaaucuacacaggccgccaucaaccaaauuaauggcaagcugaaccggcuuaucgagaaaaccaaugaaaaguuccaccagaucgaaaaggaguucuccgaaguugaggggcgcauucaggaccuggagaaauauguggaagauacgaagaucgaccucuggagcuacaacgcugagcugcuggucgcgcucgaaaaccagcauacaauugaucugaccgacucugagaugaauaaacuuuuugaacgcacccggaagcaacugagagagaacgccgaggauaugggaaauggcugcuucaaaaucuaucacaagugugacaacgcuugcauuggguccauccgcaauggaacauacgaucacgacguguaccgggaugaagcccucaacaauagauuucagauuaagggcguugagcugaaaagcggguauaaggacuggauccuuuggaucuccuucgccauuucuugcuuucugcucugugugguccugcugggcuucaucaugugggcuugccagaaaggaaacauucgcuguaauaucugcauuuga

SEQ ID NO: 192168 - RNA, 1701 nt, Artificial Sequence; identical to SEQ ID NO: 192144
  derived and/or modified CDS sequence (opt5) from hemagglutinin__InfluenzaA__AAX57874

SEQ ID NO: 192169 - RNA, 1701 nt, Artificial Sequence; identical to SEQ ID NO: 192144
  derived and/or modified CDS sequence (opt5) from hemagglutinin__InfluenzaA__AAX57884

SEQ ID NO: 192170 - RNA, 1701 nt, Artificial Sequence
  derived and/or modified CDS sequence (opt5) from hemagglutinin__InfluenzaA__AAX57894
augaagaccaucauugcccugagcuacauccucugccugguguucgcucagaaacuucccgucaacgacaauuccacagccacgcugugucucggccaccaugcgguuccuaacgggacccuggugaagacaauuaccaaugaucacaucgaggugacaaacgcuaccgaacuuguccaaucuagcuccacaggaagaauuugcgacucuccgcaucaggugcuggauggcgagaauuguacccucaucgacgcccugcugggggauccccacugcgacggauuucagaacaaagaaugggaucucuucguugagcggagcacggccuauuccaauuguuacccuuaugacgugcccgauuacgcuucucugcgcagccuugucgccuccagcggcacccuggaauuuaacaaugagucuuucaacuggacagggguggcucagaauggaaccuccagcgccugcaagagacggucuaucaaauccuuuuucagccgccucaacuggcugcaucaacuuaaguauaaguacccugcgcugaauguuacaaugcccaacaaugagaaauuugacaagcucuauauuuggggcgugcaccacccuucuaccgauuccgaccagaucagccuguacgcccaggcuuccggcagagucacggugucuacaaaacggagccagcaaaccgugauuccgaacaucgggucccgccccugggucagaggaguuagcucucggauuuccaucuacuggacaauugugaagccuggcgauauccugcucaucaacagcaccgggaaucugauugcccccagaggauauuucaaaaucagaucuggcaagagcuccauuaugcggucuaacgcuccuaucgggaaguguaauagcgaaugcauuacccccaacggauccaucccgaaugacaaaccuuuucagaacgugaaucgcaucacauacggcgccugucccagauaugucaagcagaacacgcuuaaacuggcgaccggcaugcggaaugugccugagaagcagacacgcgggauuuucggagccaucgcuggcuuuauugaaaacgggugggagggaaugguugacggcugguacggguucagacaucaaaauagcgagggaaccggccaggccgcugaucucaaaucuacacaggccgccaucaaccaaauuaauggcaagcugaaccggcuuaucgagaaaaccaaugaaaaguuucaccagaucgaaaaggaguucuccgaaguggaggggcgcauucaggaccuggagaaauaugucgaagauacgaagaucgaccucuggagcuacaacgcugagcugcugguggcgcucgaaaaccagcauacaauugaucugaccgacucugagaugaauaaacuuuucgaacgcacccggaagcaacugagagagaacgccgaggauaugggaaauggcugcuuuaaaaucuaucacaagugugacaacgcuugcauuggguccauccgcaauggaacauacgaucacgacguuuaccgggaugaagcccucaacaauagauuccagauuaagggcguggagcugaaaagcggguauaaggacuggauccuuuggaucuccuuugccauuucuugcuuccugcucugugucgugcugcugggcuuuaucaugugggcuugccagaaaggaaacauucgcuguaauaucugcauuuga

SEQ ID NO: 192171 - RNA, 1701 nt, Artificial Sequence
  derived and/or modified CDS sequence (opt5) from hemagglutinin__InfluenzaA__AAX57924
augaagaccaucauugcccugagcuacauccucugccugguguucgcucagaaacuucccgucaacgacaauuccacagccacgcugugucucggccaccaugcgguuccuaacgggacccuggugaagacaauuaccaaugaucacaucgaggugacaaacgcuaccgaacuuguccaaucuagcuccacaggaagaauuugcgacucuccgcaucagauccuggauggcgagaauuguacccucaucgacgcccugcugggggauccccacugcgacggauuucagaacaaagaaugggaucucuucguggagcggagcacggccuauuccaauuguuacccuuaugacguucccgauuacgcuucucugcgcagccuuguggccuccagcggcacccuggaauuuaacaaugagucuuucaacuggacaggggucgcucagaauggaaccuccuuugccugcaagagacggagcauuaaaucuuucuuuucccgccucaacuggcugcaucaacuuaaguauaaguacccugcgcugaaugugacaaugcccaacaaugagaaauucgacaagcucuauaucuggggcguucaccacccuagcaccgauucugaccagauuucccuguacgcccaggcuagcggcagagugacggucuccacaaaacggucucagcaaaccgugaucccgaacauugggagccgccccugggugagaggagucuccagccggaucucuauuuacuggacaaucguuaagccuggcgauauccugcucauuaacuccaccgggaaucugaucgcuccccgcggauauuuuaaaauuagaagcggcaagucuagcaucaugcgguccaacgccccuauugggaaguguaauucugaaugcaucacccccaacggaagcaucccgaaugacaaaccuuuccagaacgugaaucgcauuacauacggcgccugucccagauaugugaagcagaacacgcuuaaacuggcgaccggcaugcggaaugucccugagaagcagacacgcgggaucuuuggagccauugcuggcuucaucgaaaacgggugggagggaaugguggacggcugguacggguuuagacaucaaaauuccgagggaaccggccaggccgcugaucucaaaagcacacaggccgccauuaaccaaaucaauggcaagcugaaccggcuuaucgagaaaaccaaugaaaaguuccaccagauugaaaaggaguucucugaaguugaggggagaauccaggaccuggagaaauauguggaagauacgaagauugaccucugguccuacaacgcugagcugcuggucgcgcucgaaaaccagcauacaaucgaucugaccgacagcgagaugaauaaacuuuuugaacgcacccggaagcaacugagagagaacgccgaggauaugggaaauggcugcuucaaaauuuaucacaagugugacaacgcuugcaucgggucuauucgcaauggaacauacgaucacgacguguaccgggaugaagcccucaacaauagauuucagaucaagggcguugagcugaaauccggguauaaggacuggauccuuuggauuagcuucgccaucuccugcuuucugcucugugugguccugcugggcuucauuaugugggcuugccagaaaggaaacauccgcuguaauauuugcaucuga

SEQ ID NO: 192172 - RNA, 1701 nt, Artificial Sequence; identical to SEQ ID NO: 192144
  derived and/or modified CDS sequence (opt5) from hemagglutinin__InfluenzaA__AAX57934

SEQ ID NO: 192173 - RNA, 1701 nt, Artificial Sequence
  derived and/or modified CDS sequence (opt5) from hemagglutinin__InfluenzaA__AAX57944
augaagaccaucauugcccugagcuacauccucugccugguguucgcucagaaacuucccggcaacgacaauuccacagccacgcugugucucgggcaccaugcggucccuaacggaacccugguuaagacaauuaccaaugaucaaaucgaggugacaaacgcuaccgaacuugugcagucuagcuccacaggcagaauuugcgacucuccgcaccagauccuggauggggagaauuguacccucaucgacgcccugcugggagauccccauugcgacggcuuucagaacaaagaaugggaucucuucgucgagcggagcaaggccuauuccaauuguuacccuuaugacgugcccgauuacguuucucugcgcagccuuguggcuuccagcgggacgcuggaauuuaacaaugagucuuucaacuggaccggagucgcccaaaauggcacauccagcgcuugcaaaagacggucugacaaguccuuuuucagccgccucaacuggcugcaccagcuuaaguauaaauacccugcccugaaugugaccaugcccaacaaugagaaguuugauaaacucuauauuuggggcguucaucacccugggacagacucugaucagaucucccuguacgcgcaggccagcggaagagugaccgucuccacgaagcggucucaacagacagugauuccgaacaucggcagcgggcccugggugcgcggagucuccagcagaauuucuaucuacuggaccauuguuaaaccuggcgacauccugcucaucaacuccacagggaaucugauugcuccccggggauauuucaagauccgcagcggcaagucuagcauuaugagauccgacgccccuaucggcaaauguaacucugaaugcauuacccccaaugggagcaucccgaacggaaagccuuuucagaaugugaaccggaucaccuacggcgcuuguccccgcuaugugaaacagaauacacuuaagcuggccacggggaugagaaacgucccugagaaacaaacccggggaauuuucggcgcgaucgccggguuuauugaaaauggaugggagggcaugauggauggcugguacggguuccgccaccagaacuccgagggaacaggccaggcugccgaccucaagagcacccaagcugccaucaaucagauuaacgggaaacugaauagacuuaucgaaaagacaaacgagaaguuucaucagaucgaaaaagaguucucugaaguggagggacggauucaggaucuggagaaguauguugaagacaccaaaaucgaucucugguccuacaaugccgagcugcugguggcucucgaaaaccaacacacgauugaccugacagauagcgagaugaacaaacuuuucgaaagaaccaagaagcagcugcgcgagaaugcggaggacaugggcaacgggugcuuuaagaucuaucauaaaugugauaaugccugcauuggcucuauccggaacggaaccuacgaccacgaugucuacagagacgaagcucucaauaaccgcuuccagauuaaguccguggagcugaaaagcggcuauaaggacuggauccuuuggaucuccuuugccauuucuugcuuccugcucuguaucguucugcugggguuuauuaugugggccugccagaaaggaaauauccgguguaacauuugcaucuga

SEQ ID NO: 192174 - RNA, 1701 nt, Artificial Sequence
  derived and/or modified CDS sequence (opt5) from hemagglutinin__InfluenzaA__AAX76623
augaagaccaucauugcccugagcuacauccucugccugguguucgcucagaaacuucccggcaacgacaaguccacagccacgcugugucucgggcaccaugcggucccuaauggaaccauuguuaaaacaaucaccaacgaucaaauugaggugacaaaugcuaccgaacuggugcagucuagcuccacaggcgggaucugcgacucuccgcaccagauccuugauggagagaacuguacccugauugacgcccuccugggcgauccccagugcgacggguuucaaaauaagaaaugggaucuguucgucgaaagaagcaaggccuauuccaacuguuacccuuaugacgugcccgauuacgcuucucuccggagccugguugccuccagcggaacgcuugaguuuaauaacgaaucuuucgacuggaccggcgugacacagaauggcaccuccagcgcuugcaagcgcagaucuaacaaauccuuuuucagccggcugaauuggcucacacaucugaaguauaaauacccugcccuuaacgucaccaugcccaauaacgagaaguuugauaaacuguauaucuggggagugcaccauccugggacggacucugaucagauuucccucuacgcgcaggccagcggccgcaucacaguuuccaccaagagaucucaacagacagugauuccgaauaucgggagccggccccgcgucagagacauuuccagccggaucucuaucuacuggaccauugugaagccuggagacauccugcugauuaacuccaccggcaaccucaucgcuccccgcggguauuucaaaauuagaagcggaaagucuagcaucaugcgguccgaugccccuaucggcaaauguaauucugagugcauuacacccaacggcagcaucccgaaugacaagccuuuucagaacgugaaucgcauuacguacggggcuugucccagauaugucaaacagaacacccugaagcuggccacaggaaugcggaauguuccugaaaaacaaacccgcggcaucuucggggcgauugccggauuuaucgagaacggcugggaagggaugguggauggaugguacggcuucagacaccaaaauuccgagggcacagggcaggcugccgaccuuaagagcacccaggcugccaucaaccagauuaauggaaagcucaaccggcugaucggcaaaacgaaugagaaguuucaccagauugaaaaagaguucucugaaguggaggggagaauccaggaucuugaaaaguaugucgaggacacaaaaauugaucugugguccuacaacgccgagcuccugguggcucuggaaaaucaacauaccaucgaccucaccgauagcgagaugaacaagcuguucgaacgcacaaagaaacagcuucgggagaacgcggaagacaugggaaauggcugcuuuaagauuuaucacaaaugugauaacgccugcaucgggucuaucagaaauggcaccuacgaccaugacguuuaccgcgaugaggcucugaacaaucgguuccagauuaagggaguggagcucagauccggcuauaaagacuggauccuguggauuagcuuugccaucuccugcuuccuucugugugucgccucucucggguuuauuaugugggcuugccagaagggaaacauccgcuguaauaucugcauuuga

SEQ ID NO: 192175 - RNA, 1701 nt, Artificial Sequence
  derived and/or modified CDS sequence (opt5) from hemagglutinin__InfluenzaA__AAX76643
augaagaccaucauugcccugagcuacuuccucugccugguguuugcucagaaacuucccggcaacgacaauuccacagccacgcugugucucgggcaccaugcggucccuaacggaaccaucguuaagacaauuaccaaugaucaaaucgaggugacaaacgcuaccgaacuggugcagucuagcuccacaggcgggauuugcgacucuccgcaccagauccuugauggagagaauuguacccugaucgacgcccuccugggcgauccccagugcgacggguuccaaaacaaaaagugggaucuguuugucgaaagaagcaaagccuauuccaauuguuacccuuaugacgugcccgauuacgcuucucuccggagccugguugccuccagcggaacgcuugaguucaacaaugaaucuuuuaacuggaccggcgugacacagaauggcaccuccagcgcuugcgagcgcagaucuaacaaguccuucuuuagccggcugaauuggcucacacaucugaaguauaaauacccugcccuuaacgucaccaugcccaauaacgagaaguucgacaaacuguauauuuggggagugcaccauccugggacggauucugaccagaucucccucuacgcgcaggccagcggccgcauuacaguuuccaccaagagaucucaacagacagugaucccgaacauugggagccggccccgcgucagagauguguccagccggaucucuauuuacuggaccaucgugaaaccuggagacauccugcugauuaauuccaccggcaaccucaucgcuccccgcggguauuuuaagauuagaagcggaaagucuagcaucaugcgguccgacgccccuauuggcaaauguaauucugaaugcaucacacccaacggcagcaucccgaaugauaagccuuuccagaacgucaaucgcauuacguacggggcuugucccagauauguuaaacagaacacccugaaacuugccacaggaaugcggaaugugccugagaaacaaacccgcggcaucuuuggggcgauugccggauucaucgaaaacggcugggaggggaugguggacggaugguacggcuuuagacaccagaauagcgagggcacagggcaggcugccgaucugaaguccacccaagcugccauuaaccagaucaauggaaaacucaaccggcugaucggcaagacgaaugaaaaguuccaccagauugagaaagaguucucugaagucgaagggagaauccaggaccuugagaaguauguggaggauacaaaaauugaccugugguccuacaacgccgaacuccugguugcucuggagaaccaacauaccaucgaucucaccgacagcgaaaugaauaagcuguuugagcgcacaaagaagcagcuucgggaaaacgcggaggauaugggaaauggcugcuucaagauuuaucacaaaugugacaacgccugcaucgggucuauuagaaauggcaccuacgaucaugacguguaccgcgacgaggcucugaacaaucgguuucagaucaagggagucgaacucaaauccggcuauaaggauuggauccuguggauuagcuucgccaucuccugcuuucuucuguguguggcccuccugggguucauuaugugggcuugccagaaaggaaacaucagaugugacauuugcaucuga

SEQ ID NO: 192176 - RNA, 1701 nt, Artificial Sequence
  derived and/or modified CDS sequence (opt5) from hemagglutinin__InfluenzaA__AAX76653
augaagaccaucauugcccugagcuacuuccucugccugguguuugcucagaaacuucccggcaacgacaauuccacagccacgcugugucucgggcaccaugcggucccuaacggaaccaucguuaagacaauuaccaaugaucaaaucgaggugacaaacgcuaccgaacuggugcagucuagcuccacaggcgggauuugcgacucuccgcaccagauccuugauggagagaauuguacccugaucgacgcccuccugggcgauccccagugcgacggguuccaaaacaaaaagugggaucuguuugucgaaagaagcaaagccuauuccaauuguuacccuuaugacgugcccgauuacgcuucucuccggagccugguugccuccagcggaacgcuugaguucaacaaugaaucuuuuaacuggaccggcgugacacagaauggcaccuccagcgcuugcgagcgcagaucuaacaaguccuucuuuagccggcugaauuggcucacacaucugaaguauaaauacccugcccuuaacgucaccaugcccaauaacgagaaguucgacaaacuguauauuuggggagugcaccauccugggacggauucugaccagaucucccucuuugcgcaggccagcggccgcauuacaguuuccaccaagagaucucaacagacagugaucccgaacauugggagcggaccccggguccgcgauguguccagcagaaucucuauuuacuggaccaucgugaaaccuggcgacauccugcugauuaauuccaccgggaaccucaucgcuccccggggauacuucaagauucgcagcggcaagucuagcaucaugagauccgacgccccuauuggcaaauguaauucugaaugcaucacacccaacgggagcaucccgaaugauaagccuuuucagaacgucaaucggauuacguauggagcuuguccccgcuacguuaaacagaacacccugaaacuugccacaggcaugagaaaugugccugagaaacaaacccgggggaucuucggagcgauugccggcuuuaucgaaaacgggugggagggaaugguggacggcugguauggcuuccgccaccagaauagcgaggggacaggacaggcugccgaucugaaguccacccaagcugccauuaaccagaucaauggcaaacucaacagacugaucgggaagacgaaugaaaaguuccaccagauugagaaagaauuuucugaggucgaaggacggauccaggaccuugagaaguacguggaggauacaaaaauugaccugugguccuauaacgccgaacuccugguugcucuggagaaccaacauaccaucgaucucaccgacagcgaaaugaauaagcuguucgagagaacaaagaagcagcuucgcgaaaacgcggaggauaugggcaaugggugcuuuaagauuuaccacaaaugugacaacgccugcaucggcucuauucggaauggaaccuaugaucaugacguguacagagacgaggcucugaacaaucgcuuccagaucaagggcgucgaacucaaauccggguacaaggauuggauccuguggauuagcuuugccaucuccugcuuccuucuguguguggcccuccugggauuuauuaugugggcuugccagaaaggcaacauccggugugacauuugcaucuga

SEQ ID NO: 192177 - RNA, 1701 nt, Artificial Sequence
  derived and/or modified CDS sequence (opt5) from hemagglutinin__InfluenzaA__AAX76663
augaagaccaucauugcccugagcuacauccucugccugguguucgcucagaaacuucccggcaacgacaauuccacagccacgcugugucucgggcaccaugcggucccuaacggaacccugguuaagacaauuaccaaugaucaaaucgaggugacaaacgcuaccgaacuugugcagucuagcuccacaggcagaauuugcgacucuccgcaccagauccuggauggggagaauuguacccucaucgacgcccugcugggagauccccauugcgacggcuuucagaacaaagaaugggaucucuucgucgagcggagcaaggccuauuccaauuguuacccuuaugacgugcccgauuacguuucucugcgcagccuuguggcuuccagcgggacgcuggaauuuaacaaugagucuuucaacuggaccggagucgcccaaaauggcacauccagcgcuugcaaaagacggucugacaaguccuuuuucagccgccucaacuggcugcaccagcuuaaguauaaauacccugcccugaaugugaccaugcccaacaaugagaaguuugauaaacucuauauuuggggcguucaucacccugggacagacucugaucagaucucccuguacgcgcaggccagcggaagagugaccgucuccacgaagcggucucaacagacagugauuccgaacaucggcagcgggcccugggugcgcggagucuccagcagaauuucuaucuacuggaccauuguuaaaccuggcgacauccugcucaucaacuccacagggaaucugauugcuccccggggauauuucaagauccgcagcggcaagucuagcauuaugagauccgacgccccuaucggcaaauguaacucugaaugcauuacccccaaugggagcaucccgaacgauaagccuuuucagaaugugaaccggaucaccuacggacccuguccucgcuaugugaaacagaauacacuuaagcuggcuacgggcaugagaaacguccccgagaaacaaacccgggggauuuucggagccaucgcgggcuuuauugaaaaugggugggagggaaugauggacggcugguacggcuuccgccaccagaacuccgaggggacaggacaggccgcugaucucaagagcacccaagccgcuaucaaucagauuaacggcaaacugaauagacuuaucgaaaagacaaacgagaaguuucaucagaucgaaaaagaguucucugaaguggaggggcggauucaggaccuggagaaguauguugaagauaccaaaaucgaccucugguccuacaaugccgagcugcugguggcccucgaaaaccaacacacgauugaucugacagacagcgagaugaacaaacuuuucgaaagaaccaagaagcagcugcgcgagaaugcugaggauaugggaaacggcugcuuuaagaucuaucauaaaugugacaaugcgugcauugggucuauccggaacggcaccuacgaucacgacgucuacagagacgaagcccucaauaaccgcuuccagauuaagggaguggagcugaaauccggcuauaaggauuggauccuuuggaucagcuuugcuauuuccugcuuccugcucuguaucguucugcugggguuuauuaugugggccugccagaaaggaaauauccgguguaacauuugcaucuga

SEQ ID NO: 192178 - RNA, 1701 nt, Artificial Sequence
  derived and/or modified CDS sequence (opt5) from hemagglutinin__InfluenzaA__AAX76673
augaagaccaucauugcccugagcuacauccucugccugguguucgcucagaaacuucccgucaacgacaauuccacagccacgcugugucucggccaccaugcgguuccuaacgggacccuggugaagacaauuaccaaugaucacaucgaggugacaaacgcuaccgaacuuguccaaucuagcuccacaggaagaauuugcgacucuccgcaucagauccuggauggcgagaauuguacccucaucgacgcccugcugggggauccccacugcgacggauuucagaacaaagaaugggaucucuucguggagcggagcacggccuauuccaauuguuacccuuaugacguucccgauuacgcuucucugcgcagccuuguggccuccagcggcacccuggaauuuaacaaugagucuuucaacuggacaggggucgcucagaauggaaccuccagcgccugcaagagacggucuauuaaauccuuuuucagccgccucaacuggcugcaucaacuuaaguauaaguacccugcgcugaaugugacaaugcccaacaaugagaaauuugacaagcucuauaucuggggcguucaccacccuucuaccgauuccgaccagauuagccuguacgcccaggcuuccggcagagugacggucucuacaaaacggagccagcaaaccgugaucccgaacauugggucccgccccugggugagaggagucagcucucggaucuccauuuacuggacaaucguuaagccuggcgauauccugcucauuaacagcaccgggaaucugaucgcuccccgcggauauuucaaaauuagaucuggcaagagcuccaucaugcggucuaacgccccuauugggaaguguaauagcgaaugcaucacccccaacggauccaucccgaaugacaaaccuuuucagaacgugaaucgcauuacauacggcgccugucccagauaugugaagcagaacacgcuuaaacuggcgaccggcaugcggaaugucccugagaagcagacacgcgggaucuucggagccauugcuggcuuuaucgaaaacgggugggagggaaugguggacggcugguacggguucagacaucaaaauagcgagggaaccggccaggccgcugaucucaaaucuacacaggccgccauuaaccaaaucaauggcaagcugaaccggcuuaucgaaaagaccaaugagaaguuucaccagauugaaaaggaguucuccgaaguugaggggagaauccaggaccuggagcgcuauguggaagauacgaaaauugaccucuggagcuacaacgcugagcugcuggucgcgcucgaaaaccagcauacaaucgaucugaccgacucugagaugaauaaacuuuucgaacggaccagaaaacaacugcgcgagaacgccgaggauaugggaaauggcugcuuuaagauuuaucacaaaugugacaacgcuugcaucggguccauucggaauggaacauacgaucacgacguguacagagaugaagcccucaacaaucgcuuccagaucaagggcguugagcuuaagagcggguauaaagacuggauccuguggauuuccuuugccaucucuugcuuccugcucugugugguccugcugggcuuuauuaugugggcuugccagaagggaaacauccgguguaauauuugcaucuga

SEQ ID NO: 192179 - RNA, 1701 nt, Artificial Sequence
  derived and/or modified CDS sequence (opt5) from hemagglutinin__InfluenzaA__AAX76683
augaagaccaucauugcccugagcuacauccucugccugguguucgcucagaaacuucccgucaacgacaauuccacagccacgcugugucucggccaccaugcgguuccuaacgggacccuggugaagacaauuaccaaugaucacaucgaggugacaaacgcuaccgaacuuguccaaucuagcuccacaggaagaauuugcgacucuccgcaucagauccuggauggcgagaauuguacccucaucgacgcccugcugggggauccccacugcgacggauuucagaacaaagaaugggaucucuucguggagcggagcacggccuauuccaauuguuacccuuaugacguucccgauuacgcuucucugcgcagccuuguggccuccagcggcacccuggaauuuaacaaugagucuuucaacuggacaggggucgcucagaauggaaccuccagcgccugcaagagacggucuauuaaauccuuuuucagccgccucaacuggcugcaucaacuuaaguauaaguacccugcgcugaaugugacaaugcccaacaaugagaaauuugacaagcucuauaucuggggcguucaccacccuucuaccgauuccgaccagauuagccuguacgcccaggcuuccggcagagugacggucucuacaaaacggagccagcaaaccgugaucccgaacauugggucccgccccugggugagaggagucagcucucggaucuccauuuacuggacaaucguuaagccuggcgauauccugcucauuaacagcaccgggaaucugaucgcccccagaggauauuucaaaauuagaucuggcaagagcuccgugaugcggucuaacgcuccuaucgggaaguguaauagcgaaugcauuacccccaacggauccaucccgaaugacaaaccuuuucagaacgugaaucgcaucacauacggcgccugucccagauaugucaagcagaacacgcuuaaacuggcgaccggcaugcggaaugugccugagaagcagacacgcgggauuuucggagccaucgcuggcuuuauugaaaacgggugggagggaaugguugacggcugguacggguucagacaucaaaauagcgagggaaccggccaggccgcugaucucaaaucuacacaggccgccaucaaccaaauuaauggcaagcugaaccggcuuaucgagaaaaccaaugaaaaguuucaccagaucgaaaaggaguucuccgaaguggaggggcgcauucaggaccuggagaaauaugucgaagauacgaagaucgaccucuggagcuacaacgcugagcugcugguggcgcucgaaaaccagcauacaauugaucugaccgacucugagaugaauaaacuuuucgaacgcacccggaagcaacugagagagaacgccgaggauaugggaaauggcugcuuuaaaaucuaucacaagugugacaacgcuugcauuggguccauccgcaauggaacauacgaucacgacguuuaccgggaugaagcccucaacaauagauuccagauuaagggcguggagcugaaaagcggguauaaggacuggauccuuuggaucuccuuugccauuucuugcuuccugcucugugucgugcugcugggcuuuaucaugugggcuugccagaaaggaaacauucgcuguaauaucugcauuuga

SEQ ID NO: 192180 - RNA, 1701 nt, Artificial Sequence; identical to SEQ ID NO: 192144
  derived and/or modified CDS sequence (opt5) from hemagglutinin__InfluenzaA__AAX76713

SEQ ID NO: 192181 - RNA, 1701 nt, Artificial Sequence
  derived and/or modified CDS sequence (opt5) from hemagglutinin__InfluenzaA__AAX76723
augaagaccaucauugcccugagcuacauccucugccugguguucgcucagaaacuucccgucaacgacaauuccacagccacgcugugucucggccaccaugcgguuccuaacgggacccuggugaagacaauuaccaaugaucacaucgaggugacaaacgcuaccgaacuuguccaaucuagcuccacaggaagaauuugcgacucuccgcaucagauccuggauggcgagaauuguacccucaucgacgcccugcugggggauccccacugcgacggauuucagaacaaagaaugggaucucuucguggagcggagcacggccuauuccaauuguuacccuuaugacguucccgauuacgcuucucugcgcagccuuguggccuccagcggcacccuggaauuuaacaaugagucuuucaacuggacaggggucgcucagaauggaaccuccagcgccugcaagagacggucuauuaaauccuuuuucagccgccucaacuggcugcaucaacuuaaguauaaguacccugcgcugaaugugacaaugcccaacaaugaggaauuugacaaacucuauaucuggggcguucaccacccuucuaccgauuccgaccagauuagccuguacgcccaggcuuccggcagagugacggucucuacaaagcggagccagcaaaccgugaucccgaacauugggucccgccccugggugagaggagucagcucuaucauuuccaucuacuggacaaucguuaaaccuggcgauauucugcucaucaacagcaccgggaaucugauugcuccccggggauauuucaagauccgcucuggcaaaagcuccauuaugagaucuaacgccccuaucgggaaguguaauagcgagugcaucacccccaacggauccauuccgaaugacaagccuuuucagaacgugaaucggaucacauacggcgccuguccccgcuaugugaaacagaacacgcuuaagcuggcgaccggcaugagaaaugucccugaaaaacagacacgggggauuuucggagccaucgcuggcuuuauugagaacgggugggagggaaugguggacggcugguacggguuccgccaucaaaauagcgaaggaaccggccaggccgcugaucucaagucuacacaggccgccaucaaccaaaucaauggcaaacugaacagacuuauugagaagaccaaugaaaaauuucaccagaucgagaaggaguucuccgaaguugaggggcggauucaggaccuggaaaaguauguggaggauacgaaaaucgaccucuggagcuacaacgcugaacugcuggucgcgcucgagaaccagcauacaauugaucugaccgacucugaaaugaauaagcuguucgagagaacccgcaaacaacugcgggagaacgccgaagauaugggaaauggcugcuuuaagaucuaucacaaaugugacaacgcuugcauuggguccaucagaaauggaacauacgaucacgacguguaccgcgaugaggcccucaacaaucgguuccagaucaagggcguugaacuuaagagcggguauaaagacuggauucuuuggaucuccuuugccauuucuugcuuccugcucugugugguccugcugggcuuuaucaugugggcuugccagaagggaaacauuagauguaauaucugcaucuga

SEQ ID NO: 192182 - RNA, 1701 nt, Artificial Sequence
  derived and/or modified CDS sequence (opt5) from hemagglutinin__InfluenzaA__AAX76733
augaagaccaucauugcccugagcuacauccucugccugguguucgcucagaaacuucccggcaacgacaauuccacagccacgcugugucucgggcaccaugcggucccuaacggaacccugguuaagacaauuaccaaugaucaaaucgaggugacaaacgcuaccgaacuugugcagucuagcuccacagacagaauuugcgauucuccgcaccagauccuggacggcgggaauuguacccucaucgaugcccugcugggagacccccauugcgauggcuuucagaacaaagagugggaccucuucgucgaacggagcaaggccuauuccaauuguuacccuuaugaugugcccgacuacguuucucugcgcagccuuguggcuuccagcgggacgcuggaguuuaacaaugaaucuuucaacuggaccggagucgcccaaaauggcacauccagcgcuugcaaaagacggucugauaaguccuuuuucagccgccucaacuggcugcaccagcuuaagaauaaauauccugcccugaacguggcgaugcccaauaacgagaaguuugacaaacucuacauuuggggcguucaucacccugggaccgauucugaccagaucucccuguaugcccaggcuagcggaagagugacagucuccaccaagcggucucaacagacggugauuccgaacaucggcagccgccccagagugcgggacauuuccagccgcaucucuauuuacuggacaaucgucaaaccuggggauauccugcucauuaauuccaccggaaaccugaucgcccccagaggcuacuucaagauucggagcgggaagucuagcaucaugcgcuccgacgcuccuauuggaaaauguaauucugagugcaucacacccaacggcagcaucccgaaugauaagccuuuucagaacguuaauagaauuaccuauggcgccuguccccgguacgugaaacagaacacccuuaagcuggcgacagggaugcgcaaugugccugaaaaacaaacgagaggaaucuucggcgccauugcuggguuuaucgagaacggaugggaaggcauggucgacgggugguauggauuccggcaccagaauuacgagggcaccggccaggccgcugaucucaaguccacacaagccgccauuaaccagaucaaugggaaacugaacagacuuaucgagaagaccaaugaaaaguuucaucagauugagaaagaguucagcgaaguggaaggacgcauccaggaccuggagaaguauguugaggauacaaaaauugaccucuggucuuacaacgcugaacugcugguggcgcucgagaaccaacacaccaucgaucugacggacuccgaaaugaauaaacuuuucgagcggacaaagaagcagcugagagaaaacgccgaggauaugggcaaugggugcuuuaagauuuaucauaaaugugacaacgcuugcaucggaagcauucgcaauggcaccuacgaccacgaugucuaccgggacgaggcccucaacaauagauuccagaucaaggggguggaacugaaaucuggcuauaaggauuggauccuuuggauuuccuuugccaucagcugcuuccugcucuguauuguucugcugggauuuaucaugugggcuugccagaaaggcaacauucgcuguaauaucugcaucuga

SEQ ID NO: 192183 - RNA, 1701 nt, Artificial Sequence
  derived and/or modified CDS sequence (opt5) from hemagglutinin__InfluenzaA__AAX76743
augaagaccaucauugcccugagcuacauccucugccugguguucgcucagaaacuucccggcaacgacaauuccacagccacgcugugucucgggcaccaugcggucccuaacggaacccugguuaagacaauuaccaaugaucaaaucgaggugacaaacgcuaccgaacuugugcagucuagcuccacaggcagaauuugcgacucuccgcaccagauccuggauggggagaauuguacccucaucgacgcccugcugggagauccccauugcgacggcuuucagaacaaagaaugggaucucuucgucgagcggagcaaggccuauuccaauuguuacccuuaugacgugcccgauuacguuucucugcgcagccuuguggcuuccagcgggacgcuggaauuuaacaaugagucuuucaacuggaccggagucgcccaaaauggcacauccagcgcuugcaaaagacggucuaacaaguccuuuuucagccgccucaauuggcugcaccagcuuaagaacaaauauccugcccugaauguggcgaugcccaacaacgagaaguuugacaaacucuacauuuggggcguucaucacccugggaccgauucugaccagaucucccuguaugcccaggcuagcggaagagugacagucuccaccaagcggucucaacagacggugauuccgaauaucggcagccgccccagagugcgggauauuuccagccgcaucucuauuuacuggacaaucgucaaaccuggggacauccugcucauuaacuccaccggaaaucugaucgcccccagaggcuacuucaagauucggagcgggaagucuagcaucaugcgcuccgacgcuccuauuggaaaauguaacucugaaugcaucacacccaauggcagcaucccgaacgauaagccuuuucagaauguuaacagaauuaccuauggcgccuguccccgguacgugaaacagaauacccuuaagcuggcgacagggaugcgcaacgugccugagaaacaaacgagaggaaucuucggcgccauugcuggguuuaucgaaaauggaugggagggcaugauggacgggugguauggauuccggcaccagaacuccgagggcaccggccaggccgcugaucucaagagcacacaagccgccauuaaucagaucaacgggaaacugaauagacuuaucgaaaagaccaacgagaaguuucaucagauugaaaaagaguucucugaagucgagggacgcauccaggaccuggagaaguacguggaagauacaaaaauugaccucugguccuauaacgcugagcugcugguugcgcucgaaaaucaacacaccaucgaucugacggacagcgagaugaacaaacuuuucgaacggacaaagaagcagcugagagagaaugccgaggauaugggcaacgggugcuuuaagauuuaccauaaaugugacaaugcuugcaucggaucuauucgcaacggcaccuaugaucacgacguguaccgggacgaagcccucaauaacagauuccagaucaagggggucgagcugaaauccggcuacaaggauuggauccuuuggauuagcuuugccaucuccugcuuccugcucuguauugugcugcugggauuuaucaugugggcuugccagaaaggcaauauucgcuguaacaucugcaucuga

SEQ ID NO: 192184 - RNA, 1701 nt, Artificial Sequence
  derived and/or modified CDS sequence (opt5) from hemagglutinin__InfluenzaA__AAX76763
augaagaccaucauugcccugagcuacauccucugccugguguucgcucagaaacuucccggcaacgacaauuccacagccacgcugugucucgggcaccaugcggucccuaacggaaccauuguuaagacaaucaccaaugaucaaauugaggugacaaacgcuaccgaacuggugcagucuagcuccacaggcgggaucugcgacucuccgcaccagauccuugauggagagaauuguacccugauugacgcccuccugggcgauccccagugcgacggguuucaaaacaaaaagugggaucuguucgucgaaagaagcaaagccuauuccaauuguuacccuuaugacgugcccgauuacgcuucucuccggagccugguugccuccagcggaacgcuugaguuuaacaaugaaucuuucgacuggaccggcgugacacagaacggcaccuccagcgcuugcaagcgcagaucuaauaaguccuuuuucagccggcugaacuggcucacacaucugaaauauaaguacccugcccuuaaugucaccaugcccaacaaugagaaauuugauaagcuguauaucuggggagugcaccauccugggacggacucugaucagauuucccucuacgcgcaggccagcggccgcaucacaguuuccaccaaaagaucucaacagacagugauuccgaacaucgggagccggccccgcgucagagacauuuccagccggaucucuaucuacuggaccauugugaagccuggagacauccugcugauuaacuccaccggcaaucucaucgcuccccgcggguauuucaagauuagaagcggaaaaucuagcaucaugcgguccgaugccccuaucggcaaguguaacucugagugcauuacacccaauggcagcaucccgaacgacaaaccuuuucagaaugugaaccgcauuacguacggggcuugucccagauaugucaagcagaauacccugaaacuugccacaggaaugcggaacguuccugaaaagcaaacccgcggcaucuucggggcgauugccggauuuaucgagaauggcugggaagggaugguggauggaugguacggcuucagacaccagaacuccgagggcacagggcaggcugccgaccugaaaagcacccaagcugccaucaaucagauuaacggaaagcucaaucggcugaucggcaagacgaacgagaaauuucaccagauugaaaaggaguucucugaaguggaggggagaauccaggaucuugaaaaauaugucgaggacacaaagauugaucugugguccuacaaugccgagcuccugaucgcucuggaaaaccaacauaccauugaccucaccgauagcgagaugaacaaacuguucgaacgcacaaagaagcagcuucgggagaaugcggaagacaugggaaacggcugcuuuaaaaucuaucacaagugugauaaugccugcaucgggucuauuagaaacggcaccuacgaccaugacguguaccgcgaugaggcucugaauaaccgguuccagaucaaaggaguugagcucaaguccggcuauaaagacuggauucuguggaucagcuuugccauuuccugcuuccuucuguguguggcccuccugggguuuaucaugugggcuugccagaagggaaauaucagauguaacauuugcaucuga

SEQ ID NO: 192185 - RNA, 1701 nt, Artificial Sequence; identical to SEQ ID NO: 192104
  derived and/or modified CDS sequence (opt5) from hemagglutinin__InfluenzaA__AAY18086

SEQ ID NO: 192186 - RNA, 1701 nt, Artificial Sequence
  derived and/or modified CDS sequence (opt5) from hemagglutinin__InfluenzaA__AAY18096
augaagaccaucauugcccugagcugcauccucugucugguguucgcucagaaacuucccggcaacgacaauuccacagccacgcugugccucgggcaccaugcggucccuaacggaaccauuguuaagacaaucaccaaugaucaaauugaggugacaaacgcuaccgaacuggugcagucuagcuccacaggcgggaucugugacucuccgcaccagauccuugauggagagaauugcacccugauugacgcccuccugggcgauccccagugugacggguuucaaaacaaaaagugggaucuguucgucgaaagaagcaaagccuacuccaauugcuauccuuacgacgugcccgauuaugcuucucuccggagccugguugccuccagcggaacgcuugaguuuaacaaugaaucuuucaacuggaccggcgugacacagaauggcaccuccagcgcuugugagcgcagaucuaacaaguccuuuuucagccggcugaauuggcucacacaucugaaguacaaauauccugcccuuaacgucaccaugcccaauaacgagaaguuugacaaacuguacaucuggggagugcaccauccugggacggauucugaccagauuucccucuaugcgcaggccagcggccgcaucacaguuuccaccaagagaucucaacagacagugauuccgaacaucgggagccggccccgcgucagagauguguccagccggauuucuaucuacuggaccaucgugaaaccuggagacauucugcugaucaauuccaccggcaaccucauugcuccccgcggguacuucaagaucagaagcggaaagucuagcauuaugcgguccgacgccccuaucggcaaaugcaauucugaauguaucacacccaacggcagcauuccgaaugauaagccuuuucagaacgucaaucgcaucacguauggggcuugccccagauacguuaaacagaacacccugaaacuugccacaggaaugcggaaugugccugagaaacaaacccgcggcauuuucggggcgaucgccggauuuauugaaaacggcugggaggggaugguggacggaugguauggcuucagacaccagaauagcgagggcacagggcaggcugccgaucugaaguccacccaagcugccaucaaccagaucaauggaaaacucaaccggcugauuggcaagacgaaugaaaaguuucaccagaucgagaaagaguucucugaagucgaagggcgcauucaggaccuugagaaguacguggaggauacaaaaaucgaccugugguccuauaacgccgaacuccugguugcucuggagaaccaacauaccauugaucucaccgacagcgaaaugaauaagcuguucgagagaacaaagaagcagcuucgggaaaacgcggaggauaugggaaauggcuguuuuaagaucuaccacaaaugcgacaacgccugcauugggucuaucagaaauggcaccuaugaucaugacguguaccgcgacgaggcucugaacaaucgguuccagaucaagggagucgaacucaaauccggcuacaaggauuggauucuguggaucagcuuugccauuuccuguuuccuucugugcguggcccuccugggguuuaucaugugggcuugucagaaaggaaacauuagaugcgacaucuguaucuga

SEQ ID NO: 192187 - RNA, 1701 nt, Artificial Sequence; identical to SEQ ID NO: 192119
  derived and/or modified CDS sequence (opt5) from hemagglutinin__InfluenzaA__AAY18106

SEQ ID NO: 192188 - RNA, 1701 nt, Artificial Sequence; identical to SEQ ID NO: 192119
  derived and/or modified CDS sequence (opt5) from hemagglutinin__InfluenzaA__AAY18116

SEQ ID NO: 192189 - RNA, 1701 nt, Artificial Sequence
  derived and/or modified CDS sequence (opt5) from hemagglutinin__InfluenzaA__AAY18126
augaagaccaucauugcccugagcuacauccucugccugguguucgcucagaaacuucccggcaacgacaauuccacagccacgcugugucucgggcaccaugcggucccuaacggaaccauuguuaagacaaucaccaaugaucaaauugaggugacaaacgcuaccgaacuggugcagucuagcuccacaggcgggaucugcgacucuccgcaccagauccuugauggagagaauuguacccugauugacgcccuccugggcgauccccagugcgacggguuucaaaacaaaaagugggaucuguucgucgaaagaagcaaagccuauuccaauuguuacccuuaugacgugcccgauuacgcuucucuccggagccugguugccuccagcggaacgcuugaguuuaacaaugaaggcuucaacuggaccggcgugacacagaaugggaccucuuccgcuugcaagcgcaagagcaacaaauccuuuuucucuagacugaauuggcucacacaucugaaguauaaauacccugcccuuaacgucaccaugcccaauaacgagaaguuugacaaacuguauaucuggggagugcaccauccuggcacggauaacgaccagauuagccucuacgcgcaggccucugggcggaucacaguuuccaccaagcgcagccaacagacagugauuccgaauaucggauccagaccccggguccgcgaugugucuagcagaauuuccaucuacuggaccaucgugaagccuggcgacauucugcugaucaacagcaccgggaaucucauugcuccccggggauauuucaaaauccgcucuggcaaguccagcauuaugagaucugacgccccuaucggcaaauguaacagcgagugcaucacacccaauggguccauuccgaacgauaagccuuuucagaaugucaaccggaucacguacggagcuuguccccgcuauguuaaacagaauacccugaagcuggccacaggcaugagaaacgugccugaaaaacaaacccgggggauuuucggagcgaucgccggcuuuauugagaaugggugggaaggaaugguggacggcugguacggcuuccgccaccagaacucugaggggacaggacaggcugccgaucuuaagagcacccaagcugccaucaaucagaucaacggcaagcucaauagacugauugggaaaacgaacgagaaguuucaccagaucgaaaaagaguucuccgaagucgagggacggauucaggaccuugaaaaguauguggaggauacaaaaaucgaccuguggagcuacaacgccgagcuccugguugcucuggaaaaucaacauaccauugaucucaccgacucugagaugaacaagcuguucgaaagaacaaagaaacagcuucgcgagaaugcggaagauaugggcaacgggugcuuuaagaucuaucacaaaugugacaaugccugcauuggcuccauccggaacggaaccuacgaucaugacguguacagagacgaggcucugaauaaccgcuuccagaucaagggcgucgagcucaaaagcggguauaaggauuggauucuguggaucucuuuugccauuuccugcuuccuucuguguguggcccuccugggauuuaucaugugggcuugccagaagggcaauauucgguguaacaucugcaucuga

SEQ ID NO: 192190 - RNA, 1701 nt, Artificial Sequence
  derived and/or modified CDS sequence (opt5) from hemagglutinin__InfluenzaA__AAY18136
augaagaccaucauugcccugagcuacauccucugccugguguucgcucagaaacuucccggcaacgacaauuccacagccacgcugugucucgggcaccaugcggucccuaacggaaccauuguuaagacaaucaccaaugaucaaauugaggugacaaacgcuaccgaacuggugcagucuagcuccacaggcgggaucugcgacucuccgcaccagauccuugauggagagaauuguacccugauugacgcccuccugggcgauccccagugcgacggguuucaaaacaaaaagugggaucuguucgucgaaagaagcaaagccuauuccaauuguuacccuuaugacgugcccgauuacgcuucucuccggagccugguugccuccagcggaacgcuugaguuuaacaaugaaucuuucgacuggaccggcgugacacagaacggcaccuccagcgcuugcaagcgcagaucuaauaaguccuuuuucagccggcugaacuggcucacacaucugaaauauaaguacccugcccuuaaugucaccaugcccaacaaugagaaauuugauaagcuguauaucuggggagugcaccauccugggacggacucugaucagauuucccucuacgcgcaggccagcggccgcaucacaguuuccaccaaaagaucucaacagacagugauuccgaacaucgggagccggccccgcgucagagacguguccagccggauuucuaucuacuggaccaucgugaagccuggagacauucugcugaucaacuccaccggcaaucucauugcuccccgcggguauuucaagaucagaagcggaaaaucuagcauuaugcgguccgaugccccuaucggcaaguguaacucugagugcaucacacccaauggcagcauuccgaacgacaaaccuuuucagaaugucaaccgcaucacguacggggcuugucccagauauauuaagcagaauacccugaaacuugccacaggaaugcggaacguuccugaaaagcaaacccgcggcaucuucggggcgauugccggauuuaucgagaauggcugggaagggaugguggauggaugguacggcuucagacaccagaacuccgagggcacagggcaggcugccgaccugaaaagcacccaagcugccaucaaucagauuaacggaaagcucaaucggcugaucggcaagacgaacgagaaauuucaccagauugaaaaggaguucucugaaguggaggggagaauccaggaucuugaaaaauaugucgaggacacaaagauugaucugugguccuacaaugccgagcuccugguggcucuggaaaaccaacauaccaucgaccucaccgauagcgagaugaacaaacuguucgaacgcacaaagaagcagcuucgggagaaugcggaagacaugggaaacggcugcuuuaaaauuuaucacaagugugauaaugccugcaucgggucuaucagaaacggcaccuacgaccaugacguuuaccgcgaugaggcucugaauaaccgguuccagauuaaaggaguggagcucaaguccggcuauaaagacuggauccuguggauuagcuuugccaucuccugcuuccuucugugugucgcccuccugggguuuauuaugugggcuugccagaagggaaauaucagauguaacaucugcauuuga

SEQ ID NO: 192191 - RNA, 1701 nt, Artificial Sequence; identical to SEQ ID NO: 192144
  derived and/or modified CDS sequence (opt5) from hemagglutinin__InfluenzaA__AAY18156

SEQ ID NO: 192192 - RNA, 1701 nt, Artificial Sequence; identical to SEQ ID NO: 192144
  derived and/or modified CDS sequence (opt5) from hemagglutinin__InfluenzaA__AAY18176

SEQ ID NO: 192193 - RNA, 1701 nt, Artificial Sequence; identical to SEQ ID NO: 192144
  derived and/or modified CDS sequence (opt5) from hemagglutinin__InfluenzaA__AAY18186

SEQ ID NO: 192194 - RNA, 1701 nt, Artificial Sequence; identical to SEQ ID NO: 192145
  derived and/or modified CDS sequence (opt5) from hemagglutinin__InfluenzaA__AAY18564

SEQ ID NO: 192195 - RNA, 1701 nt, Artificial Sequence
  derived and/or modified CDS sequence (opt5) from hemagglutinin__InfluenzaA__AAY18585
augaagaccaucauugcccugagcuacauccucugccugguguucgcucagaaacuucccgagaacgacaauuccacagccacgcugugucucggccaccaugcggucccuaacgggacccugguuaagacaauuaccaaugaucaaaucgaagugacaaacgcuaccgagcuugugcagucuagcuccacaggaagaauuugcgacucuccgcaccagauccuggauggcgaaaauuguacccucaucgacgcccugcugggggauccccauugcgacggauuucagaacaaagagugggaucucuucgucgaacggagcaaggccuauuccaauuguuacccuuaugacgugcccgauuacguuucucugcgcagccuuguggcuuccagcggcacgcuggaguuuaacaaugagucuuucaacuggaccggggucgcccaaaauggaacauccagcgcuugcaaaagacggucugacaaguccuuuuucagccgccucaacuggcugcaccagcuuaaguauaaauacccugcccugaaugugaccaugcccaacaaugaaaaguuugauaaacucuauauuuggggcguucaucacccuggcacagacucugaucagaucucccuguacgcgcaggccagcgggagagugaccgucuccacgaagcggucucaacagacagugauuccgaacaucggaagccgccccugggugagaggcgucuccagccggauuucuaucuacuggaccauuguuaaaccuggggacauccugcucaucaacuccacaggaaaucugauugcuccccgcggcuauuucaagaucagaagcgggaagucuagcauuaugcgguccgacgccccuaucggaaaauguaacucugagugcauuacccccaauggcagcaucccgaacgauaagccuuuucagaaugugaaccgcaucaccuacggccccuguccuagauaugugaaacagaauacacuuaagcuggcuacggggaugcggaacguccccgaaaaacaaacccgcggaauuuucggcgccaucgcgggguuuauugagaauggaugggagggcaugauggacgggugguacggauucagacaccagaacuccgaaggcacaggccaggccgcugaucucaagagcacccaagccgcuaucaaucagauuaacgggaaacugaaucggcuuaucgagaagacaaacgaaaaguuucaucagaucgagaaagaguucucugaaguggagggacgcauucaggaccuggaaaaguauguugaggauaccaaaaucgaccucugguccuacaaugccgaacugcugguggcccucgagaaccaacacacgauugaucugacagacagcgaaaugaacaaacuuuucgagagaaccaagaagcagcugcgggagaaugcugaagauaugggcaacgggugcuuuaagaucuaucauaaaugugacaaugcgugcauuggaucuaucagaaacggcaccuacgaucacgacgucuaccgcgacgaggcccucaauaaccgguuccagauuaaggggguggaacugaaauccggcuauaaggauuggauccuuuggaucagcuuugcuauuuccugcuuccugcucuguaucguucugcugggauuuauuaugugggccugccagaaaggcaauaucagauguaacauuugcaucuga

SEQ ID NO: 192196 - RNA, 1701 nt, Artificial Sequence; identical to SEQ ID NO: 192104
  derived and/or modified CDS sequence (opt5) from hemagglutinin__InfluenzaA__AAY18611

SEQ ID NO: 192197 - RNA, 1701 nt, Artificial Sequence; identical to SEQ ID NO: 192145
  derived and/or modified CDS sequence (opt5) from hemagglutinin__InfluenzaA__AAY27843

SEQ ID NO: 192198 - RNA, 1701 nt, Artificial Sequence; identical to SEQ ID NO: 192104
  derived and/or modified CDS sequence (opt5) from hemagglutinin__InfluenzaA__AAY27853

SEQ ID NO: 192199 - RNA, 1701 nt, Artificial Sequence
  derived and/or modified CDS sequence (opt5) from hemagglutinin__InfluenzaA__AAY27863
augaagaccaucauugcccugagcuacauccucugccugguguucgcucagaaacuucccggcaacgacaauuccacagccacgcugugucucgggcaccaugcggucccuaacggaaccauuguuaagacaaucaccaaugaucaaauugaggugacaaacgcuaccgaacuggugcagucuagcuccacaggcgggaucugcgacucuccgcaccagaucauugauggagagaauuguacccuuaucgacgcccugcucggcgauccccagugcgacggguuucaaaacaaaaagugggaucuguucgucgaaagaagcaaagccuauuccaauuguuacccuuaugacgugcccgauuacgcuucucugcggagccucguugccuccagcggaacgcuggaguuuaacaaugaaucuuucgacuggaccggcgugacacagaacggcaccuccagcgcuugcaagcgcagaucuaauaaguccuuuuucagccggcuuaacuggcugacacaucucaaauauaaguacccugcccugaaugucaccaugcccaacaaugagaaauuugauaaacuuuauauuuggggagugcaccauccugggacggacucugaucagaucucccuguacgcgcaggccagcggccgcauuacaguuuccaccaagagaucucaacagacagugaucccgaacauugggagccggccccgcgucagagacguguccagccggaucucuaucuacuggaccauugugaagccuggagacauccuccugauuaacuccaccggcaaucugaucgcuccccgcggguauuucaagauuagaagcggaaaaucuagcaucaugaucuccgaugccccuauuggcaaguguaacucugagugcaucacacccaauggcagcauuccgaacgacaaaccuuuucagaaugucaaccggaucacguacggggcuuguccccgcuauguuaagcagaauacccucaaacuggccacaggaaugagaaacgugccugaaaagcaaacccggggcauuuucggggcgaucgccggauuuaucgagaauggcugggaagggaugguggauggaugguacggcuuccgccaccagaacuccgagggcacagggcaggcugccgaccuuaaaagcacccaagcugccauuaaucagaucaacggaaagcugaauagacucauuggcaagacgaacgagaaauuucaccagaucgaaaaggaguucucugaagucgaggggcggauucaggaucuggaaaaauauguggaggacacaaagaucgaucuuugguccuacaaugccgagcugcucguugcucuggaaaaccaacauaccauugaccugaccgauagcgagaugaacaaacucuucgaaagaacaaagaagcagcugcgcgagaaugcggaagacaugggaaacggcugcuuuaaaaucuaucacaagugugauaaugccugcaucgggucuauucggaacggcaccuacgaccaugacguguacagagaugaggcucuuaauaaccgcuuccagaucaaaggagucgagcugaaguccggcuauaaagacuggauucucuggaucagcuuugccauuuccugcuuccugcuuuguguggcccugcucggguuuaucaugugggcuugccagaagggaaauauccgguguaacauuugcaucuga

SEQ ID NO: 192200 - RNA, 1701 nt, Artificial Sequence; identical to SEQ ID NO: 192123
  derived and/or modified CDS sequence (opt5) from hemagglutinin__InfluenzaA__AAY27959

SEQ ID NO: 192201 - RNA, 1701 nt, Artificial Sequence; identical to SEQ ID NO: 192103
  derived and/or modified CDS sequence (opt5) from hemagglutinin__InfluenzaA__AAY27994

SEQ ID NO: 192202 - RNA, 1701 nt, Artificial Sequence; identical to SEQ ID NO: 192103
  derived and/or modified CDS sequence (opt5) from hemagglutinin__InfluenzaA__AAY28004

SEQ ID NO: 192203 - RNA, 1701 nt, Artificial Sequence; identical to SEQ ID NO: 192103
  derived and/or modified CDS sequence (opt5) from hemagglutinin__InfluenzaA__AAY28265

SEQ ID NO: 192204 - RNA, 1701 nt, Artificial Sequence
  derived and/or modified CDS sequence (opt5) from hemagglutinin__InfluenzaA__AAY28275
augaagaccaucauugcccugagcuacauccucugccugguguucgcucagaaacuucccggcaacgacaauuccacagccacgcugugucucgggcaccaugcggucccuaacggaacccugguuaagacaauuaccaaugaucaaaucgaggugacaaacgcuaccgaacuugugcagucuagcuccacaggcagaauuugcgacucuccgcaccagauccuggauggggagaauuguacccucaucgacgcccugcugggagauccccauugcgacggcuuucagaacaaagaaugggaucucuucgucgagcggagcaaggccuauuccaauuguuacccuuaugacgugcccgauuacgcuucucugcgcagccuuguugccuccagcgggacgcuggaauuuaacaaugagucuuucaacuggaccggaguggcucaaaauggcacauccagcgccugcaaaagacggucuaacaaguccuuuuucagccgccucaauuggcugcaccagcuuaaguauaaauacccugcgcugaacgucaccaugcccaauaacgagaaguuugacaaacucuauauuuggggcgugcaucacccuucuacagauuccgaccagaucagccuguacgcccaggcuuccgggagaguuaccgugucuacgaagcggagccaacagacagucauuccgaacaucggaucccgccccugggugagaggcgugagcucucggauuuccaucuacuggaccauugucaaaccuggggauauccugcucaucaauagcacaggaaaccugauugcuccccgcggcuauuucaagaucagaucugggaagucuuccguuaugcggucugacgccagcauuggaaaauguaauuccgaaugcaucaccccuaacggcagcauucccaaugacaagccguuucagaacgugaaucgcaucaccuacggcgccuguccuagauaugugaaacagaacacacuuaagcuggcgacggggaugcggaauguccccgagaaacaaacccgcggaaucuucggcgccauugcuggguuuaucgaaaacggaugggagggcaugguggaugggugguacggauucagacaccagaauagcgagggcacaggccaggccgcugaccucaaguccacccaagccgccauuaaccagaucaaugggaaacugaaccggcuuauugaaaagacaaaugagaaguuucaucagaucgaaaaagaguucagcgaaguugagggaagaauccaggaucuggagaaguauguggaagacaccaaaauugaucucuggucuuacaacgcugagcugcuggucgcgcucgaaaaccaacacacgaucgaccugacagauuccgagaugaauaaacuuuucgaacgcaccaagaagcagcugcgggagaacgccgaggacaugggcaaugggugcuuuaagauuuaucauaaaugugauaacgcuugcaucggaagcauuagaaauggcaccuacgaccacgauguguaccgcgacgaagcccucaacaaucgguuccagaucaaggggguugagcugaaauccggcuauaaggacuggauucuuuggaucucuuuugccaucagcugcuuccugcucugugugguccugcugggauuuauuaugugggcuugccagaaaggcaacaucagauguaauauuugcaucuga

SEQ ID NO: 192205 - RNA, 1701 nt, Artificial Sequence
  derived and/or modified CDS sequence (opt5) from hemagglutinin__InfluenzaA__AAY28285
augaagaccaucauugcccugagcuacauccucugccugguguucgcucagaaacuucccggcaacgacaauuccacagccacgcugugucucgggcaccaugcggucccuaacggaacccugguuaagacaauuaccaaugaucaaaucgaggugacaaacgcuaccgaacuugugcaaaauucuagcacaggcagaauuugcgacuccccgcaccagauccuggauggggagaacuguacccucaucgacgcccugcugggagauccccauugcgacggcuuucagaauaaagaaugggaucucuucgucgagcggucuaaggccuauagcaacuguuacccuuaugacgugcccgauuacguuucccugcgcucucuuguggcuagcuccgggacgcuggaauuuaauaacgagagcuucaauuggaccggagucgcccagaacggcacaucuuccgcuugcaaaagacggagcgacaaguccuuuuucucucgccucaauuggcugcaccagcuuaaguauaaauacccugcccugaacgugaccaugcccaauaacgagaaguuugauaaacucuauauuuggggcguucaucacccugggacagacaacgaucagaucagccuguacgcgcaggccucuggaagagugaccgucuccacgaagcggagccaacagacagugauuccgaauaucggcucccgccccugggugagaggggucucuagccggauuuccaucuacuggaccauuguuaaaccuggagacauccugcucaucaacagcacaggcaaucugauugcuccccgcggguauuucaagaucagaucuggaaaguccagcauuaugcggucugacgccccuaucggcaaauguaacagcgaaugcauuacccccaauggcuccaucccgaacgauaagccuuuucagaaugugaaccgcaucaccuacgggcccuguccuagauaugugaaacagaauacacuuaagcuggcuacgggaaugcggaacguccccgagaaacaaacccgcggcauuuucggggccaucgcgggauuuauugaaaauggcugggaggggaugauggacggaugguacggcuucagacaccagaacucugagggcacagggcaggccgcugaucucaagagcacccaagccgcuaucaaucagauuaacggaaaacugaaucggcuuaucgaaaagacaaacgagaaguuucaucagaucgaaaaagaguucuccgaaguggagggccgcauucaggaccuggagaaguauguugaagauaccaaaaucgaccucuggagcuacaacgccgagcugcugguggcccucgaaaaucaacacacgauugaucugacagacucugagaugaacaaacuuuucgaaagaaccaagaagcagcugcgggagaaugcugaggauauggggaacggaugcuuuaagaucuaucauaaaugugacaaugcgugcauuggcuccaucagaaacgggaccuacgaucacgacgucuaccgcgacgaagcccucaauaaccgguuccagauuaagggcguggagcugaaaagcggauauaaggauuggauccuuuggaucucuuuugcuauuuccugcuuccugcucuguaucguucugcugggcuuuauuaugugggccugccagaaagggaauaucagauguaacauuugcaucuga

SEQ ID NO: 192206 - RNA, 1701 nt, Artificial Sequence
  derived and/or modified CDS sequence (opt5) from hemagglutinin__InfluenzaA__AAY28295
augaagaccaucauugcccugagcuacauccucugccugguguucgcucagaaacuucccggcaacgacaauuccacagccacgcugugucucgggcaccaugcggucccuaacggaaccauuguuaagacaaucaccaaugaucaaauugaggugacaaacgcuaccgaacuggugcagucuagcuccacaggcgggaucugcgacucuccgcaccagauccuugauggagagaauuguacccugauugacgcccuccugggcgauccccagugcgacggguuucaaaacaaaaagugggaucuguucgucgaaagaagcaaagccuauuccaauuguuacccuuaugacgugcccgauuacgcuucucuccggagccugguugccuccagcggaacgcuugaguuuaacaaugaaucuuucgacuggaccggcgugacacagaacggcaccuccagcgcuugcaagcgcagaucuaauaaguccuuuuucagccggcugaacuggcucacacaucugaaauauaaguacccugcccuuaaugucaccaugcccaacaaugagaaauuugauaagcuguauaucuggggagugcaccauccugggacggacucugaucagauuucccucuacgcgcaggccagcggcaaaaucacaguuuccaccaagcgcucucaacagacagugauuccgaacaucgggagcagaccccggguccgcgacguguccagcagaauuucuaucuacuggaccaucgugaagccuggagacauucugcugaucaacuccaccggcaaucucauugcuccccggggguauuucaaaauccagagcggaaagucuagcauuaugcgcuccgaugccccuaucggcaaauguaacucugagugcaucacacccaauggcagcauuccgaacgacaagccuuuucagaaugucaacagaaucacguacggggcuuguccccgguauguuaaacaaaagacccugaaacuugccacaggaaugcgcaaugugccugaaaagcagaccagaggcauuuucggggcgaucgccggauuuauugagaacggcugggaagggaugguggauggaugguacggcuuccggcaccaaaauuccgagggcacagggcaggcugccgaccugaaaagcacccaggcugccaucaaccagaucaauggaaaacucaaccgccugauuggcaagacgaaugagaaauuucaccagaucgaaaaggaguucucugaagucgaggggcggauucaagaucuugaaaaauauguggaggacacaaagaucgaucugugguccuacaacgccgagcuccugguugcucuggaaaaucagcauaccauugaccucaccgauagcgagaugaacaagcuguucgaaagaacaaagaagcagcuuagagagaacgcggaagacaugggaaauggcugcuuuaaaaucuaucacaagugugauaacgccugcauugggucuauccgcaauggcaccuacgaccaugacguguaccgggaugaggcucugaacaauagauuccagaucaaaggagucgagcucaaguccggcuauaaggacuggauucuguggaucagcuuugccauuuccugcuuccuucuguguguggcccuccugggguuuaucaugugggcuugccaaaaaggaaacauucgcuguaauaucugcaucuga

SEQ ID NO: 192207 - RNA, 1701 nt, Artificial Sequence
  derived and/or modified CDS sequence (opt5) from hemagglutinin__InfluenzaA__AAY28305
augaaggccaucauugcucugagcuacauccucugccugguguucgcccagaaacuucccggcaacgacaauuccaccgcgacacugugucucgggcaccaugcugucccuaacggaacgcugguuaagaccauuacaaaugaucaaaucgaggugaccaacgccacagaacuugugcagucuagcuccaccggcagaauuugcgacucuccgcaccagauccuggauggggagaauuguacacucaucgacgcccugcugggagauccccauugcgacggcuuucagaacaaagaaugggaucucuucgucgagcggagcaaggcuuauuccaauuguuacccuuaugacgugcccgauuacguuucucugcgcagccuuguggccuccagcgggacccuggaauuuaacaaugagucuuucaacuggacgggagucgcucaaaauggcaccuccagcgccugcaaaagacggucugacaaguccuuuuucagccgccucaacuggcugcaccagcuuaaguauaaauacccugcgcugaaugugacaaugcccaacaaugagaaguuugauaaacucuauauuuggggcguucaucacccugggaccgacucugaucagaucucccuguacgcccaggcuagcggaagagugacagucuccaccaagcggucucaacagacggugauuccgaacaucggcagcgggcccugggugcgcggagucuccagcagaauuucuaucuacuggacaauuguuaaaccuggcgacauccugcucaucaacuccaccgggaaucugauugcuccccggggauauuucaagauccgcagcggcaagucuagcauuaugagauccgacgccccuaucggcaaauguaacucugaaugcauuacacccaaugggagcaucccgaacgauaagccuuuucagaaugugaaccggaucaccuacggagccuguccccgcuaugugaaacagaauacccuuaagcuggcgacaggcaugagaaacgucccugagaaacaaacgcgggggauuuucggagccaucgcuggcuuuauugaaaaugggugggagggaaugauggacggcugguacggcuuccgccaccagaacuccgaggggaccggacaggccgcugaucucaagagcacacaagccgccaucaaucagauuaacggcaaacugaauagacuuaucgaaaagaccaacgagaaguuucaucagaucgaaaaagaguucucugaaguggaggggcggauucaggaccuggagaaguauguugaagauacaaaaaucgaccucugguccuacaaugcugagcugcugguggcgcucgaaaaccaacacaccauugaucugacggacagcgagaugaacaaacuuuucgaaagaacaaagaagcagcugcgcgagaaugccgaggauaugggaaacggcugcuuuaagaucuaucauaaaugugacaaugcuugcauugggucuauccggaacggcaccuacgaucacgacgucuacagagacgaagcccucaauaaccgcuuccagauuaagggaguggagcugaaauccggcuauaaggauuggauccuuuggaucagcuuugccauuuccugcuuccugcucuguaucguucugcugggguuuauuaugugggcuugccagaaaggaaauauccgguguaacauuugcaucuga

SEQ ID NO: 192208 - RNA, 1701 nt, Artificial Sequence
  derived and/or modified CDS sequence (opt5) from hemagglutinin__InfluenzaA__AAY28325
augaagaccaucauugcccugagcuacauccucugccugguguucgcucagaaacuucccggcaacgacaauuccacagccacgcugugucucgggcaccaugcggucccuaacggaacccugguuaagacaauuaccaaugaucaaaucgaggugacaaacgcuaccgaacuugugcagucuagcuccacaucuagaauuugcgacagcccgcaccagauccuggauggcgagaauuguacccucaucgacgcccugcugggggauccccauugcgacggauuucagaacaaagaaugggaucucuucgucgagcgguccaaggccuauucuaauuguuacccuuaugacgugcccgauuacguuagccugcgcucccuuguggcuagcucuggcacgcuggaauuuaacaaugaguccuucaacuggaccggggucgcccaaaauggaacaagcucugcuugcaaaagacgguccgacaagagcuuuuucucucgccucaacuggcugcaccagcuuaaguauaaauacccugcccugaaugugaccaugcccaacaaugagaaguuugauaaacucuauauuuggggcguucaucacccuggcacagacuccgaucagaucagccuguacgcgcaggccuccgggagagugauugucucuaccaagcggagccaacagacggugaucccgaacauuggauccggccccugggugcgcggggucagcucuagaaucuccauuuacuggacaaucguuaaaccuggagacauccugcucauuaacagcaccggcaaucugaucgcuccccggggguauuucaagauucgcucuggaaagagcuccaucaugagaucugacgccccuauuggcaaauguaacagcgaaugcaucacacccaauggcuccaucccgaacgauaagccuuuucagaaugugaaccggauuaccuacggggcuuguccccgcuaugugaaacagaauacccuuaagcuggccacaggaaugagaaacgucccugagaaacaaacgcggggcaucuucggggcgauugccggauuuaucgaaaauggcugggaggggaugauggacggaugguacggcuuccgccaccagaacagcgagggcaccgggcaggcugccgaucucaagucuacacaagcugccauuaaucagaucaacggaaaacugaauagacuuaucgaaaagaccaacgagaaguuucaucagauugaaaaagaguucgccgaaguggagggccggauccaggaccuggagaaguauguugaagauacaaaaauugaccucugguccuacaaugcugagcugcugguggcgcucgaaaaccaacacaccaucgaucugacggacagcgagaugaacaaacuuuucgaaagaacaaagaagcagcugcgcgagaaugccgaggauauggggaacggaugcuuuaagauuuaucauaaaugugacaaugcuugcaucggcucuauucggaacgggaccuacgaucacgacgucuacagagacgaagcccucaauaaccgcuuccagaucaagggcguggagcugaaauccggauauaaggauuggauccuuuggauuagcuuugccaucuccugcuuccugcucuguauuguucugcugggcuuuaucaugugggcuugccagaaagggaauauucgguguaacaucugcaucuga

SEQ ID NO: 192209 - RNA, 1701 nt, Artificial Sequence
  derived and/or modified CDS sequence (opt5) from hemagglutinin__InfluenzaA__AAY28335
augaagaccaucauugcccugagcuacauccucugccugguguccgcucagaaacuucccggcaacgacaauucuacagccacgcugugucucgggcaccaugcggucccuaacggaacccugguuaagacaauuaccaaugaucaaaucgaggugacaaacgcuaccgaacuugugcagagcuccucuacaagcagaauuugcgacuccccgcaccagauccuggauggcgagaauuguacccucaucgacgcccugcugggggauccccauugcgacggauuccagaacaaagaaugggaucucuuugucgagcggucuaaggccuauagcaauuguuacccuuaugacgugcccgauuacguuucccugcgcagccuuguggcuucuuccggcacgcuggaauuuaacaaugagagcuucaacuggaccggggucgcccaaaauggaacaucuuccgcuugcaaaagacggagcgacaagucuuucuuuucccgccucaacuggcugcaccagcuuaaguauaaauacccugcccugaaugugaccaugcccaacaaugagaaguucgauaaacucuauauuuggggcguucaucacccuggcacagacagcgaucagaucucccuguacgcgcaggccucugggagagugaccgucagcacgaagcggucccaacagacagugauuccgaacaucggaagccgccccugggugagaggcgucucuucccggauuagcaucuacuggaccauuguuaaaccuggggacauccugcucaucaacucuacaggaaaucugauugcuccccgcggcuauuuuaagaucagaagcgggaaguccucuauuaugcggagcgacgccccuaucggaaaauguaacuccgaaugcauuacccccaauggcagcaucccgaacgauaagccuuuccagaaugugaaccgcaucaccuacggcgcuugucccagauaugugaaacagaauacacuuaagcuggccacggggaugcggaacgucccugagaaacaaacccgcggaauuuuuggcgcgaucgccggguucauugaaaauggaugggagggcaugauggacgggugguacggauuuagacaccagaacucugagggcacaggccaggcugccgaucucaaguccacccaagcugccaucaaucagauuaacgggaaacugaaucggcuuaucgaaaagacaaacgagaaguuccaucagaucgaaaaagaguuuagcgaaguggagggacgcauucaggaccuggagaaguauguugaagauaccaaaguggaccucuggucuuacaaugccgagcugcuggucgcucucgaaaaccaacacacgaucgaucugacagacuccgagaugaacaaacuuuucgaaagaaccaagaagcagcugcgggagaaugcggaggauaugggcaacgggugcuucaagauuuaucauaaaugugacaaugccugcaucggaagcauuagaaacggcaccuacgaucacgacguguaccgcgacgaagcucucaauaaccgguuucagaucaaggggguugagcugaaauccggcuauaaggauuggauucuuuggaucucuuucgccaucagcugcuuucugcucuguauugugcugcugggauucaucaugugggccugccagaaaggcaauauuagauguaacaucugcauuuga

SEQ ID NO: 192210 - RNA, 1701 nt, Artificial Sequence; identical to SEQ ID NO: 192104
  derived and/or modified CDS sequence (opt5) from hemagglutinin__InfluenzaA__AAY28345

SEQ ID NO: 192211 - RNA, 1701 nt, Artificial Sequence; identical to SEQ ID NO: 192144
  derived and/or modified CDS sequence (opt5) from hemagglutinin__InfluenzaA__AAY28355

SEQ ID NO: 192212 - RNA, 1701 nt, Artificial Sequence
  derived and/or modified CDS sequence (opt5) from hemagglutinin__InfluenzaA__AAY28363
augaagaccaucauugcccugagcuacauccucugcaugguguucgcucagaaacugcccgucaacgacaauuccacagccacgcuuugucugggccaccaugcgguuccuaacgggacccucgugaagacaauuaccaaugaucacaucgaggugacaaacgcuaccgaacugguccaaucuagcuccacaggaagaauuugcgacucuccgcaucagauccuugauggcgagaauuguacccugaucgacgcccuccugggggauccccacugcgacggauuucagaacaaagaaugggaucuguucguggagcggagcacggccuauuccaauuguuacccuuaugacguucccgauuacgcuucucuccgcagccugguggccuccagcggcacccuugaauuuaacaaugagucuuucaacuggacaggggucgcucagaauggaaccuccagcgccugcaagagacggucuauuaaauccuuuuucagccgccugaacuggcuccaucaacugaaguauaaguacccuucucuuaaugugacaaugcccaacaaugagaaauuugacaagcuguauaucuggggcguucaccacccuuccaccgauagcgaccagauuucccucuacgcgcaggccucuggcagagugacggucagcacaaaacggucccagcaaaccgugaucccgaacauugggagccgccccugggugagaggagucucuucccggaucagcauuuacuggacaaucguuaagccuggcgauauccugcugauuaacucuaccgggaaucucaucgcuccccgcggauauuucaaaauuagaagcggcaaguccucuaucaugcggagcaacgccccuauugggaaguguaauuccgaaugcaucacccccaacggaagcaucccgaaugacaaaccuuuucagaacgugaaucgcauuacauacggcgcuugucccagauaugugaagcagaacacgcugaaacuugccaccggcaugcggaaugucccugagaagcagacacgcgggaucuucggagcgauugccggcuuuaucgaaaacgggugggagggaaugguggacggcugguacggguucagacaucaaaauucugagggaaccggccaggcugccgaucugaaauccacacaggcugccauuaaccaaaucaauggcaagcucaaccggcugaucgagaaaaccaaugaaaaguuucaccagauugaaaaggaguucagcgaaguugaggggagaauccaggaccuugagaaauauguggaagauacgaagauugaccuguggucuuacaacgccgagcuccuggucgcucuggaaaaccagcauacaaucgaucucaccgacuccgagaugaauaaacuguucgaacgcacccggaagcaacuuagagagaacgcggaggauaugggaaauggcugcuuuaaaauuuaucacaagugugacaacgccugcaucgggagcauucgcaauggaacauacgaucacgacguguaccgggaugaagcucugaacaauagauuccagaucaagggcguugagcucaaauccggguauaaggacuggauccuguggauuucuuuugccaucagcugcuuccuucugugugugguccuccugggcuuuauuaugugggccugccagaaaggaaacauccgcuguaauauuugcaucuga

SEQ ID NO: 192213 - RNA, 1701 nt, Artificial Sequence; identical to SEQ ID NO: 192144
  derived and/or modified CDS sequence (opt5) from hemagglutinin__InfluenzaA__AAY28375

SEQ ID NO: 192214 - RNA, 1701 nt, Artificial Sequence; identical to SEQ ID NO: 192104
  derived and/or modified CDS sequence (opt5) from hemagglutinin__InfluenzaA__AAY28385

SEQ ID NO: 192215 - RNA, 1701 nt, Artificial Sequence
  derived and/or modified CDS sequence (opt5) from hemagglutinin__InfluenzaA__AAY28395
augaagaccaucauugcccugagcuacauccucugccugguguucgcucagaaacuucccggcaacgacaauuccacagccacgcugugucucgggcaccaugcggucccuaacggaaccauuguuaagacaaucaccaaugaucaaauugaggugacaaacgcuaccgaacuggugcagucuagcuccacaggcgggaucugcgacucuccgcaccagauccuugauggagagaauuguacccugauugacgcccuccugggcgauccccagugcgacggguuucaaaacaaaaagugggaucuguucgucgaaagaagcaaagccuauuccaauuguuacccuuaugacgugcccgauuacgcuucucuccggagccugguugccuccagcggaacgcuugaguuuaacaaugaaucuuucgacuggaccggcgugacacagaacggcaccuccagcgcuugcaagcgcagaucuaauaaguccuuuuucagccggcugaacuggcucacacaucugaaauauaaguacccugcccuuaaugucaccaugcccaacaaugagaaauuugauaagcuguauaucuggggagugcaccauccugggacggacucugaucagauuaaccucuacgcgcaggccuccggccgcaucacaguuagcaccaaaagaucccaacagacagugauuccgaacaucgggucucggccccgcgucagagacgugagcucccggauuagcaucuacuggaccaucgugaagccuggagacauucugcugaucaauucuaccggcaaccucauugcuccccgcggguauuucaagaucagauccggaaaaagcucuauuaugcggagcgaugccccuaucggcaaguguaauuccgagugcaucacacccaacggcucuauuccgaaugacaaaccuuuucagaacgucaaucgcaucacguacggggcuugucccagauauauuaagcagaacacccugaaacuugccacaggaaugcggaauguuccugaaaagcaaacccgcggcaucuucggggcgauugccggauuuaucgagaacggcugggaagggaugguggauggaugguacggcuucagacaccagaauagcgagggcacagggcaggcugccgaccugaaauccacccaagcugccaucaaccagauuaauggaaagcucaaccggcugaucggcaagacgaaugagaaauuucaccagauugaaaaggaguucagcgaaguggaggggagaauccaggaucuugaaaaauaugucgaggacacaaagauugaucuguggucuuacaacgccgagcuccugguggcucuggaaaaccaacauaccaucgaccucaccgauuccgagaugaauaaacuguucgaacgcacaaagaagcagcuucgggagaacgcggaagacaugggaaauggcugcuuuaaaauuuaucacaagugugauaacgccugcaucgggagcaucagaaauggcaccuacgaccaugacguuuaccgcgaugaggcucugaacaaucgguuccagauuaaaggaguggagcucaagucuggcuauaaagacuggauccuguggauuuccuuugccaucagcugcuuccuucugugugucgcccuccugggguuuauuaugugggcuugccagaagggaaacaucagauguaauaucugcauuuga

SEQ ID NO: 192216 - RNA, 1701 nt, Artificial Sequence
  derived and/or modified CDS sequence (opt5) from hemagglutinin__InfluenzaA__AAY28405
augaagaccaucauugcccugagcuacauccucugccugguguucgcucagaaacuucccggcaacgacaauuccacagccacgcugugucucgggcaccaugcggucccuaacggaacccugguuaagacaauuaccaaugaucaaaucgaggugacaaacgcuaccgaacuugugcagauuucuagcacaggcagaaucugcgacaauccgcaccagauccuggauggggagaacuguacccucauugacgcccugcugggagauccccauugcgacggcuuucagaauaaagaaugggaucucuucgucgagcgguccaaggccuauucuaacuguuacccuuaugacgugcccgauuacguuagccugcgcucccuuguggcuucuagcgggacgcuggaauuuaauaacgaguccuucaauuggaccggagucgcccaaaacggcacaagcucugcuugcaaaagacgguccgacaagagcuuuuucucucgccucaauuggcugcaccagcuuaaguauaaauacccugcccugaacgugaccaugcccaauaacgagaaguuugauaaacucuauaucuggggcguucaucacccugggacagacuccgaucagauuagccuguacgcgcaggccucuggaagagugaccgucuccacgaagcggagccaacagacagugaucccgaacauuggcucccgccccugggugagaggggucucuagccggaucuccauuuacuggaccaucguuaaaccuggagacauccugcucauuaauagcacaggcaaccugaucgcuccccgcggguauuucaagauuagaucuggaaaguccagcaucaugcggucugacgccccuauuggcaaauguaauagcgaaugcaucacccccaacggcuccaucccgaaugauaagccuuuucagaacgugaaucgcauuaccuacgggcccuguccuagauaugugaaacagaacacacuuaagcuggcuacgggaaugcggaauguccccgagaaacaaacccgcggcaucuucggggccauugcgggauuuaucgaaaacggcugggaggggaugauggacggaugguacggcuucagacaccaaaauucugagggcacagggcaggccgcugaucucaagagcacccaggccgcuauuaaccagaucaauggaaaacugaaccggcuuaucgaaaagacaaaugagaaguuucaucagauugaaaaagaguucuccgaaguggagggcagaauccaggaccuggagaaguauguugaagauaccaaaauugaccucuggagcuacaacgccgagcugcugguggcccucgaaaaccaacacacgaucgaucugacagacucugagaugaauaaacuuuucgaacgcaccaagaagcagcugcgggagaacgcugaggauauggggaauggaugcuuuaagauuuaucauaaaugugacaacgcgugcaucggcuccauuagaaaugggaccuacgaucacgacgucuaccgcgacgaagcccucaacaaucgguuccagaucaagggcguggagcugaaaagcggauauaaggauuggauccuuuggauuucuuuugcuaucuccugcuuccugcucuguauuguucugcugggcuuuaucaugugggccugccagaaagggaacauuagauguaauaucugcguguga

SEQ ID NO: 192217 - RNA, 1701 nt, Artificial Sequence; identical to SEQ ID NO: 192104
  derived and/or modified CDS sequence (opt5) from hemagglutinin__InfluenzaA__AAY28486

SEQ ID NO: 192218 - RNA, 1701 nt, Artificial Sequence; identical to SEQ ID NO: 192104
  derived and/or modified CDS sequence (opt5) from hemagglutinin__InfluenzaA__AAY28521

SEQ ID NO: 192219 - RNA, 1701 nt, Artificial Sequence; identical to SEQ ID NO: 192103
  derived and/or modified CDS sequence (opt5) from hemagglutinin__InfluenzaA__AAY28531

SEQ ID NO: 192220 - RNA, 1701 nt, Artificial Sequence; identical to SEQ ID NO: 192104
  derived and/or modified CDS sequence (opt5) from hemagglutinin__InfluenzaA__AAY28541

SEQ ID NO: 192221 - RNA, 1701 nt, Artificial Sequence
  derived and/or modified CDS sequence (opt5) from hemagglutinin__InfluenzaA__AAY28551
augaagaccaucauugcccugagcuacauccucugccugguguucgcucagaaacuucccgucaacgacaauuccacagccacgcugugucucggccaccaugcgguuccuaacgggacccuggugaagacaauuaccaaugaucacaucgaggugacaaacgcuaccgaacuuguccaaucuagcuccacaggaagaauuugcgacucuccgcaucagauccuggauggcgagaauuguacccucaucgacgcccugcugggggauccccacugcgacggauuucagaacaaagaaugggaucucuucguggagcggagcacggccuauuccaauuguuacccuuaugacguucccgauuacgcuucucugcgcagccuuguggccuccagcggcacccuggaauuuaacaaugagucuuucaacuggacaggggucgcucagaauggaaccuccagcgccugcaagagacggucuauuaaauccuuuuucagccgccucaacuggcugcaucaacuuaaguauaaguacccugcgcugaaugugacaaugcccaacaaugagaaauuugacaagcucuauaucuggggcguucaccacccuucuaccgauuccgaccagauuagccuguacgcccaggcuuccggcagagugacggucucuacaaaacggagccagcaaaccgugaucccgaacauuggguccggacccugggugcgcggcgucagcucuagaaucuccauuuacuggacaaucguuaagccuggggauauccugcucauuaacagcaccggaaaucugaucgcuccccggggcuauuucaaaauucgcucugggaaaagcuccaucaugagaucuaacgccccuauuggaaaguguaauagcgaaugcaucacccccaacggcuccaucccgaaugacaaaccuuuucagaacgugaaucggauuacauacggcgccuguccccgcuaugugaagcagaacacgcuuaaacuggcgaccgggaugagaaaugucccugagaagcagacacggggaaucuucggcgccauugcuggguuuaucgaaaacggaugggagggcaugguggacgggugguacggauuccgccaucaaaauagcgagggcaccggccaggccgcugaucucaaaucuacacaggccgccauuaaccaaaucaaugggaagcugaacagacuuaucgaaaagaccaaugagaaguuucaccagauugaaaaggaguucuccgaaguugagggacggauccaggaccuggagaaauauguggaagauacgaagauugaccucuggagcuacaacgcugagcugcuggucgcgcucgaaaaccagcauacaaucgaucugaccgacucugagaugaauaaacuuuucgaaagaacccgcaagcaacugcgggagaacgccgaggauaugggcaaugggugcuuuaaaauuuaucacaagugugacaacgcuugcaucggauccauuagaaauggcacauacgaucacgacguguaccgcgaugaagcccucaacaaucgguuccagaucaaggggguugagcugaaaagcggcuauaaggacuggauccuuuggauuuccuuugccaucucuugcuuccugcucugugugguccugcugggauuuauuaugugggcuugccagaaaggcaacaucagauguaauauuugcaucuga

SEQ ID NO: 192222 - RNA, 1701 nt, Artificial Sequence; identical to SEQ ID NO: 192104
  derived and/or modified CDS sequence (opt5) from hemagglutinin__InfluenzaA__AAY28561

SEQ ID NO: 192223 - RNA, 1701 nt, Artificial Sequence; identical to SEQ ID NO: 192119
  derived and/or modified CDS sequence (opt5) from hemagglutinin__InfluenzaA__AAY28581

SEQ ID NO: 192224 - RNA, 1701 nt, Artificial Sequence
  derived and/or modified CDS sequence (opt5) from hemagglutinin__InfluenzaA__AAY28591
augaagaccaucauugcccugagcuacauccucugccugguguucgcucagaaacuucccgucaacgacaauuccacagccacgcugugucucggccaccaugcgguuccuaacgggacccuggugaagacaauuaccaaugaucacaucgaggugacaaacgcuaccgaacuuguccaaucuagcuccacaggaagaauuugcgacucuccgcaucagauccuggauggcgagaauuguacccucaucgacgcccugcugggggauccccacugcgacggauuucagaacaaagaaugggaucucuucguggagcggagcacggccuauuccaauuguuacccuuaugacguucccgauuacgcuucucugcgcagccuuguggccuccagcggcacccuggaauuuaacaaugagucuuucaacuggacaggggucgcucagaauggaaccuccagcgccugcaagagacggucuauuaaauccuuuuucagccgccucaacuggcugcaucaacuuaaguauaaguacccugcgcuggacgugacaaugcccaauaacgagaaauuugauaagcucuauaucuggggcguucaccacccuucuaccgacuccgaucagauuagccuguacgcccaggcuuccggcagagugacggucucuacaaaacggagccagcaaaccgugaucccgaauauugggucccgccccugggugagaggagucagcucucggaucuccauuuacuggacaaucguuaagccuggcgacauccugcucauuaacagcaccgggaaccugaucgcuccccgcggauauuucaaaauuagaucuggcaagagcuccaucaugcggucuaaugccccuauugggaaguguaacagcgaaugcaucacccccaauggauccaucccgaacgacaaaccuuuucagaaugugaaccgcauuacauacggcgccugucccagauaugugaagcagaauacgcuuaaacuggcgaccggcaugcggaacgucccugagaagcagacacgcgggaucuucggagccauugcuggcuuuaucgaaaaugggugggagggaaugguggauggcugguacggguucagacaucaaaacagcgagggaaccggccaggccgcugaccucaaaucuacacaggccgccauuaaucaaaucaacggcaagcugaaucggcuuaucgagaaaaccaacgaaaaguuucaccagauugaaaaggaguucuccgaaguugaggggagaauccaggaucuggagaaauauguggaagacacgaagauugaucucuggagcuacaaugcugagcugcuggucgcgcucgaaaaccagcauacaaucgaccugaccgauucugagaugaacaaacuuuucgaacgcacccggaagcaacugagagagaaugccgaggacaugggaaacggcugcuuuaaaauuuaucacaagugugauaaugcuugcaucggguccauucgcaacggaacauacgaccacgauguguaccgggacgaagcccucaauaacagauuccagaucaagggcguugagcugaaaagcggguauaaggacuggauccuuuggauuuccuuugccaucucuugcuuccugcucugugugguccugcugggcuuuauuaugugggcuugccagaaaggaaauauccgcuguaacauuugcaucuga

SEQ ID NO: 192225 - RNA, 1701 nt, Artificial Sequence; identical to SEQ ID NO: 192144
  derived and/or modified CDS sequence (opt5) from hemagglutinin__InfluenzaA__AAY28608

SEQ ID NO: 192226 - RNA, 1701 nt, Artificial Sequence
  derived and/or modified CDS sequence (opt5) from hemagglutinin__InfluenzaA__AAY28618
augaagaccaucauugcccugagcuacauccucugccugguguucgcucagaaacuucccggcaacgacaauuccacagccacgcugugucucgggcaccaugcggucccuaacggaaccauuguuaagacaaucaccaaugaucaaauugaggugacaaacgcuaccgaacuggugcagucuagcuccacaggcgggaucugcgacucuccgcaccagauccuugauggagagaauuguacccugauugacgcccuccugggcgauccccagugcgacggguuucaaaacaaaaagugggaucuguucgucgaaagaagcaaagccuauuccaauuguuacccuuaugacgugcccgauuacgcuucucuccggagccugguugccuccagcggaacgcuugaguuuaacaaugaaucuuucaacuggaccggcgugacacagaauggcaccuccagcgcuugcaagcgcagaucuaacaaguccuuuuucagccggcugaauuggcucacacaucugaaauauaaguacccugcccuuaacgucaccaugcccaauaacgagaaauuugacaagcuguauaucuggggagugcaccauccugggacggauucugaccagauuucccucuacgcgcaggccagcggccgcaucacaguuuccaccaaaagaucucaacagacagugauuccgaacaucgggagccggccccgcgucagagauguguccagccggaugucuauuuacuggaccaucgugaagccuggagacauccugcugauuaauuccaccggcaaccucaucgcuccccgcggguauuucaagauuagaagcggaaaaucuagcaucaugcgguccgacgccccuauuggcaaguguaauucugagugcaucacacccaacggcagcaucccgaaugauaaaccuuuucagaacgucaaucgcauuacguacggggcuugucccagauauguuaagcagaacacccugaaacuugccacaggaaugcggaaugugccugaaaagcaaacccgcggcaucuucggggcgauugccggauuuaucgagaacggcugggaagggaugguggacggaugguacggcuucagacaccaaaauuccgagggcacagggcaggcugccgaucugaaaagcacccaggcugccauuaaccagaucaauggaaagcucaaccggcugaucggcaagacgaaugagaaauuucaccagauugaaaaggaguucucugaagucgaggggagaauccaggaccuugaaaaauauguggaggauacaaagauugaccugugguccuacaacgccgagcuccugguugcucuggaaaaccaacauaccaucgaucucaccgacagcgagaugaauaaacuguucgaacgcacaaagaagcagcuucgggagaacgcggaagauaugggaaauggcugcuuuaaaauuuaucacaagugugacaacgccugcaucgagucuauuagaaaugggaccuacgaucaugacguguaccgcgacgaggcucugaacaaucgguuccagaucaaaggcgucgaacucaaguccggauauaaagauuggauccuguggauuagcuuugccaucuccugcuuccuucuguguguggcccuccugggcuuuauuaugugggcuugccagaaggggaacaucagauguaauauuugcaucuga

SEQ ID NO: 192227 - RNA, 1701 nt, Artificial Sequence; identical to SEQ ID NO: 192119
  derived and/or modified CDS sequence (opt5) from hemagglutinin__InfluenzaA__AAY28638

SEQ ID NO: 192228 - RNA, 1701 nt, Artificial Sequence
  derived and/or modified CDS sequence (opt5) from hemagglutinin__InfluenzaA__AAY28648
augaagaccaucauugcccugagcuacauccucugccugguguucgcucagaaacuucccggcaacgacaauuccacagccacgcugugucucgggcaccaugcggucccuaacggaacccugguuaagacaauuaccaaugaucaaaucgaggugacaaacgcuaccgaacuugugcagucuagcuccacaggcagaauuugcgacucuccgcaccagauccuggauggggagaauuguacccucaucgacgcccugcugggagauccccauugcgacggcuuucagaacaaagaaugggaucucuucgucgagcggagcaaggccuauuccaauuguuacccuuaugacgugcccgauuacguuucucugcgcagccuuguggcuuccagcgggacgcuggaauuuaacaaugagucuuucaacuggaccggagucgcccaaaauggcacauccagcgcuugcaaaagacggucugacaaguccuuuuucagccgccucaacuggcugcaccagcuuaaguauaaauacccugcccugaaugugaccaugcccaacaaugagaaguuugauaaacucuauauuuggggcguucaucacccugggacagacucugaucagaucucccuguacgcgcaggccagcggaagagugaccgucuccacgaagcggucucaacagacagugauuccgaacaucggcagcgggcccugggugcgcggagucuccagcagaauuucuaucuacuggaccauuguuaaaccuggcgacauccugcucaucaacuccacagggaaucugauugcuccccggggauauuucaagauccgcagcggcaagucuagcauuaugagauccgacgccccuaucggcaaauguaacucugaaugcauuacccccaaugggagcaucccgaacgauaagccuuuucagaaugugaaccggaucaccuacggagcuuguccccgcuaugugaaacagaauacacuuaagcuggccacgggcaugagaaacgucccugagaaacaaacccgggggauuuucggagcgaucgccggcuuuauugaaaaugggugggagggaaugauggacggcugguacggcuuccgccaccagaacuccgaggggacaggacaggcugccgaucucaagagcacccaagcugccaucaaucagauuaacggcaaacugaauagacuuaucgaaaagacaaacgagaaguuucaucagaucgaaaaagaguucucugaaguggaggggcggauucaggaccuggagaaguauguugaagauaccaaaaucgaccucugguccuacaaugccgagcugcugguggcucucgaaaaccaacacacgauugaucugacagacagcgagaugaacaaacuuuucgaaagaaccaagaagcagcugcgcgagaaugcggaggauaugggaaacggcugcuuuaagaucuaucauaaaugugacaaugccugcauugggucuauccggaacggcaccuacgaucacgacgucuacagagacgaagcucucaauaaccgcuuccagauuaagggaguggagcugaaauccggcuauaaggauuggauccuuuggaucagcuuugccauuuccugcuuccugcucuguaucguucugcugggguuuauuaugugggccugccagaaaggaaauauccgguguaacauuugcaucuga

SEQ ID NO: 192229 - RNA, 1701 nt, Artificial Sequence
  derived and/or modified CDS sequence (opt5) from hemagglutinin__InfluenzaA__AAY44610
augaagaccaucauugcccugagcuacauccucugccugguguucgcucagaaacuucccggcaacgacaauuccacagccacgcugugucucgggcaccaugcggucccuaacggaaccauuguuaagacaaucaccaaugaucaaauugaggugacaaacgcuaccgaacuggugcagucuagcuccacaggcgggaucugcgacucuccgcaccagauccuugauggagagaauuguacccugauugacgcccuccugggcgauccccagugcgacggguuucaaaacaaaaagugggaucuguucgucgaaagaaauaaagccuauagcaacuguuacccuuaugacgugcccgauuacgcuucccuccggucucugguugccagcuccggaacgcuugaguuuaauaacgaaucuuucgacuggaccggcgugacacagaauggcaccucuuccgcuugcaagcgcagaagcaacaagagcuuuuucucccggcugaauuggcucacacaucugaaauauaaguacccugcccuuaacgucaccaugcccaauaacgagaaauuugauaagcuguauaucuggggagugcaccauccugggacggacagcgaucagauuucucucuacgcgcaggccuccggccgcaucacaguuagcaccaaaagaucccaacagacagugauuccgaacaucgggucucggccccgcgucagagacgugagcucccggauuagcaucuacuggaccaucgugaagccuggagacauucugcugaucaauucuaccggcaaccucauugcuccccgcggguauuucaagaucagauccggaaaaagcucuauuaugcggagcgaugccccuaucggcaaguguaauuccgagugcaucacacccaacggcucuauuccgaaugacaaaccuuuucagaacgucaaucgcaucacguacggggcuugucccagauauguuaagcagaacacccugaaacuugccacaggaaugcggaaugugccugaaaagcaaacccgcggcauuuucggggcgaucgccggauuuauugagaacggcugggaagggaugguggauggaugguacggcuucagacaccagaauagcgagggcacagggcaggcugccgaccugaaauccacccaagcugccaucaaccagaucaauggaaagcucaaccggcugauuggcaagacgaaugagaaauuucaccagaucgaaaaggaguucagcgaagucgaggggcgcauucaggaucuugaaaaauauguggaggacacaaagaucgaucuguggucuuacaacgccgagcuccugguugcucuggaaaaccaacauaccauugaccucaccgauuccgagaugaauaaacuguucgaaagaacaaagaagcagcuucgggagaacgcggaagacaugggaaauggcugcuuuaaaaucuaucacaagugugauaacgccugcauugggagcaucagaaauggcaccuacgaccaugacguguaccgcgaugaggcucugaacaaucgguuccagaucaaaggagucgagcucaagucuggcuauaaagacuggauucuguggaucuccuuugccauuagcugcuuccuucuguguguggcccuccugggguuuaucaugugggcuugccagaagggaaacauuagauguaauaucugcaucuga

SEQ ID NO: 192230 - RNA, 1701 nt, Artificial Sequence
  derived and/or modified CDS sequence (opt5) from hemagglutinin__InfluenzaA__AAY44620
augaagaccaucauugcccugagcuacauccucugccugguguucgcucagaaacuucccggcaacgacaauuccacagccacgcugugucucgggcaccaugcggucccuaacggaacccugguuaagacaauuaccaaugaucaaaucgaggugacaaacgcuaccgaacuugugcagucuagcuccacaggcagaauuugcgacucuccgcaccagauccuggauggggagaauuguacccucaucgacgcccugcugggagauccccauugcgacggcuuucagaacaaagaaugggaucucuucgucgagcggagcaaggccuauuccaauuguuacccuuaugacgugcccgauuacguuucucugcgcagccuuguggcuuccagcgggacgcuggaauuuaacaaugagucuuucaacuggaccggagucgcccaaaauggcacauccagcgcuugcaaaagacggucugacaaguccuuuuucagccgccucaacuggcugcaccagcuuaaguauaaauacccugcccugaaugugaccaugcccaacaaugagaaguuugauaaacucuauauuuggggcguucaucacccugggacagacucugaucagaucucccuguacgcgcaggccagcggaagagugaccgucuccacgaagcggucucaacagacagugauuccgaacaucggcagccgccccugggugagaggggucuccagccggauuucuaucuacuggaccauuguuaaaccuggagacauccugcucaucaacuccacaggcaaucugauugcuccccgcggguauuucaagaucagaagcggaaagucuagcauuaugcgguccgacgccccuaucggcaaauguaacucugaaugcauuacccccaauggcagcaucccgaacgauaagccuuuucagaaugugaaccgcaucaccuacgggcccuguccuagauaugugaaacagaauacacuuaagcuggcuacgggaaugcggaacguccccgagaaacaaacccgcggcauuuucggggccaucgcgggauuuauugaaaauggcugggaggggaugauggacggaugguacggcuucagacaccagaacuccgagggcacagggcaggccgcugaucucaagagcacccaagccgcuaucaaucagauuaacgaaaaacugaaucggcuuaucgagaagacaaacgaaaaguuucaucagaucgagaaagaguucucugaaguggagggacgcauucaggaccuggaaaaguauguugaggauaccaaaaucgaccucugguccuacaaugccgaacugcugguggcccucgagaaccaacacacgauugaucugacagacagcgaaaugaacaaacuuuucgagagaaccaagaagcagcugcgggagaaugcugaagauaugggcaacgggugcuuuaagaucuaucauaaaugugacaaugcgugcauuggaucuaucagaaacggcaccuacgaucacgacgucuaccgcgacgaggcccucaauaaccgguuccagauuaaggggguggaacugaaauccggcuauaaggauuggauccuuuggaucagcuuugcuauuuccugcuuccugcucuguaucguucugcugggauuuauuaugugggccugccagaaaggcaauaucagauguaacauuugcaucuga

SEQ ID NO: 192231 - RNA, 1701 nt, Artificial Sequence; identical to SEQ ID NO: 192152
  derived and/or modified CDS sequence (opt5) from hemagglutinin__InfluenzaA__AAY44621

SEQ ID NO: 192232 - RNA, 1701 nt, Artificial Sequence; identical to SEQ ID NO: 192119
  derived and/or modified CDS sequence (opt5) from hemagglutinin__InfluenzaA__AAY44631

SEQ ID NO: 192233 - RNA, 1701 nt, Artificial Sequence
  derived and/or modified CDS sequence (opt5) from hemagglutinin__InfluenzaA__AAY44641
augaagaccaucauugcccugagcuacauccucugccugguguucgcucagaaacuucccggcaacgacaauuccacagccacgcugugucucgggcaccaugcggucccuaacggaacccugguuaagacaauuaccaaugaucaaaucgaggugacaaacgcuaccgaacuugugcagucuagcuccacaggcagaauuugcgacucuccgcaccagauccuggauggggagaauuguacccucaucgacgcccugcugggagauccccauugcgacggcuuucagaacaaagaaugggaucucuucgucgagcggagcaaggccuauuccaauuguuacccuuaugacgugcccgauuacguuucucugcgcagccuuguggcuuccagcgggacgcuggaauuuaacaaugagucuuucaacuggaccggagucgcccaaaauggcacauccagcgcuugcaaaagacggucugacaaguccuuuuucagccgccucaacuggcugcaccagcuuaaguauaaauacccugcccugaaugugaccaugcccaacaaugagaaguuugauaaacucuauauuuggggcguucaucacccugggacagacucugaucagaucucccuguacgcgcaggccagcggaagagugaccgucuccacgaagcggucucaacagacagugauuccgaacaucggcagccgccccugggugagaggggucuccagccggauuucuaucuacuggaccauuguuaaaccuggagacauccugcucaucaacuccacaggcaaucugauugcuccccgcggguauuucaagaucagaagcggaaagucuagcauuaugcgguccgacgccccuaucggcaaauguaacucugaaugcauuacccccaauggcagcaucccgaacgauaagccuuuucagaaugugaaccgcaucaccuacgggcccuguccuagauaugugaaacagaauacacuuaagcuggcuacgggaaugcggaacguccccgagaaacaaacccgcggcauuuucggggccaucgcgggauuuauugaaaauggcugggaggggaugauggacggaugguacggcuucagacaccagaacuccgagggcacagggcaggccgcugaucucaagagcacccaagccgcuaucaaucagauuaacggaaaacugaaucggcuuaucgaaaagacaaacgagaaguuucaucagaucgaaaaagaguucucugaaguggagggccgcauucaggaccuggagaaguauguugaagauaccaaaaucgaccucugguccuacaaugccgagcugcugguggcccucgaaaaccaacacacgauugaucugacagacagcgagaugaacaaacuuuucgaaagaaccaagaagcagcugcgggagaaugcugaggauauggggaacggaugcuuuaagaucuaucauaaaugugacaaugcgugcauuggcucuaucagaaacgggaccuacgaucacgacgucuaccgcgacgaagcccucaauaaccgguuccagauuaagggcguggagcugaaauccggauauaaggauuggauccuuuggaucagcuuugcuauuuccugcuuccugcucuguaucggccugcugggguuuauuaugugggccugccagaaaggaaauaucagauguaacauuugcaucuga

SEQ ID NO: 192234 - RNA, 1701 nt, Artificial Sequence
  derived and/or modified CDS sequence (opt5) from hemagglutinin__InfluenzaA__AAY44651
augaagaccaucauugcccugagcuacauccucugccugguguucgcucagaaacuucccgucaacgacaauuccacagccacgcugugucucggccaccaugcgguuccuaacgggacccuggugaagacaauuaccaaugaucacaucgaggugacaaacgcuaccgaacuuguccaaucuagcuccacaggaagaauuugcgacucuccgcaucagauccuggauggcgagaauuguacccucaucgacgcccugcugggggauccccacugcgacggauuucagaacaaagaaugggaucucuucguggagcggagcacggccuauuccaauuguuacccuuaugacguucccgauuacgcuucucugcgcagccuuguggccuccagcggcacccuggaauuuaacaaugagucuuucaacuggacaggggucgcucagaauggaaccuccagcgccugcaagagacggucuauuaaauccuuuuucagccgccucaacuggcugcaucaacuuaaguauaaguacccugcgcugaaugugacaaugcccaacaaugagaaauuugacaagcucuauaucuggggcguucaccacccuucuaccgauuccgaccagauuagccuguacgcccaggcuuccggcagagugacggucucuacaaaacggagccagcaaaccgugaucccgaacauugggucccgccccugggaaagaggagugagcucucggaucuccauuuacuggacaaucgucaagccuggcgauauccugcucauuaacagcaccgggaaucugaucgcuccccgcggauauuucaaaauuagaucuggcaagagcuccaucaugcggucuaacgccccuauugggaaguguaauagcgagugcaucacccccaacggauccaucccgaaugacaaaccuuuucagaacguuaaucgcauuacauacggcgccugucccagauaugugaagcagaacacgcuuaaacuggcgaccggcaugcggaaugugccugaaaagcagacacgcgggaucuucggagccauugcuggcuuuaucgagaacgggugggagggaauggucgacggcugguacggguucagacaucaaaauagcgaaggaaccggccaggccgcugaucucaaaucuacacaggccgccauuaaccaaaucaauggcaagcugaaccggcuuaucgagaaaaccaaugaaaaguuucaccagauugagaaggaguucuccgaaguggaggggagaauccaggaccuggaaaaauauguugaggauacgaagauugaccucuggagcuacaacgcugaacugcugguggcgcucgagaaccagcauacaaucgaucugaccgacucugaaaugaauaaacuuuucgagcgcacccggaagcaacugaaagagaacgccgaagauaugggaaauggcugcuuuaagauuuaucacaagugugacaacgcuugcaucggguccauuagaaauggaacauacgaucacgacgucuaccgcgaugaggcccucaacaaucgguuccagaucaaaggcguggaacuuaagagcggguauaaagacuggauccuguggauuuccuuugccaucucuugcuuccugcucuguguugugcugcugggcuuuauuaugugggcuugccagaagggaaacaucagauguaauauuugcaucuga

SEQ ID NO: 192235 - RNA, 1701 nt, Artificial Sequence
  derived and/or modified CDS sequence (opt5) from hemagglutinin__InfluenzaA__AAY44755
augaagaccaucauugcccugagcuacauccucugccugguguucgcucagaaacuucccggcaacgacaauuccacagccacgcugugucucgggcaccaugcggucccuaacggaacccugguuaagacaauuaccaaugaucaaaucgaggugacaaacgcuaccgaacuugugcagucuagcuccacaggcagaauuugcgacucuccgcaccagauccuggauggggagaauuguacccucaucgacgcccugcugggagauccccauugcgacggcuuucagaacaaagaaugggaucucuucgucgagcggagcaaggccuauuccaauuguuacccuuaugacgugcccgauuacgcuucucugcgcagccuuguugccuccagcgggacgcuggaauuuaacaaugagucuuucaacuggaccggaguggcucaaaauggcacauccagcgccugcaaaagacggucuaacaaguccuuuuucagccgccucaauuggcugcaccagcuuaaguauaaauacccugcgcugaacgucaccaugcccaauaacgagaaguuugacaaacucuauauuuggggcgugcaucacccuucuacagauuccgaccagaucagccuguacgcccaggcuuccgggagaguuaccgugucuacgaagcggggacaacagacagucauuccgaacaucggcagccgccccugggugagagggguguccagcauuaucucuauuuacuggaccaucgucaaaccuggagauauccugcucauuaauuccacaggcaaccugaucgcuccccggggguauuucaagauucgcagcggaaagucuagcguuaugagauccgacgccucuaucggcaaauguaauagcgaaugcauuaccccuaacggcuccauccccaaugacaagccguuucagaacgugaaucggaucaccuacggggccuguccucgcuaugugaaacagaacacacuuaagcuggcgacgggaaugagaaauguccccgagaaacaaacccggggcauuuucggggccaucgcuggauuuauugaaaacggcugggaggggaugguggauggaugguacggcuuccgccaccagaauagcgagggcacagggcaggccgcugaccucaagucuacccaagccgccaucaaccagauuaauggaaaacugaacagacuuaucgaaaagacaaaugagaaguuucaucagaucgaaaaagaguucuccgaaguugagggccggauucaggaucuggagaaguauguggaagacaccaaaaucgaucucuggagcuacaacgcugagcugcuggucgcgcucgaaaaccaacacacgauugaccugacagauucugagaugaauaaacuuuucgaaagaaccaagaagcagcugcgcgagaacgccgaggacauggggaauggaugcuuuaagaucuaucauaaaugugauaacgcuugcauuggcuccauccggaaugggaccuacgaccacgauguguacagagacgaagcccucaacaaucgcuuccagauuaagggcguugagcugaaaagcggauauaaggacuggauccuuuggaucuccuuugccauuucuugcuuccugcucugugugguccugcugggcuuuaucaugugggcuugccagaaagggaacauucgguguaauaucugcauuuga

SEQ ID NO: 192236 - RNA, 1701 nt, Artificial Sequence
  derived and/or modified CDS sequence (opt5) from hemagglutinin__InfluenzaA__AAY44775
augaagaccaucauugcccugagcuacauccucugccugguguucgcucagaaacuucccgucaacgacaauuccacagccacgcugugucucggccaccaugcgguuccuaacgggacccuggugaagacaauuaccaaugaucacaucgaggugacaaacgcuaccgaacuuguccaaucuagcuccacaggaagaauuugcgacucuccgcaucagauccuggauggcgagaauuguacccucaucgacgcccugcugggggauccccacugcgacggauuucaggauaaagaaugggaccucuucguggagcggagcacggccuauuccaacuguuacccuuaugauguucccgacuacgcuucucugcgcagccuuguggccuccagcggcacccuggaauuuaauaacgagucuuucaauuggacaggggucgcucagaacggaaccuccagcgccugcaagagacggucuauuaaauccuuuuucagccgccucaauuggcugcaucaacuuaaguauaaguacccugcgcugaacgugacaaugcccaauaacgagaaauuugauaagcucuauaucuggggcguucaccacccuucuaccgacuccgaucagauuagccuguacgcccaggcuuccggcagagugacggucucuacaaaacggagccagcaaaccgugaucccgaauauugggucccgccccugggugagaggagucagcucucggaucuccauuuacuggacaaucguuaagccuggcgacauccugcucauuaacagcaccgggaaccugaucgcuccccgcggauauuucaaaauuagaucuggcaagagcuccaucaugcggucuaaugccccuauugggaaguguaacagcgaaugcaucacccccaauggauccaucccgaacgacaaaccuuuucagaaugugaaccgcauuacauacggcgccugucccagauaugugaagcagacgacccuuaaacuggcgacaggcaugcggaaugucccugagaagcagacccgcgggaucuucggagccauugcuggcuuuaucgaaaacgggugggagggaaugguggauggcugguacggguucagacaucaaaauagcgagggaacaggccaggccgcugaccucaaaucuacccaggccgccauuaaccaaaucaauggcaagcugaaccggcuuaucgagaaaacgaaugaaaaguuucaccagauugaaaaggaguucuccgaaguugaggggagaauccaggaucuggagaaauauguggaagacacaaagauugaucucuggagcuacaacgcugagcugcuggucgcgcucgaaaaucagcauaccaucgaccugaccgauucugagaugaacaaacuuuucgaacgcacacggaagcaacugagagagaacgccgaggacaugggaaauggcugcuuuaaaauuuaucacaagugugauaacgcuugcaucggguccauucgcaauggaaccuacgaccacgauguguaccgggacgaagcccucaacaauagauuccagaucaagggcguugagcugaaaagcggguauaaggacuggauccuuuggauuuccuuugccaucucuugcuuccugcucugugugguccugcugggcuuuauuaugugggcuugccagaaaggaaacauccgcuguaauauuugcaucuga

SEQ ID NO: 192237 - RNA, 1701 nt, Artificial Sequence; identical to SEQ ID NO: 192144
  derived and/or modified CDS sequence (opt5) from hemagglutinin__InfluenzaA__AAY44785

SEQ ID NO: 192238 - RNA, 1701 nt, Artificial Sequence
  derived and/or modified CDS sequence (opt5) from hemagglutinin__InfluenzaA__AAY44795
augaagaccaucauugcccugagcuacauccucugccugguguucgcucagaaacuucccgucaacgacaauuccacagccacgcugugucucggccaccaugcgguuccuaacgggacccuggugaagacaauuaccaaugaucacaucgaggugacaaacgcuaccgaacuuguccaaucuagcuccacaggaagaauuugcgacucuacccaucagauccuggauggcgagaauuguacgcucaucgacgcccugcugggggauccgcacugcgacggauuucagaacaaagaaugggaucucuucguggagcggagcaccgccuauuccaauuguuaccccuaugacguuccugauuacgcuucucugcgcagccuuguggccuccagcggcacacuggaauuuaacaaugagucuuucaacuggaccggggucgcucagaauggaacauccagcgccugcaagagacggucuauuaaauccuuuuucagccgccucaacuggcugcaucaacuuaaguauaaguaccccgcgcugaaugugaccaugccuaacaaugagaaauuugacaagcucuauaucuggggcguucaccaccccucuacggauuccgaccagauuagccuguacgcccaggcuuccggcagagugacagucucuaccaaacggagccagcaaacagugaucccuaacauugggucccgcccgugggugagaggagucagcucucggaucuccauuuacuggaccaucguuaagcccggcgauauccugcucauuaacagcaccgggaaucugaucgccccucgcggauauuucaaaauuagaucuggcaagagcuccaucaugcggucuaacgcucccauugggaaguguaauagcgaaugcaucacaccuaacggauccauccccaaugacaaaccguuucagaacgugaaucgcauuacguacggcgccuguccuagauaugugaagcagaacacccuuaaacuggcgacaggcaugcggaauguccccgagaagcagacccgcgggaucuucggagccauugcuggcuuuaucgaaaacgggugggagggaaugguggacggcugguacggguucagacaucaaaauagcgagggaacaggccaggccgcugaucucaaaucuacccaggccgccauuaaccaaaucaauggcaagcugaaccggcuuaucgagaaaacgaaugaaaaguuucaccagauugaaaaggaguucuccgaaguugaggggagaauccaggaccuggagaaauauguggaagauacaaagauugaccucuggagcuacaacgcugagcugcuggucgcgcucgaaaaccagcauaccaucgaucugaccgacucugagaugaauaaacuuuucgaacgcacacggaagcaacugagagagaacgccgaggauaugggaaauggcugcuuuaaaauuuaucacaagugugacaacgcuugcaucggguccauucgcaauggaaccuacgaucacgacguguaccgggaugaagcccucaacaauagauuccagaucaagggcguugagcugaaaagcggguauaaggacuggauccuuuggauuuccuuugccaucucuugcuuccugcucugugugguccugcugggcuuuauuaugugggcuugccagaaaggaaacauccgcuguaauauuugcaucuga

SEQ ID NO: 192239 - RNA, 1701 nt, Artificial Sequence
  derived and/or modified CDS sequence (opt5) from hemagglutinin__InfluenzaA__AAY44796
augaagaccaucauugcccugagcuacacacucugccugguguucgcucagaaacuucccggcaacgacaauuccacggccacccugugucucgggcaccaugcggucccuaacggaacaaucguuaagaccauuacaaaugaucaaaucgaggugaccaacgcuacagaacuggugcagucuagcuccaccggcgggauuugcgacucuccgcaccagauccuugauggagagaauuguacgcugaucgacgcccuccugggcgauccccagugcgacggguuucaaaacaaaaagugggaucuguucgucgaaagaagcaaagccuauuccaauuguuacccuuaugacgugcccgauuacgcuucucuccggagccugguugccuccagcggaacccuugaguuuaacaaugaaucuuucgacuggacaggcgugacccagaacggcacauccagcgcuugcaagcgcagaucuaauaaguccuuuuucagccggcugaacuggcucacccaucugaaauauaaguacccugcccuuaaugucacgaugcccaacaaugagaaauuugauaagcuguauauuuggggagugcaccauccugggacagacucugaucagaucucccucuacgcgcaggccagcggccgcauuaccguuuccacaaaaagaucucaacagaccgugaucccgaacauugggagccggccccgcgucagagacguguccagccggaucucuauuuacuggaccaucgugaagccuggagacauccugcugauuaacuccacaggcaaucucaucgcuccccgcggguauuucaagauuagaagcggaaaaucuagcaucaugcgguccgaugccccuauuggcaaguguaacucugagugcaucacgcccaauggcagcaucccgaacgacaaaccuuuucagaaugucaaccgcauuaccuacggggcuugucccagauauaucaagcagaauacacugaaacuugccaccggaaugcggaacguuccugaaaagcaaacacgcggcauuuucggggcgaucgccggauuuauugagaauggcugggaagggaugguggauggaugguacggcuucagacaccagaacuccgagggcaccgggcaggcugccgaccugaaaagcacgcaagcugccaucaaucagaucaacggaaagcucaaucggcugauuggcaagacaaacgagaaauuucaccagaucgaaaaggaguucucugaaguggaggggcgcauucaggaucuugaaaaauaugucgaggacaccaagaucgaucugugguccuacaaugccgagcuccugguggcucuggaaaaccaacauaccauugaccucacagauagcgagaugaacaaacuguucgaaagaaccaagaagcagcuucgggagaaugcggaagacaugggaaacggcugcuuuaaaaucuaucacaagugugauaaugccugcauugggucuaucagaaacggcacauacgaccaugacguuuaccgcgaugaggcucugaauaaccgguuccagaucaaaggaguggagcucaaguccggcuauaaagacuggauucuguggaucagcuuugccauuuccugcuuccuucugugugucgcccuccugggguuuaucaugugggcuugccagaagggaaauauuagauguaacaucugcaucuga

SEQ ID NO: 192240 - RNA, 1701 nt, Artificial Sequence; identical to SEQ ID NO: 192119
  derived and/or modified CDS sequence (opt5) from hemagglutinin__InfluenzaA__AAY44896

SEQ ID NO: 192241 - RNA, 1701 nt, Artificial Sequence
  derived and/or modified CDS sequence (opt5) from hemagglutinin__InfluenzaA__AAY44906
augaagaccaucauugcccugagcuacauccucugccugguguucgcucagaaacuucccggcaacgacaauuccacagccacgcugugucucgggcaccaugcggucccuaacggaaccauuguuaagacaaucaccaaugaucaaauugaggugacaaacgcuaccgaacuggugcagucuagcuccacaggcgggaucugcgacucuccgcaccagauccuugauggagagaauuguacccugauugacgcccuccugggcgauccccagugcgacggguuucaaaacaaaaagugggaucuguucgucgaaagaagcaaagccuauuccaauuguuacccuuaugacgugcccgauuacgcuucucuccggagccugguugccuccagcggaacgcuugaguuuaacaaugaaucuuucgacuggaccggcgugacacagaacggcaccuccagcgcuugcaagcgcagaucuaauaaguccuuuuucagccggcugaacuggcucacacaucugaaauauaaguacccugcccuuaaugucaccaugcccaacaaugagaaauuugauaagcuguauaucuggggagugcaccauccugggacggacucugaucagauuucccucuacgcgcaggccagcggccgcaucacaguuuccaccaaaagaucucaacagacagugauuccgaacaucgggagccggccccgcgucagagacguguccagccggauuucuaucuacuggaccaucgugaagccuggagacauucugcugaucaacuccaccggcaaucucauugcuccccgcggguauuucaagaucagaagcggaaaaucuagcauuaugcgguccgaugccccuaucggcaaguguaacucugagugcaucacacccaauggcagcauuccgaacgacaaaccuuuucagaaugucaaccgcaucacguacggggcuugucccagauauguuaagcagaauacccugaaacuugccacaggaaugcggaacgugccugaacgccaaaccagaggcauuuucggggcgaucgccggauuuauugagaauggcugggaagggaugguggauggaugguacggcuuccggcaccagaacuccgagggcacagggcaggcugccgaccugaaaagcacccaagcugccaucaaucagaucaacggaaaacucaauagacugauuggcaagacgaacgagaaguuucaccagaucgaaaaagaguucucugaagucgaggggcgcauucaggaucuugaaaaguauguggaggacacaaaaaucgaucugugguccuacaaugccgagcuccugguugcucuggaaaaccaacauaccauugaccucaccgauagcgagaugaacaagcuguucgaacggacaaagaagcagcuuagagagaaugcggaagacaugggaaacggcugcuuuaagaucuaucacaaaugugauaaugccugcauugggucuauccgcaacggcaccuacgaccaugacguguaccgggaugaggcucugaauaacagauuccagaucaagggagucgagcucaaauccggcuauaaggacuggauucuguggaucagcuuugccauuuccugcuuccuucuguguguggcccuccugggguuuaucaugugggcuugccagaaaggaaauauucgcuguaacaucugcaucuga

SEQ ID NO: 192242 - RNA, 1701 nt, Artificial Sequence
  derived and/or modified CDS sequence (opt5) from hemagglutinin__InfluenzaA__AAY46371
augaagaccaucauugcccugagcuacauccucugccugguguucgcucagaaacuucccggcaacgacaauuccacagccacgcugugucucgggcaccaugcggucccuaacggaacccugguuaagacaauuaccucugaucaaaucgaggugacaaaugcuaccgaacuugugcagagcuccucuacaggcagaauuugcgacagcccgcaccggauccuggauggggagaacuguacccucaucgacgcccugcugggagauccccauugcgacggcuuucagaauaaagaaugggaucucuucgucgagcgcuccaaggccuauucuaacuguuacccuuaugacgugcccgauuacgcuagccugagaucccuuguugccagcucugggacgcuggaauuuaauaacgaguccuucaauuggaccggaguggcucagaacggcaccagcuuugccugcaaacggcgcucuauuaaguccuucuuuagcagacucaauuggcugcaccaacuuaaguauaaauacccugcgcugaacgucacaaugcccaauaacgacaaguucgauaaacucuauaucuggggcgugcaucacccugggacagacucugaucagaccucccuguacgcccaggcuagcggacggguuacgguguccacaaagcgcucucagcaaaccgucauuccgaauaucggcagcagacccugggugcgcgggguguccagccggauuucuaucuacuggacaauugucaaaccuggagacauccugcucaucaacuccaccggcaaccugauugcccccagaggguauuuuaagauccggagcggaaagucuagcauuaugcgcuccgacgcuccuaucggcaaauguaauucugagugcauuacccccaacggcagcaucccgaaugggaagccuuuccagaacguuaauagaaucacauacggagccuguccccgguaugugaaacagaacacgcuuaagcuggcgaccggcaugcgcaaugugccugaaaaacagacaagagggauuuuuggagccaucgcuggcuucauugagaacgggugggaaggaauggucgauggcugguacggcuuucggcaccaaaauuccgaggggaccggacaggccgcugaccucaagagcacacaggccgccaucaaccaaauuaauggcaaacugaacagacuuaucgagaagaccaaugaaaaguuccaucagaucgagaaagaguucacggaaguggaagggcgcauucaggaucuggagaaguauguugaggacacaaaaaucgaucucuggucuuacaacgcugaacugcugguggcgcucgagaaucagcacaccauugaccugaccgauuccgaaaugaacaaacuuuuugagcggacaagaaagcaacugcgcgaaaacgccgaggacaugggaaauggcugcuucaagaucuaucauaagugugauaacgcuugcauugggagcauccggaauggcaccuacgaccacgaugucuacagagacgaggcccucaacaaucgcuuucagauuaaaggaguggaacugaagucuggcuauaaagacuggauccuuuggaucuccuucgccacaagcugcuuucugcucuguguugugcugcugggguucauuaugugggcuugccagaagggaaacauccgguguaauauuugcaucuga

SEQ ID NO: 192243 - RNA, 1701 nt, Artificial Sequence; identical to SEQ ID NO: 192104
  derived and/or modified CDS sequence (opt5) from hemagglutinin__InfluenzaA__AAY46381

SEQ ID NO: 192244 - RNA, 1701 nt, Artificial Sequence
  derived and/or modified CDS sequence (opt5) from hemagglutinin__InfluenzaA__AAY46391
augaagaccaucauugcccugagcuacauccucugccugguguucgcucagaaacuucccgucaacgacaauuccacagccacgcugugucucggccaccaugcgguuccuaacgggacccuggugaagacaauuaccaaugaucacaucgaggugacaaacgcuaccgaacuuguccaaucuagcuccacaggaagaauuugcgacucuccgcaucagauccuggauggcgagaauuguacccucaucgacgcccugcugggggauccccacugcgacggauuucagaacaaagaaugggaucucuucguggagcggagcacggccuauuccaauuguuacccuuaugacguucccgauuacgcuucucugcgcagccuuguggccuccagcggcacccuggaauuuaacaaugagucuuucaacuggacaggggucgcucagaauggaaccuccagcgccugcaagagacggucuauuaaauccuuuuucagccgccucaacuggcugcaucaacuuaaguauaaguacccugcgcugaaugugacaaugcccaacaaugagaaauuugacaagcucuauaucuggggcguucaccacccuucuaccgauuccgaccagauuagccuguacgcccaggcuuccggcagagugacggucucuacaaaacggagccagcaaaccgugaucccgaacauugggucccgccccugggugagaggagucagcucuaucauuuccaucuacuggacaaucguuaagccuggcgauauucugcucaucaacagcaccgggaaucugauugcuccccggggauauuucaaaauccgcucuggcaagagcuccauuaugagaucuaacgccccuaucgggaaguguaauagcgaaugcaucacccccaacggauccauuccgaaugacaaaccuuuucagaacgugaaucggaucacauacggcgccuguccccgcuaugugaagcagaacacgcuuaaacuggcgaccggcaugagaaaugucccugagaagcagacacgggggauuuucggagccaucgcuggcuuuauugaaaacgggugggagggaaugguggacggcugguacggguuccgccaucaaaauagcgagggaaccggccaggccgcugaucucaaaucuacacaggccgccaucaaccaaaucaauggcaagcugaacagacuuauugagaaaaccaaugaaaaguuucaccagaucgaaaaggaguucuccgaaguugaggggcggauucaggaccuggagaaauauguggaagauacgaagaucgaccucuggagcuacaacgcugagcugcuggucgcgcucgaaaaccagcauacaauugaucugaccgacucugagaugaauaaacuuuucgaaagaacccgcaagcaacugcgggagaacgccgaggauaugggaaauggcugcuuuaaaaucuaucacaagugugacaacgcuugcauuggguccaucagaaauggaacauacgaucacgacguguaccgcgaugaagcccucaacaaucgguuccagaucaagggcguugagcugaaaagcggguauaaggacuggauucuuuggaucuccuuugccauuucuugcuuccugcucugugugguccugcugggcuuuaucaugugggcuugccagaaaggaaacauuagauguaauaucugcaucuga

SEQ ID NO: 192245 - RNA, 1701 nt, Artificial Sequence
  derived and/or modified CDS sequence (opt5) from hemagglutinin__InfluenzaA__AAY46426
augaagaccaucauugcccugagcuacauccucugccugguguucgcucagaaacuucccggcaacgacaauuccacagccacgcugugucucgggcaccaugcggucccuaacggaacccugguuaagacaauuaccaaugaucaaaucgaggugacaaacgcuaccgaacuugugcagucuagcuccacaggcagaauuugcgacucuccgcaccagauccuggauggggagaauuguacccucaucgacgcccugcugggagauccccauugcgacggcuuucagaacaaagaaugggaucucuucgucgagcggagcaaggccuauuccaauuguuacccuuaugacgugcccgauuacgcuucucugcgcagccuuguugccuccagcgggacgcuggaauuuaacaaugagucuuucaacuggaccggaguggcucaaaauggcacauccagcgccugcaaaagacggucuaacaaguccuuuuucagccgccucaauuggcugcaccagcuuaaguauaaauacccugcgcugaacgucaccaugcccaauaacaagaaauuugacaagcucuauauuuggggcgugcaucacccuucuacagauuccgaccagaucagccuguacgcccaggcuuccgggagaguuaccgugucuacgaaacggagccaacagacagucauuccgaacaucggaucccgccccugggugagaggcgugagcucucggauuuccaucuacuggaccauugucaagccuggggauauccugcucaucaauagcacaggaaaccugauugcuccccgcggcuauuucaagaucagaucugggaaaagcuccauuaugcggucugacgccccuaucggaaaguguaauagcgagugcauuacccccaacggcuccaucccgaaugacaaaccuuuucagaacguuaaucgcaucaccuacggcgccugucccagauaugugaagcagaacacacuuaaacuggcgacggggaugcggaauauuccugaaaagcaaacccgcggaaucuucggcgccauugcuggguuuaucgagaacggaugggaaggcaugguggaugggugguacggauucagacaccagaauagcgagggcacaggccaggccgcugaccucaaaucuacccaagccgccauuaaccagaucaaugggaagcugaaccggcuuaucgagaagacaaaugaaaaauuucaucagauugagaaggaguucuccgaagucgaaggaagaauccaggaucuggagaaauauguggaggacaccaagauugaucucuggagcuacaacgcugaacugcugguugcgcucgagaaccaacacacgaucgaccugacagauucugaaaugaauaaacuuuucgagcgcaccaagaagcagcugcgggaaaacgccgaggacaugggcaaugggugcuuuaaaauuuaucauaagugugauaacgcuugcaucggauccauuagaaauggcaccuacgaccacgauguguaccgcgacgaggcccucaacaaucgguuccagaucaaaggggucgaacuuaagagcggcuauaaagacuggauccuguggauuuccuuugccaucucuugcuuccugcucugugugguucugcugggauuuauuaugugggcuugccagaagggcaacaucagauguaauauuugcaucuga

SEQ ID NO: 192246 - RNA, 1701 nt, Artificial Sequence
  derived and/or modified CDS sequence (opt5) from hemagglutinin__InfluenzaA__AAY47013
augaagaccaucauugcccugagcuacauccucugccugguguucgcucagaaacuucccggcaacgacaauuccacagccacgcugugucucgggcaccaugcggucccuaacggaacccugguuaagacaauuaccaaugaucaaaucgaggugacaaacgcuaccgaacuugugcagucuagcuccacaggcagaauuugcgacucuccgcaccagauccuggauggggagaauuguacccucaucgacgcccugcugggagauccccauugcgacggcuuucagaacaaagaaugggaucucuucgucgagcggagcaaggccuauuccaauuguuacccuuaugacgugcccgauuacguuucucugcgcagccuuguggcuuccagcgggacgcuggaauuuaacaaugagucuuucaacuggaccggagucgcccaaaauggcacauccagcgcuugcaaaagacggucugacaaguccuuuuucagccgccucaacuggcugcaccagcuuaaguauaaauacccugcccugaaugugaccaugcccaacaaugagaaguuugauaaacucuauauuuggggcguucaucacccugggacagacucugaucagaucucccuguacgcgcaggccagcggaagagugaccgucuccacgaagcggucucaacagacagugauuccgaacaucggcagcgggcccugggugcgcggagucuccagcagaauuucuaucuacuggaccauuguuaaaccuggcgacauccugcucaucaacuccacagggaaucugauugcuccccggggauauuucaagauccgcagcggcaagucuagcauuaugagauccgacgccccuaucggcaaauguaacucugaaugcauuacccccaaugggagcaucccgaacgauaagccuuuucagaaugugaaccggaucaccuacggacccuguccucgcuaugugaaacagaauacacuuaagcuggcuacgggcaugagaaacguccccgagaaacaaacccgggggauuuucggagccaucgcgggcuuuauugaaaaugggugggagggaaugauggacggcugguacggcuuccgccaccagaacuccgaggggacaggacaggccgcugaucucaagagcacccaagccgcuaucaaucagauuaacggcaaacugaauagacuuaucaagaagacaaacgaaaaauuucaucagaucgagaaggaguucucugaaguggaagggcggauucaggaccuggagaaauauguugaggauaccaagaucgaccucugguccuacaaugccgaacugcugguggcccucgagaaccaacacacgauugaucugacagacagcgaaaugaacaaacuuuucgagagaaccaagaagcagcugcgcgaaaaugcugaggauaugggaaacggcugcuuuaaaaucuaucauaagugugacaaugcgugcauugggucuauccggaacggcaccuacgaucacgacgucuacagagacgaggcccucaauaaccgcuuccagauuaaaggaguggaacugaaguccggcuauaaagauuggauccuuuggaucagcuuugcuauuuccugcuuccugcucuguaucguucugcugggguuuauuaugugggccugccagaagggaaauauccgguguaacauuugcaucuga

SEQ ID NO: 192247 - RNA, 1701 nt, Artificial Sequence
  derived and/or modified CDS sequence (opt5) from hemagglutinin__InfluenzaA__AAY47023
augaagaccaucauugcccugagcuacauccucugccugguguucgcucagaaacuucccggcaacgacaauuccacagccacgcugugucucgggcaccaugcggucccuaacggaacccugguuaagacaauuaccaaugaucaaaucgaggugacaaacgcuaccgaacuugugcagucuagcuccacaucuagaauuugcgacagcccgcaccagauccuggauggcgagaauuguacccucaucgacgcccugcugggggauccccauugcgacggauuucagaacaaagaauggggccucuucgucgagcgguccaaggccuauucuaauuguuacccuuaugaugugcccgacuacguuagccugcgcucccuuguggcuagcucugggacgcuggaauuuaacaaugaguccuucaacuggaccggagucgcccaaaauggcacaagcucugcuugcaaaagacgguccgauaagagcuuuuucucucgccucaacuggcugcaccagcuuaaguauaaauacccugcccugaaugugaccaugcccaacaaugagaaguuugacaaacucuauauuuggggcguucaucacccugggacagauuccgaccagaucagccuguacgcgcaggccuccggaagagugaccgucucuacgaagcggagccaacagacagugauuccgaacaucggcucccgccccugggugagaggggucagcucucggauuuccaucuacuggaccauuguuaaaccuggagauauccugcucaucaacagcacaggcaaucugauugcuccccgcggguauuucaagaucagaucuggaaagagcuccauuaugcggucugacgccccuaucggcaaauguaacagcgaaugcauuacccccaauggcuccaucccgaacgacaagccuuuucagaaugugaaccgcaucaccuacggggcuugucccagauaugugaaacagaauacacuuaagcuggccacgggaaugcggaacgucccugagaaacaagcgcgcggcauuuucggggccaucgcuggauuuauugaaaauggcugggaggggaugauggauggaugguacggcuucagacaccagaacagcgagggcaccgggcaggccgcugaccucaagucuacacaagccgccaucaaucagauuaacggaaaacugaaucggcuuaucgaaaagaccaacgagaaguuucaucagaucgaaaaagaguucuccgaaguggagggccgcauucaggaucuggagaaguauguugaagacacaaaaaucgaucucuggagcuacaaugcugagcugcugguggcgcucgaaaaccaacacaccauugaccugacggauucugagaugaacaaacuuuucgaaagaacaaagaagcagcugcgggagaaugccgaggacauggggaacggaugcuuuaagaucuaucauaaaugugauaaugcuugcauuggcuccaucagaaacgggaccuacgaccacgaugucuaccgcgacgaagcccucaauaaccgguuccagauuaagggcguggagcugaaaagcggauauaaggacuggauccuuuggaucuccuuugccauuucuugcuuccugcucuguaucguucugcugggcuuuauuaugugggcuugccagaaagggaauaucagauguaacauuugcaucuga

SEQ ID NO: 192248 - RNA, 1701 nt, Artificial Sequence; identical to SEQ ID NO: 192244
  derived and/or modified CDS sequence (opt5) from hemagglutinin__InfluenzaA__AAY47052

SEQ ID NO: 192249 - RNA, 1701 nt, Artificial Sequence
  derived and/or modified CDS sequence (opt5) from hemagglutinin__InfluenzaA__AAY47075
augaagaccaucauugcccugagcuacauccucugccugguguucgcucagaaacuucccggcaacgacaauuccauggccacacugugucucgggcaccaugcggucccuaacggaacgcugguuaagaccauuacaaaugaucaaaucgaggugaccaacgcuacagaacuugugcagucuagcuccaccggcagaauuugcgacucuccgcaccagauccuggauggggagaauuguacacucaucgacgcccugcugggagauccccauugcgacggcuuucagaacaaagaaugggaucucuucgucgagcggagcaaggccuauuccaauuguuacccuuaugacgugcccgauuacguuucucugcgcagccuuguggcuuccagcgggacccuggaauuuaacaaugagucuuucaacuggacgggagucgcccaaaauggcaccuccagcgcuugcaaaagacggucuaacaaguccuuuuucagccgccucaauuggcugcaccagcuuaagaacaaauauccugcccugaaugugacaaugcccaacaacgagaaguuugacaaacucuacauuuggggcguucaucacccugggaccgauucugaccagaucucccuguaugcgcaggccagcggaagagugacagucuccaccaagcggucucaacagacggugauuccgaauaucggcagccgccccagagugcgggauauuuccagccgcaucucuauuuacuggacaaucgucaaaccuggggacauccugcucauuaacuccaccggaaaucugaucgcucccagaggcuacuucaagauucggagcgggaagucuagcaucaugcgcuccgacgccccuauuggaaaauguaacucugaaugcaucacacccaauggcagcaucccgaacgauaagccuuuucagaauguuaacagaauuaccuauggcgcuuguccccgguacgugaaacagaauacccuuaagcuggccacagggaugcgcaacgugccugagaaacaaacgagaggaaucuucggcgcgauugccggguuuaucgaaaauggaugggagggcaugauggacgggugguauggauuccggcaccagaacuccgagggcaccggccaggcugccgaucucaagagcacacaagcugccauuaaucagaucaacgggaaacugaauagacuuaucgaaaagaccaacgagaaguuucaucagauugaaaaagaguucucugaagucgagggacgcauccaggaccuggagaaguacguggaagauacaaaaauugaccucugguccuauaacgccgagcugcugguugcucucgaaaaucaacacaccaucgaucugacggacagcgagaugaacaaacuuuucgaacggacaaagaagcagcugagagagaaugcggaggauaugggcaacgggugcuuuaagauuuaccauaaaugugacaaugccugcaucggaucuauucgcaacggcaccuaugaucacgacguguaccgggacgaagcucucaauaacagauuccagaucaagggggucgagcugaaauccggcuacaaggauuggauccuuuggauuagcuuugccaucuccugcuuccugcucuguauugugcugcugggauuuaucaugugggccugccagaaaggcaauauucgcuguaacaucugcaucuga

SEQ ID NO: 192250 - RNA, 1701 nt, Artificial Sequence
  derived and/or modified CDS sequence (opt5) from hemagglutinin__InfluenzaA__AAY47085
augaagaccaucauugcccugagcuacauccucugccugguguucgcucagaaacuucccggcaacgacaauuccacagccacgcugugucucgggcaccaugcggucccuaacggaaccauuguuaagacaaucaccaaugaucaaauugaggugacaaacgcuaccgaacuggugcagucuagcuccacaggcgggaucugcgacucuccgcaccagauccuugauggagagaauuguacccugauugacgcccuccugggcgauccccagugcgacggguuucaaaacaaaaagugggaucuguucgucgaaagaagcaaagccuauuccaauuguuacccuuaugacgugcccgauuacgcuucucuccggagccugguugccuccagcggaacgcuugaguuuaacaaugaaucuuucaacuggaccggcgugacacagaauggcaccuccagcgcuugcaagcgcagaucuaacaaguccuuuuucagccggcugaauuggcucacacaucugaaauauaaguacccugcccuuaacgucaccaugcccaauaacgagaaauuugacaagcuguauaucuggggagugcaccauccugggacggauucugaccagauuucccucuacgcgcaggccagcggccgcaucacaguuuccaccaaaagaucucaacagacagugauuccgaacgucgggagccggccccgcgugagagauguguccagccggaucucuauuuacuggaccaucgucaagccuggagacauccugcugauuaauuccaccggcaaccucaucgcuccccgcggguauuucaagauuagaagcggaaaaucuagcaucaugcgguccgacgccccuauuggcaaguguaauucugagugcaucacacccaacggcagcaucccgaaugauaaaccuuuucagaacguuaaucgcauuacguacggggcuugucccagauaugugaagcagaacacccugaaacuugccacaggaaugcggaaugugccugaaaagcaaacccgcggcaucuucggggcgauugccggauuuaucgagaacggcugggaagggauggucgacggaugguacggcuucagacaccaaaauuccgagggcacagggcaggcugccgaucugaaaagcacccaggcugccauuaaccagaucaauggaaagcucaaccggcugaucggcaagacgaaugagaaauuucaccagauugaaaaggaguucucugaaguggaggggagaauccaggaccuugaaaaauauguugaggauacaaagauugaccugugguccuacaacgccgagcuccugguggcucuggaaaaccaacauaccaucgaucucaccgacagcgagaugaauaaacuguucgaacgcacaaagaagcagcuucgggagaacgcggaagauaugggaaauggcugcuuuaaaauuuaucacaagugugacaacgccugcaucgagucuauuagaaaugggaccuacgaucaugacgucuaccgcgacgaggcucugaacaaucgguuccagaucaaaggcguggaacucaaguccggauauaaagauuggauccuguggauuagcuuugccaucuccugcuuccuucuguguguugcccuccugggcuuuauuaugugggcuugccagaaggggaacaucagauguaauauuugcaucuga

SEQ ID NO: 192251 - RNA, 1701 nt, Artificial Sequence
  derived and/or modified CDS sequence (opt5) from hemagglutinin__InfluenzaA__AAY58320
augaagaccaucauugcccugagcuacauccucugccugguguucgcucagaaacuucccggcaacgacaauuccacagccacgcugugucucgggcaccaugcggucccuaacggaaccauuguuaagacaaucaccaaugaucaaauugaggugacaaacgcuaccgaacuggugcagucuagcuccacaggcgggaucugcgacucuccgcaccagauccuugauggagagaauuguacccugauugacgcccuccugggcgauccccagugcgacggguuucaaaacaaaaagugggaucuguucgucgaaagaagcaaagccuauuccaauuguuacccuuaugacgugcccgauuacgcuucucuccggagccugguugccuccagcggaacgcuugaguuuaacaaugaaucuuucgacuggaccggcgugacacagaacggcaccuccagcgcuugcaagcgcagaucuaauaaguccuuuuucagccggcugaacuggcucacacaucugaaauauaaguacccugcccuuaaugucaccaugcccaacaaugagaaauuugauaagcuguauaucuggggagugcaccauccugggacggacucugaucagauuucccucuacgcgcaggccagcggccgcaucacaguuuccaccaaaagaucucaacagacagugauuccgaacaucgggagccggccccgcgucagagacauuuccagccggaucucuaucuacuggaccauugugaagccuggagacauccugcugauuaacuccaccggcaaucucaucgcuccccgcggguauuucaagauuagaagcggaaaaucuagcaucaugcgguccgaugccccuaucggcaaguguaacucugagugcauuacacccaauggcagcaucccgaacgacaaaccuuuucagaaugugaaccgcauuacguacggggcuugucccagauaugucaagcagaauacccugaaacuugccacaggaaugcggaacguuccugaaaagcaaacccgcggcaucuucggggcgauugccggauuuaucgagaauggcugggaagggaugguggauggaugguacggcuucagacaccagaacuccgagggcacagggcaggcugccgaccugaaaagcacccaagcugccaucaaucagauuaacggaaagcucaaucggcugaucggcaagacgaacgagaaauuucaccagauugaaaaggaguucucugaaguggaggggagaauccaggaucuugaaaaauaugucgaggacacaaagauugaucugugguccuacaaugccgagcuccugguggcucuggaaaaccaacauaccaucgaccucaccgauagcgagaugaacaaacuguucgaacgcacaaagaagcagcuucgggagaaugcggaagacaugggaaacggcugcuuuaaaauuuaucacaagugugauaaugccugcaucgggucuaucagaaacggcaccuacgaccaugacguuuaccgcgaugaggcucugaauaaccgguuccagauuaaaggaguggagcucaaguccggcuauaaagacuggauccuguggauuagcuuugccaucuccugcuuccuucugugugucgcccuccugggguuuauuaugugggcuugccagaagggaaauaucagauguaacaucugcauuuga

SEQ ID NO: 192252 - RNA, 1701 nt, Artificial Sequence
  derived and/or modified CDS sequence (opt5) from hemagglutinin__InfluenzaA__AAY59035
augaagaccaucauugcccugagcuacauccucugccugguguucgcucagaaacuuacagucaacgacaauuccacggccacccugugucucggccaccaugcgguucccaacgggacacuggugaagaccauuacaaaugaucacaucgaggugaccaacgcuacagaacuuguccaaucuagcuccaccggaagaauuugcgacucuccucaucagauccuggauggcgagaauuguacgcucaucgacgcccugcugggggauccgcacugcgacggauuucagaacaaagaaugggaucucuucguggagcggagcaccgccuauuccaauuguuaccccuaugacguuccugauuacgcuucucugcgcagccuuguggccuccagcggcacacuggaauuuaacaaugagucuuucaacuggaccggggucgcucagaauggaacauccagcgccugcaagagacggucuauuaaauccuuuuucagccgccucaacuggcugcaucaacuuaaguauaaguaccccgcgcugaaugugaccaugccuaacaaugagaaauuugacaagcucuauaucuggggcguucaccaccccucuacggauuccgaccagauuagccuguacgcccaggcuuccggcagagugacagucucuaccaaacggagccagcaaacagugaucccuaacauugggucccgcccgugggugagaggagucagcucucggaucuccauuuacuggaccaucguuaagcccggcgauauccugcucauuaacagcaccgggaaucugaucgccccucgcggauauuucaaaauuagaucuggcaagagcuccaucaugcggucuaacgcucccauugggaaguguaauagcgaaugcaucacaccuaacggauccauccccaaugacaaaccguuucagaacgugaaucgcauuacguacggcgccuguccuagauaugugaagcagaacacccuuaaacuggcgacaggcaugcggaauguccccgagaagcagacccgcgggaucuucggagccauugcuggcuuuaucgaaaacgggugggagggaaugguggacggcugguacggguucagacaucaaaauagcgagggaacaggccaggccgcugaucucaaaucuacccaggccgccauuaaccaaaucaauggcaagcugaaccggcuuaucgagaaaacgaaugaaaaguuucaccagauugaaaaggaguucuccgaaguugaggggagaauccaggaccuggagaaauauguggaagauacaaagauugaccucuggagcuacaacgcugagcugcuggucgcgcucgaaaaccagcauaccaucgaucugaccgacucugagaugaauaaacuuuucgaacgcacacggaagcaacugagagagaacgccgaggauaugggaaauggcugcuuuaaaauuuaucacaagugugacaacgcuugcaucggguccauucgcaauggaaccuacgaucacgacguguaccgggaugaagcccucaacaauagauuccagaucaagggcguugagcugaaaagcggguauaaggacuggauccuuuggauuuccuuugccaucucuugcuuccugcucugugugguccugcugggcuuuauuaugugggcuugccagaaaggaaacauccgcuguaauauuugcaucuga

SEQ ID NO: 192253 - RNA, 1701 nt, Artificial Sequence
  derived and/or modified CDS sequence (opt5) from hemagglutinin__InfluenzaA__AAY64202
augaagaccaucauugcccugagcuacauccucugccugguguucgcucagaaacuucccggcaacgacaauuccacagccacgcugugucucgggcaccaugcggucccuaacggaaccauuguuaagacaaucaccaaugaucaaauugaggugacaaacgcuaccgaacuggugcagucuagcuccacaggcgggaucugcgacucuccgcaccagauccuugauggagagaauuguacccugauugacgcccuccugggcgauccccagugcgacggguuucaaaacaaaaagugggaucuguucgucgaaagaagcaaagccuauuccaauuguuacccuuaugacgugcccgauuacgcuucucuccggagccugguugccuccagcggaacgcuugaguuuaacaaugaaucuuucaacuggaccggcgugacacagaauggcaccuccagcgcuugcgagcgcagaucuaacaaguccuuuuucagccggcugaauuggcucacacaucugaaguauaaauacccugcccuuaacgucaccaugcccaauaacgagaaguuugacaaacuguauaucuggggagugcaccauccugggacggauucugaccagauuucccucuacgcgcaggccagcggccgcaucacaguuuccaccaagagaucucaacagacagugauuccgaacaucgggagccggccccgcgucagagauguguccagccggauuucuaucuacuggaccaucgugaaaccuggagacauucugcugaucaauuccaccggcaaccucauugcuccccgcggguauuucaagaucagaagcggaaagucuagcauuaugcgguccgacgccccuaucggcaaauguaauucugaaugcaucacacccaacggcagcauuccgaaugauaagccuuuucagaacgucaaucgcaucacguacggggcuugucccagauauguuaaacagaacacccugaagcuggccacaggaaugcggaaugugccugagaaacaaaaccgcggcauuuucggggcgaucgccggauuuauugaaaauggcugggaggggaugguggacggaugguacggcuucagacaccagaacuccgagggcaccgggcaggcugccgaucuuaagagcacacaagcugccaucaaucagaucaacggaaaacucaaucggcugauuggcaagaccaacgaaaaguuucaccagaucgagaaagaguucucugaagucgaagggcgcauucaggaccuugagaaguauguggaggauacgaaaaucgaccugugguccuacaacgccgaacuccugguugcucuggagaaucaacauacaauugaucucaccgacagcgaaaugaacaagcuguucgagagaaccaaaaagcagcuucgggaaaaugcggaggauaugggaaacggcugcuuuaagaucuaucacaaaugugacaaugccugcauugggucuaucagaaacggcacauacgaucaugacguguaccgcgacgaggcucugaauaaccgguuccagaucaagggagucgaacucaaauccggcuauaaggauuggauucuguggaucagcuuugccauuuccugcuuccuucuguguguggcccuccugggguuuaucaugugggcuugccagaaaggaaauauuagaugugacaucugcaucuga

SEQ ID NO: 192254 - RNA, 1701 nt, Artificial Sequence
  derived and/or modified CDS sequence (opt5) from hemagglutinin__InfluenzaA__AAY64212
augaagaccaucauugcccugagcuacauccucugccugguguucgcucagaaaauucccgucaacgacaauuccacagccacgcuuugucugggccaccaugcgguuccuaacgggacccucgugaagacaaucaccaaugagcacauugaagugacaaacgcuaccgagcugguccaaucuagcuccacaggaagaaucugcgauucuccgcaucagauccuugacggcgaaaauuguacccugauugaugcccuccugggggacccccacugcgauggauuucagaacaaagagugggaccuguucguggaacggagcacggccuauuccaauuguuacccuuaugauguucccgacuacgcuucucuccgcagccugguggccuccagcggcacccuugaguuuaacaaugagucuuucaacuggacaggggucgcucagaauggaaccuccagcgccugcaagagacggucuaucaaauccuuuuucagccgccugaacuggcuccaucaacugaaguauaaguacccugcgcuuaaugugacaaugcccaacaaugaaaaauuugauaagcuguauauuuggggcguucaccacccuucuaccgacuccgaucagaucagccucuacgcccaggcuuccggcagagugacggucucuacaaaacggagccagcaaaccgugauuccgaacaucgggucccgccccugggugagaggagucagcucucggauuuccaucuacuggacaaucguuaagccuggcgacauucugcugaucaacagcaccgggaaucucauugcccccagaggauauuucaaaaucagaucuggcaagagcuccauuaugcggucuaacgcucugaucgggaaguguaauagcgagugcaucaccccuaacggauccauucccaaugauaaaccguuucagaacgugaaucgcaucacauacggcgccuguccuagauaugugaagcagaacacgcuuaaacuggcgaccggcaugcggaauguccccgaaaagcagacacgcgggauuuucggagccaucgcuggcuuuauugagaacgggugggagggaaugguggacggcugguacggguucagacaucaaaauagcgaaggaaccggccaggccgcugaccucaaaucuacacaggccgccaucaaccaaaucaauggcaagcugaaccggcuuauugagaaaaccaaugaaaaguuucaccagaucgagaaggaguucuccgaaguugaggggcgcauucaggaucuggaaaaauauguggaggacacgaagaucgaucucuggagcuacaacgcugaacugcuggucgcgcucgagaaccagcauacaauugaccugaccgauucugaaaugaauaaacuuuucgagcgcacccggaagcaacugagagagaacgccgaagacaugggaaauggcugcuuuaaaaucuaucacaagugugauaacgcuugcauuggguccauccgcaauggaacauacgaccacgauguguaccgggacgaggcccucaacaauagauuccagaucaagggcguugaacugaaaagcggguauaaggauuggauucuuuggaucuccuuugccauuucuugcuuccugcucugugugguccugcugggcuuuaucaugugggcuugccagaaaggaaacauucgcuguaauaucugcaucuga

SEQ ID NO: 192255 - RNA, 1701 nt, Artificial Sequence
  derived and/or modified CDS sequence (opt5) from hemagglutinin__InfluenzaA__AAY64222
augaagaccaucauugcccugagcuacauccucugccugguguucgcucagaaacuucccggcaacgacaauuccacagccacgcugugucucgggcaccaugcggucccuaacggaacccugguuaagacaauuaccaaugaucaaaucgaggugacaaacgcuaccgaacuugugcagucuagcuccauuggcagaaucugcgacucuccgcaccagauccuggauggggagaauuguacacucauugacgcccugcugggagauccccauugcgacggcuuucagaacaaagaaugggaucucuucgucgagcggagcaaggccuauuccaauuguuacccuuaugacgugcccgauuacguuucucugcgcagccuuguggcuuccagcgggacccuggaauuuaacaaugagucuuucaacuggacgggagucgcccaaaauggcaccuccagcucuugcaaaagacgguccgacaagagcuuuuucucucgccucaacuggcugcaccagcuuaaguauaaauacccugcucugaaugugacaaugcccaacaaugagaaguuugauaaacucuauaucuggggcguucaucacccugggaccgacuccgaucagauuagccuguacgcccaggcguccggaagagugacagucucuaccaagcggagccaacagacggugaucccgaacauuggcucccgccccugggugagaggggucagcucucggaucuccauuuacuggacaaucguuaaaccuggagacauccugcucauuaacagcaccggcaaucugaucgcuccccgcggguauuucaagauuagaucuggaaagagcuccaucaugcggucugacgccccuauuggcaaauguaacagcgaaugcaucacacccaauggcuccaucccgaacgauaagccuuuucagaaugugaaccgcauuaccuacgggcccuguccuagauaugugaaacagaauacccuuaagcuggccacaggaaugcggaacguccccgagaaacaaacgcgcggcaucuucggggcuauugccggauuuaucgaaaauggcugggaggggaugauggacggaugguacggcuucagacaccagaacagcgagggcaccgggcaggcggccgaucucaagucuacacaagcugccauuaaucagaucaacggaaaacugaaucggcuuaucgaaaagaccaacgagaaguuucaucagauugaaaaagaguucuccgaaguggagggcagaauccaggaccuggagaaguauguugaagauacaaaaauugaccucuggagcuacaaugcugagcugcugguggcccucgaaaaccaacacaccaucgaucugacggacucugagaugaacaaacuuuucgaaaagacaaagaagcagcugcgcgagaaugccgaggauauggggaacggaugcuuuaaaauuuaucauaagugugacaaugcuugcaucggcuccauucggaacgggaccuacgaucacgacgucuacagagacgaagcgcucaauaaccgcuuccagaucaaaggcguggagcuuaagagcggauauaaagauuggauccuguggauuuccuuugccaucucuugcuuccugcucuguauuguucugcugggcuuuaucaugugggcuugccagaaggggaauauucgguguaacaucugcaucuga

SEQ ID NO: 192256 - RNA, 1701 nt, Artificial Sequence
  derived and/or modified CDS sequence (opt5) from hemagglutinin__InfluenzaA__AAY64262
augaagaccaucauugcccugagcuacauccucugccugguguucgcucagaaacuucccggcaacgacaauuccacagccacgcugugucucgggcaccaugcggucccuaacggaacccugguuaagacaauuaccaaugaucaaaucgaggugacaaacgcuaccgaacuugugcagucuagcuccacaggcagaauuugcgacucuccgcaccagauccuggauggggagaauuguacccucaucgacgcccugcugggagauccccauugcgacggcuuucagaacaaagaaugggaucucuucgucgagcggagcaaggccuauuccaauuguuacccuuaugacgugcccgauuacgcuucucugcgcagccuuguugccuccagcgggacgcuggaauuuaacaaugagucuuucaacuggaccggaguggcucaaaauggcacauccagcgccugcaaaagacggucuaacaaguccuuuuucagccgccucaauuggcugcaccagcuuaaguauaaauacccugcgcugaacgucaccaugcccaauaacgagaaguuugacaaacucuauauuuggggcgugcaucacccuucuacagauuccgaccagaucagccuguacgcccaggcuuccgggagaguuaccgugucuacgaagcggagccaacagacagucauuccgaacaucggaucccgccccugggugagaggcgugagcucucggauuuccaucuacuggaccauugucaaaccuggggauauccugcucaucaauagcacaggaaaccugauugcccccagaggcuauuucaagaucagaucuggaaagagcuccauuaugcggucugacgcuccuaucgggaaauguaauagcgaaugcauuacccccaacggcuccaucccgaaugacaagccuuuucagaacguuaaucgcaucaccuacggcgccugucccagauaugugaaacagaacacacuuaagcuggcgacggggaugcggaaugugccugagaaacaaacccgcggaauuuucggcgccaucgcuggguuuauugaaaacggaugggagggcauggucgaugggugguacggauucagacaccagaauagcgagggcacaggccaggccgcugaccucaagucuacccaagccgccaucaaccagauuaaugggaaacugaaccggcuuaucgaaaagacaaaugagaaguuucaucagaucgaaaaagaguucuccgaaguggagggacgcauucaggaucuggagaaguauguugaagacaccaaaaucgaucucuggagcuacaacgcugagcugcugguggcgcucgaaaaccaacacacgauugaccugacagauucugagaugaauaaacuuuucgaacgcaccaagaagcagcugcgggagaacgccgaggacaugggcaaugggugcuuuaagaucuaucauaaaugugauaacgcuugcaugggauccauuagaaauggcaccuacgaccacgaugucuaccgcgacgaagcccucaacaaucgguuccagaucaaggggguggagcugaaaagcggcuauaaggacuggauucuuuggaucuccuuugccaucucuugcuuccugcucuguguugugcugcugggauuuauuaugugggcuugccagaaaggcaacaucagauguaauauuugcaucuga

SEQ ID NO: 192257 - RNA, 1701 nt, Artificial Sequence
  derived and/or modified CDS sequence (opt5) from hemagglutinin__InfluenzaA__AAY64272
augaagaccaucauugcccugagcuacauccucugccugguguucgcucagaaacuucccggcaacgacaauuccacagccacgcugugucucgggcaccaugcggucccuaacggaaccauuguuaagacaaucaccaaugaucaaauugaggugacaaacgcuaccgaacuggugcagucuagcuccacaggcgggaucugcgacucuccgcaccagauccuugauggagagaauuguacccugauugacgcccuccugggcgauccccagugcgacggguuucaaaacaaaaagugggaucuguucgucgaaagaagcaaagccuauuccaauuguuacccuuaugacgugcccgauuacgcuucucuccggagccugguugccuccagcggaacgcuugaguuuaacaaugaaucuuucaacuggaccggcgugacacagaauggcaccuccagcgcuugcaagcgcagaucuaacaaguccuuuuucagccggcugaauuggcucacacaucugaaauauaaguacccugcccuuaacgucaccaugcccaauaacgagaaauuugacaagcuguauaucuggggagugcaccauccugggacggauucugaccagauuucccucuacgcgcaggccagcggccgcaucacaguuuccaccaaaagaucucaacagacagugauuccgaacaucgggagccggccccgcgucagagauguguccagccggauuucuaucuacuggaccaucgugaagccuggagacauucugcugaucaauuccaccggcaaccucauugcuccccgcggguauuucaagaucagaagcggaaaaucuagcauuaugcgguccgacgccccuaucggcaaguguaauucugagugcaucacacccaacggcagcauuccgaaugauaaaccuuuucagaacgucaaucgcaucacguacggggcuugucccagauauguuaagcagaacacccugaaacuugccacaggaaugcggaaugugccugaaaagcaaacccgcggcauuuucggggcgaucgccggauuuauugagaacggcugggaagggaugguggacggaugguacggcuucagacaccaaaauuccgagggcacagggcaggcugccgaucugaaaagcacccaggcugccaucaaccagaucaauggaaagcucaaccggcugauuggcaagacgaaugagaaauuucaccagaucgaaaaggaguucucugaagucgaggggcgcauucaggaccuugaaaaauauguggaggauacaaagaucgaccugugguccuacaacgccgagcuccugguugcucuggaaaaccaacauaccauugaucucaccgacagcgagaugaauaaacuguucgaaagaacaaagaagcagcuucgggagaacgcggaagauaugggaaauggcugcuuuaaaaucuaucacaagugugacaacgccugcauugagucuaucagaaaugggaccuacgaucaugacguguaccgcgacgaggcucugaacaaucgguuccagaucaaaggcgucgaacucaaguccggauauaaagauuggauucuguggaucagcuuugccauuuccugcuuccuucuguguguggcccuccugggcuuuaucaugugggcuugccagaaggggaacauuagauguaauaucugcaucuga

SEQ ID NO: 192258 - RNA, 1701 nt, Artificial Sequence
  derived and/or modified CDS sequence (opt5) from hemagglutinin__InfluenzaA__AAY64282
augaagaccaucauugcccugagcuacauccucugccugguguucgcucagaaacuucccggcaacgacaauuccacagccacgcugugucucgggcaccaugcggucccuaacggaacccugguuaagacaauuaccaaugaucaaaucgaggugacaaacgcuaccgaacuugugcagucuagcuccacaggcagaauuugcgacucuccgcaccagauccuggauggggagaauuguacccucaucgacgcccugcugggagauccccauugcgacggcuuucagaacaaagaaugggaucucuucgucgagcggagcaaggccuauuccaauuguuacccuuaugacgugcccgauuacgcuucucugcgcagccuuguugccuccagcgggacgcuggaauuuaacaaugagucuuucaacuggaccggaguggcucaaaauggcacauccagcgccugcaaaagacggucuaacaaguccuuuuucagccgccucaauuggcugcaccagcuuaaguauaaauacccugcgcugaacgucaccaugcccaauaacgagaaguuugacaaacucuauauuuggggcgugcaucacccuucuacagauuccgaccagaucagccuguacgcccaggcuuccgggagaguuaccgugucuacgaagcggagccaacagacagucauuccgaacaucggaucccgccccugggugagaggcgugagcucucggauuuccaucuacuggaccauugucaaaccuggggauauccugcucaucaauagcacaggaaaccugauugcccccagaggcuauuucaagaucagaucuggaaagagcuccauuaugcggucugacgcuccuaucgggaaauguaauagcgaaugcauuacccccaacggcuccaucccgaaugacaagccuuuucagaacguuaaucgcaucaccuacggcgccugucccagauaugugaaacagaacacacuuaagcuggcgacggggaugcggaaugugccugagaaacaaacccgcggaauuuucggcgccaucgcuggguuuauugaaaacggaugggagggcauggucgaugggugguacggauucagacaccagaauagcgagggcacaggccaggccgcugaccucaagucuacccaagccgccaucaaccagauuaaugggaaacugaaccggcuuaucgaaaagacaaaugagaaguuucaucagaucgaaaaagaguucuccgaaguggagggacgcauucaggaucuggagaaguauguugaagacaccaaaaucgaucucuggagcuacaacgcugagcugcugguggcgcucgaaaaccaacacacgauugaccugacagauucugagaugaauaaacuuuucgaacgcaccaagaagcagcugcgggagaacgccgaggacaugggcaaugggugcuuuaagaucuaucauaaaugugauaacgcuugcauuggauccaucagaaauggcaccuacgaccacgaugucuaccgcgacgaagcccucaacaaucgguuccagauuaaggggguggagcugaaaagcggcuauaaggacuggauccuuuggaucuccuuugccauuucuugcuuccugcucuguguugugcugcugggauuuaucaugugggcuugccagaaaggcaacauuagauguaauaucugcauuuga

SEQ ID NO: 192259 - RNA, 1701 nt, Artificial Sequence
  derived and/or modified CDS sequence (opt5) from hemagglutinin__InfluenzaA__AAY64292
augaagaccaucauugcccugagcuacauccucugccugguguucgcucagaaacuucccggcaacgacaauuccacagccacgcugugucucgggcaccaugcggucccuaacggaacccugguuaagacaauuaccaaugaucaaaucgaggugacaaacgcuaccgaacuugugcagucuagcuccacagacaaaauuugcgauucuccgcaccagauccuggacggcgggaauuguacccucaucgaugcccugcugggagacccccauugcgauggcuuucagaacaaggagugggaccucuucgucgaaagaagcaaagccuauuccaauuguuacccuuaugaugugcccgacuacguuucucugcggagccuuguggcuuccagcgggacgcuggaguuuaacaaugaaucuuucaacuggaccggagucgcccaaaauggcacauccagcgcuugcaagcgcagaucugauaaguccuuuuucagccggcucaacuggcugcaccagcuuaaaaauaaguauccugcccugaacgugaccaugcccaauaacgagaaauuugacaagcucuacauuuggggcguucaucacccugggacagauucugaccagaucucccuguaugcgcaggccagcggacgcgugaccgucuccacgaaaagaucucaacagacagugauuccgaacaucggcagccggccccgcgugagagacauuuccagccggaucucuauuuacuggaccaucgucaagccuggggauauccugcucauuaauuccacaggaaaccugaucgcuccccgcggcuacuucaagauuagaagcgggaaaucuagcaucaugcgguccgacgccccuauuggaaaguguaauucugagugcaucacccccaacggcagcaucccgaaugauaaaccuuuucagaacguuaaucgcauuaccuauggcgcuugucccagauacgugaagcagaacacacuuaaacuggccacggggaugcggaaugugccugaaaagcaaacccgcggaaucuucggcgcgauugccggguuuaucgagaacggaugggaaggcauggucgacgggugguauggauucagacaccaaaauuccgagggcacaggccaggcugccgaucucaaaagcacccaggcugccauuaaccagaucaaugggaagcugaaccggcuuaucgagaagacaaaugaaaaauuucaucagauugagaaggaguucucugaaguggaaggaagaauccaggaccuggagaaauacguugaggauaccaagauugaccucugguccuauaacgccgaacugcugguggcucucgagaaccaacacacgaucgaucugacagacagcgaaaugaauaaacuuuucgagcgcaccaagaagcagcugcgggaaaacgcggaggauaugggcaaugggugcuuuaaaauuuaccauaagugugacaacgccugcaucggaucuauuagaaauggcaccuaugaccacgaugucuaccgcgacgaggcucucaacaaucgguuccagaucaaagggguggaacugaaguccggcuacaaagauuggauccuuuggauuagcuuugccaucuccugcuuccugcucuguauuguucugcugggauuuaucaugugggccugccagaagggcaacauuagauguaauaucugcaucuga

SEQ ID NO: 192260 - RNA, 1701 nt, Artificial Sequence
  derived and/or modified CDS sequence (opt5) from hemagglutinin__InfluenzaA__AAY64302
augaagaccaucauugcccugagcuacauccucugccugguguucgcucagaaacuucccggcaacgacaauuccacagccacgcugugucucgggcaccaugcggucccuaacggaacccugguuaagacaauuaccucugaucaaaucgaggugacaaaugcuaccgaacuugugcagagcuccucuacaggcagaauuugcgacagcccgcaccggauccuggauggggagaacuguacccucaucgacgcccugcugggagauccccauugcgacggcuuucagaauaaagaaugggaucucuucgucgagcgcuccaaggccuauucuaacuguuacccuuaugacgugcccgauuacgcuagccugagaucccuuguugccagcucugggacgcuggaauuuaauaacgaguccuucaauuggaccggaguggcucagaacggcaccagcuuugccugcaaacggcgcucuauuaaguccuucuuuagcagacucaauuggcugcaccaacuuaaguauaaauacccugcgcugaacgucacaaugcccaauaacgacaaguucgauaaacucuauaucuggggcgugcaucacccuucuacagacuccgaucagaccagccuguacgcccaggcuuccgggcggguuacggugucuacaaagcgcagccagcaaaccgucauuccgaauaucggauccagacccugggugcggggcgugagcucucgcauuuccaucuacuggacaauugucaaaccuggggacauccugcucaucaacagcaccggaaaccugauugcccccagaggcuauuuuaagauccggucuggaaagagcuccauuaugaaaucugacgcuccuaucgggaaguguaauagcgagugcauuacccccaacggcuccaucccgaaugauaaaccuuuccagaacguuaaucgcaucacauacggcgccugucccagauaugugaagcagaacacgcuuaaacuggcgaccgggaugcggaaugugccugaaaagcagacacgcggaauuuuuggcgccaucgcuggguucauugagaacggaugggaaggcauggucgacgggugguacggauuuagacaccaaaauagcgagggcaccggccaggccgcugaucucaaaucuacacaggccgccaucaaccaaauuaaugggaagcugaaccggcuuaucgagaagaccaaugaaaaauuccaucagaucgagaaggaguucacggaaguggaaggacgcauucaggaccuggagaaauauguugaggauacaaagaucgaccucugguccuacaacgcugaacugcugguggcgcucgagaaucagcacaccauugaucugaccgacagcgaaaugaacaaacuuuuugagagaacacggaagcaacugagagaaaacgccgaggauaugggcaaugggugcuucaagaucuaucauaaaugugacaacgucugcauuggaucuauccgcaauggcaccuacgaucacgacguguaccgggacgaggcucucaacaauagauuucagauuaaggggguugaacugaaauccggcuauaaggauuggauccuuuggaucagcuucgccacauccugcuuucugcucugugugguccugcugggauucauuaugugggccugccagaaaggcaacauccgcuguaauauuugcaucuga

SEQ ID NO: 192261 - RNA, 1701 nt, Artificial Sequence; identical to SEQ ID NO: 192255
  derived and/or modified CDS sequence (opt5) from hemagglutinin__InfluenzaA__AAY64312

SEQ ID NO: 192262 - RNA, 1701 nt, Artificial Sequence; identical to SEQ ID NO: 192258
  derived and/or modified CDS sequence (opt5) from hemagglutinin__InfluenzaA__AAY64322

SEQ ID NO: 192263 - RNA, 1701 nt, Artificial Sequence
  derived and/or modified CDS sequence (opt5) from hemagglutinin__InfluenzaA__AAY64332
augaagaccaucauugcccugagcuacauccucugccugguguucacacagaaacuucccggcaacgacaauuccacggcuacccugugucucgggcaccaugccgucccuaacggaacaauuguuaagaccaucacaaaugaucaaauugaggugaccaacgcgacagaacuggugcagucuagcuccaccggcgggaucugcgacucuccgcaccagauccuugauggagagaauuguacgcugauugacgcucuccugggcgauccccagugcgacggguuucaaaacaaaaagugggaucuguucgucgaaagaagcaaagccuauuccaauuguuacccuuaugacgugcccgauuacgccucucuccggagccugguugcuuccagcggaacccuugaguuuaacaaugaaucuuucgacuggacaggcgugacccagaacggcacauccagcgccugcaagcgcagaucuaauaaguccuuuuucagccggcugaacuggcucacccaucugaaauuuaaguauccugcucuuaaugucacgaugcccaacaaugagaaauucgauaagcuguacaucuggggagugcaccauccugggacagacucugaucagauuucccucuaugcccaggcgagcggccgcaucaccguuuccacaaaaagaucucaacagaccgugauuccgaacaucgggagccggccccgcgucagagacguguccagccggauuucuaucuacuggaccaucgugaagccuggagacauucugcugaucaacuccacaggcaaucucauugcccccagaggguacuuuaagaucagaagcggaaaaucuagcauuaugcgguccgaugcuccuaucggcaaguguaacucugagugcaucacgcccaauggcagcauuccgaacgacaaaccuuuccagaaugucaaccgcaucaccuauggggccugucccagauacguuaagcagaauacacugaaacuugcuaccggaaugcggaacgugccugaaaagcaaacacgcggcauuuuuggggccaucgcgggauucauugagaauggcugggaagggaugguggauggaugguauggcuuuagacaccagaacuccgagggcaccgggcaggccgcugaccugaaaagcacgcaagccgcuaucaaucagaucaacggaaagcucaaucggcugauuggcaagacaaacgagaaauuccaccagaucgaaaaggaguucucugaagucgaggggcgcauucaggaucuugaaaaauacguggaggacaccaagaucgaucugugguccuauaaugccgagcuccugguugcccuggaaaaccaacauaccauugaccucacagauagcgagaugaacaaacuguuugaacgcaccaagaagcagcuucgggagaaugcugaagacaugggaaacggcugcuucaaaaucuaccacaagugugauaaugcgugcauugggucuaucagaaacggcacauaugaccaugacguguaccgcgaugaggcccugaauaaccgguuucagaucaaaggagucgagcucaaguccggcuacaaagacuggauucuguggaucagcuucgcuauuuccugcuuucuucuguguguggcccuccugggguucaucaugugggccugccagaagggaaauauuagaugugauaucugcaucuga

SEQ ID NO: 192264 - RNA, 1701 nt, Artificial Sequence
  derived and/or modified CDS sequence (opt5) from hemagglutinin__InfluenzaA__AAY64342
augaagaccaucauugcccugagcuacauccucugccugguguucgcucagaaacuucccggcaacgacaauuccacagccacgcugugucucgggcaccaugcggucccuaacggaacccugguuaagacaauuaccaaugaucaaaucgaggugacaaacgcuaccgaacuugugcagucuagcuccacaggcagaauuugcgacucuccgcaccagauccuggauggggagaauuguacccucaucgacgcccugcugggagauccccauugcgacggcuuucagaacaaagaaugggaucucuucgucgagcggagcaaggccuauuccaauuguuacccuuaugacgugcccgauuacgcuucucugcgcagccuuguugccuccagcgggacgcuggaauuuaacaaugagucuuucaacuggaccggaguggcucaaaauggcacauccagcgccugcaaaagacggucuaacaaguccuuuuucagccgccucaauuggcugcaccagcuuaaguauaaauacccugcgcugaacgucaccaugcccaauaacgagaaguuugacaaacucuauauuuggggcgugcaucacccuucuacagauuccgaccagaucagccuguacgcccaggcuuccgggagaguuaccgugucuacgaagcggagccaacagacagucauuccgaacaucggaucccgccccugggugagaggcgugagcucucggauuuccaucuacuggaccauugucaaaccuggggauauccugcucaucaauagcacaggaaaccugauugcccccagaggcuauuucaagaucagaucuggaaagagcuccauuaugcggucugacgcuccuaucgggaaauguaauagcgaaugcauuacccccaacggcuccaucccgaaugacaagccuuuucagaacguuaaucgcaucaccuacggcgccugucccagauaugugaaacagaacacacuuaagcuggcgacggggaugcggaaugugccugagaaacaaacccgcggaauuuucggcgccaucgcuggguuuauugaaaacggaugggagggcauggucgaugggugguacggauucagacaccagaauagcgagggcacaggccaggccgcugaccucaagucuacccaagccgccaucaaccagauuaaugggaaacugaaccggcuuaucgaaaagacaaaugagaaguuucaucagaucgaaaaagaguucuccgaaguggagggacgcauucaggaucuggagaaguauguugaagacaccaaaaucgaucucuggagcuacaacgcugagcugcugguggcgcucgaaaaccaacacacgauugaccugacagauucugagaugaauaaacuuuucgaacgcaccaagaagcagcugcgggagaacgccgaggacaugggcaaugggugcuuuaagaucuaucauaaaugugauaacgcuugcauuggauccaucagaaauggcaccuacgaccacgaugucuaccgcgacgaagcccucaacaaucgguuccagauuaaggggguggagcugaaaagcggcuauaaggacuggauccuuuggaucuccuuugccacaucuugcuuccugcucuguguugugcugcugggauuuauuaugugggcuugccagaaaggcaacaucagauguaauauuugcaucuga

SEQ ID NO: 192265 - RNA, 1701 nt, Artificial Sequence; identical to SEQ ID NO: 192104
  derived and/or modified CDS sequence (opt5) from hemagglutinin__InfluenzaA__AAY64352

SEQ ID NO: 192266 - RNA, 1701 nt, Artificial Sequence
  derived and/or modified CDS sequence (opt5) from hemagglutinin__InfluenzaA__AAY64362
augaagaccaucauugcccugagcuacauccucugccugguguucgcucagaaacuucccggcaacgacaauuccacagccacgcugugucucgggcaccaugcggucccuaacggaaccauuguuaagacaaucaccaaugaucaaauugaggugacaaacgcuaccgaacuggugcagucuagcuccacaggcgagaucugcgacucuccgcaccagauccuugauggggaaaauuguacccugauugacgcccuccugggagauccccagugcgacggcuuucaaaacaaaaagugggaucuguucgucgagagaagcaaagccuauuccaauuguuacccuuaugacgugcccgauuacgcuucucuccggagccugguugccuccagcgggacgcuugaauuuaacaaugagucuuucgacuggaccggagugacacagaacggcaccuccagcgcuugcaagcgcagaucuaauaaguccuuuuucagccggcugaacuggcucacacaucugaaauauaaguacccugcccuuaaugucaccaugcccaacaaugagaaauuugauaagcuguauaucuggggcgugcaccauccugggacggacucugaucagauuucccucuacgcgcaggccagcggacgcaucacaguuuccaccaaaagaucucaacagacagugauuccgaacaucggcagccggccccgcgucagagacauuuccagccggaucucuaucuacuggaccauugugaagccuggggacauccugcugauuaacuccaccggaaaucucaucgcuccccgcggcuauuucaagauuagaagcgggaaaucuagcaucaugcgguccgaugccccuaucggaaaguguaacucugaaugcauuacacccaauggcagcaucccgaacgacaaaccuuuucagaaugugaaccgcauuacguacggcgcuugucccagauauaucaagcagaauacccugaaacuugccacagggaugcggaacgucccugagaagcaaacccgcggaauuuucggcgcgaucgccggguuuaucgaaaauggaugggagggcaugguugaugggugguacggauucagacaccagaacuccgagggcacaggccaggcugccgaccugaaaagcacccaagcugccauuaaucagaucaacgggaagcucaaucggcugauuggaaagacgaacgaaaaauuucaccagaucgagaaggaguucucugaaguggaaggccgcauucaggaucuugagaaauauguggaggacacaaagaucgaucugugguccuacaaugccgaacuccuggucgcucuggagaaccaacauaccauugaccucaccgauagcgaaaugaacaaacuguucgagagaacaaagaagcagcuucgggaaaaugcggaggacauggggaacggaugcuuuaaaaucuaucacaagugugauaaugccugcaucggcucuauuagaaacgggaccuacgaccaugacguguaccgcgaugaggcucugaauaaccgguuccagaucaaaggcguugaacucaaguccggauauaaagacuggauucuguggaucagcuuugccauuuccugcuuccuucuguguguggcccuccugggcuuuaucaugugggcuugccagaaggggaauaucagauguaacauuugcaucuga

SEQ ID NO: 192267 - RNA, 1701 nt, Artificial Sequence; identical to SEQ ID NO: 192258
  derived and/or modified CDS sequence (opt5) from hemagglutinin__InfluenzaA__AAY64382

SEQ ID NO: 192268 - RNA, 1701 nt, Artificial Sequence
  derived and/or modified CDS sequence (opt5) from hemagglutinin__InfluenzaA__AAY64392
augaagaccaucauugcccugagcuacauccucugccugguguucgcucagaaacuucccggcaacgacaauuccacagccacgcugugucucgggcaccaugcggucccuaacggaaccauuguuaagacaaucaccaaugaucaaauugaggugacaaacgcuaccgaacuggugcagucuagcuccacaggcgggaucugcgacucuccgcaccagauccuugauggagagaauuguacccugauugacgcccuccugggcgauccccagugcgacggguuucaaaacaaaaagugggaucuguucgucgaaagaagcaaagccuauuccaauuguuacccuuaugacgugcccgauuacgcuucucuccggagccugguugccuccagcggaacgcuugaguuuaacaaugaaucuuucaacuggaccggcgugacacagaauggcaccuccagcgcuugcaagcgcagaucuaacaaguccuuuuucagccggcugaauuggcucacacaucugaaauauaaguacccugcccuuaacgucaccaugcccaauaacgagaaauuugacaagcuguauaucuggggagugcaccauccugggacggauaacgaccagauuucucucuacgcgcaggccuccggccgcaucacaguuagcaccaaaagaucccaacagacagugauuccgaauaucgggucucggccccgcgucagagaugugagcucccggauuagcaucuacuggaccaucgugaagccuggagacauucugcugaucaacucuaccggcaaucucauugcuccccgcggguauuucaagaucagauccggaaaaagcucuauuaugcggagcgacgccccuaucggcaaguguaacuccgagugcaucacacccaauggcucuauuccgaacgauaaaccuuuucagaaugucaaccgcaucacguacggggcuugucccagauauguuaagcagaauacccugaaacuugccacaggaaugcggaacgugccugaaaagcaaacccgcggcauuuucggggcgaucgccggauuuauugagaauggcugggaagggaugguggacggaugguacggcuucagacaccagaacagcgagggcacagggcaggcugccgaucugaaauccacccaagcugccaucaaucagaucaacggaaagcucaaucggcugauuggcaagacgaacgagaaauuucaccagaucgaaaaggaguucagcgaagucgaggggcgcauucaggaccuugaaaaauauguggaggauacaaagaucgaccuguggucuuacaacgccgagcuccugguugcucuggaaaaucaacauaccauugaucucaccgacuccgagaugaacaaacuguucgaaagaacaaagaagcagcuucgggagaaugcggaagauaugggaaacggcugcuuuaaaaucuaucacaagugugacaaugccugcauugggagcaucagaaacggcaccuacgaucaugacguguaccgcgacgaggcucugaauaaccgguuccagaucaaaggagucgagcucaagucuggcuauaaagauuggauucuguggaucuccuuugccauuagcugcuuccuucuguguguggcccuccugggguuuaucaugugggcuugccagaagggaaauauuagauguaacaucugcaucuga

SEQ ID NO: 192269 - RNA, 1701 nt, Artificial Sequence; identical to SEQ ID NO: 192260
  derived and/or modified CDS sequence (opt5) from hemagglutinin__InfluenzaA__AAY64402

SEQ ID NO: 192270 - RNA, 1701 nt, Artificial Sequence; identical to SEQ ID NO: 192258
  derived and/or modified CDS sequence (opt5) from hemagglutinin__InfluenzaA__AAY98037

SEQ ID NO: 192271 - RNA, 1701 nt, Artificial Sequence; identical to SEQ ID NO: 192258
  derived and/or modified CDS sequence (opt5) from hemagglutinin__InfluenzaA__AAY98047

SEQ ID NO: 192272 - RNA, 1701 nt, Artificial Sequence; identical to SEQ ID NO: 192119
  derived and/or modified CDS sequence (opt5) from hemagglutinin__InfluenzaA__AAY98057

SEQ ID NO: 192273 - RNA, 1701 nt, Artificial Sequence
  derived and/or modified CDS sequence (opt5) from hemagglutinin__InfluenzaA__AAY98067
augaagaccaucauugcccugagcuacauccucugccugguguucgcucaggagcuucccggcaacgacaauuccacagccacgcugugucucgggcaccaugcggucccuaacggaacccugguuaaaacaauuaccaaugaucaaaucgaagugacaaacgcuaccgagcuugugcagucuagcuccacaggcagaauuugcgacucuccgcaccagauccuggauggggaaaauuguacccucaucgacgcccugcugggagauccccauugcgacggcuuucagaacaaggagugggaucucuucgucgaacggagcaaagccuauuccaauuguuacccuuaugacgugcccgauuacguuucucugcgcagccuuguggcuuccagcgggacgcuggaguuuaacaaugagucuuucaacuggaccggagucgcccaaaauggcacauccagcgcuugcaagagacggucugacaaauccuuuuucagccgccucaacuggcugcaccagcuuaaguauaaguacccugcccugaaugugaccaugcccaacaaugaaaaauuugauaagcucuauauuuggggcguucaucacccugggacagacucugaucagaucucccuguacgcgcaggccagcggaagagugaccgucuccacgaaacggucucaacagacagugauuccgaacaucggcagcgggcccugggugcgcggagucuccagcagaauuucuaucuacuggaccauuguuaagccuggcgacauccugcucaucaacuccacagggaaucugauugcuccccggggauauuucaaaauccgcagcggcaagucuagcauuaugagauccgacgccccuaucggcaaguguaacucugagugcauuacccccaaugggagcaucccgaacgauaaaccuuuucagaaugugaaccggaucaccuacggacccuguccucgcuaugugaagcagaauacacuuaaacuggcuacgggcaugagaaacguccccgaaaagcaaacccgggggauuuucggagccaucgcgggcuuuauugagaaugggugggagggaaugauggacggcugguacggcuuccgccaccagaacuccgaagggacaggacaggccgcugaucucaaaagcacccaagccgcuaucaaucagauuaacggcaagcugaauagacuuaucgagaaaacaaacgaaaaguuucaucagaucgagaaggaguucucugaaguggaggggcggauucaggaccuggaaaaauauguugaggauaccaagaucgaccucugguccuacaaugccgaacugcugguggcccucgagaaccaacacacgauugaucugacagacagcgaaaugaacaaacuuuucgagagaaccaagaaacagcugcgcgagaaugcugaagauaugggaaacggcugcuuuaagaucuaucauaagugugacaaugcgugcauugggucuauccggaacggcaccuacgaucacgacgucuacagagacgaggcccucaauaaccgcuuccagauuaaaggaguggaacugaaguccggcuauaaagauuggauccuuuggaucagcuuugcuauuuccugcuuccugcucuguaucguucugcugggguuuauuaugugggccugccagaagggaaauauccgguguaacauuugcaucuga

SEQ ID NO: 192274 - RNA, 1701 nt, Artificial Sequence
  derived and/or modified CDS sequence (opt5) from hemagglutinin__InfluenzaA__AAY98077
augaagaccaucauugcccugagcuacauccucugccugguguucgcucagaaacuucccggcaacgacaauuccacagccacgcugugucucgggcaccaugcggucccuaacggaacccugguuaagacaauuaccaaugaucaaaucgaggugacaaacgcuaccgaacuugugcagucuagcuccgccucuagaauuugcgacagcccgcaccagauccuggauggcgagaauuguacacucaucgacgcccugcugggggauccccauugcgacggauuucagaacaaagaaugggaucucuucgucgagcgguccaaggcuuauucuaauuguuacccuuaugacgugcccgauuacguuagccugcgcucccuuguggccagcucuggcacccuggaauuuaacaaugaguccuucaacuggacgggggucgcucaaaauggaaccagcucugccugcaaaagacgguccgacaagagcuuuuucucucgccucaacuggcugcaccagcuuaaguauaaauacccugcgcugaaugugacaaugcccaacaaugagaaguuugauaaacucuauauuuggggcguucaucacccuggcaccgacuccgaucagaucagccuguacgcccaggcuuccgggagagugacagucucuaccaagcggagccaacagacggugauuccgaacaucggaucccgccccugggugagaggcgucagcucucggauuuccaucuacuggacaauuguuaaaccuggggacauccugcucaucaacagcaccggaaaucugauugcccccagaggcuauuucaagaucagaucuggaaagagcuccauuaugcggucugacgcuccuaucgggaaauguaacagcgaaugcauuacacccaauggcuccaucccgaacgauaagccuuuucagaaugugaaccgcaucaccuacggcgccugucccagauaugugaaacagaauacccuuaagcuggcgacagggaugcggaacgucccugagaaacaaacgcgcggaauuuucggcgccaucgcuggguuuauugaaaauggaugggagggcaugauggacgggugguacggauucagacaccagaacagcgagggcaccggccaggccgcugaucucaagucuacacaagccgccaucaaucagauuaacgggaaacugaaucggcuuaucgaaaagaccaacgagaaguuucaucagaucgaaaaagaguucuccgaaguggagggacgcauucaggaccuggagaaguauguugaagauacaaaaaucgaccucuggagcuacaaugcugagcugcugguggcgcucgaaaaccaacacaccauugaucugacggacucugagaugaacaaacuuuucgaacgcacaaagaagcagcugcgggagaaugccgaggauaugggcaacgggugcuuuaagaucuaucauaaaugugacaaugcuugcauuggauccaucagaaacggcaccuacgaucacgacgucuaccgcgacgaagcccucaauaaccgguuccagauuaaggggguggagcugaaaagcggcuauaaggauuggauccuuuggaucuccuuugccauuucuugcuuccugcucuguaucguucugcugggauuuauuaugugggcuugccagaaaggcaauaucagauguaacauuugcaucuga

SEQ ID NO: 192275 - RNA, 1701 nt, Artificial Sequence
  derived and/or modified CDS sequence (opt5) from hemagglutinin__InfluenzaA__AAY98087
augaagaccaucauugcccugagcuacauccucugccugguguucgcucagaaacuucccggcaacgacaauuccacagccacgcugugucucgggcaccaugcggucccuaacggaacccugguuaagacaauuaccaaugaucaaaucgaggugacaaacgcuaccgaacuugugcagucuagcuccacaggcagaauuugcgacucuccgcaccggauccuggauggggagaauuguacccucaucgacgcccugcugggagauccccauugcgacggcuuucagaacaaagaaugggaucucuucgucgagcgcagcaaggccuauuccaauuguuacccuuaugacgugcccgauuacgcuucucugagaagccuuguugccuccagcgggacgcuggaauuuaacaaugagucuuucaacuggaccggaguggcucagaauggcacauccagcgccugcaaacggcgcucuauuaaguccuuuuucagcagacucaacuggcugcaccaacuuaaguauaaauacccugcgcugaaugucaccaugcccaacaaugacaaguuugauaaacucuauaucuggggcgugcaucacccuucuacagacuccgaucagaccagccuguacgcccaggcuuccgggcggguuacggugucuacaaagcgcagccagcaaaccgucauuccgaacaucggauccagacccugggugcggggcgugagcucucgcauuuccaucuacuggacaauugucaaaccuggggacauccugcucaucaacagcaccggaaaucugauugcccccagaggcuauuucaagauccggucuggaaagagcuccauuaugcgcucugacgcuccuaucgggaaauguaacagcgagugcauuacccccaauggcuccaucccgaacgauaagccuuuucagaauguuaacagaaucacauacggcgccuguccccgguaugugaaacagaauacgcuuaagcuggcgaccgggaugcgcaacgugccugaaaaacagacaagaggaauuuucggcgccaucgcuggguuuauugagaauggaugggaaggcauggucgacgggugguacggauuccggcaccaaaacagcgagggcaccggccaggccgcugaucucaagucuacacaggccgccaucaaucaaauuaacgggaaacugaauagacuuaucgagaagaccaacgaaaaguuucaucagaucgagaaagaguucuccgaaguggaaggacgcauucaggaccuggagaaguauguugaggauacgaaaaucgaccucuggagcuacaaugcugaacugcugguggcgcucgagaaccagcacacaauugaucugaccgacucugaaaugaacaagcuguucgagcggaccagaaaacaacugcgcgaaaaugccgaggauaugggcaacgggugcuuuaagaucuaucauaagugugacaaugcuugcauuggauccauccggaacggcacauacgaucacgacgucuacagagacgaggcccucaauaaccgcuuccagauuaaagggguggaacuuaagagcggcuauaaagauuggauccuuuggaucuccuuugccauuucuugcuuccugcucuguguugugcugcugggauuuaucaugugggcuugccagaagggcaauauucgguguaacaucugcauuuga

SEQ ID NO: 192276 - RNA, 1701 nt, Artificial Sequence; identical to SEQ ID NO: 192258
  derived and/or modified CDS sequence (opt5) from hemagglutinin__InfluenzaA__AAY98097

SEQ ID NO: 192277 - RNA, 1701 nt, Artificial Sequence; identical to SEQ ID NO: 192258
  derived and/or modified CDS sequence (opt5) from hemagglutinin__InfluenzaA__AAY98107

SEQ ID NO: 192278 - RNA, 1701 nt, Artificial Sequence
  derived and/or modified CDS sequence (opt5) from hemagglutinin__InfluenzaA__AAY98117
augaagaccaucauugcccugagcuacauccucugccugguguucgcucagaaacuucccggcaacgacaauuccacagccacgcugugucucgggcaccaugcggucccuaacggaacccugguuaagacaauuaccaaugaucaaaucgaggugacaaacgcuaccgaacuugugcagucuagcuccacaggcagaauuugcgacucuccgcaccagauccuggauggggagaauuguacccucaucgacgcccugcugggagauccccauugcgacggcuuucagaacaaagaaugggaucucuucgucgagcggagcaaggccuauuccaauuguuacccuuaugacgugcccgauuacgcuucucugcgcagccuuguugccuccagcgggacgcuggaauuuaacaaugagucuuucaacuggaccggaguggcucaaaauggcacauccagcgccugcaaaagaggcucuaacaaguccuuuuucagccggcucaauuggcugcaccagcuuaaguauaaauacccugcgcugaacgucaccaugcccaauaacgagaaguuugaaaaacucuauauuuggggagugcaucacccuucuacagacuccgaucagaucagccuguacgcccaggcuuccgggcgcguuaccgugucuacgaagagaagccaacagacagucauuccgaacaucggcucccggcccugggugcgcggggugagcucuagaauuuccaucuacuggaccauugucaaaccuggagacauccugcucaucaauagcacaggcaaccugauugcuccccggggguauuucaagauccgcucuggaaagagcuccauuaugagaucugaugccccuaucggcaaauguaauagcgagugcauuacccccaacggcuccaucccgaaugacaagccuuuucagaacguuaaucggaucaccuacggggccuguccccgcuaugugaaacagaacacacuuaagcuggcgacgggaaugagaaaugugccugaaaaacaaacccggggcauuuucggggccaucgcuggauuuauugagaacggcugggaggggauggucgacggaugguacggcuuccgccaccagaauagcgaaggcacagggcaggccgcugaucucaagucuacccaagccgccaucaaccagauuaauggaaaacugaacagacuuaucgagaagacaaaugaaaaguuucaucagaucgagaaagaguucuccgaaguggagggccggauucaggaccuggaaaaguauguugaggauaccaaaaucgaccucuggagcuacaacgcugaacugcugguggcgcucgagaaccaacacacgauugaucugacagacucugaaaugaauaaacuuuucgagagaaccaagaagcagcugcgcgagaacgccgaagauauggggaauggaugcuuuaagaucuaucauaaaugugacaacgcuugcauuggcuccauccggaaugggaccuacgaucacgacgucuacagagaugaggcccucaacaaucgcuuccagauuaagggcguggaacugaaaagcggauauaaggacuggauccuuuggaucuccuuugccauuucuugcuuccugcucuguguugugcugcugggcuuuaucaugugggcuugccagaaagggaacauucgguguaauaucugcauuuga

SEQ ID NO: 192279 - RNA, 1701 nt, Artificial Sequence; identical to SEQ ID NO: 192258
  derived and/or modified CDS sequence (opt5) from hemagglutinin__InfluenzaA__AAY98147

SEQ ID NO: 192280 - RNA, 1701 nt, Artificial Sequence; identical to SEQ ID NO: 192258
  derived and/or modified CDS sequence (opt5) from hemagglutinin__InfluenzaA__AAY98157

SEQ ID NO: 192281 - RNA, 1701 nt, Artificial Sequence
  derived and/or modified CDS sequence (opt5) from hemagglutinin__InfluenzaA__AAY98167
augaagaccaucauugcccugagcuacauccucugccugguguucgcucagaaacuucccggcaacgacaauuccacagccacgcugugucucgggcaccaugcggucccuaacggaacccugguuaagacaauuaccaaugaucaaaucgaggugacaaacgcuaccgaacuugugcagucuagcuccacaggcagaauuugcgacucuccgcaccagauccuggauggggagaauuguacccucaucgacgcccugcugggagauccccauugcgacggcuuucagaacaaagaaugggaucucuucgucgagcggagcaaggccuauuccaauuguuacccuuaugacgugcccgauuacgcuucucugcgcagccuuguugccuccagcgggacgcuggaauuuaacaaugagucuuucaacuggaccggaguggcucaaaauggcacauccagcgccugcaaaagacggucuaacaaguccuuuuucagccgccucaauuggcugcaccagcuuaaguauaaauacccugcgcugaacgucaccaugcccaauaacgagaaguuugacaaacucuauauuuggggcgugcaucacccuucuacagauuccgaccagaucagccuguacgcccaggcuuccgggagaguuaccgugucuacgcaacggagccagcagacagucauuccgaacaucggaucccgccccugggugagaggcgugagcucucggauuuccaucuacuggaccauugucaagccuggggauauccugcucaucaauagcacaggaaaccugauugcccccagaggcuauuucaaaaucagaucugggaaaagcuccauuaugcggucugacgcuccuaucggaaaguguaauagcgaaugcauuacccccaacggcuccaucccgaaugacaaaccuuuucagaacguuaaucgcaucaccuacggcgccugucccagauaugugaagcaaaacacacuuaaacuggcgacggggaugcggaaugugccugagaagcagacccgcggaauuuucggcgccaucgcuggguuuauugaaaacggaugggagggcauggucgaugggugguacggauucagacaccagaauagcgagggcacaggccaagccgcugaccucaaaucuacccaggccgccaucaaccagauuaaugggaagcugaaccggcuuaucgaaaagacaaaugagaaguuucaucagaucgaaaaggaguucuccgaaguggagggacgcauucaagaucuggagaaauauguugaagacaccaagaucgaucucuggagcuacaacgcugagcugcugguggcgcucgaaaaccagcacacgauugaccugacagauucugagaugaauaaacuuuucgaacgcaccaagaaacagcugcgggagaacgccgaggacaugggcaaugggugcuuuaagaucuaucauaagugugauaacgcuugcauuggauccaucagaaauggcaccuacgaccacgaugucuaccgcgacgaagcccucaacaaucgguuccagauuaaagggguggagcuuaagagcggcuauaaagacuggauccuguggaucuccuuugccauuucuugcuuccugcucuguguugugcugcugggauuuaucaugugggcuugccaaaagggcaacauuagauguaauaucugcauuuga

SEQ ID NO: 192282 - RNA, 1701 nt, Artificial Sequence
  derived and/or modified CDS sequence (opt5) from hemagglutinin__InfluenzaA__AAY98177
augaagaccaucauugcccugagcuacauccucugccugguguucgcucagaaacuucccggcaacgacaauuccacagccacgcugugucucgggcaccaugcggucccuaacggaacccugguuaagacaauuaccaaugaucaaaucgaggugacaaacgcuaccgaacuugugcagucuagcuccacaggcagaauuugcgacucuccgcaccagauccuggauggggagaauuguacccucaucgacgcccugcugggagauccccauugcgacggcuuucagaacaaagaaugggaucucuucgucgagcggagcaaggccuauuccaauuguuacccuuaugacgugcccgauuacgcuucucugcgcagccuuguugccuccagcgggacgcuggaauuuaacaaugagucuuucaacuggaccggaguggcucaaaauggcacauccagcgccugcaaaagacggucuaacaaguccuuuuucagccgccucaauuggcugcaccagcuuaaguauaaauacccugcgcugaacgucaccaugcccaauaacgagaaguuugacaaacucuauauuuggggcgugcaucacccuucuacagauuccgaccagaucagccuguacgcccaggcuuccgggagaguuaccgugucuacgaagcggagccaacagacagucauuccgaacaucggaucccgccccugggugagaggcgugagcucucggauuuccaucuacuggaccauugucaaaccuggggauauccugcucaucaauagcacaggaaaccugauugcccccagaggcuauuucaagaucagaucuggaaagagcuccauuaugcggucugacgcuccuaucgggaaauguaauagcgaaugcauuacccccaacggcuccaucccgaaugacaagccuuuucagaacguuaaucgcaucaccuacggcgccugucccagauaugugaaacagaacacacuuaagcuggcgacggggaugcggaaugugccugagaaacaaacccgcggaauuuucggcgccaucgcuggguuuauugaaaacggaugggagggcauggucgaugggugguacggauucagacaccagaauagcgagggcacaggccaggccgcugaccucaagucuacccaagccgccaucaaccagauuaaugggaaacugaaccggcuuaucgaaaagacaaaugagaaguuucaucagaucgaaaaagaguucuccgaaguggagggacgcauucaggaucuggagaaguauguugaagacaccaaaaucgaucucuggagcuacaacgcuggccugcugguggcgcucgagaaccaacacacgauugaccugacagauucugaaaugaauaaacuuuucgagcgcaccaagaagcagcugcgggaaaacgccgaggacauggggaauggaugcuuuaagaucuaucauaaaugugauaacgcuugcauuggcuccaucagaaaugggaccuacgaccacgaugucuaccgcgacgaggcccucaacaaucgguuccagauuaagggcguggaacugaaaagcggauauaaggacuggauccuuuggaucuccuuugccauuucuugcuuccugcucuguguugugcugcugggcuuuaucaugugggcuugccagaaagggaacauuagauguaauaucugcauuuga

SEQ ID NO: 192283 - RNA, 1701 nt, Artificial Sequence
  derived and/or modified CDS sequence (opt5) from hemagglutinin__InfluenzaA__AAY98195
augaagaccaucauugcccugagcuacauccucugccugguguucgcucagaaacuucccggcaacgacaauuccacagccacgcugugucucgggcaccaugcggucccuaacggaacccugguuaagacaauuaccaaugaucaaaucgaggugacaaacgcuaccgaacuugugcagucuagcuccacaggcagaauuugcgacucuccgcaccagauccuggauggggagaauuguacccucaucgacgcccugcugggagauccccauugcgacggcuuucagaacaaagaaugggaucucuucgucgagcggagcaaggccuauuccaauuguuacccuuaugacgugcccgauuacgcuucucugcgcagccuuguugccuccagcgggacgcuggaauuuaacaaugagucuuucaacuggaccggaguggcucaaaauggcacauccagcgccugcaaaagacggucuaacaaguccuuuuucagccgccucaauuggcugcaccagcuuaaguauaaauacccugcgcugaacgucaccaugcccaauaacgagaaguuugacaaacucuauauuuggggcgugcaucacccuucuacagauuccgaccagaucagccuguacgcccaggcuuccgggagaguuaccgugucuacgaagcggagccaacagacagucauuccgaacaucggaucccgccccugggugagaggcgugagcucucggauuuccaucuacuggaccauugucaaaccuggggauauccugcucaucaauagcacaggaaaccugauugcccccagaggcuauuucaagaucagaucuggaaagagcuccauuaugcggucugacgcuccuaucgggaaauguaauagcgaaugcauuacccccaacggcuccaucccgaaugacaagccuuuucagaacguuaaucgcaucaccuacggcgccugucccagauaugugaaacagaacacacuuaagcuggcgacggggaugcggaaugugccugagaaacaaacccgcggaauuuucggcgccaucgcuggguuuauugaaaacggaugggagggcauggucgaugggugguacggauucagacaccagaauagcgagggcacaggccaggccgcugaccucaagucuacccaagccgccaucaaccagauuaaugggaaacugaaccggcuuaucgaaaagacaaaugagaaguuucaucagaucgaaaaagaguucuccgaaguggagggacgcauucaggaucuggagaaguauguugaagacaccaaaaucgaucucuggagcuacaacgcugagcugcugguggcgcucgaaaaccaacacacgauugaccugacagauucugagaugaauaagcuguucgaacgcacccggaaacagcugagagagaacgccgaggacaugggcaaugggugcuuuaagaucuaucauaagugugauaacgcuugcauuggauccauccgcaauggcaccuacgaccacgaugucuaccgggacgaagcccucaacaauagauuccagauuaaagggguggagcuuaagagcggcuauaaagacuggauccuuuggaucuccuuugccauuucuugcuuccugcucuguguugugcugcugggauuuaucaugugggcuugccagaagggcaacauucgcuguaauaucugcauuuga

SEQ ID NO: 192284 - RNA, 1701 nt, Artificial Sequence; identical to SEQ ID NO: 192258
  derived and/or modified CDS sequence (opt5) from hemagglutinin__InfluenzaA__AAY98207

SEQ ID NO: 192285 - RNA, 1701 nt, Artificial Sequence; identical to SEQ ID NO: 192260
  derived and/or modified CDS sequence (opt5) from hemagglutinin__InfluenzaA__AAY98217

SEQ ID NO: 192286 - RNA, 1701 nt, Artificial Sequence; identical to SEQ ID NO: 192258
  derived and/or modified CDS sequence (opt5) from hemagglutinin__InfluenzaA__AAY98227

SEQ ID NO: 192287 - RNA, 1701 nt, Artificial Sequence; identical to SEQ ID NO: 192258
  derived and/or modified CDS sequence (opt5) from hemagglutinin__InfluenzaA__AAY98237

SEQ ID NO: 192288 - RNA, 1701 nt, Artificial Sequence
  derived and/or modified CDS sequence (opt5) from hemagglutinin__InfluenzaA__AAY98247
augaagaccaucauugcccugagcuacauccucugccugguguucgcucagaaacuucccggcaacgacaauuccacagccacgcugugucucgggcaccaugcggucccuaacggaacccugguuaagacaauuaccaaugaucaaaucgaggugacaaacgcuaccgaacuugugcagucuagcuccacaggcagaauuugcgacucuccgcaccagauccuggauggggagaauuguacccucaucgacgcccugcugggagauccccauugcgacggcuuucagaacaaagaaugggaucucuucgucgagcggagcaaggccuauuccaauuguuacccuuaugacgugcccgauuacgcuucucugcgcagccuuguugccuccagcgggacgcuggaauuuaacaaugagucuuucaacuggaccggaguggcucaaaauggcacauccagcgccugcaaaagacggucuaacaaguccuuuuucagccgccucaauuggcugcaccagcuuaaguauaaauacccugcgcugaacgucaccaugcccaauaacgagaaguuugacaaacucuauauuuggggcgugcaucacccuucuacagauuccgaccagaucagccuguacgcccaggcuuccgggagaguuaccgugucuacgaagcggagccaacagacagucauuccgaacaucggaucccgccccugggugagaggcgugagcucucggauuuccaucuacuggaccauugucaaaccuggggauauccugcucaucaauagcacaggaaaccugauugcuccccgcggcuauuucaagaucagaucuggaaagagcuccauuaugcggucugacgccccuaucgggaaauguaauagcgaaugcauuacccccaacggcuccaucccgaaugacaagccuuuucagaacguuaaucgcaucaccuacggcgccugucccagauauauuaaacagaacacacuuaagcuggcgacggggaugcggaaugugccugagaaacaaacccgcggaaucuucggcgccauugcuggguuuaucgaaaacggaugggagggcaugguggaugggugguacggauucagacaccagaauagcgagggcacaggccaggccgcugaccucaagucuacccaagccgccauuaaccagaucaaugggaaacugaaccggcuuaucgaaaagacaaaugagaaguuucaucagauugaaaaagaguucuccgaagucgagggaagaauccaggaucuggagaaguauguggaagacaccaaaauugaucucuggagcuacaacgcugagcugcugguugcgcucgaaaaccaacacacgaucgaccugacagauucugagaugaauaaacuuuucgaacgcaccaagaagcagcugcgggagaacgccgaggacaugggcaaugggugcuuuaagauuuaucauaaaugugauaacgcuugcaucggauccauuagaaauggcaccuacgaccacgauguguaccgcgacgaagcccucaacaaucgguuccagaucaagggggucgagcugaaaagcggcuauaaggacuggauccuuuggauuuccuuugccaucucuugcuuccugcucugugugguucugcugggauuuauuaugugggcuugccagaaaggcaacaucagauguaauauuugcaucuga

SEQ ID NO: 192289 - RNA, 1701 nt, Artificial Sequence; identical to SEQ ID NO: 192258
  derived and/or modified CDS sequence (opt5) from hemagglutinin__InfluenzaA__AAY98319

SEQ ID NO: 192290 - RNA, 1701 nt, Artificial Sequence
  derived and/or modified CDS sequence (opt5) from hemagglutinin__InfluenzaA__AAY98329
augaagaccaucauugcccugagcuacauccucugccugguguucgcucagaaacuucccggcaacgacaauuccacagccacgcugugucucgggcaccaugcggucccuaacggaacccugguuaagacaauuaccaaugaucaaaucgaggugacaaacgcuaccgaacuugugcagucuagcuccacaggcagaauuugcgacucuccgcaccagauccuggauggggagaauuguacccucaucgacgcccugcugggagauccccauugcgacggcuuucagaacaaagaaugggaucucuucgucgagcggagcaaggccuauuccaauuguuacccuuaugacgugcccgauuacgcuucucugcgcagccuuguugccuccagcgggacgcuggaauuuaacaaugagucuuucaacuggaccggaguggcucaaaauggcacauccagcgccugcaaaagacggucuaacaaguccuuuuucagccgccucaauuggcugcaccagcuuaaguauaaauacccugcgcugaacgucaccaugcccaauaacgagaaguuugacaaacucuauauuuggggcgugcaucacccuucuacagauuccgaccagaucagccuguacgcccaggcucuggggagaguuaccguguccacgaagcggucucaacagacagucauuccgaacaucggaagccgccccugggugagaggcguguccagccggauuucuaucuacuggaccauugucaaaccuggggauauccuccugaucaauuccacaggaaaccuuauugcccccagaggcuauuucaagaucagaagcgggaagucuagcauuaugcgguccgacgcuccuaucggaaaauguaauucugaaugcauuacccccaacggcagcaucccgaaugacaagccuuuucagaacguuaaucgcaucaccuacggcgccugucccagauaugugaaacagaacacacugaagcucgcgacggggaugcggaaugugccugagaaacaaacccgcggaauuuucggcgccaucgcuggguuuauugaaaacggaugggagggcauggucgaugggugguacggauucagacaccucaauuccgagggcacaggccaggccgcugaccuuaagagcacccaggccgccaucaaccaaauuaaugggaaacugaaccggcucaucgaaaagacaaaugagaaguuucaucagaucgaaaaagaguucucugaaguggagggacgcauucaggaucuggagaaguauguugaagacaccaaaaucgaucugugguccuacaacgcugagcuccugguggcgcuugaaaaccagcacacgauugaccugacagauagcgagaugaauaagcuguucgaacgcaccaaaaagcaacugcgggagaacgccgaggacaugggcaaugggugcuuuaagaucuaucauaaaugugauaacgcuugcauuggaucuaucagaaauggcaccuacgaccacgaugucuaccgcgacgaagcccuuaacaaucgguuccagauuaaggggguggagcugaaauccggcuauaaggacuggauccucuggaucagcuuugccauuuccugcuuccugcuguguguugugcuccugggauuuaucaugugggcuugccagaaaggcaacauuagauguaauaucugcauuuga

SEQ ID NO: 192291 - RNA, 1701 nt, Artificial Sequence; identical to SEQ ID NO: 192258
  derived and/or modified CDS sequence (opt5) from hemagglutinin__InfluenzaA__AAY98339

SEQ ID NO: 192292 - RNA, 1701 nt, Artificial Sequence; identical to SEQ ID NO: 192258
  derived and/or modified CDS sequence (opt5) from hemagglutinin__InfluenzaA__AAY98353

SEQ ID NO: 192293 - RNA, 1701 nt, Artificial Sequence
  derived and/or modified CDS sequence (opt5) from hemagglutinin__InfluenzaA__AAY98366
augaagaccaucauugcccugagcuacauccucugccugguguucgcucagaaacuucccggcaacgacaauuccacagccacgcugugucucgggcaccaugcggucccuaacggaacccugguuaagacaauuaccucugaucaaaucgaggugacaaaugcuaccgaacuugugcagagcuccucuacaggcagaauuugcgacagcccgcaccggauccuggauggggagaacuguacccucaucgacgcccugcugggagauccccauugcgacggcuuucagaauaaagaaugggaucucuucgucgagcgcuccaaggccuauucuaacuguuacccuuaugacgugcccgauuacgcuagccugagaucccuuguugccagcucugggacgcuggaauuuaauaacgaguccuucaauuggaccggaguggcucagaacggcaccagcuuugccugcaaacggcgcucuauuaaguccuucuuuagcagacucaauuggcugcaccaacuuaaguauaaauacccugcgcugaacgucacaaugcccaauaacgacaaguucgauaaacucuauaucuggggcgugcaucacccugggacagacucugaucagaccucccuguacgcccaggcuagcggacggguuacgguguccacaaagcgcucucagcaaaccgucauuccgaauaucggcagcagacccugggugcgcgggguguccagccggauuucuaucuacuggacaauugucaaaccuggagacauccugcucaucaacuccaccggcaaccugauugcccccagaggguauuuuaagauccggagcggaaagucuagcauuaugcgcuccgacgcuccuaucggcaaauguaauucugagugcauuacccccaacggcagcaucccgaaugauaagccuuuccagaacguuaauagaaucacauacggggccuguccccgguaugugaaacagaacacgcuuaagcuggcgaccggaaugcgcaaugugccugaaaaacagacaagaggcauuuuuggggccaucgcuggauucauugagaacggcugggaagggauggucgacggaugguacggcuuucggcaccaaaauuccgagggcaccgggcaggccgcugaucucaagagcacacaggccgccaucaaccaaauuaauggaaaacugaacagacuuaucgagaagaccaaugaaaaguuccaucagaucgagaaagaguucacggaaguggaaggccgcauucaggaccuggagaaguauguugaggauacaaaaaucgaccucuggucuuacaacgcugaacugcugguggcgcucgagaaucagcacaccauugaucugaccgacuccgaaaugaacaaacuuuuugagcggacaagaaagcaacugcgcgaaaacgccgaggauauggggaauggaugcuucaagaucuaucauaagugugacaacgcuugcauuggcagcauccggaaugggaccuacgaucacgacgucuacagagacgaggcccucaacaaucgcuuucagauuaaaggcguggaacugaagucuggauauaaagauuggauccuuuggaucuccuucgccacaagcugcuuucugcucuguguugugcugcugggcuucauuaugugggcuugccagaaggggaacauccgguguaauauuugcaucuga

SEQ ID NO: 192294 - RNA, 1701 nt, Artificial Sequence
  derived and/or modified CDS sequence (opt5) from hemagglutinin__InfluenzaA__AAY98376
augaagaccaucauugcccugagcuacauccucugccugguguucgcucagaaacuucccggcaacgacaauuccacagccacgcugugucucgggcaccaugcggucccuaacggaacccugguuaagacaauuaccaaugaucaaaucgaggugacaaacgcuaccgaacuugugcagucuagcuccacaggcagaauuugcgacucuccgcaccagauccuggauggggagaauuguacccucaucgacgcccugcugggagauccccauugcgacggcuuucagaacaaagaaugggaucucuucgucgagcggagcaaggccuauuccaauuguuacccuuaugacgugcccgauuacgcuucucugcgcagccuuguugccuccagcgggacgcuggaauuuaacaaugagucuuucaacuggaccggaguggcucaaaauggcacauccagcgccugcaaaagacggucuauuaaguccuuuuucagccgccucaacuggcugcaccagcuuaaguauaaauacccugcgcugaaugucaccaugcccaacaaugacaaguuugauaaacucuauaucuggggcgugcaucacccuucuacagacuccgaucagaccagccuguacgcccaggcuuccgggagaguuacggugucuacaaagcggagccaacagaccgucauuccgaacaucggaucccgccccugggugagaggcgugagcucucggauuuccaucuacuggacaauugucaaaccuggggacauccugcucaucaacagcaccggaaaucugauugcccccagaggcuauuucaagaucagaucuggaaagagcuccauuaugcggucugacgcuccuaucgggaaauguaacagcgagugcauuacccccaauggcuccaucccgaacgauaagccuuuucagaauguuaaccgcaucacauacggcgccugucccagauaugugaaacagaauacgcuuaagcuggcgaccgggaugcggaacgugccugaaaaacaaacacgcggaauuuucggcgccaucgcuggguuuauugagaauggaugggaaggcauggucgacgggugguacggauucagacaccagaacagcgagggcaccggccaggccgcugaucucaagucuacacaagccgccaucaaucagauuaacgggaaacugaaucggcuuaucgagaagaccaacgaaaaguuucaucagaucgagaaagaguucuccgaaguggaaggacgcauucaggaccuggagaaguauguugaggauacgaaaaucgaccucuggagcuacaaugcugaacugcugguggcgcucgagaaccaacacacaauugaucugaccgacucugaaaugaacaagcuguucgagcgcacccggaaacagcugagagaaaaugccgaggauaugggcaacgggugcuuuaagaucuaucauaagugugacaaugcuugcauuggauccauccgcaacggcacauacgaucacgacgucuaccgggacgaggcccucaauaacagauuccagauuaaagggguggaacuuaagagcggcuauaaagauuggauccuuuggaucuccuuugccauuucuugcuuccugcucuguguugugcugcugggauuuaucaugugggcuugccagaagggcaauauucgcuguaacaucugcauuuga

SEQ ID NO: 192295 - RNA, 1701 nt, Artificial Sequence
  derived and/or modified CDS sequence (opt5) from hemagglutinin__InfluenzaA__AAY98386
augaagaccaucauugcccugagcuacauccucugccugguguucgcucagaaacuucccggcaacgacaauuccacagccacgcugugucucgggcaccaugcggucccuaacggaacccugguuaagacaauuaccaaugaucaaaucgaggugacaaacgcuaccgaacuugugcagucuagcuccacaggcagaauuugcgacucuccgcaccagauccuggaugggggaaauuguacccucaucgacgcccugcugggcgauccccauugcgacggguuucagaacaaagagugggaucucuucgucgaacggagcaagguguauuccaauuguuacccuuaugacguucccgauuacgccucucugcgcagccuuguggcuuccagcggaacgcuggaguuuaacaaugaaucuuucaacuggaccggcgucgcccaaaauggcacauccagcgcuugcaaaagacggucuauuaaguccuuuuucagccgccucaacuggcugcaccagcuuaaguauaaauacccugcccugaaugugaccaugcccaacaaugagaaguuugacaaacucuauaucuggggaguucaucacccuucuacagauuccgaccagauuagccuguacgcgcaggccuccgggagagugaccgucucuacgaagcggagccaacagacagugaucccgaacauuggcucccgccccugggugagaggggucagcucucggaucuccauuuacuggaccaucguuaaaccuggagauauccugcucauuaacagcacaggcaaucugaucgcuccccgcggguauuucaagauuagaucuggaaagagcuccaucaugcggucugacgccccuauuggcaaauguaacagcgagugcaucacccccaauggcuccaucccgaacgacaagccuuuucagaaugugaaccgcauuaccuacggggcuugucccagauaugugaaacagaauacacuuaagcuggccacgggaaugcggaacgucccugaaaaacaaacccgcggcaucuucggggcgauugccggauuuaucgagaauggcugggaagggaugguggauggaugguacggcuucagacaccagaacagcgagggcacagggcaggcugccgaccucaagucuacccaagcugccauuaaucagaucaacggaaaacugaaucggcuuaucgagaagacaaacgaaaaguuucaucagauugagaaagaguucuccgaaguugaaggcagaauccaggaucuggagaaguauguggaggacaccaaaauugaucucuggagcuacaaugccgaacugcuggucgcucucgagaaccaacacacgaucgaccugacagauucugaaaugaacaaacuuuucgagcgcaccaagaagcagcugcgggaaaaugcggaggacauggggaacggaugcuuuaagauuuaucauaaaugugauaaugccugcaucggcuccauuagaaacgggaccuacgaccacgauguguaccgcgacgaggcucucaauaaccgguuccagaucaagggcguugaacugaaaagcggauauaaggacuggauccuuuggauuuccuuugccaucucuugcuuccugcucugugugguccugcugggcuuuauuaugugggccugccagaaagggaauaucagauguaacauuugcaucuga

SEQ ID NO: 192296 - RNA, 1701 nt, Artificial Sequence; identical to SEQ ID NO: 192258
  derived and/or modified CDS sequence (opt5) from hemagglutinin__InfluenzaA__AAY98396

SEQ ID NO: 192297 - RNA, 1701 nt, Artificial Sequence; identical to SEQ ID NO: 192258
  derived and/or modified CDS sequence (opt5) from hemagglutinin__InfluenzaA__AAY98406

SEQ ID NO: 192298 - RNA, 1701 nt, Artificial Sequence
  derived and/or modified CDS sequence (opt5) from hemagglutinin__InfluenzaA__AAZ32946
augaagaccaucauugcccugagcuacauccucugccugguguucgcucagaaacuucccggcaacgacaauuccacagccacgcugugucucgggcaccaugcggucccuaacggaaccauuguuaagacaaucaccaaugaucaaauugaggugacaaacgcuaccgaacuggugcagucuagcuccacaggcgggaucugcgacucuccgcaccagauccuugauggagagaauuguacccugauugacgcccuccugggcgauccccagugcgacggguuucaaaacaaaaagugggaucuguucgucgaaagaagcgaggccuauuccaauuguuacccuuaugacgugcccgauuacgcuucucuccggagccugaucgccuccagcggaacgcuugaauuuaccaacgagucuuucaauuggacaggcguuacccagaacggcacauccagcgcuugcaaacgcagaucuaauaaguccuuuuucagccggcugaacuggcucacccaucugaaguauaaauacccugcccuuaaugugacgaugcccaacaaugagaaguuugacaaacuguauauuuggggaguccaccauccugggacagauucugaccagaucucccucuacgcgcaggccagcggccgcauuaccguguccacaaagagaucucaacagaccguuaucccgaacauugggagccggccccgcgugagagaugucuccagccggaucucuaucuacuggaccauugugaaaccuggagacauccugcugauuaacuccacaggcaaucucaucgcuccccgcggguauuucaagauuagaagcggaaagucuagcaucaugcgguccgacgccccuaucggcaaauguaacucugaaugcauuacgcccaauggcagcaucccgaacgauaagccuuuucagaauauuaaccgcaucaccuacgggacaugucccagauaugugaaacagaauacccugaaacuugcuacaggaaugcggaacgucccugagaaacaaacccgcggcauuuucggggccaucgcgggauuuaucgaaaauggcugggaggggaugguugacggaugguacggcuucagacaccagaacuccgagggcacggggcaggccgcugaucucaagagcacacaagccgcuauuaaucagaucaacggaaaacugaaucggcugauuggcaagaccaacgaaaaguuucaccagaucgagaaagaguucucugaaguggaagggcgcauucaggaccuugagaaguauguggaggauaccaaaaucgaccugugguccuacaaugccgaacuccuggucgcccuggagaaccaacauacaauugaucucaccgacagcgaaaugaacaagcuguucgagagaacaaagaagcagcuucgggaaaaugcugaggauaugggaaacggcugcuuuaagaucuaucacaaaugugacaaugcgugcaucgggucuauuagaaacggcacguacgaucaugacguguaccgcgacgaggcccugaauaaccgguuccagaucaagggaguugaacucaaauccggcuauaaggauuggauucuguggaucagcuuugcuauuuccugcuuccuucugugugugguccuccugggguuuaucaugugggccugccagaaaggaaauaucagauguaacauuugcaucuga

SEQ ID NO: 192299 - RNA, 1701 nt, Artificial Sequence
  derived and/or modified CDS sequence (opt5) from hemagglutinin__InfluenzaA__AAZ32949
augaagaccaucauugcccugagcuacauccucugccugguguucgcucagaaacuucccggcaacgacaauuccacagccacgcugugucucgggcaccaugcggucccuaacggaaccauuguuaagacaaucaccaaugaucaaauugaggugacaaacgcuaccgaacuggugcagucuagcuccacaggcgggaucugcgacucuccgcaccagauccuugauggagagaauuguacccugauugacgcccuccugggcgauccccagugcgacggguuucaaaacaaaaagugggaucuguucgucgaaagaagcgaggccuauuccaauuguuacccuuaugacgugcccgauuacgcuucucuccggagccugaucgccuccagcggaacgcuugaauuuaccaacgagucuuucaauuggacaggcguuacccagaacggcacauccagcgcuugcaaacgcagaucuaauaaguccuuuuucagccggcugaacuggcucacccaucugaaguauaaauacccugcccuuaaugugacgaugcccaacaaugagaaguuugacaaacuguauauuuggggaguccaccauccugggacagauucugaccagaucucccucuacgcgcaggccagcggccgcauuaccguguccacaaagagaucucaacagaccguuaucccgaacauugggagccggccccgcgugagagauaucuccagccggaucucuauuuacuggaccaucgucaaaccuggagacauucugcugaucaacuccacaggcaaucucauugcuccccgcggguauuucaagaucagaagcggaaagucuagcaucaugcgguccgacgccccuauuggcaaauguaacucugaaugcaucacgcccaauggcagcauuccgaacgauaagccuuuucagaauaucaaccgcauuaccuacggggcuugucccagauaugugaaacagaauacacugaagcuggccaccggaaugcggaacgugccugagaaacaaacacgcggcaucuucggggcgaucgccggauuuauugaaaauggcugggaggggauggucgacggaugguacggcuucagacaccagaacuccgagggcaccgggcaggcugccgaucuuaagagcacgcaagcugccaucaaucagauuaacggaaaacucaaucggcugaucggcaagacaaacgaaaaguuucaccagauugagaaagaguucucugaaguugaagggagaauccaggaccuugagaaguauguggaggauaccaaaauugaccugugguccuacaaugccgaacuccugguggcucuggagaaccaacauaccaucgaucucacagacagcgaaaugaacaagcuguucgagcgcaccaaaaagcagcuucgggaaaaugcggaggauaugggaaacggcugcuuuaagaucuaucacaaaugugacaaugccugcauugggucuaucagaaacggcacauacgaucaugacgucuaccgcgacgaggcucugaauaaccgguuccagauuaagggaguggaacucaaauccggcuauaaggauuggauccuguggauuagcuuugccaucuccugcuuccuucuguguguugugcuccugggguuuaucaugugggccugccagaaaggaaauauuagauguaacaucugcauuuga

SEQ ID NO: 192300 - RNA, 1701 nt, Artificial Sequence
  derived and/or modified CDS sequence (opt5) from hemagglutinin__InfluenzaA__AAZ32950
augaagaccaucauugcccugagcuacauccucugccugguguucgcucagaaacuucccggcaacgacaauuccacagccacgcugugucucgggcaccaugcggucccuaacggaaccauuguuaagacaaucaccaaugaucaaauugaggugacaaacgcuaccgaacuggugcagucuagcuccacaggcgggaucugcgacucuccgcaccagauccuugauggagagaauuguacccugauugacgcccuccugggcgauccccagugcgacggguuucaaaacaaaaagugggaucuguucgucgaaagaagcgaggccuauuccaauuguuacccuuaugacgugcccgauuacgcuucucuccggagccugaucgccuccagcggaacgcuugaauuuaccaacgagucuuucaauuggacaggcguuacccagaacggcacauccagcgcuugcaaacgcagaucuaauaaguccuuuuucagccggcugaacuggcucacccaucugaaguauaaauacccugcccuuaaugugacgaugcccaacaaugagaaguuugacaaacuguauauuuggggaguccaccauccugggacagauucugaccagaucucccucuacgcgcaggccagcggccgcauuaccguguccacaaagagaucucaacagaccguuaucccgaacauugggagccggccccgcgugagagaugucuccagccggaucucuaucuacuggaccauugugaaaccuggagacauccugcugauuaacuccacaggcaaucucaucgcuccccgcggguauuucaagauuagaagcggaaagucuagcaucaugcgguccgacgccccuaucggcaaauguaacucugaaugcauuacgcccaauggcagcaucccgaacgauaagccuuuucagaauauuaaccgcaucaccuacggggcuugucccagauaugugaaacagaauacacugaagcuggccaccggaaugcggaacgucccugagaaacaaacacgcggcauuuucggggcgaucgccggauuuaucgaaaauggcugggaggggaugguugacggaugguacggcuucagacaccagaacuccgagggcaccgggcaggcugccgaucuuaagagcacgcaagcugccauuaaucagaucaacggaaaacucaaucggcugauuggcaagacaaacgaaaaguuucaccagaucgagaaagaguucucugaaguggaagggcgcauucaggaccuugagaaguauguggaggauaccaaaaucgaccugugguccuacaaugccgaacuccuggucgcucuggagaaccaacauaccauugaucucacagacagcgaaaugaacaagcuguucgagagaaccaaagaacagcuucgggagaaugcggaggauaugggaaacggcugcuuuaagaucuaucacaagugugacaaugccugcaucgggucuauuagaaacggcacauacgaucaugacguguaccgcgacgaagcucugaauaaccgguuccagaucaaaggaguugagcucaaguccggcuauaaagauuggauucuguggaucagcuuugccauuuccugcuuccuucugugugugguccuccugggguuuaucaugugggccugccagaagggaaauaucagauguaacauuugcaucuga

SEQ ID NO: 192301 - RNA, 1701 nt, Artificial Sequence
  derived and/or modified CDS sequence (opt5) from hemagglutinin__InfluenzaA__AAZ32951
augaagaccaucauugcccugagcuacauccucugccugguguucgcucagaaaauucccggcaacgacaauuccacagccacgcuuugucuggggcaccaugcggucccuaacggaacccucguuaagacaaucaccaaugaucaaauugaggugacaaacgcuaccgaacuggugcagucuagcuccacaggcgggaucugcgacucuccgcaccagauccuugauggagagaauuguacccugauugacgcccuccugggcgauccccauugcgacggguuucagaacaaaaagugggaucuguucgucgaaagaagcaaagccuauuccaauuguuacccuuaugacgugcccgauuacgcuucucuccggagccugguugccuccagcggaacgcuugaguuuaacaaugaaucuuucaacuggaccggcgugacacaaaauggcaccuccagcgcuugcaagcgcagaucuaacaaguccuuuuucagccggcugaauuggcuccaccagcugaaauauaaguacccugcccuuaacgucgcgaugcccaauaacgagaaauuugacaagcuguauaucuggggagugcaucacccugggacagauucugaccagauuucccucuacgcccaggcuagcggccgcaucaccguuuccacgaaaagaucucaacagacagugauuccgaacaucgggagccggccccgcgucagagauauuuccagccggaucucuaucuacuggaccauugugaagccuggagacauccugcugauuaauuccacaggcaaccucaucgcuccccgcggguauuucaagauuagaagcggaaaaucuagcaucaugcgguccgacgccccuaucggcaaguguaauucugagugcauuacccccaacggcagcaucccgaaugauaaaccuuuucagaacgugaaucgcauuaccuacggggccugucccagauaugucaagcagaacacacugaaacuugcgacgggaaugcggaauguuccugaaaagcaaacccgcggcaucuucggggccauugcuggauuuaucgagaacggcugggaagggaugguggacggaugguacggcuucagacaccaaaauuccgagggcacagggcaggccgcugaucugaaaagcacccaggccgccaucaaccagauuaauggaaagcucaaccggcugaucggcaagacaaaugagaaauuucaucagauugaaaaggaguucucugaaguggaggggagaauccaggaccuugaaaaauaugucgaggauaccaagauugaccugugguccuacaacgcugagcuccugguggcgcuggaaaaccaacacacgaucgaucucacagacagcgagaugaauaaacuguucgaacgcaccaagaagcagcuucgggagaacgccgaagauaugggaaauggcugcuuuaaaauuuaucauaagugugacaacgcuugcaucgggucuaucagaaauggcaccuacgaucacgacguuuaccgcgacgaggcccugaacaaucgguuccagauuaaaggaguggagcucaaguccggcuauaaagauuggauccuguggauuagcuuugccaucuccugcuuccuucugugugucgcucuccugggguuuauuaugugggccugccagaagggaaacaucagauguaauaucugcauuuga

SEQ ID NO: 192302 - RNA, 1701 nt, Artificial Sequence
  derived and/or modified CDS sequence (opt5) from hemagglutinin__InfluenzaA__AAZ32952
augaagaccaucauugcccugagcuacauccucugccugguguucgcucagaaaauucccggcaacgacaauuccacagccacgcuuugucuggggcaccaugcggucccuaacggaacccucguuaagacaaucaccaaugaucaaauugaggugacaaacgcuaccgaacuggugcagucuagcuccacaggcgggaucugcgacucuccgcaccagauccuugauggagagaauuguacccugauugacgcccuccugggcgauccccauugcgacggguuucagaacaaaaagugggaucuguucgucgaaagaagcaaagccuauuccaauuguuacccuuaugacgugcccgauuacgcuucucuccggagccugguugccuccagcggaacgcuugaguuuaacaaugaaucuuucaacuggaccggcgugacacaaaauggcaccuccagcgcuugcaagcgcagaucuaacaaguccuuuuucagccggcugaauuggcuccaccagcugaaauauaaguacccugcccuuaacgucgcgaugcccaauaacgagaaauuugacaagcuguauaucuggggagugcaucacccugggacagauucugaccagauuucccucuacgcccaggcuagcggccgcaucaccguuuccacgaaaagaucucaacagacagugauuccgaacaucgggagccggccccgcgucagagauguguccagccggauuucuaucuacuggaccaucgugaagccuggagacauucugcugaucaauuccacaggcaaccucauugcuccccgcggguauuucaagaucagaagcggaaaaucuagcauuaugcgguccgacgccccuaucggcaaguguaauucugagugcaucacccccaacggcagcauuccgaaugauaaaccuuuucagaacgucaauaagaucaccuacggggccuguccccgcuauguuaaacagaacacacugaagcuggcgacgggaaugagaaaugugccugaaaaacaaacccggggcauuuucggggccaucgcuggauuuauugagaacggcugggaagggaugguggacggaugguacggcuuccgccaccaaaauuccgagggcacagggcaggccgcugaucuuaagagcacccaggccgccaucaaccagaucaauggaaagcucaacagacugauuggcaaaacaaaugagaaguuucaucagaucgaaaaagaguucucugaagucgaggggcggauucaggaccuugaaaaguauguggaggauaccaaaaucgaccugugguccuacaacgcugagcuccugguugcgcuggaaaaccaacacacgauugaucucacagacagcgagaugaauaagcuguucgaaagaaccaagaaacagcuucgcgagaacgccgaagauaugggaaauggcugcuuuaagaucuaucauaaaugugacaacgcuugcauugggucuauccggaauggcaccuacgaucacgacguguacagagacgaggcccugaacaaucgcuuccagaucaagggagucgagcucaaauccggcuauaaggauuggauucuguggaucagcuuugccauuuccugcuuccuucuguguguggcucuccugggguuuaucaugugggccugccagaagggaaacauucgguguaauaucugcaucuga

SEQ ID NO: 192303 - RNA, 1701 nt, Artificial Sequence
  derived and/or modified CDS sequence (opt5) from hemagglutinin__InfluenzaA__AAZ32953
augaagaccaucauugcccugagcuacauccucugccugguguucgcucagaaaauucccggcaacgacaauuccacagccacgcuuugucuggggcaccaugcggucccuaacggaacccucguuaagacaaucaccaaugaucaaauugaggugacaaacgcuaccgaacuggugcagucuagcuccacaggcgggaucugcgacucuccgcaccagauccuugauggagagaauuguacccugauugacgcccuccugggcgauccccauugcgacggguuucagaacaaaaagugggaucuguucgucgaaagaagcaaagccuauuccaauuguuacccuuaugacgugcccgauuacgcuucucuccggagccugguugccuccagcggaacgcuugaguuuaacaaugaaucuuucaacuggaccggcgugacacaaaauggcaccuccagcgcuugcaagcgcagaucuaacaaguccuuuuucagccggcugaauuggcuccaccagcugaaauauaaguacccugcccuuaacgucgcgaugcccaauaacgagaaauuugacaagcuguauaucuggggagugcaucacccugggacagauucugaccagauuucccucuacgcccaggcuagcggccgcaucaccguuuccacgaaaagaucucaacagacagugauuccgaacaucgggagccggccccgcgucagagauguguccagccggauuucuaucuacuggaccaucgugaagccuggagacauucugcugaucaauuccacaggcaaccucauugcccccagaggguauuucaagaucagaagcggaaaaucuagcauuaugcgguccgacgcuccuaucggcaaguguaauucugagugcaucacccccaacggcagcauuccgaaugauaaaccuuuucagaacgucaaucgcaucaccuacggggccugucccagauauguuaagcagaacacacugaaacuugcgacgggaaugcggaaugugccugaaaagcaaacccgcggcauuuucggggccaucgcuggauuuauugagaacggcugggaagggaugguggacggaugguacggcuucagacaccaaaauuccgagggcacagggcaggccgcugaucugaaaagcacccaggccgccaucaaccagaucaauggaaagcucaaccggcugauuggcaagacaaaugagaaauuucaucagaucgaaaaggaguucucugaagucgaggggcgcauucaggaccuugaaaaauauguggaggauaccaagaucgaccugugguccuacaacgcugagcuccugguugcgcuggaaaaccaacacacgauugaucucacagacagcgagaugaauaaacuguucgaacgcaccaagaagcagcuucgggagaacgccgaagauaugggaaauggcugcuuuaaaaucuaucauaagugugacaacgcuugcauugggucuaucagaaauggcaccuacgaucacgacguguaccgcgacgaggcccugaacaaucgguuccagaucaaaggagucgagcucaaguccggcuauaaagauuggauucuguggaucagcuuugccauuuccugcuuccuucuguguguggcucuccugggguuuaucaugugggccugccagaagggaaacauuagauguaauaucugcaucuga

SEQ ID NO: 192304 - RNA, 1701 nt, Artificial Sequence
  derived and/or modified CDS sequence (opt5) from hemagglutinin__InfluenzaA__AAZ38462
augaagaccaucauugcccugagcuacauccucugccugguguucgcucagaaacuucccggcaacgacaauuccacagccacgcugugucucgggcaccaugcggucccuaacggaacccugguuaagacaauuaccucugaucaaaucgaggugacaaaugcuaccgaacuugugcagagcuccucuacaggcagaauuugcgacagcccgcaccggauccuggauggggagaacuguacccucaucgacgcccugcugggagauccccauugcgacggcuuucagaauaaagaaugggaucucuucgucgagcgcuccaaggccuauucuaacuguuacccuuaugacgugcccgauuacgcuagccugagaucccuuguugccagcucugggacgcuggaauuuaauaacgaguccuucaauuggaccggaguggcucagaacggcaccagcuuugccugcaaacggcgcucuauuaaguccuucuuuagcagacucaauuggcugcaccaacuuaaguauaaauacccugcgcugaacgucacaaugcccaauaacgacaaguucgauaaacucuauaucuggggcgugcauuacccugggacagacucugaucagaccucccuguacgcccaggcuagcggacggguuacgguguccacaaagcgcucucagcaaaccgucauuccgaauaucggcagcagacccugggugcgcgggguguccagccggauuucuaucuauuggacaauugucaaaccuggagacauccugcucaucaacuccaccggcaaccugauugcccccagaggguacuuuaagauccggagcggaaagucuagcauuaugcgcuccgacgcuccuaucggcaaauguaauucugagugcauuacccccaacggcagcaucccgaaugggaagccuuuccagaacguuaauagaaucacauauggagccuguccccgguacgugaaacagaacacgcuuaagcuggcgaccggcaugcgcaaugugccugaaaaacagacaagagggauuuuuggagccaucgcuggcuucauugagaacgggugggaaggaauggucgauggcugguauggcuuucggcaccaaaauuccgaggggaccggacaggccgcugaccucaagagcacacaggccgccaucaaccaaauuaauggcaaacugaacagacuuaucgagaagaccaaugaaaaguuccaccagaucgagaaagaguucacggaaguggaagggcgcauucaggaucuggagaaguacguugaggacacaaaaaucgaucucuggucuuauaacgcugaacugcugguggcgcucgagaaucagcauaccauugaccugaccgauuccgaaaugaacaaacuuuuugagcggacaagacgccaacugcgggaaaacgccgaggacaugggaaauggcugcuucaagaucuaccacaagugugauaacgcuugcauugggagcaucagaaauggcaccuacgaccaugaugucuaucgcgacgaggcccucaacaaucgguuucagauuaagggaguggaacugaaaucuggcuacaaggacuggauccuuuggaucuccuucgccacaagcugcuuucugcucuguguugugcugcugggguucauuaugugggcuugccagaaaggaaacaucagauguaauauuugcaucuga

SEQ ID NO: 192305 - RNA, 1701 nt, Artificial Sequence
  derived and/or modified CDS sequence (opt5) from hemagglutinin__InfluenzaA__AAZ38473
augaagaccaucauugcccugagcuacauccucugccugguguucgcucagaaacuucccggcaacgacaauuccacagccacgcugugucucgggcaccaugcggucccuaacggaacccugguuaagacaauuaccucugaucaaaucgaggugacaaaugcuaccgaacuugugcagagcuccucuacaggcagaauuugcgacagcccgcaccggauccuggauggggagaacuguacccucaucgacgcccugcugggagauccccauugcgacggcuuucagaauaaagaaugggaucucuucgucgagcgcuccaaggccuauucuaacuguuacccuuaugacgugcccgauuacgcuagccugagaucccuuguugccagcucugggacgcuggaauuuaauaacgaguccuucaauuggaccggaguggcucagaacggcaccagcuuuacaugcaaacggcgcucuauuaaguccuucuuuagcagacucaauuggcugcaccaacuuaaguauaaauacccugcccugaacgucacaaugcccaauaacgacaaguucgauaaacucuauaucuggggcgugcaucacccuucuaccgacuccgaucagacgagccuguacgcgcaggccuccgggcggguuacagugucuaccaagcgcagccagcaaacagucauuccgaauaucggauccagacccugggugcggggcgugagcucucgcauuuccaucuacuggaccauugucaaaccuggggacauccugcucaucaacagcaccggaaaccugauugcucccagaggcuauuuuaagauccggucuggaaagagcuccauuaugaaaucugacgccccuaucgggaaguguaauagcgagugcauuacacccaacggcuccaucccgaaugauaaaccuuuccagaacguuaaucgcaucacguacggcgcuugucccagauaugugaagcagaacacccuuaaacuggccacagggaugcggaaugugccugaaaagcagacccgcggaauuuuuggcgcgaucgccggguucauugagaacggaugggaaggcauggucgacgggugguacggauuuagacaccaaaauagcgagggcacaggccaggcugccgaucucaaaucuacccaggcugccaucaaccaaauuaaugggaagcugaaccggcuuaucgagaagacgaaugaaaaauuccaucagaucgagaaggaguucacagaaguggaaggacgcauucaggaccuggagaaauauguugaggauaccaagaucgaccucugguccuacaacgccgaacugcugguggcucucgagaaucagcacaccauugaucugacagacagcgaaaugaacaaacuuuuugagagaacccggaagcaacugagagaaaacgcggaggauaugggcaaugggugcuucaagaucuaucauaaaugugacaacgucugcauuggaucuauccgcaauggcacauacgaucacgacguguaccgggacgaggcccucaacaauagauuucagauuaaggggguugaacugaaauccggcuauaaggauuggauccuuuggaucagcuucgcuacguccugcuuucugcucugugugguccugcugggauucauuaugugggccugccagaaaggcaacauccgcuguaauauuugcaucuga

SEQ ID NO: 192306 - RNA, 1701 nt, Artificial Sequence; identical to SEQ ID NO: 192258
  derived and/or modified CDS sequence (opt5) from hemagglutinin__InfluenzaA__AAZ38484

SEQ ID NO: 192307 - RNA, 1701 nt, Artificial Sequence
  derived and/or modified CDS sequence (opt5) from hemagglutinin__InfluenzaA__AAZ38495
augaagaccaucauugcccugagcuacauccucugccugguguucgcucagaaacuucccggcaacgacaauuccacagccacgcugugucucgggcaccaugcggucccuaacggaacccugguuaagacaauuaccaaugaucaaaucgaggugacaaacgcuaccgaacuugugcagucuagcuccacaggcagaauuugcgacucuccgcaccagauccuggauggggagaauuguacccucaucgacgcccugcugggagauccccauugcgacggcuuucagaacaaagaaugggaucucuucgucgagcggagcaaggccuauuccaauuguuacccuuaugacgugcccgauuacgcuucucugcgcagccuuguugccuccagcgggacgcuggaauuuaacaaugagucuuucaacuggaccggaguggcucaaaauggcacauccagcgccugcaaaagacggucuaacaaguccuuuuucagccgccucaauuggcugcaccagcuuaaguauaaauacccugcgcugaacgucaccaugcccaauaacgagaaguuugacaaacucuauauuuggggcgugcaucacccuucuacagauuccgaccagaucagccuguacgcccaggcuuccgggagaguuaccgugucuacgaagcggagccaacagacagucauuccgaacaucggaucccgccccugggugagaggcgugagcucuaaaauuuccaucuacuggaccauugucaagccuggggauauccugcucaucaauagcacaggaaaccugauugcuccccggggcuauuucaagauccgcucugggaaaagcuccauuaugagaucugacgccccuaucggaaaguguaauagcgaaugcauuacccccaacggcuccaucccgaaugacaaaccuuuucagaacguuaaucggaucaccuacggcgccuguccccgcuaugugaagcagaacacacuuaaacuggcgacggggaugagaaaugugccugagaagcaaacccggggaauuuucggcgccaucgcuggguuuauugaaaacggaugggagggcauggucgaugggugguacggauuccgccaccagaauagcgagggcacaggccaggccgcugaccucaaaucuacccaagccgccaucaaccagauuaaugggaagcugaacagacuuaucgaaaagacaaaugagaaauuucaucagaucgaaaaggaguucuccgaaguggagggacggauucaggaucuggagaaauauguugaagacaccaagaucgaucucuggagcuacaacgcugagcugcugguggcgcucgaaaaccaacacacgauugaccugacagauucugagaugaauaaacuuuucgaaagaaccaagaagcagcugcgcgagaacgccgaggacaugggcaaugggugcuuuaaaaucuaucauaagugugauaacgcuugcauuggauccauccggaauggcaccuacgaccacgaugucuacagagacgaagcccucaacaaucgcuuccagauuaaagggguggagcuuaagagcggcuauaaagacuggauccuguggaucuccuuugccauuucuugcuuccugcucuguguugugcugcugggauuuaucaugugggcuugccagaagggcaacauucgguguaauaucugcauuuga

SEQ ID NO: 192308 - RNA, 1701 nt, Artificial Sequence
  derived and/or modified CDS sequence (opt5) from hemagglutinin__InfluenzaA__AAZ38517
augaagaccaucauugcccugagcuacauccucugccugguguucgcucagaaacuucccggcaacgacaauuccacagccacgcugugucucgggcaccaugcggucccuaacggaaccauuguuaagacaaucaccaaugaucaaauugaggugacaaacgcuaccgaacuggugcagucuagcuccacaggcgggaucugcgacucuccgcaccagauccuugauggagagaauuguacccugauugacgcccuccugggcgauccccagugcgacggguuucaaaacaaaaagugggaucuguucgucgaaagaagcaaagccuauuccaauuguuacccuuaugacgugcccgauuacgcuucucuccggagccugguugccuccagcggaacgcuugaguuuaacaaugaaucuuucaacuggaccggcgugacacagaauggcaccuccagcgcuugcaagcgcagaucuaacaauuccuuuuucagccggcugaacuggcucacacaucugaaguuuaaauauccugcccuuaaugucaccaugcccaacaacgagaaguucgacaaacuguacaucuggggagugcaccauccugggacggauaaugaccagauuucucucuaugcgcaggccuccggccgcaucacaguuagcaccaagagaucccaacagacagugauuccgaacaucgggucucggccccgcgucagagauauuccuagccggaucuccaucuacuggaccauugugaaacccggagacauccugcugauuaauagcaccggcaaccucaucgcuccucgcggguacuuuaagauuagaucuggaaaguccagcaucaugcggucugacgcccccaucggcaaauguaauagcgagugcauuacaccgaacggcuccaucccuaaugauaagcccuuccagaacgugaaucgcauuacguauggggcuuguccuagauacgucaaacagaacacccugaagcuggccacaggaaugcggaauguucccgaaaaacaaacccgcggcaucuuuggggcgauugccggauucaucgagaacggcugggaagggaugguggacggaugguauggcuuuagacaccaaaauucugagggcaucgggcaggcugccgaucuuaagagcacacaggcugccauuaaccagaucaauggaaaacucaaccggcugauuggcaagaccaacgagaaguuccaccagaucgaaaaagaguucuccgaaguggaggggcgcauucaggaccuugaaaaguacgucgaggauacgaaaaucgaccuguggagcuauaaugccgagcuccugguggcucuggaaaaccaacauacaauugaucucaccgacucugagaugaauaagcuguuugaaagaaccaaaaagcagcuucgggagaacgcggaagauaugggaaauggcugcuucaagaucuaccacaaauguaacaaugccugcaucggguccauuagaaacggcacauaugaccaugauguuuaccgcgacgaggcucugaauaaccgguuucagaucaagggaguggagcucaaaagcggcuacaaggacuggauucuguggaucucuuucgccauuuccugcuuucuucugugugucgugcuccugggguucaucaugugggccugccagaaaggaaauaucagauguaacauuugcaucuga

SEQ ID NO: 192309 - RNA, 1701 nt, Artificial Sequence
  derived and/or modified CDS sequence (opt5) from hemagglutinin__InfluenzaA__AAZ38539
augaagaccaucauugcccugagcuacauccucugccugguguucgcucagaaacuucccggcaacgacaauuccacagccacgcugugucucgggcaccaugcggucccuaacggaacccugguuaagacaauuaccaaugaucaaaucgaggugacaaacgcuaccgaacuugugcagucuagcuccacaggcagaauuugcgacucuccgcaccagauccuggauggggagaauuguacccucaucgacgcccugcugggagauccccauugcgacggcuuucagaacaaagaaugggaucucuucgucgagcggagcaaggccuauuccaauuguuacccuuaugacgugcccgauuacguuucucugcgcagccuuguggcuuccagcgggacgcuggaauuuaacaaugagucuuucaacuggaccggagucgcccaaaauggcacauccagcgcuugcaaaagacggucugacaaguccuuuuucagccgccucaacuggcugcaccagcuuaaguauaaauacccugcccugaaugugaccaugcccaacaaugagaaguuugauaaacucuauauuuggggcguucaucacccugggacagacucugaucagaucucccuguacgcgcaggccagcggaagagugaccgucuccacgaagcggucucaacagacagugauuccgaacaucggcagccgccccugggugagaggggucuccagcaaaauuucuaucuacuggaccauuguuaagccuggagacaucuuccugaucaacuccacaggcaaucucauugcuccccggggguauuuuaagauccgcagcggaaaaucuagcauuaugagauccgacgccccuaucggcaaguguaacucugaaugcauuacccccaauggcagcaucccgaacgauaaaccuuuccagaaugugaaccggaucaccuacgggcccuguccucgcuaugugaagcagaauacacugaaacuugcuacgggaaugagaaacguccccgagaagcaaacccggggcauuuuuggggccaucgcgggauucauugaaaauggcugggaggggaugauggacggaugguacggcuuucgccaccagaacuccgagggcacagggcaggccgcugaucugaaaagcacccaagccgcuaucaaucagauuaacggaaagcucaauagacugaucgaaaagacaaacgagaaauuccaucagaucgaaaaggaguucucugaaguggagggccggauucaggaccuugagaaauauguugaagauaccaagaucgaccugugguccuacaaugccgagcuccugguggcccuggaaaaccaacacacgauugaucucacagacagcgagaugaacaaacuguuugaaagaaccaagaagcagcuucgcgagaaugcugaggauauggggaacggaugcuucaaaaucuaucauaagugugacaaugcgugcauuggcucuauccggaacgggaccuacgaucacgacgucuacagagacgaagcccugaauaaccgcuuucagauuaaaggcguggagcucaaguccggauauaaagauuggauccuguggaucagcuucgcuauuuccugcuuucuucuguguaucguucuccugggcuucauuaugugggccugccagaaggggaauauccgguguaacauuugcaucuga

SEQ ID NO: 192310 - RNA, 1701 nt, Artificial Sequence; identical to SEQ ID NO: 192258
  derived and/or modified CDS sequence (opt5) from hemagglutinin__InfluenzaA__AAZ38561

SEQ ID NO: 192311 - RNA, 1701 nt, Artificial Sequence
  derived and/or modified CDS sequence (opt5) from hemagglutinin__InfluenzaA__AAZ38583
augaagaccaucauugcccugagcuacauccucugccugguguucgcucagaaaauucccggcaacgacaauuccacagccacgcuuugucuggggcaccaugcggucccuaacggaaccaucguuaagacaauuaccaaugaucaaaucgaggugacaaacgcuaccgaacucgugcagucuagcuccacaggcgggaucugcgacucuccgcaccagauucuggauggagagaauuguacccuuaucgacgcccugcucggcgauccccagugcgacggguuucaaaacaaaaagugggaucuguucgucgaaagaagcaaagccuauuccaauuguuacccuuaugacgugcccgauuacgcuucucugcggagccucguugccuccagcggaacgcuggaguuuaacaaugaaucuuucaacuggaccggcgugacacagaauggcaccuccagcgcuugcaagcgcagaucuaacaauuccuuuuucagccggcuuaacuggcugacacaucucaaguuuaaauauccugcccugaaugucaccaugcccaacaacgagaaguucgacaaacuuuacauuuggggagugcaccauccugggacgaauaacgaucagaucucucuguaugcgcaggccuccggccgcauuacaguuagcaccaagagaucccaacagacagugaucccgaauauugggucucggccccgcgucagagacaucccuagccggaucuccauuuacuggaccaucgugaaacccggagauauucuccugaucaacagcaccggcaaucugauugcuccucgcggguacuuuaagaucagaucuggaaaguccagcaucaugcggucugacgcccccauuggcaaauguaacagcgagugcaucacaccgaauggcuccauuccuaacgacaagcccuuccagaaugugaaccgcaucacguauggggcuuguccuagauacgucaaacagaauacccucaagcuggccacaggaaugcggaacguucccgaaaaacaaacccgcggcauuuuuggggcgaucgccggauucaucgagaauggcugggaagggaugguggauggaugguauggcuuuagacaccagaacucugagggcauugggcaggcugccgaccuuaagagcacacaagcugccaucaaucagauuaacggaaaacugaaccggcucaucggcaagaccaaugagaaguuccaccagauugaaaaagaguucuccgaaguggaggggagaauccaggaucuggaaaaguacgucgaggacacgaaaauugaucuuuggagcuauaacgccgagcugcucguggcucuggaaaaucaacauacaaucgaccugaccgauucugagaugaacaagcucuuugaacgcaccaaaaagcagcugcgggagaaugcggaagacaugggaaacggcugcuucaagaucuaccacaaaugugauaaugccugcauuggguccaucagaaacggcacauaugaccaugauguuuaccgcgacgaggcucuuaauaaccgguuucagauuaagggaguggagcugaaaagcggcuacaaggacuggaucauuuggaucucuuucgccaucuccugcuuucuccugugugucgcccuucugggguucauuaugugggcuugccagaaaggaaauaucagauguaacauuugcaucuga

SEQ ID NO: 192312 - RNA, 1701 nt, Artificial Sequence
  derived and/or modified CDS sequence (opt5) from hemagglutinin__InfluenzaA__AAZ38594
augaagaccaucauugcccugagcuacauccucugccugguguucgcucagaaacuucccggcaacgacaauuccacagccacgcugugucucgggcaccaugcggucccuaacggaaccauuguuaagacaaucaccaaugaucaaauugaggugacaaacgcuaccgaacuggugcagucuagcuccacaggcgggaucugcgacucuccgcaccagauccuugauggagagaauuguacccugauugacgcccuccugggcgauccccagugcgacggguuucaaaacaaaaagugggaucuguucgucgaaagaagcaaagccuauuccaauuguuacccuuaugacgugcccgauuacgcuucucuccggagccugguugccuccagcggaacgcuugaguuuaacaaugaaucuuucaacuggaccggcgugacacagaauggcaccuccagcgcuugcaagcgcagaucuaacuccagcuuuuucucucggcugaauuggcucacacaucugaaguuuaaauauccugcccuuaacgucaccaugcccaauaacgagaaguucgacaaacuguacaucuggggagugcaccauccugggacggauaacgaccagauuucccucuaugcgcaggccagcggccgcaucacaguuuccaccaagagaucucaacagacagugauuccgaauaucgggagccggccccgcgucagagauauuccuucccggaucagcaucuacuggaccauugugaaacccggagacauccugcugauuaacucuaccggcaaucucaucgcuccucgcggguacuuuaagauuagauccggaaagagcucuaucaugcggagcgacgcccccaucggcaaauguaacuccgagugcauuacaccgaauggcucuaucccuaacgauaagcccuuccagaaugugaaccgcauuacguauggggcuuguccuagauacgucaaacagaauacccugaaacuugccacaggaaugcggaacguucccgaaaagcaaacccgcggcaucuuuggggcgauugccggauucaucgagaauggcugggaagggaugguggacggaugguauggcuuuagacaccagaacagcgagggcaucgggcaggcugccgaucugaaguccacacaagcugccauuaaucagaucaacggaaaacucaaucggcugauuggcaagaccaacgagaaguuccaccagaucgaaaaagaguucagcgaaguggaggggcgcauucaggaccuugaaaaguacgucgaggauacgaaaaucgaccuguggucuuauaacgccgagcuccugguggcucuggaaaaucaacauacaauugaucucaccgacuccgagaugaacaagcuguuugaaagaaccaaaaagcagcuucgggagaaugcggaagauaugggaaacggcugcuucaagaucuaccacaaaugugacaaugccugcaucgggagcauuagaaacggcacauaugaucaugacguuuaccgcgacgaggcucugaauaaccgguuucagaucaagggaguggagcucaaaucuggcuacaaggauuggauucuguggaucuccuucgccauuagcugcuuucuucugugugucgcccuccugggguucaucaugugggcuugccagaaaggaaauaucagauguaacauuugcaucuga

SEQ ID NO: 192313 - RNA, 1701 nt, Artificial Sequence
  derived and/or modified CDS sequence (opt5) from hemagglutinin__InfluenzaA__AAZ38605
augaagaccaucauugcccugagcuacauccucugccugguguucacacagaaacuucccggcaacgacaauuccacggcuacccugugucucgggcaccaugccgucccuaacggaacaauuguuaagaccaucacaaaugaucaaauugaggugaccaacgcgacagaacuggugcagucuagcuccaccggcgggaucugcgacucuccgcaccagauccuugauggagagaauuguacgcugauugacgcucuccugggcgauccccagugcgacggguuucaaaacaaaaagugggaucuguucgucgaaagaagcaaagccuauuccaauuguuacccuuaugacgugcccgauuacgccucucuccggagccugguugcuuccagcggaacccuugaguuuaacaaugaaucuuucaacuggacaggcgugacccagaauggcacauccagcgccugcaagcgcagaucuaacaauuccuuuuucagccggcugaacuggcucacccaucugaaguuuaaauauccugcucuuaaugucacgaugcccaacaacgagaaguucgacaaacuguacaucuggggagugcaccauccugggacagauaaugaccagauuucucucuaugcccaggcguccggccgcaucaccguuagcacaaagagaucccaacagaccgugauuccgucuaucgggagccggccccgcauuagagaugucccuucccggaucagcaucuacuggaccauugugaaacccggagacauccugcugauuaacucuacaggcaaucucaucgccccucgcggguacuuuaagauuagauccggaaagagcucuaucaugcggagcgacgcucccaucggcaaauguaacuccgagugcauuacgccgaauggcucuaucccuaacgauaagcccuuccagaaugugaaccgcauuaccuauggggccuguccuagauacgucaaacagaauacacugaaacuugcuaccggaaugcggaacguucccgaaaagcaaacacgcggcaucuuuggggccauugcgggauucaucgagaauggcugggaagggaugguggacggaugguauggcuuuagacaccagaacagcgagggcaccgggcaggccgcugaucugaaguccacgcaagccgcuaucaaucagauuaacggaaaacucaaucggcugaucggcaagacaaacgagaaguuccaccagauugaaaaagaguucagcgaaguggaggggagaauccaggaccuugaaaaguacgucgaggauaccaaaauugaccuguggucuuauaacgccgagcuccugguggcccuggaaaaucaacauaccaucgaucucacagacuccgagaugaacaagcuguuugaacgcaccaaaaagcagcuucgggagaaugcugaagauaugggaaacggcugcuucaagauuuaccacaaaugugacaaugcgugcaucgggagcaucagaaacggcacauaugaucaugacguuuaccgcgacgaggcccugaauaaccgguuucagauuaagggaguggagcucaaaucuggcuacaaggauuggauccuguggauuuccuucgcuaucagcugcuuucuucugugugucgcccuccugggguucauuaugugggccugccagaaaggaaauaucagauguaacaucugcauuuga

SEQ ID NO: 192314 - RNA, 1698 nt, Artificial Sequence
  derived and/or modified CDS sequence (opt5) from hemagglutinin__InfluenzaA__AAZ38627
augaaggccaaacugcucgugcugcuuugcaccuucacagcuacguacgccgacaccaucuguauuggcuaucacgcgaacaauagcacagauaccgucgacacaguucuggagaagaacgugaccgugacacauuccgucaaucuccuggaagauucucacaacgggaaacuuugccugcucaagggaaucgcuccccugcagcugggcaauuguagcguggccggguggauucucggaaacccugagugcgaacugcuuaucuccaaagagucuuggagcuacauuguugaaaccccgaaucccgagaacggcacguguuauccuggguacuuugccgacuaugaggaacugagagagcaacucuccucugugagcuccuucgaacgguuugagaucuuccccaagggaagcucuuggccuaaucauaccgucacaggcguguccgcuagcugcucucacaacggcaaguccagcuuuuaccgcaaucugcuuuggcugaccgggaaaaacggacucuaucccaaucugucuauguccuacguuaacaauaaggagaaagaagugcugguccucuggggcgugcaucacccuccgaacaucggggaucagagagcccuguaccacacagagaacgcuuaugugagcgucguuuccucucauuacagccggcgcuucacccccgaaauugccaagagaccuaaagugcgggaccaggagggacgcaucaauuauuacuggacgcuucuggaacccggcgauacaauuaucuuugaggcgaacgggaaucucauugccccuugguaugcuuucgcccuguccagaggauuuggcagcggcaucauuaccucuaacgcucccauggacgagugugaugccaagugccagacaccgcaaggggcgaucaauuccagccuuccuuuccagaacgugcaccccgucaccaucggagaauguccuaaguacgugcggucugccaaacugcgcauggcuaccggccucagaaauauucccagcauccagucccgggggcuguuuggagccauugcuggcuucaucgaagggggauggacaggcaugguugacggcugguauggguaccaucaccagaacgaacaaggaucuggcuacgccgccgaucaaaagagcacgcagaaugcuauuaacgggaucaccaauaaagugaacuccgucaucgagaagaugaauacacaguuuaccgcggugggaaaagaguucaacaagcuggagcgcagaauggagaaucucaacaaaaagguugacgauggcuuccuggacauuuggacauauaacgccgaacuucuggugcuccuggagaaugaacggacccuugacuuucacgauagcaacgucaagaaucuguacgagaaagugaagucucagcucaaaaacaaugcuaaggaaaucgggaacggcugcuucgaguuuuaucauaaauguaauaacgagugcauggaauccgucaagaauggaacguacgacuaucccaaguacagcgaggaaucuaaacugaaccgcgagaagauugauggcgugaaacuggaguccauggggguuuaucagauccucgccauuuacagcacaguggccuccucucugguccuucuggugagccucggagcuaucuccuucuggaugugcucuaauggcagccugcaguguagaaucugcauuuga

SEQ ID NO: 192315 - RNA, 1701 nt, Artificial Sequence
  derived and/or modified CDS sequence (opt5) from hemagglutinin__InfluenzaA__AAZ38638
augaagaccaucauugcccugagcuacauccucugccugguguucgcucagaaacuucccggcaacgacaauuccacagccacgcugugucucgggcaccaugcggucccuaacggaaccauuguuaagacaaucaccaaugaucaaauugaggugacaaacgcuaccgaacuggugcagucuagcuccacaggcgggaucugcgacucuccgcaccagauccuugauggagagaauuguacccugauugacgcccuccugggcgauccccagugcgacggguuucaaaacaaaaagugggaucuguucgucgaaagaagcaaagccuauuccaauuguuacccuuaugacgugcccgauuacgcuucucuccggagccugguugccuccagcggaacgcuugaguuuaacaaugaaucuuucaacuggaccggcgugacacagaauggcaccuccagcgcuugcaagcgcagaucuaacaauuccuuuuucagccggcugaacuggcucacacaucugaaguuuaaauauccugcccuuaaugucaccaugcccaacaacgagaaguucgacaaacuguacaucuggggagugcaccauccugggacggauaaugaccagauuucucucuaugcgcaggccuccggccgcaucacaguuagcaccaagagaucccaacagacagugauuccgaacaucgggucucggccccgcgucagagauauuccuagccggaucuccaucuacuggaccauugugaaacccggagacauccugcugauuaauagcaccggcaaccucaucgcuccucgcggguacuuuaagauuagaucuggaaaguccagcaucaugcggucugacgcccccaucggcaaauguaauagcgagugcauuacaccgaacggcuccaucccuaaugauaagcccuuccagaacgugaaucgcauuacguauggggcuuguccuagauacgucaaacagaacacccugaagcuggccacaggaaugcggaauguucccgaaaaacaaacccgcggcaucuuuggggcgauugccggauucaucgagaacggcugggaagggaugguggacggaugguauggcuuuagacaccaaaauucugagggcaucgggcaggcugccgaucuuaagagcacacaggcugccauuaaccagaucaauggaaaacucaaccggcugauuggcaagaccaacgagaaguuccaccagaucgaaaaagaguucuccgaaguggaggggcgcauucaggaccuugaaaaguacgucgaggauacgaaaaucgaccuguggagcuauaaugccgagcuccugguggcucuggaaaaccaacauacaauugaucucaccgacucugagaugaauaagcuguuugaaagaaccaaaaagcagcuucgggagaacgcggaagauaugggaaauggcugcuucaagaucuaccacaaaugugacaacgccugcaucggguccauuagaaauggcacauaugaucaugacguuuaccgcgacgaggcucugaacaaucgguuucagaucaagggaguggagcucaaaagcggcuacaaggauuggauucuguggaucucuuucgccauuuccugcuuucuucugugugucgcccuccugggguucaucaugugggcuugccagaaaggaaacaucagauguaauauuugcaucuga

SEQ ID NO: 192316 - RNA, 1701 nt, Artificial Sequence; identical to SEQ ID NO: 192315
  derived and/or modified CDS sequence (opt5) from hemagglutinin__InfluenzaA__AAZ38650

SEQ ID NO: 192317 - RNA, 1701 nt, Artificial Sequence
  derived and/or modified CDS sequence (opt5) from hemagglutinin__InfluenzaA__AAZ43370
augaagaccaucauugcccugagcuacaucuucugccucguguuugcucagaaacugcccggcaacgacaauuccacagccacgcuuugucuggggcaccaugcggucccuaacggaacccucguuaagacaauuaccaaugaucaaaucgaggugacaaacgcuaccgaacuggugcagucuagcuccacaggcagaauuugcgacucuccgcaccggauccuugaugggaaaaauuguacccugaucgacgcccuccugggagauccccauugcgacggcuuccagaacgagaagugggaucuguuuauugaacgcagcaaagccuucuccaauuguuauccuuacgacguccccgauuaugcuucucucagaagccugguggccuccagcgggacgcuugaguuuaucaacgaaggauucaauuggaccggcguuacacagucuggcggguccuacgcuugcaagcggggaagcgugaaguccuuuuucucucgccugaacuggcucuaugagagcgaguacaaauauccugcccugaaugucaccaugcccaacaauggcaaguuugacaaacuuuacauuuggggagugcaccauccuucuacagaaaaggagcaaaccaaccuguacguuagagcguccgggcgggugacggucagcacaaaacgcucccagcagaccgugaucccgaauauuggcucuagacccugggugcgggggcucagcucccgcaucagcauuuauuggacaaucgucaagccuggagauauccugcugauuaacucuaccggcaaccucaucgcccccagaggcuacuucaagauucggaccgggaaauccagcaucaugcgcucugacgcuccuauuggaacauguagcuccgaaugcaucacgcccaauggcucuaucccgaacgauaagccuuuucagaauguuaacaaaauuaccuauggggccugucccagauacgugaagcaaaauacacugaaacuugcuaccggaaugcggaacgugccugagaagcagacacgcggcaucuucggggccauugcgggauuuaucgagaauggcugggaaggcauggucgacgggugguauggauucagacaccagaacagcgagggcaccgggcaggccgcugaccugaaauccacgcaagccgcuauugaucagaucaauggaaagcucaaccggcugaucgaaaagacaaaugagaaauuccaccagauugaaaaggaguuuagcgagguggaaggcagaauccaagaccuugagaaauacguugaagauaccaagauugaccuguggucuuauaacgccgagcuccugguggcccuggaaaaucagcauaccaucgaucucacagacuccgagaugaacaaacuguucgagaagacccgcaagcagcuucgggaaaaugcugaggauauggggaacggcugcuuuaaaauuuaccacaagugugacaacgcgugcaucggaagcauuagaaauggcacauacgaucaugacgucuaucgcgaugaagcccugaacaaucgguuccagaucaaagggguggagcucaagucuggauacaaagacuggauccuguggauuuccuuugcuaucagcugcuuccuucuguguguugugcuccugggcuuuauuaugugggccugccaaaaggggaacaucagauguaauauuugcaucuga

SEQ ID NO: 192318 - RNA, 1701 nt, Artificial Sequence; identical to SEQ ID NO: 192190
  derived and/or modified CDS sequence (opt5) from hemagglutinin__InfluenzaA__AAZ43394

SEQ ID NO: 192319 - RNA, 1701 nt, Artificial Sequence
  derived and/or modified CDS sequence (opt5) from hemagglutinin__InfluenzaA__AAZ43405
augaagaccaucauugcccugagcuacauccucugccugguguucgcucagaaacuucccggcaacgacaauuccacagccacgcugugucucgggcaccaugcggucccuaacggaacccugguuaagacaauuaccaaugaucaaaucgaggugacaaacgcuaccgaacuugugcagucuagcuccacaggcagaauuugcgacucuccgcaccagauccuggauggggagaauuguacccucaucgacgcccugcugggagauccccauugcgacggcuuucagaacaaagaaugggaucucuucgucgagcggagcaaggccuauuccaauuguuacccuuaugacgugcccgauuacgcuucucugcgcagccuuguugccuccagcgggacgcuggaauuuaacaaugagucuuucaacuggaccggaguggcucaaaauggcacauccagcgccugcaaaagacggucuaacaaguccuuuuucagccgccucaauuggcugcaccagcuuaaguauaaauacccugcgcugaacgucaccaugcccaauaacgagaaguuugacaaacucuauauuuggggcgugcaucacccuucuacagauuccgaccagaucagccuguacgcccaggcuuccgggagaguuaccgugucuacgaagcggagccaacagacagucauuccgaacaucggaucccgccccugggugagaggcgugagcucucggauuuccaucuacuggaccauugucaaaccuggggauauccugcucaucaauuguacaggaaaccugauugcccccagaggcuauuucaagaucagaagcgggaagucuagcauuaugcgguccgacgcuucuaucggaaaaugcaauagcgaauguauuaccccuaacggcuccauccccaaugacaagccguuucagaacguuaaucgcaucaccuacggcgccugcccuagauaugugaaacagaacacacuuaagcuggcgacggggaugcggaaugugcccgagaaacaaacccgcggaauuuucggcgccaucgcuggguuuauugaaaacggaugggagggcauggucgaugggugguacggauucagacaccagaauagcgagggcacaggccaggccgcugaccucaagucuacccaagccgccaucaaccagauuaaugggaaacugaaccggcuuaucgaaaagacaaaugagaaguuucaucagaucgaaaaagaguucuccgaaguggagggacgcauucaggaucuggagaaguauguugaagacaccaaaaucgaucucuggagcuacaacgcugagcugcugguggcgcucgaaaaccaacacacgauugaccugacagauucugagaugaauaaacuuuucgaacgcaccaagaagcagcugcgggagaacgccgaggacaugggcaauggguguuuuaagaucuaucauaaaugcgauaacgcuugcauuggauccaucagaaauggcaccuacgaccacgaugucuaccgcgacgaagcccucaacaaucgguuccagauuaaggggguggagcugaaaagcggcuauaaggacuggauccuuuggaucuccuuugccauuucuuguuuccugcucugcguugugcugcugggauuuaucaugugggcuugucagaaaggcaacauuagaugcaauaucuguauuuga

SEQ ID NO: 192320 - RNA, 1701 nt, Artificial Sequence; identical to SEQ ID NO: 192119
  derived and/or modified CDS sequence (opt5) from hemagglutinin__InfluenzaA__AAZ74352

SEQ ID NO: 192321 - RNA, 1701 nt, Artificial Sequence; identical to SEQ ID NO: 192275
  derived and/or modified CDS sequence (opt5) from hemagglutinin__InfluenzaA__AAZ74363

SEQ ID NO: 192322 - RNA, 1698 nt, Artificial Sequence
  derived and/or modified CDS sequence (opt5) from hemagglutinin__InfluenzaA__AAZ74374
augaaggugaaacugcucauccugcuuugcaccuucacagccacguacgcugacaccauuuguaucggcuaucacgccaacaauagcacagauaccgucgacacaguucuggagaagaacgugaccgugacacauuccgucaaucuccuggaagauucucacaacgggaaacuuugccugcucaagggaauugcgccccugcagcugggcaauuguagcguggcuggguggauccucggaaacccugagugcgaacugcuuauuuccaaagagucuuggagcuacaucguugaaaccccgaaucccgagaacggcgccuguuauccuggguacuuugccgacuaugaggaacugagagagcaacucuccucugugagcuccuucgaacgguuugagaucuuccccaaggagagcucuuggccuaaucauacggucaccggaguguccgcuagcugcucucacaacggcaaguccagcuuuuaccgcaaucugcuuuggcugacaggcaaaaacgggcucuaucccaaucugucuaaguccuacgccaacaauaaagaaaaggagguucugauucucuggggagugcaucacccuccgaacaucggcgaucagagaacccuguaccacacagaaaacgcuuaugucagcgugguguccucucauuacgggcggcgcuucacccccgagauuacgaaaagaccuaagguccgggaccaggaaggacgcaucaauuauuacuggacacuucuggagcccggcgauaccauuaucuuugaggccaacgggaaucucauugcgccuugguaugccuucgcucugagcagaggauuuggcuccggcaucaucacaagcaacgcccccauggacgaaugugaugcuaagugccagaccccgcaaggggccauuaauucuucccuuccuuuccagaacguucaccccgugaccaucggagaguguccuaaauacgugcggagcgcgaagcugcgcauggucacaggccucagaaauauucccucuauccagagccgggggcuguuuggagccauugcuggcuucaucgaagggggauggacgggcaugguggacggcugguauggguaccaucaccagaacgagcaaggauccggcuacgccgcugaucagaaaucuacccagaaugccaucaacgggauuacaaauaagguuaacagcgugaucgaaaagaugaauacccaguuuacagccgucggaaaagaguucaacaaacuggagcgcagaauggaaaaucucaacaagaagguggacgauggcuuccuggacguuuggaccuauaacgcugagcuucuggugcuccuggaaaaugagcggacgcuugacuuucacgauuccaacgucaaaaaucuguacgaaaaggugaaaagccaacucaagaacaaugcgaaagagauugggaacggcugcuucgaguuuuaucauaaguguaauaacgaaugcauggagucugucaagaauggaacauacgacuaucccaaauacuccgaagagagcaagcugaaccgcgagaaaaucgauggcgugaagcuggacucuauggggguuuaucagauucucgccaucuacuccaccguggcuagcucccugguccuucuggugucucucggagccaucagcuucuggaugugcuccaauggcucucugcaguguagaauuugcaucuga

SEQ ID NO: 192323 - RNA, 1701 nt, Artificial Sequence
  derived and/or modified CDS sequence (opt5) from hemagglutinin__InfluenzaA__AAZ74397
augaacaccaucauugcccugagcuacauccucugccugguguucgcucagaaacuucccggcaaugacaacuccacagccacgcugugucucgggcaccaugcggucccuaauggaacccugguuaagacaauuaccucugaucaaaucgaggugacaaacgcuaccgaacuugugcagagcuccucuacaggcagaauuugcgacagcccgcaccggauccuggauggggagaauuguacccucaucgacgcccugcugggagauccccucugcgacggcuuucagaacaaggaaugggaucuguucgucgagcgcuccaaagccuauucuaauuguuacccuuaugacgugcccgauuacgcuagccuuagaucccugguugccagcucugggacgcucgaauuuaacaaugaguccuucaacuggaccggaguggcucagaauggcaccagcuuugccugcaagcggcgcucuauuaaauccuucuuuagcagacugaacuggcuucaucaacugaaguauaaguacccugcgcucaaugucacaaugcccaacaaugacaaauucgauaagcuguauaucuggggcgugcaccauccugggacagacucugaucagaccucccuguacgcccaggcuagcggacggguuacgguguccacaaaacgcucucagcaaaccgucauuccgaacaucggcagcagacccugggugcgcgggguguccagccggauuucuaucuacuggacaauugucaagccuggagacauccuccugaucaacuccaccggcaaucuuauugcccccagaggguauuuuaaaauccggagcggaaagucuagcauuaugcgcuccgacgcuccuaucggcaaguguaacucugagugcauuacccccaauggcagcaucccgaacgggaaaccuuuccagaauguuaacagaaucacauacggagccuguccccgguaugugaagcagaauacgcugaaacucgcgaccggcaugcgcaacgugccugaaaagcagacaagagggauuuuuggagccaucgcuggcuucauugagaaugggugggaaggaauggucgauggcugguacggcuuucggcaccaaaacuccgaggggaccggacaggccgcugaccugaaaagcacacaggccgccaucaaucaaauuaacggcaaacuuaauagacugaucgagaagaccaacgaaaaguuccaccagaucgagaaggaguucacggaaguggaagggcgcauucaggaucucgagaaauauguugaggacacaaagaucgaucuguggucuuacaaugcugaacugcucguggcgcuggagaaccagcauaccauugaccuuaccgauuccgaaaugaacaaacuguuugagcggacaagaaagcaacuccgcgaaaaugccgaggacaugggaaacggcugcuucaaaaucuaucacaagugugauaaugcuugcauugggagcauccggaacggcaccuacgaccaugaugucuacagagacgaggcccugaauaaccgcuuucagauuaagggaguggaacuuaaaucuggcuauaaggacuggauccuguggaucuccuucgccacaagcugcuuucuccuguguguugugcugcucggguucauuaugugggcuugccagaaaggaaauauccgguguaacauuugcaucuga

SEQ ID NO: 192324 - RNA, 1701 nt, Artificial Sequence
  derived and/or modified CDS sequence (opt5) from hemagglutinin__InfluenzaA__AAZ74408
augaagaccaucauugcccugagcuacauccucugccugguguucgcucagaaacuucccggcaacgacaauuccacagccacgcugugucucgggcaccaugcggucccuaacggaacccugguuaagacaauuaccaaugaucaaaucgaggugacaaacgcuaccgaacuugugcagucuagcuccacaggcagaauuugcgacucuccgcaccagauccuggauggggagaauuguacccucaucgacgcccugcugggagauccccauugcgacggcuuucagaacaaagaaugggaucucuucgucgagcggagcaaggccuauuccaauuguuacccuuaugacgugcccgauuacgcuucucugcgcagccuuguugccuccagcgggacgcuggaauuuaacaaugagucuuucaacuggaccggaguggcucaaaauggcacauccagcgccugcaaaagacggucuaacaaguccuuuuucagccgccucaauuggcugcaccagcuuaaguauaaauacccugcgcugaacgucaccaugcccaauaacgagaaguuugacaaacucuauauuuggggcgugcaucacccuucuacagauuccgaccagaucagccuguacgcccaggcuuccgggagaguuaccgugucuacgaagcggagccaacagacagucauuccgaacaucggaucccgccccugggugagaggcgugagcucucggauuuccaucuacuggaccauugucaaaccuggggauauccugcucaucaauagcacaggaaaccugauugcccccagaggcuauuucaagaucagaucuggaaagagcuccauuaugcggucugacgcuccuaucgggaaauguaauagcgaaugcauuacccccaacggcuccaucccgaaugacaagccuuuucagaacguuaaucgcaucaccuacggcgccugucccagauaugugaaacagaacacacuuaagcuggcgacggggaugcggaaugugccugagaaacaaacccgcggaauuuucggcgccaucgcuggguuuauugaaaacggaugggagggcauggucgaugggugguacggauucagacaccagaauagcgagggcacaggccaggccgcugaccucaagucuacccaagccgccaucaaccagauuaaugggaaacugaaccggcuuaucgaaaagacaaaugagaaguuucaucagaucgaaaaagaguucuccgaaguggagggacgcauucaggaucuggagaaguauguugaagacaccaaaaucgaucucuggagcuacaacgcugagcugcugguggcgcucgaaaaccaacacacgauugaccugacagauucugagaugaauaaacuuuucgaacgcaccaagaagcagcugcgggagaacgccgaggacaugggcaaugggugcuuuaagaucuaucauaaaugugauaacgcuugcauuggauccaucagaaauggcaccuacaaccacgacgucuaccgcgaugaagcccucaauaaccgguuccagauuaaggggguggagcugaaaagcggcuauaaggacuggauccuuuggaucuccuuugccauuucuugcuuccugcucuguguugugcugcugggauuuaucaugugggcuugccagaaaggcaauauuagauguaacaucugcauuuga

SEQ ID NO: 192325 - RNA, 1701 nt, Artificial Sequence; identical to SEQ ID NO: 192258
  derived and/or modified CDS sequence (opt5) from hemagglutinin__InfluenzaA__AAZ74430

SEQ ID NO: 192326 - RNA, 1701 nt, Artificial Sequence; identical to SEQ ID NO: 192315
  derived and/or modified CDS sequence (opt5) from hemagglutinin__InfluenzaA__AAZ74441

SEQ ID NO: 192327 - RNA, 1701 nt, Artificial Sequence
  derived and/or modified CDS sequence (opt5) from hemagglutinin__InfluenzaA__AAZ74452
augaagaccaucauugcccugagcuacauccucugccugguguucgcucagaaacuucccggcaacgacaauuccacagccacgcugugucucgggcaccaugcggucccuaacggaaccauuguuaagacaaucaccaaugaucaaauugaggugacaaacgcuaccgaacuggugcagucuagcuccacaggcgggaucugcgacucuccgcaccagauccuugauggagagaauuguacccugauugacgcccuccugggcgauccccagugcgacggguuucaaaacaaaaagugggaucuguucaucgaaagaagcaaagccuauuccaauuguuacccuuaugacguccccgauuacgcuucucuccggagccugguggccuccagcggaacgcuugaguuuaacaaugaaucuuucaacuggaccggcguuacacagaauggcaccuccagcgcuugcaagcgcagaucuaacaauuccuuuuucagccggcugaacuggcucacacaucugaaguuuaaauauccugcccuuaaugugaccaugcccaacaacgagaaguucgacaaacuguacauuuggggaguccaccauccugggacggauaaugaccagaucucucucuaugcgcaggccuccggccgcauuacagugagcaccaagagaucccaacagacaguuaucccgaacauugggucucggccccgcgugagagauaucccuagccggaucuccauuuacuggaccaucgucaaacccggagacauucugcugaucaauagcaccggcaaccucauugcuccucgcggguacuuuaagaucagaucuggaaaguccagcaucaugcggucugacgcccccauuggcaaauguaauagcgagugcaucacaccgaacggcuccauuccuaaugauaagcccuuccagaacgugaaucgcaucacguauggggcuuguccuagauacgugaaacagaacacccugaagcuggccacaggaaugcggaauguccccgaaaaacaaacccgcggcauuuuuggggcgaucgccggauucaucgagaacggcugggaagggaugguugacggaugguauggcuuuagacaccaaaauucugagggcauugggcaggcugccgaucuuaagagcacacaggcugccaucaaccagauuaauggaaaacucaaccggcugaucggcaagaccaacgagaaguuccaccagauugaaaaagaguucuccgaaguggaggggagaauccaggaccuugaaaaguacguggaggauacgaaaauugaccuguggagcuauaaugccgagcuccuggucgcucuggaaaaccaacauacaaucgaucucaccgacucugagaugaauaagcuguuugaacgcaccaaaaagcagcuucgggagaacgcggaagauaugggaaauggcugcuucaagaucuaccacaaaugugacaacgccugcauuggguccaucagaaauggcacauaugaucaugacguguaccgcgacgaggcucugaacaaucgguuucagauuaagggaguugagcucaaaagcggcuacaaggauuggauccuguggauuucuuucgccaucuccugcuuucuucuguguguggcccuccugggguucaucaugugggcuugccagaaaggaaacauuagauguaauaucugcauuuga

SEQ ID NO: 192328 - RNA, 1701 nt, Artificial Sequence
  derived and/or modified CDS sequence (opt5) from hemagglutinin__InfluenzaA__AAZ74463
augaagaccaucauugcccugagcuacauccucugccugguguucgcucagaaacuucccggcaacgacaauuccacagccacgcugugucucgggcaccaugcggucccuaacggaaccauuguuaagacaaucaccaaugaucaaauugaggugacaaacgcuaccgaacuggugcagucuagcuccacaggcgggaucugcgacucuccgcaccagauccuugauggagagaauuguacccugauugacgcccuccugggcgauccccagugcgacggguuucaaaacaaaaagugggaucuguucgucgaaagaagcaaagccuauuccaauuguuacccuuaugacgugcccgauuacgcuucucuccggagccugguugccuccagcggaacgcuugaguuuaacaaugaaucuuucaacuggaccggcgugacacagaauggcaccuccagcgcuugcaagcgcagaucuaacaauuccuuuuucagccggcugaacuggcucacacaucugaaguuuaaauauccugcccuuaaugucaccaugcccaacaacgagaaguucgacaaacuguacaucuggggagugcaccauccugggacggauaaugaccagauuucucucuaugcgcaggccuccggccgcaucacaguuagcaccaagagaucccaacagacagugauuccgaacaucgggucucggccccgcgucagagauauuccuagccggaucuccaucuacuggaccauugugaaacccggagacauccugcugauuaauagcaccggcaaccucaucgcuccucgcggguacuuuaagauuagaucuggaaaguccagcaucaugcggucugacgcccccaucggcaaauguaauagcgagugcauuacaccgaacggcuccaucccuaaugauaagcccuuccagaacgugaaucgcauuacguauggggcuuguccuagauacgucaaacagaacacccugaagcuggccacaggaaugcggaauguucccgaaaaacaaacccgcggcaucuuuggggcgauugccggauucaucgagaacggcugggaagggaugguggacggaugguauggcuuuagacaccaaaauucugagggcaucgggcaggcugccgaucuuaagagcacacaggcugccauuaaccagaucaauggaaaacucaaccggcugauuggcaagaccaacgagaaguuccaccagaucgaaaaagaguucuccgaaguggaggggcgcauucaggaccuugaaaaguacgucgaggauacgaaaaucgaccuguggagcuauaaugccgagcuccugguggcucuggaaaaccaacauacaauugaucucaccgacucugagaugaauaagcuguuugaaagaaccaaaaagcagcuucgggagaacgcggaagauaugggaaauggcugcuucaagaucuaccacaaaugugacaacgccugcaucggguccauuagaaauggcacauaugaucaugacguuuaccgcgacgaggcucugaacaaucgguuucagaucaagggaguggagcucaaaagcggcuacaaggauuggauucuguggaucucuuucgccauuuccugcuuucuucugugugucgugcuccugggguucaucaugugggccugccagaaaggaaacaucagauguaauauuugcaucuga

SEQ ID NO: 192329 - RNA, 1701 nt, Artificial Sequence
  derived and/or modified CDS sequence (opt5) from hemagglutinin__InfluenzaA__AAZ74474
augaagaccaucauugcccugagcuacauccucugccugguguucgcucagaaacuucccggcaacgacaauuccacagccacgcugugucucgggcaccaugcggucccuaacggaaccauuguuaagacaaucaccaaugaucaaauugaggugacaaacgcuaccgaacuggugcagucuagcuccacaggcgggaucugcgacucuccgcaccagauccuugauggagagaauuguacccugauugacgcccuccugggcgauccccagugcgacggguuucaaaacaaaaagugggaucuguucgucgaaagaagcaaagccuauuccaauuguuacccuuaugacgugcccgauuacgcuucucuccggagccugguugccuccagcggaacgcuugaguuuaacaaugaaucuuucaacuggaccggcgugacacagaauggcaccuccagcgcuugcaagaagcgcucuaacaauuccuuuuucagcagacugaacuggcucacacaucugaaauuuaaguauccugcccuuaaugucaccaugcccaacaacgagaaauucgacaagcuguacaucuggggagugcaccauccugggacggauaaugaccagauuucucucuaugcgcaggccuccggccggaucacaguuagcaccaaacgcucccaacagacagugauuccgaacaucgggucuagaccccggguccgcgauauuccuagcagaaucuccaucuacuggaccauugugaagcccggagacauccugcugauuaauagcaccggcaaccucaucgcuccucggggguacuuuaagauucgcucuggaaaauccagcaucaugagaucugacgcccccaucggcaaguguaauagcgagugcauuacaccgaacggcuccaucccuaaugauaaacccuuccagaacgugaaucggauuacguauggggcuuguccucgcuacgucaagcagaacacccugaaacuugccacaggaaugagaaauguucccgaaaagcaaacccggggcaucuuuggggcgauugccggauucaucgagaacggcugggaagggaugguggacggaugguauggcuuucgccaccaaaauucugagggcaucgggcaggcugccgaucugaaaagcacacaggcugccauuaaccagaucaauggaaagcucaacagacugauuggcaagaccaacgagaaauuccaccagaucgaaaaggaguucuccgaaguggaggggcggauucaggaccuugaaaaauacgucgaggauacgaagaucgaccuguggagcuauaaugccgagcuccugguggcucuggaaaaccaacauacaauugaucucaccgacucugagaugaauaaacuguuugaaagaaccaagaagcagcuucgcgagaacgcggaagauaugggaaauggcugcuucaaaaucuaccacaagugugacaacgccugcaucggguccauucggaauggcacauaugaucaugacguuuacagagacgaggcucugaacaaucgcuuucagaucaaaggaguggagcucaagagcggcuacaaagauuggauucuguggaucucuuucgccauuuccugcuuucuucugugugucgcccuccugggguucaucaugugggcuugccagaagggaaacauccgguguaauauuugcaucuga

SEQ ID NO: 192330 - RNA, 1701 nt, Artificial Sequence; identical to SEQ ID NO: 192327
  derived and/or modified CDS sequence (opt5) from hemagglutinin__InfluenzaA__AAZ74485

SEQ ID NO: 192331 - RNA, 1701 nt, Artificial Sequence; identical to SEQ ID NO: 192328
  derived and/or modified CDS sequence (opt5) from hemagglutinin__InfluenzaA__AAZ74496

SEQ ID NO: 192332 - RNA, 1701 nt, Artificial Sequence; identical to SEQ ID NO: 192327
  derived and/or modified CDS sequence (opt5) from hemagglutinin__InfluenzaA__AAZ74507

SEQ ID NO: 192333 - RNA, 1701 nt, Artificial Sequence; identical to SEQ ID NO: 192328
  derived and/or modified CDS sequence (opt5) from hemagglutinin__InfluenzaA__AAZ74518

SEQ ID NO: 192334 - RNA, 1701 nt, Artificial Sequence; identical to SEQ ID NO: 192327
  derived and/or modified CDS sequence (opt5) from hemagglutinin__InfluenzaA__AAZ74529

SEQ ID NO: 192335 - RNA, 1701 nt, Artificial Sequence
  derived and/or modified CDS sequence (opt5) from hemagglutinin__InfluenzaA__AAZ74551
augaagaccaucauugcccugagcuacauccucugccugguguucgcucagaaacuucccggcaacgacaauuccacagccacgcugugucucgggcaccaugcggucccuaacggaaccauuguuaagacaaucaccaaugaucaaauugaggugacaaacgcuaccgaacuggugcagucuagcuccacaggcgggaucugcgacucuccgcaccagauccuugauggagagaauuguacccugauugacgcccuccugggcgauccccagugcgacggguuucaaaacaaaaagugggaucuguucgucgaaagaagcaaagccuauuccaauuguuacccuuaugacgugcccgauuacgcuucucuccggagccugguugccuccagcggaacgcuugaguuuaacaaugaaucuuucaacuggaccggcgugacacagaauggcaccuccagcgcuugcaagcgcagaucuaacaauuccuuuuucagccggcugaacuggcucacacaucugaaguuuaaauauccugcccuuaaugucaccaugcccaacaacgagaaguucgacaaacuguacaucuggggagugcaccauccugggacggauaaugaccagauuucucucuaugcgcaggccuccggccgcaucacaguuagcaccaagagaucccaacagacagugauuccgaacaucgggucucggccccgcgucagagauauuccuagccggaucuccaucuacuggaccauugugaaacccggagacauccugcugauuaauagcaccggcaaccucaucgcuccucgcggguacuuuaagauuagaucuggaaaguccagcaucaugcggucugacgcccccaucggcaaauguaauagcgagugcauuacaccgaacggcuccaucccuaaugauaagcccuuccagaacgugaaucgcauuacguauggggcuuguccuagauacgucaaacagaacacccugaagcuggccacaggaaugcggaauguucccgaaaaacaaacccgcggcaucuuuggggcgauugccggauucaucgagaacggcugggaagggaugguggacggaugguauggcuuuagacaccaaaauucugagggcaucgggcaggcugccgaucuuaagagcacacaggcugccauuaaccagaucaauggaaaacucaaccggcugauuggcaagaccaacgagaaguuccaccagaucgaaaaagaguucuccgaaguggaggggcgcauucaggaccuugaaaaguacgucgaggauacgaaaaucgaccuguggagcuauaaugccgagcuccugguggcucuggaaaaccaacauacacucgaucugaccgacucugagaugaauaaacuuuuugaaagaaccaagaagcagcugcgggagaacgcggaagauaugggaaauggcugcuucaagauuuaccacaaaugugacaacgccugcaucggguccaucagaaauggcacauaugaucaugacguuuaccgcgacgaggcucucaacaaucgguuucagauuaagggaguggagcugaaaagcggcuacaaggauuggauccuuuggauuucuuucgccaucuccugcuuucugcucugugucgcccugcugggguucauuaugugggcuugccagaaaggaaacaucagauguaauaucugcauuuga

SEQ ID NO: 192336 - RNA, 1701 nt, Artificial Sequence; identical to SEQ ID NO: 192258
  derived and/or modified CDS sequence (opt5) from hemagglutinin__InfluenzaA__AAZ74562

SEQ ID NO: 192337 - RNA, 1701 nt, Artificial Sequence
  derived and/or modified CDS sequence (opt5) from hemagglutinin__InfluenzaA__AAZ74573
augaagaccaucauugcccugagcuacauccucugccugguguucgcucagaaacuucccggcaacgacaauuccacagccacgcugugucucgggcaccaugcggucccuaacggaaccauuguuaagacaaucaccaaugaucaaauugaggugacaaacgcuaccgaacuggugcagucuagcuccacaggcgggaucugcgacucuccgcaccagauccuugauggagagaauuguacccugauugacgcccuccugggcgauccccagugcgacggguuucaaaacaaaaagugggaucuguucaucgaaagaagcaaagccuauuccaauuguuacccuuaugacguccccgauuacgcuucucuccggagccugguggccuccagcggaacgcuugaguuuaacaaugaaucuuucaacuggaccggcguuacacagaauggcaccuccagcgcuugcaagcgcagaucuaacaauuccuuuuucagccggcugaacuggcucacacaucugaaguuuaaauauccugcccuuaaugugaccaugcccaacaacgagaaguucgacaaacuguacauuuggggaguccaccauccugggacgggcaaugaucagaucucucucuaugcgcaggccuccgggcgcauuacagugagcaccaagagaucccaacagacaguuaucccgaacauuggaucucggccccgcgugagagacaucccuagccggaucuccauuuacuggaccaucgucaaacccggcgauauucugcugaucaauagcaccgggaaccucauugcuccucgcggauacuuuaagaucagaucuggcaaguccagcaucaugcggucugacgcccccauuggcaaauguaauagcgagugcaucacaccgaacggguccauuccuaaugacaagcccuuccagaacgugaaucgcaucacguauggagcuuguccuagauacgugaaacagaacacccugaagcuggccacaggcaugcggaauguccccgaaaaacaaacccgcgggauuuuuggagcgaucgccggcuucaucgagaacgggugggaaggaaugguugauggcugguauggcuuuagacaccaaaauucugaggggauuggacaggcugccgaccuuaagagcacacaggcugccaucaaccagauuaauggcaaacucaaccggcugaucgggaagaccaacgagaaguuccaccagauugaaaaagaguucuccgaaguggagggaagaauccaggaucuugaaaaguacguggaggacacgaaaauugaucuguggagcuauaaugccgagcuccuggucgcucuggaaaaccaacauacaaucgaccucaccgauucugagaugaauaagcuguuugaacgcaccaaaaagcagcuucgggagaacgcggaagacaugggcaaugggugcuucaagaucuaccacaaaugugauaacgccugcauuggcuccaucagaaauggaacauaugaccaugauguguaccgcgacgaggcucugaacaaucgguuucagauuaagggcguugagcucaaaagcggguacaaggacuggauccuguggauuucuuucgccaucuccugcuuucuucuguguguggcccuccugggauucaucaugugggcuugccagaaaggcaacauuagauguaauaucugcauuuga

SEQ ID NO: 192338 - RNA, 1701 nt, Artificial Sequence
  derived and/or modified CDS sequence (opt5) from hemagglutinin__InfluenzaA__AAZ74584
augaagaccaucauugcccugagcuacauccucugccugguguucgcucagaaacuucccggcaacgacaauuccacagccacgcugugucucgggcaccaugcggucccuaacggaacccugguuaagacaauugcuaaugaucaaaucgaggugaccaacgccacagaacuugugcagucuagcuccaccggcagaauuugcgacucuccgcaccagauccuggauggggagaauuguacacucaucgacgcccugcugggagauccccauugcgacggcuuucagaacaaagaaugggaucucuucgucgagcggagcaaggcuuauuccaauuguuacccuuaugacgugcccgauuacgccucucugcgcagccuuguugcuuccagcgggacccuggaauuuaacaaugagucuuucaacuggacgggaguggcccaaaauggcaccuccagcgcgugcaaaagacggucuaacaaguccuuuuucagccgccucaauuggcugcaccagcuuaaguauaaauacccugcccagaacgucacaaugcccaauaacgagaaguuugacaaacuguauauuuggggcgugcaucacccuucuaccgauuccgaccagaucagccucuacgcucaagccuccgggagaguuacagugucuaccaagcggagccagcagacggucauuccgaacaucggaucccgccccugggugagaggcgugagcucucggauuuccaucuacuggacaauugucaaaccuggggauauccugcugaucaauagcaccggaaaccucauugcuccccgcggcuauuucaagaucagaucuggaaagagcuccauuaugcggucugacgccccuaucgggaaauguaauagcgaaugcauuacacccaacggcuccaucccgaaugacaagccuuuucagaacguuaaucgcaucaccuacggcgcgugucccagauaugugaaacaaaacacccugaaacuugccacagggaugcggaaugugccugagaaacagacgcgcggaauuuucggcgcuaucgccggguuuauugaaaacggaugggagggcauggucgaugggugguacggauucagacaccagaauagcgagggcaccggccaagcugccgaccugaagucuacacaggccgcuaucaaccagauuaaugggaaacucaaccggcugaucgaaaagaccaaugagaaguuucaucagaucgaaaaagaguucuccgaaguggagggacgcauucaagaucuugagaaguauguugaagacacaaaaaucgaucuguggagcuacaacgcggagcuccugguggcccuggaaaaccagcacaccauugaccucacggauucugagaugaauaagcuguucgaaagaacaaagaagcagcuucgggagaacgcugaggacaugggcaaugggugcuuuaagaucuaucauaaaugugauaacgccugcauuggauccaucagaaauggcaccuacgaccacgaugucuaccgcgacgaagcccugaacaaucgguuccagauuaaggggguggagcucaaaagcggcuauaaggacuggauccuguggaucuccuuugcuauuucuugcuuccuucuguguguugcccuccugggauuuaucaugugggcgugccaaaaaggcaacauuagauguaauaucugcauuuga

SEQ ID NO: 192339 - RNA, 1701 nt, Artificial Sequence; identical to SEQ ID NO: 192315
  derived and/or modified CDS sequence (opt5) from hemagglutinin__InfluenzaA__AAZ74595

SEQ ID NO: 192340 - RNA, 1701 nt, Artificial Sequence
  derived and/or modified CDS sequence (opt5) from hemagglutinin__InfluenzaA__AAZ74617
augaagaccaucauugcccugagcuacauccucugccugguguucgcucagaaacuucccgucaacgacaauuccacagccacgcugugucucggccaccaugcgguuccuaacgggacccuggugaagacaauuaccaaugaucacaucgaggugacaaacgcuaccgaacuuguccaaucuagcuccacaggaagaauuugcgacucuccgcaucagauccuggauggcgagaauuguacccucaucgacgcccugcugggggauccccacugcgacggauuucagaacaaagaaugggaucucuucguggagcggagcacggccuauuccaauuguuacccuuaugacguucccgauuacgcuucucugcgcagccuuguggccuccagcggcacccuggaauuuaacaaugagucuuucaacuggacaggggucgcucagaauggaaccuccagcgccugcaagagacggucuauuaaauccuuuuucagccgccucaacuggcugcaucaacuuaaguauaaguacccugcgcugaaugugacaaugcccaacaaugagaaauuugacaagcucuauaucuggggcguucaccacccuucuaccgauuccgaccagauuagccuguacgcccaggcuuccggcagagugacggucucuacaaaacggagccagcaaaccgugaucccgaacauugggucccgccccugggugagaggagucagcucuaagaucuccauuuacuggacaaucguuaaaccuggcgauauccugcucauuaacagcaccgggaaucugaucgcuccccggggauauuucaagauucgcucuggcaagagcuccaucaugagaucuaacgccccuauugggaaauguaauagcgaaugcaucacccccaacggauccaucccgaaugacaagccuuuucagaacgugaaucggauuacauacggcgccuguccccgcuaugugaaacagaacacgcuuaagcuggcgaccggcaugagaaaugucccugagaaacagacacgggggaucuucggagccauugcuggcuuuaucgaaaacgggugggagggaaugguggacggcugguacggguuccgccaucaaaauagcgagggaaccggccaggccgcugaucucaagucuacacaggccgccauuaaccaaaucaauggcaaacugaacagacuuaucgaaaagaccaaugagaaguuucaccagauugaaaaagaguucuccgaaguugaggggcggauccaggaccuggagaaguauguggaagauacgaaaauugaccucuggagcuacaacgcugagcugcuggucgcgcucgaaaaccagcauacaaucgaucugaccgacucugagaugaauaagcuguucgaaagaacccgcaaacaacugcgggagaacgccgaggauaugggaaauggcugcuuuaagauuuaucacaagugugacaacgcuugcaucggguccauuagaaauggaacauacgaucacgacguguaccgcgaugaagcccucaacaaucgguuccagaucaaaggcguugagcuuaagagcggguauaaagacuggauccuuuggauuuccuuugccaucucuugcuuccugcucugugugguccugcugggcuuuauuaugugggcuugccagaagggaaacaucagauguaauauuugcaucuga

SEQ ID NO: 192341 - RNA, 1701 nt, Artificial Sequence; identical to SEQ ID NO: 192119
  derived and/or modified CDS sequence (opt5) from hemagglutinin__InfluenzaA__AAZ79505

SEQ ID NO: 192342 - RNA, 1701 nt, Artificial Sequence
  derived and/or modified CDS sequence (opt5) from hemagglutinin__InfluenzaA__AAZ79516
augaagaccaucauugcccugagcuacauccucugccugguguucgcucagaaacuucccggcaacgacaauuccacagccacgcugugucucgggcaccaugcggucccuaacggaacccugguuaagacaauuaccaaugaucaaaucgaggugacaaacgcuaccgaacuugugcagucuagcuccacaggcagaauuugcgacucuccgcaccagauccuggauggggagaauuguacccucaucgacgcccugcugggagauccccauugcgacggcuuucagaacaaagaaugggaucucuucgucgagcggagcaaggccuauuccaauuguuacccuuaugacgugcccgauuacgcuucucugcgcagccuuguugccuccagcgggacgcuggaauuuaacaaugagucuuucaacuggaccggaguggcucaaaauggcacauccagcgccugcaaaagacggucuaacaaguccuuuuucagccgccucaauuggcugcaccagcuuaaguauaaauacccugcgcugaacgucaccaugcccaauaacgagaaguuugacaaacucuauauuuggggcgugcaucacccuucuacagauuccgaccagaucagccuguacgcccaggcuuccgggagaguuaccgugucuacgaagcggagccaacagacagucauuccgaacaucggaucccgccccugggugagaggcgugagcucucggauuuccaucuacuggaccauugucaaaccuggggauauccugcucaucaauagcacaggaaaccugauugcccccagaggcuauuucaagaucagaucuggaaagagcuccauuaugcggucugacgcuccuaucgggaaauguaauagcgaaugcauuacccccaacggcuccaucccgaaugacaagccuuuucagaacguuaaucgcaucaccuacggcgccugucccagauaugugaaacagaacacacuuaagcuggcgacggggaugcggaaugugccugagaaacaaacccgcggaauuuucggcgccaucgcuggguuuauugaaaacggaugggagggcauggucgaugggugguacggauucagacaccagaauagcgagggcacaggccaggccgcugaccucaagucuacccaagccgccaucaaccagauuaaugggaaacugaaccggcuuaucgaaaagacaaaugagaaguuucaucagaucgaaaaagaguucuccgaaguggagggacgcauucaggaucuggagaaguauguugaagacaccaaaaucgaucucuggagcuacaacgcugagcugcugguggcgcucgaaaaccaacacacgauugaccugacagauucugagaugaauaaacuuuucgaacgcaccaagaagcagcugcgggagaacgccgaggacaugggcaaugggugccucaagaucuaucauaaaugugauaacgcuugcauuggauccaucagaaauggcaccuacgaccacgaugucuaccgcgacgaagcccugaacaaucgguuucagauuaaggggguggagcuuaaaagcggcuauaaggacuggauccuguggaucuccuucgccauuucuugcuuucuccuguguguugugcugcucggauucaucaugugggcuugccagaaaggcaacauuagauguaauaucugcauuuga

SEQ ID NO: 192343 - RNA, 1701 nt, Artificial Sequence
  derived and/or modified CDS sequence (opt5) from hemagglutinin__InfluenzaA__AAZ79527
augaagaccaucauugcccugagcuacauccucugccugguguucgcucagaaacuucccggcaacgacaauuccacagccacgcugugucucgggcaccaugcggucccuaacggaaccauuguuaagacaaucaccaaugaucaaauugaggugacaaacgcuaccgaacuggugcagucuagcuccacaggcgggaucugcgacucuccgcaccagauccuugauggagagaauuguacccugauugacgcccuccugggcgauccccagugcgacggguuucaaaacaaaaagugggaucuguucgucgaaagaagcaaagccuauuccaauuguuacccuuaugacgugcccgauuacgcuucucuccggagccugguugccuccagcggaacgcuugaguuuaacaaugaaucuuucgacuggaccggcgugacacagaacggcaccuccagcgcuugcaagcgcagaucuaauaaguccuuuuucagccggcugaacuggcucacacaucugaaauauaaguacccugcccuuaaugucaccaugcccaacaaugagaaauuugauaagcuguauaucuggggagugcaccauccugggacggacucugaucagauuucccucuacgcgcaggccagcggccgcaucacaguuuccaccaaaagaucucaacagacagugauuccgaacaucgggagccggccccgcgucagagacguguccagccggauuucuaucuacuggaccaucgugaagccuggagacauucugcugaucaacuccaccggcaaucucauugcuccccgcggguauuucaagaucagaagcggaaaaucuagcauuaugcgguccgaugccccuaucggcaaguguaacucugagugcaucacacccaauggcagcauuccgaacgacaaaccuuuucagaaugucaaccgcaucacguacggggcuugucccagauauguuaagcagaauacccugaaacuugccacaggaaugcggaacgugccugaacgccaaaccagaggcauuuucggggcgaucgccggauuuauugagaauggcugggaagggaugguggauggaugguacggcuuccggcaccagaacuccgagggcacagggcaggcugccgaccucaagagcacccaagcugccaucaaucagaucaacggaaaacugaauagacugauuggcaagacgaacgagaaguuucaccagaucgaaaaagaguucucugaagucgaggggcgcauucaggaucuugaacgguauguggaggacacaaagaucgaucugugguccuacaaugccgagcuccugguugcucuggaaaaccaacauaccauugaccucaccgauagcgagaugaacaaacuguucgaaagaacaaagaaacagcuucgcgagaaugcggaagacaugggaaacggcugcuuuaagaucuaucacaagugugauaaugccugcauugggucuauccggaacggcaccuacgaccaugacguguacagagaugaggcucugaauaaccgcuuccagaucaaaggagucgagcucaaguccggcuauaaagacuggauucuguggaucagcuuugccauuuccugcuuccuucuguguguggcccuccugggguuuaucaugugggcuugccagaagggaaauauucgguguaacaucugcaucuga

SEQ ID NO: 192344 - RNA, 1698 nt, Artificial Sequence
  derived and/or modified CDS sequence (opt5) from hemagglutinin__InfluenzaA__AAZ79549
augaaggugaaacugcucauccugcuuugcaccuucacagccacguacgcugacaccauuuguaucggcuaucacgccaacaauagcacagauaccgucgacacaguucuggagaagaacgugaccgugacacauuccgucaaucuccuggaagauucucacaacgggaaacuuugccugcucaagggaauugcgccccugcagcugggcaauuguagcguggcuggguggauccucggaaacccugagugcgaacugcuuauuuccaaagagucuuggagcuacaucguugaaaccccgaaucccgagaacggcgccuguuauccuggguacuuugccgacuaugaggaacugagagagcaacucuccucugugagcuccuucgaacgguuugagaucuuccccaaggagagcucuuggccuaaucauacggucaccggaguguccgcuagcugcucucacaacggcaaguccagcuuuuaccgcaaucugcuuuggcugacaggcaaaaacgggcucuaucccaaucugucuaaguccuacgccaacaauaaagaaaaggagguucugauucucuggggagugcaucacccuccgaacaucggcaaccagagaacccuguaccacacagaaaaugcuuaugucagcgugguguccucucauuacagccggcgcuucacccccgagauuacgaaaagaccuaagguccgggaucaggaagggcgcaucaacuauuacuggacacuucuggagcccggagacaccauuaucuuugaggccaauggcaaccucauugcgccuugguaugccuucgcucuguccagaggguuuggaagcggcaucaucacaucuaaugcccccauggaugaaugugacgcuaagugccagaccccgcaaggcgccauuaacuccagccuuccuuuccagaauguucaccccgugaccaucggggaguguccuaaauacgugcggucugcgaagcugcgcauggucacaggacucagaaacauucccagcauccagucccggggccuguuuggggccauugcuggauucaucgaaggcggguggacgggaaugguggauggcugguauggcuaccaucaccagaaugagcaagggucuggauacgccgcugaccagaaaagcacccagaacgccaucaauggcauuacaaacaagguuaauuccgugaucgaaaagaugaacacccaguuuacagccgucgggaaagaguucaauaaacuggagcgcagaauggaaaaccucaacaagaagguggaugacggauuccuggauauuuggaccuauaaugcugagcuucugguucuccuggaaaacgagcggacgcuugacuuucacgacagcaaugugaaaaaccuguacgaaaaggucaaaucucaacucaagaauaacgcgaaagagaucggcaaugggugcuucgaguuuuaucauaaguguaacaaugaaugcauggaguccgugaagaacggcacauacgauuaucccaaauacagcgaagagucuaagcugaaucgcgagaaaauugacggagucaagcuggauuccaugggcguguaucagauccucgccaucuacagcaccguugcuuccucucuggugcuucuggucagccucggggccauuuccuucuggaugugcucuaacggaagccugcaguguagaaucugcauuuga

SEQ ID NO: 192345 - RNA, 1701 nt, Artificial Sequence
  derived and/or modified CDS sequence (opt5) from hemagglutinin__InfluenzaA__AAZ79560
augaagaccaucauugcccugagcuacauccucugccugguguucgcucagaaacuucccggcaacgacaauuccacagccacgcugugucucgggcaccaugcggucccuaacggaacccugguuaagacaauuaccaaugaucaaaucgaggugacaaacgcuaccgaacuugugcagucuagcuccacaggcagaauuugcgacucuccgcaccagauccuggauggggagaauuguacccucaucgacgcccugcugggagauccccauugcgacggcuuucagaacaaagaaugggaucucuucgucgagcggagcaaggccuauuccaauuguuacccuuaugacgugcccgauuacgcuucucugaaaagccuuguugccuccagcgggacgcuggaauuuaacaaugagucuuucaacuggaccggaguggcucaaaauggcacauccagcgccugcaagcgcagaucuaacaaguccuuuuucagccggcucaauuggcugcaccagcuuaaauauaaguacccugcgcugaacgucaccaugcccaauaacgagaaauuugacaagcucuauauuuggggcgugcaucacccuucuacagauuccgaccagaucagccuguacgcccaggcuuccgggcgcguuaccgugucuacgaaaagaagccaacagacagucauuccgaacaucggaucccggcccugggugcgcggcgugagcucuagaauuuccaucuacuggaccauugucaagccuggggauauccugcucaucaauagcacaggaaaccugauugcuccccggggcuauuucaagauccgcucugggaaaagcuccauuaugagaucuaaugccccuaucggaaaguguaacagcgaaugcauuacccccaauggcuccaucccgaacgacaaaccuuuucagaauguuaaccggaucaccuacggcgccuguccccgcuaugugaagcagaauacacuuaaacuggcgacggggaugagaaacgugccugagaagcaaacccggggaauuuucggcgccaucgcuggguuuauugaaaauggaugggagggcauggucgacgggugguacggauuccgccaccagaacagcgagggcacaggccaggccgcugaucucaaaucuacccaagccgccaucaaucagauuaacgggaagcugaauagacuuaucgaaaagacaaacgagaaauuucaucagaucgaaaaggaguucuccgaaguggagggacggauucaggaccuggagaaauauguugaagauaccaagaucgaccucuggagcuacaacgcugagcugcugguggcgcucgaaaaucaacacacgauugaucugacagacucugagaugaacaaacuuuucgaaagaaccaagaagcagcugcgcgagaaugccgaggauaugggcaacgggugcuuuaaaaucuaucauaagugugacaaugcuugcauuggauccauccggaacggcaccuacgaucacgacgucuacagagaugaagcccucaauaaccgcuuccagauuaaagggguggagcuuaagagcggcuauaaagacuggauccuguggaucuccuuugccauuucuugcuuccugcucuguguugugcugcugggauuuaucaugugggcuugccagaagggcaauauucgguguaacaucugcauuuga

SEQ ID NO: 192346 - RNA, 1701 nt, Artificial Sequence
  derived and/or modified CDS sequence (opt5) from hemagglutinin__InfluenzaA__AAZ79571
augaagaccaucauugcccugagcuacauccucugccugguguucgcucagaaacuucccggcaacgacaauuccacagccacgcugugucucgggcaccaugcggucccuaacggaacccugguuaagacaauuaccaaugaucaaaucgaggugacaaacgcuaccgaacuugugcagucuagcuccacaggcagaauuugcgacucuccgcaccagauccuggauggggagaauuguacccucaucgacgcccugcugggagauccccggugcgacggcuuucagaacaaagaaugggaucucuucgucgagcgcagcaaggccuauuccaauuguuacccuuaugacgugcccgauuacgcuucucugagaagccuuguugccuccagcgggacgcuggaauuuaacaaugagucuuucaacuggaccggaguggcucaaaauggcacauccagcgccugcaaacggcgcucuaacaaguccuuuuucagcagacucaauuggcugcaucagcuuaaguauaaauacccugcgcugaacgucaccaugcccaauaacgagaaguuugacaaacucuauauuuggggcgugcaccauccuucuacagauuccgaccagaucagccuguacgcccaggcuuccgggcggguuaccgugucuacgaagcgcagccaacagacagucauuccgaacaucggauccagacccugggugcggggcgugagcucucgcauuuccaucuacuggaccauugucaaaccuggggauauccugcucaucaauagcacaggaaaccugauugcccccagaggcuauuucaagauccggucuggaaagagcuccauuaugcgcucugacgcuccuaucgggaaauguaauagcgaaugcauuacccccaacggcuccaucccgaaugacaagccuuuucagaacguuaauagaaucaccuacggcgccuguccccgguaugugaaacagaacacacuuaagcuggcgacggggaugcgcaaugugccugagaaacaaaccagaggaauuuucggcgccaucgcuggguuuauugaaaacggaugggagggcauggucgaugggugguacggauuccggcaccagaauagcgagggcacaggccaggccgcugaccucaagucuacccaagccgccaucaaccagauuaaugggaaacugaacagacuuaucgaaaagacaaaugagaaguuucaccagaucgaaaaagaguucuccgaaguggagggacgcauucaggaucuggagaaguauguugaagacaccaaaaucgaucucuggagcuacaacgcugagcugcugguggcgcucgaaaaccaacauacgauugaccugacagauucugagaugaauaaacuuuucgaacggaccaagaagcagcugagagagaacgccgaggacaugggcaaugggugcuuuaagaucuaucacaaaugugauaacgcuugcauuggauccauccgcaauggcaccuacgaccaugaugucuaccgggacgaagcccucaacaauagauuccagauuaaggggguggagcugaaaagcggcuauaaggacuggauccuuuggaucuccuuugccauuucuugcuuccugcucuguguugugcugcugggauuuaucaugugggcuugccagaaaggcaacauucgcuguaauaucugcauuuga

SEQ ID NO: 192347 - RNA, 1701 nt, Artificial Sequence
  derived and/or modified CDS sequence (opt5) from hemagglutinin__InfluenzaA__AAZ79582
augaagaccaucauugcccugagcuacauccucugccugguguucgcucagaaacuucccggcaacgacaauuccacagccacgcugugucucgggcaccaugcggucccuaacggaacccugguuaagacaauuaccaaugaucaaaucgaggugacaaacgcuaccgaacuugugcagucuagcuccacaggcagaauuugcgacucuccgcaccagauccuggauggggagaauuguacccucaucgacgcccugcugggagauccccauugcgacggcuuucagaacaaagaaugggaucucuucgucgagcggagcaaggccuauuccaauuguuacccuuaugacgugcccgauuacgcuucucugcgcagccuuguugccuccagcgggacgcuggaauuuaacaaugagucuuucaacuggaccggaguggcucaaaauggcacauccagcgccugcaaaagacggucuaacaaguccuuuuucagccgccucaauuggcugcaccagcuuaaguauaaauacccugcgcugaacgucaccaugcccaauaacgagaaguuugacaaacucuauauuuggggcgugcaucacccuucuacagauuccgaccagaucagccuguacgcccaggcuuccgggagaguuaccgugucuacgaagcggagccaacagacagucauuccgaacaucggauccggccccugggugcgcggggugagcucuagaauuuccaucuacuggaccauugucaaaccuggagauauccugcucaucaauagcacaggcaaccugauugcuccccggggguauuucaagauccgcucuggaaagagcuccauuaugagaucugacgccccuaucggcaaauguaauagcgaaugcauuacccccaacggcuccaucccgaaugacaagccuuuucagaacguuaaucggaucaccuacggggccuguccccgcuaugugaaacagaacacacuuaagcuggcgacgggaaugagaaaugugccugagaaacaaacccggggcauuuucggggccaucgcuggauuuauugaaaacggcugggaggggauggucgauggaugguacggcuuccgccaccagaauagcgagggcacagggcaggccgcugaccucaagucuacccaagccgccaucaaccagauuaauggaaaacugaacagacuuaucgaaaagacaaaugagaaguuucaucagaucgaaaaagaguucuccgaaguggagggccggauucaggaucuggagaaguauguugaagacaccaaaaucgaucucuggagcuacaacgcugagcugcugguggcgcucgaaaaccaacacacgauugaccugacagauucugagaugaauaaacuuuucgaaagaaccaagaagcagcugcgcgagaacgccgaggacauggggaauggaugcuuuaagaucuaucauaaaugugauaacgcuugcauuggcuccauccggaaugggaccuacgaccacgaugucuacagagacgaagcccucaacaaucgcuuccagauuaagggcguggagcugaaaagcggauauaaggacuggauccuuuggaucuccuuugccauuucuugcuuccugcucuguguugugcugcugggcuuuaucaugugggcuugccagaaagggaacauucgguguaauaucugcauuuga

SEQ ID NO: 192348 - RNA, 1698 nt, Artificial Sequence
  derived and/or modified CDS sequence (opt5) from hemagglutinin__InfluenzaA__AAZ79604
augaaggccaaacugcucgugcugcuuugcaccuucacagcuacguacgccgacaccaucuguauuggcuaucacgcgaacaauagcacagauaccgucgacacaguucuggagaagaacgugaccgugacacauuccgucaaucuccuggaagauucucacaacgggaaacuuugccugcucaagggaaucgcuccccugcagcugggcaauuguagcguggccggguggauucucggaaacccugagugcgaacugcuuaucuccaaagagucuuggagcuacauuguugaaaccccgaaucccgagaacggcacguguuauccuggguacuuugccgacuaugaggaacugagagagcaacucuccucugugagcuccuucgaacgguuugagaucuuccccaagggaagcucuuggccuaaucauaccgucacaggcguguccgcuagcugcucucacaacggcaaguccagcuuuuaccgcaaucugcuuuggcugaccgggaaaaacggacucuaucccaaucugucuauguccuacguuaacaauaaggagaaagaagugcugguccucuggggcgugcaucacccuccgaacaucggggaucagagagcccuguaccacacagagaacgcuuaugugagcgucguuuccucucauuacagccggcgcuucacccccgaaauugccaagagaccuaaagugcgggaccaggagggacgcaucaauuauuacuggacgcuucuggaacccggcgauacaauuaucuuugaggcgaacgggaaucucauugccccuugguaugcuuucgcccuguccagaggauuuggcagcggcaucauuaccucuaacgcucccauggacgagugugaugccaagugccagacaccgcaaggggcgaucaauuccagccuuccuuuccagaacgugcaccccgucaccaucggagaauguccuaaguacgugcggucugccaaacugcgcaugguuaccggccucagaaauauucccagcauccagucccgggggcuguuuggagcuauugccggcuucaucgaagggggauggacaggcaugguggacggcugguauggguaccaucaccagaacgaacaaggaucuggcuacgcugccgaucaaaagagcacgcagaaugccauuaaccgcaucaccaauaaagucaacuccgugaucgagaagaugaauacacaguuuaccgcuguugggaaagaguucaacaagcuggagagacggauggagaaucucaacaaaaagguggacgauggauuccuggacauuuggacauauaacgcggaacuucugguccuccuggagaaugaacgcacccuugacuuucacgauagcaacgugaagaaucuguacgagaaagucaagucucagcucaaaaacaaugccaaggaaaucggcaacgggugcuucgaguuuuaucauaaauguaauaacgagugcauggaauccgugaagaauggcacguacgacuaucccaaguacagcgaggaaucuaaacugaacagagagaagauugauggaguuaaacuggaguccaugggcguguaucagauccucgcuauuuacagcacagucgccuccucucuggugcuucugguuagccucggggccaucuccuucuggaugugcucuaauggaagccugcagugucggaucugcauuuga

SEQ ID NO: 192349 - RNA, 1701 nt, Artificial Sequence
  derived and/or modified CDS sequence (opt5) from hemagglutinin__InfluenzaA__AAZ79615
augaagaccaucauugcccugagcuacauccucugccugguguucgcucagaaaauucccggcaacgacaauuccacagccacgcuuugugucgggcaccaugcgguuccuaacggaaccaucgugaagacaauuaccaaugaucaaaucgaggugacaaacgcuaccgaacugguccagucuagcuccacaggcgggaucugcgacucuccgcaccagauucucgauggagagaauuguacccugaucgacgcccuucugggcgauccccagugcgacggguuucaaaacaaaaagugggaucucuucguggaaagaagcaaagccuauuccaauuguuacccuuaugacguucccgauuacgcuucucugcggagccugguggccuccagcggaacgcucgaguuuaacaaugaaucuuucaacuggaccggcgucacacagaauggcaccuccagcgcuugcaagcgcagaucuaacaauuccuuuuucagccggcugaacuggcuuacacaucugaaguuuaaauauccugcccucaaugugaccaugcccaacaacgagaaguucgacaaacuguacauuuggggaguucaccauccugggacggauaaugaccagaucucucuuuaugcgcaggccuccggccgcauuacagugagcaccaagagaucccaacagacagucaucccgaacauugggucucggccccgcgugagagauaucccuagccggaucuccauuuacuggaccaucgugaaacccggagacauucugcucaucaauagcaccggcaaccugauugcuccucgcggguacuuuaagaucagaucuggaaaguccagcaucaugcggucugacgcccccauuggcaaauguaauagcgagugcaucacaccgaacggcuccauuccuaaugauaagcccuuccagaacgucaaucgcaucacguauggggcuuguccuagauacguuaaacagaacacccugaagcucgccacaggaaugcggaaugugcccgaaaaacaaacccgcggcauuuuuggggcgaucgccggauucaucgagaacggcugggaagggaugguggacggaugguauggcuuuagacaccagaauagcgagggcauugggcaggcugccgaucugaagucuacacaagcugccaucaaccagauuaauggaaaacuuaaccggcugaucggcaagaccaacgagaaguuccaccagauugaaaaagaguucuccgaagucgaggggagaauccaggaccucgaaaaguacguggaggauacgaaaauugaccuguggagcuauaaugccgagcuucugguugcucucgaaaaccaacauacaaucgaucugaccgacucugagaugaauaagcuguuugaacgcaccaaaaagcagcuccgggagaacgcggaagauaugggaaauggcugcuucaagaucuaccacaaaugugacaacgccugcauuggguccaucagaaauggcacauaugaucaugacguguaccgcgacgaggcucugaacaaucgguuucagauuaagggagucgagcuuaaaagcggcuacaaggauuggauccuguggauuucuuucgccaucuccugcuuucuccugugugugguucuucugggguucaucaugugggccugccagaaaggaaacauuagauguaauaucugcauuuga

SEQ ID NO: 192350 - RNA, 1701 nt, Artificial Sequence
  derived and/or modified CDS sequence (opt5) from hemagglutinin__InfluenzaA__AAZ79627
augaagaccaucauugcccugagcuacauccucugccugguguucgcucagaaacuucccggcaacgacaauuccacagccacgcugugucucgggcaccaugcggucccuaacggaaccauuguuaagacaaucaccaaugaucaaauugaggugacaaacgcuaccgaacuggugcagucuagcuccacaggcgggaucugcgacucuccgcaccagauccuugauggagagaauuguacccugauugacgcccuccugggcgauccccagugcgacggguuucaaaacaaaaagugggaucuguucgucgaaagaagcaaagccuauuccaauuguuacccuuaugacgugcccgauuacgcuucucuccggagccugguugccuccagcggaacgcuugaguuuaacaaugaaucuuucaacuggaccggcgugacacagaauggcaccuccagcgcuugcaagcgcagaucuaacuccagcuuuuucucucggcugaauuggcucacacaucugaaguuuaaauauccugcccuuaaggucaccaugcccaacaaugagaaauucgacaagcuguacaucuggggagugcaccauccugggacggauaacgaccagauuucccucuaugcgcaggccagcggccgcaucacaguuuccaccaaaagaucucaacagacagugauuccgaacaucgggagccggccccgcgucagagauauuccuucccggaucagcaucuacuggaccauugugaagcccggagacauccugcugauuaauucuaccggcaaccucaucgcuccucgcggguacuuuaagauuagauccggaaaaagcucuaucaugcggagcgacgcccccaucggcaaguguaauuccgagugcauuacaccgaacggcucuaucccuaaugauaaacccuuccagaacgugaaucgcauuacguauggggcuuguccuagauacgucaagcagaacacccugaaacuugccacaggaaugcggaauguucccgaaaagcaaacccgcggcaucuuuggggcgauugccggauucaucgagaacggcugggaagggaugguggacggaugguauggcuuuagacaccagaauagcgagggcaucgggcaggcugccgaucugaaauccacacaagcugccauuaaccagaucaauggaaagcucaaccggcugauuggcaagaccaaugagaaauuccaccagaucgaaaaggaguucagcgaaguggaggggcgcauucaggaccuugaaaaauacgucgaggauacgaagaucgaccuguggucuuauaacgccgagcuccugguggcucuggaaaaccaacauacaauugaucucaccgacuccgagaugaauaaacuguuugaaagaaccaagaagcagcuucgggagaacgcggaagauaugggaaauggcugcuucaaaaucuaccacaagugugacaacgccugcaucgggagcauuagaaauggcacauaugaucaugacguuuaccgcgacgaggcucugaacaaucgguuucagaucaaaggaguggagcucaagucuggcuacaaagauuggauucuguggaucuccuucgccauuagcugcuuucuucugugugucgcccuccugggguucaucaugugggcuugccagaagggaaacaucagauguaauauuugcaucuga

SEQ ID NO: 192351 - RNA, 1701 nt, Artificial Sequence; identical to SEQ ID NO: 192328
  derived and/or modified CDS sequence (opt5) from hemagglutinin__InfluenzaA__AAZ79941

SEQ ID NO: 192352 - RNA, 1701 nt, Artificial Sequence; identical to SEQ ID NO: 192327
  derived and/or modified CDS sequence (opt5) from hemagglutinin__InfluenzaA__AAZ79944

SEQ ID NO: 192353 - RNA, 1701 nt, Artificial Sequence
  derived and/or modified CDS sequence (opt5) from hemagglutinin__InfluenzaA__AAZ79963
augaagaccaucauugcccugagcuacauccucugccugguguucgcucagaaacuucccggcaacgacaauuccacagccacgcugugucucgggcaccaugcggucccuaacggaaccauuguuaagacaaucaccaaugaucaaauugaggugacaaacgcuaccgaacuggugcagucuagcuccacaggcgggaucugcgacucuccgcaccagauccuugauggagagaauuguacccugauugacgcccuccugggcgauccccagugcgacggguuucaaaacaaaaagugggaucuguucgucgaaagaagcaaagccuauuccaauuguuacccuuaugacgugcccgauuacgcuucucuccggagccugguugccuccagcggaacgcuugaguuuaacaaugaaucuuucaacuggaccggcgugacacagaauggcaccuccagcgcuugcaagcgcagaucuaacaauuccuuuuucagccggcugaacuggcucacacaucugaaguuuaaauauccugcccuuaaugucaccaugcccaacaacgagaaguucgacaaacuguacaucuggggagugcaccauccugggacggauaaugaccagauuucucucuaugcgcaggccuccggccgcaucacaguuagcaccaagagaucccaacagacagugauuccgucuaucgggagccggccccgcauuagagaugucccuucccggaucagcaucuacuggaccauugugaaacccggagacauccugcugauuaacucuaccggcaaucucaucgcuccucgcggguacuuuaagauuagauccggaaagagcucuaucaugcggagcgacgcccccaucggcaaauguaacuccgagugcauuacaccgaauggcucuaucccuaacgauaagcccuuccagaaugugaaccgcauuacguauggggcuuguccuagauacgucaaacagaauacccugaaacuugccacaggaaugcggaacguucccgaaaaacaaacccgcggcaucuuuggggcgauugccggauucaucgagaauggcugggaagggaugguggacggaugguauggcuuuagacaccagaacagcgagggcacagggcaggcugccgaucugaaguccacccaagcugccaucaaucagauuaacggaaaacucaaucggcugaucggcaagacgaacgagaaguuccaccagauugaaaaagaguucagcgaaguggaggggagaauccaggaccuugaaaaguacgucgaggauacaaaaauugaccuguggucuuauaacgccgagcuccugguggcucuggaaaaucaacauaccaucgaucucaccgacuccgagaugaacaagcuguuugaacgcacaaagaagcagcuucgggagaaugcggaagauaugggaaacggcugcuucaagauuuaccacaaaugugacaaugccugcaucgggagcaucagaaacggcaccuaugaucaugacguuuaccgcgacgaggcucugaauaaccgguuucagauuaagggaguggagcucaaaucuggcuacaaggauuggauccuguggauuuccuucgccaucagcugcuuucuucugugugucgcccuccugggguucauuaugugggcuugccagaaaggaaauaucagauguaacaucugcauuuga

SEQ ID NO: 192354 - RNA, 1701 nt, Artificial Sequence
  derived and/or modified CDS sequence (opt5) from hemagglutinin__InfluenzaA__AAZ79974
augaagaccaucauugcccugagcuacauccucugccugguguucgcucagaaacuucccggcaacgacaauuccacagccacgcugugucucgggcaccaugcggucccuaacggaaccauuguuaagacaaucaccaaugaucaaauugaggugacaaacgcuaccgaacuggugcagucuagcuccacaggcgggaucugcgacucuccgcaccagauccuugauggagagaauuguacccugauugacgcccuccugggcgauccccagugcgacggguuucaaaacaaaaagugggaucuguucgucgaaagaagcaaagccuauuccaauuguuacccuuaugacgugcccgauuacgcuucucuccggagccugguugccuccagcggaacgcuugaguuuaacaaugaaucuuucaacuggaccggcgugacacagaauggcaccuccagcgcuugcaagcgcagaucuaacaauuccuuuuucagccggcugaacuggcucacacaucugaaguuuaaauauccugcccuuaaugucaccaugcccaacaacgagaaguucgacaaacuguacaucuggggagugcaccauccugggacgaauaacgaucagauuucucucuaugcgcaggccuccggccgcaucacaguuagcaccaagagaucccaacagacagugauuccgaauaucgggucucggccccgcgucagagacauuccuagccggaucuccaucuacuggaccauugugaaacccggagauauccugcugauuaacagcaccggcaaucucaucgcuccucgcggguacuuuaagauuagaucuggaaaguccagcaucaugcggucugacgcccccaucggcaaauguaacagcgagugcauuacaccgaauggcuccaucccuaacgacaagcccuuccagaaugugaaccgcauuacguauggggcuuguccuagauacgucaaacagaauacccugaagcuggccacaggaaugcggaacguucccgaaaaacaaacccgcggcaucuuuggggcgauugccggauucaucgagaauggcugggaagggaugguggauggaugguauggcuuuagacaccagaacucugagggcaucgggcaggcugccgaccuuaagagcacacaagcugccauuaaucagaucaacggaaaacucaaccggcugauuggcaagaccaaugagaaguuccaccagaucgaaaaagaguucuccgaaguggaggggcgcauucaggaucuugaaaaguacgucgaggacacgaaaaucgaucuguggagcuauaacgccgagcuccugguggcucuggaaaaucaacauacaauugaccucaccgauucugagaugaacaagcuguuugaaagaaccaaaaagcagcuucgggagaaugcggaagacaugggaaacggcugcuucaagaucuaccacaaaugugauaaugccugcaucggguccauuagaaacggcacauaugaccaugauguuuaccgcgacgaggcucugaauaaccgguuucagaucaagggaguggagcucaaaagcggcuacaaggacuggauucuguggaucucuuucgccauuuccugcuuucuucugugugucgcccuccugggguucaucaugugggcuugccagaaaggaaauaucagauguaacauuugcaucuga

SEQ ID NO: 192355 - RNA, 1701 nt, Artificial Sequence; identical to SEQ ID NO: 192327
  derived and/or modified CDS sequence (opt5) from hemagglutinin__InfluenzaA__AAZ79996

SEQ ID NO: 192356 - RNA, 1701 nt, Artificial Sequence
  derived and/or modified CDS sequence (opt5) from hemagglutinin__InfluenzaA__AAZ80007
augaagaccaucauugcccugagccacaucuucugccucgugcugggccaguaccuucccgggaacgacaauuccacagcuacgcugugucucggacaucacgccgucccuaacggcacccugguuaaaacaauuaccaaugaucaaaucgaggugacaaacgcgaccgaacuugugcagucuagcuccacagggaagauuugcaauaacccgcauagaauccuggacggaaucgauuguacccucauugacgcucugcugggcgauccccacugcgacggguuucagaaugagacgugggaucucuucgucgaacggucuaaagccuuuagcaacuguuauccuuacgacgugcccgauuaugccucccugcgcucucuuguugcuagcuccggaacccuggaguucaucacagaaggcuuuaccuggacaggcgugacccagaaugggggaagcaacgccugcaagagaggcccugggucuggauucuuuucccggcucaauuggcugacgaaaagcgagucuacauaccccguccuuaacgugaccaugccuaauaacgacaauuucgauaagcuguauauuuggggcguucaucacccguccacaaaccaagagcagaccagccucuacgugcaggcuucugggcgcgucaccguguccacaagacggagccagcaaacgaucauucccaacaucggaucccgcccuugggugagaggccugucuagccggauuuccaucuauuggaccaucgucaagcccggcgacguucuggugauuaauagcaacgggaaucucaucgccccucgcggauacuuuaaaaugagaacaggcaagucuuccauuaugcggagcgaugcgcccaucgacaccuguauuucugaaugcaucacaccgaacgggagcaucccuaaugacaaacccuuccagaacgugaauaagauuaccuacggagccuguccuaaauaugucaagcagaacacgcugaaacuugcuacaggcaugcgcaaugugcccgagaaacagaccagagggcuguuuggagccaucgcuggcuucauugaaaacggcugggaggggaugaucgauggaugguacggcuuucggcaccaaaauuccgaggggaccggacaggccgcggaccucaagucuacacaggccgcuauugaucaaaucaacggcaaacugaaucgcguuaucgaaaagaccaacgagaaauuccaucagauugaaaaggaguucagcgaaguggaggggagaauccaggaccuugagaaauaugucgaagauacaaagauugaccugugguccuacaaugccgagcuccugguggcucuggaaaaccagcacacgaucgaucucaccgacagcgagaugaacaagcuguuugaaaagacacggagacaacuucgcgagaaugccgaggauaugggcaacggaugcuucaagauuuaucauaaaugugacaaugccugcaucgaaucuauucggaacggcaccuacgaucacgacguuuauagagacgaggcucugaauaaccgcuuucagaucaaggggguggaacucaaauccggauacaaggauuggauccuguggauuagcuucgcgaucucuugcuuucuucugugugucgugcuccugggcuucauuaugugggccugccagcgggggaauaucagauguaacauuugcaucuga

SEQ ID NO: 192357 - RNA, 1701 nt, Artificial Sequence; identical to SEQ ID NO: 192328
  derived and/or modified CDS sequence (opt5) from hemagglutinin__InfluenzaA__AAZ80017

SEQ ID NO: 192358 - RNA, 1701 nt, Artificial Sequence
  derived and/or modified CDS sequence (opt5) from hemagglutinin__InfluenzaA__AAZ80030
augaagaccaucauugcccugagcuacauccucugccugguguucgcucaggagcuucccggcaacgacaauuccacagccacgcugugucucgggcaccaugcggucccuaacggaaccauuguuaaaacaaucaccaaugaucaaauugaagugacaaacgcuaccgagcuggugcagucuagcuccacaggcgggaucugcgacucuccgcaccagauccuugauggagaaaauuguacccugauugacgcccuccugggcgauccccagugcgacggguuucaaaacaagaaaugggaucuguucgucgagagaagcaaggccuauuccaauuguuacccuuaugacgugcccgauuacgcuucucuccggagccugguugccuccagcggaacgcuugaauuuaacaaugagucuuucaacuggaccggcgugacacagaauggcaccuccagcgcuugcaaacgcagaucuaacaauuccuuuuucagccggcugaacuggcucacacaucugaaguuuaaguauccugcccuuaaugucaccaugcccaacaacgagaaauucgacaagcuguacaucuggggagugcaccauccugggacggauaaugaccagacaucucucuaugcgcaggccuccggccgcauuaccguuagcacaaaaagaucccaacagaccgugaucccgaacauugggucucggccccgcgucagagauaucccuagccggauuuccaucuacuggaccaucgugaagcccggagacauucugcugaucaauagcacaggcaaccucauugcuccucgcggguacuuuaaaaucagaucuggaaaguccagcauuaugcggucugacgcccccaucggcaaguguaauagcgaaugcaucacgccgaacggcuccauuccuaaugauaaacccuuccagaacgugaaucgcaucaccuauggggcuuguccuagauacgucaagcagaacacacugaaacuugccaccggaaugcggaauguucccgagaagcaaacacgcggcauuuuuggggcgaucgccggauucauugaaaacggcugggaggggaugguggacggaugguauggcuuuagacaccaaaauucugagggcaucgggcaggcugccgaucugaaaagcacccaggcugccaucaaccagauuaauggaaagcucaaccggcugaucggcaaaacgaacgaaaaguuccaccagauugagaaggaguucuccgaaguggaagggagaauccaggaccuugagaaauacgucgaggauacaaagauugaccuguggagcuauaaugccgaacuccugguggcucuggagaaccaacauaccaucgaucucaccgacucugaaaugaauaaacuguuugagcgcacaaagaaacagcuucgggaaaacgcggaggauaugggaaauggcugcuucaagauuuaccacaagugugacaacgccugcaucggguccaucagaaauggcaccuaugaucaugacguuuaccgcgacgaggcucugaacaaucgguuucagauuaaaggaguggaacucaagagcggcuacaaagauuggauccuguggauuucuuucgccaucuccugcuuucuucugugugucgcccuccugggguucauuaugugggcuugccagaagggaaacaucagauguaauaucugcauuuga

SEQ ID NO: 192359 - RNA, 1701 nt, Artificial Sequence
  derived and/or modified CDS sequence (opt5) from hemagglutinin__InfluenzaA__AAZ83242
augaagaccaucauugcccugagcuacauccucugccugguguucgcucagaaacuucccggcaacgacaauuccacagccacgcugugucucgggcaccaugcggucccuaacggaaccauuguuaagacaaucaccaaugaucaaauugaggugacaaacgcuaccgaacuggugcagucuagcuccacaggcgagaucugcgacucuccgcaccagauccuugauggggaaaauuguacccugauugacgcccuccugggagauccccagugcgacggcuuucaaaacaaaaagugggaucuguucgucgagagaaauaaagccuauagcaacuguuacccuuaugacgugcccgauuacgcuucccuccggucucugguugccagcuccgggacgcuugaauuuaauaacgagagcuucaauuggaccggagugacacagaacggcaccucuuccgcuugcaagcgcagaagcaauaagucuuucuucucccggcugaacuggcucacacaucugaaauauaaguacccugcccuuaaugucaccaugcccaacaacgagaaauuugacaagcuguauaucuggggcgugcaccauccugggacggauagcgaccagauuaaucucuacgcgcaggccucuggacgcaucacaguuuccaccaaaagaagccaacagacagugauuccgaacaucggcuaccggccccgcgucagagaugugccuucccggauuucuaucuauuggaccaucgugaagcccggggacauucugcugaucaauagcaccggaaaccucauugcuccucgcggcuacuucaagaucagauccgggaaaagcucuauuaugcgguccgacgcccccaucggaaaguguaauagcgaaugcaucacaccgaacggcucuauuccuaaugauaaacccuuucagaacgucaaucgcaucacguauggcgcuuguccuagauacguuaagcagaacacccugaaacuugccacagggaugcggaaugugcccgagaagcaaacccgcggaauuuucggcgcgaucgccggguuuauugaaaacggaugggagggcaugguggacgggugguauggauucagacaccagaauagcgagggcacaggccaggcugccgaucugaaauccacccaagcugccaucaaccagaucaaugggaagcucaaccggcugauuggaaagacgaacgaaaaauuucaccagaucgagaaggaauuuucugaggucgaaggccgcauucaggaccuugagaaauacguggaggauacaaagaucgaccuguggagcuauaaugccgaacuccugguugcucuggagaaccaacauaccauugaucucaccgacuccgaaaugaauaaacuguucgagagaacaaagaagcagcuucgggaaaacgcggaggauauggggaauggaugcuuuaaaaucuaccacaagugugacaacgccugcauuggcagcaucagaaaugggaccuacgaucaugacguguaucgcgacgaggcucugaacaaucgguuccagaucaaaggcgucgaacucaagucuggauacaaagauuggauucuguggaucuccuuugccauuagcugcuuccuucuguguguggcccuccugggcuuuaucaugugggcuugccagaaggggaacauuagauguaauaucugcaucuga

SEQ ID NO: 192360 - RNA, 1701 nt, Artificial Sequence
  derived and/or modified CDS sequence (opt5) from hemagglutinin__InfluenzaA__AAZ83266
augaagaccaucauugcccugagcuacauccucugccugguguucgcucagaaacuucccggcaacgacaauuccacagccacgcugugucucgggcaccaugcggucccuaacggaacccugguuaagacaauuaccaaugaucaaaucgaggugacaaacgcuaaugaacuugugcagucuagcuccaccggcagaauuugcgacucuccgcaccagauccuggauggggagaacuguacacucaucgacgcccugcugggagauccccggugcgacggcuuucagaauaaagaaugggaucucuucgucgagcgcagcaaggccuauuccaacuguuacccuuaugacgugcccgauuacgcuucucugagaagccuuguugccuccagcgggacccuggaauuuaauaacgagucuuucaauuggacgggaguggcucaaaacggcaccuccagcgccugcaaacggcgcucuaauaaguccuuuuucagcagacucaacuggcugcaucagcuuaaguauaaauacccugcgcugaaugucacaaugcccaacaacgagaaguuugacaaacucuauauuuggggcgugcaccauccuucuaccgauuccgaccagaucagccuguacgcccaggcuuccgggcggguuacagugucuaccaagcgcagccaacagacggucauuccgaauaucggauccagacccugggugcggggcgugagcucucgcauuuccaucuacuggacaauugucaaaccuggggauauccugcucaucaacagcaccggaaaucugauugcccccagaggcuauuucaagauccggucuggaaagagcuccauuaugcgcucugacgcuccuaucgggaaauguaacagcgaaugcauuacacccaauggcuccaucccgaacgacaagccuuuucagaauguuaacagaaucaccuacggcgccuguccccgguaugugaaacagaauacccuuaagcuggcgacagggaugcgcaacgugccugagaaacaaacgagaggaauuuucggcgccaucgcuggguuuauugaaaauggaugggagggcauggucgaugggugguacggauuccggcaccagaacagcgagggcaccggccaggccgcugaccucaagucuacacaagccgccaucaaucagauuaacgggaaacugaauagacuuaucgaaaagaccaacgagaaguuucaccagaucgaaaaagaguucuccgaaguggagggacgcauucaggaucuggagaaguauguugaagacacaaaaaucgaucucuggagcuacaacgcugagcugcugguggcgcucgaaaaucaacauaccauugaccugacggauucugagaugaacaaacuuuucgaacggacaaagaagcagcugagagagaaugccgaggacaugggcaacgggugcuuuaagaucuaucacaaaugugauaaugcuugcauuggauccauccgcaacggcaccuacgaccaugaugucuaccgggacgaagcccucaauaacagauuccagauuaaggggguggagcugaaaagcggcuauaaggacuggauccuuuggaucuccuuugccauuucuugcuuccugcucuguguugugcugcugggauuuaucaugugggcuugccagaaaggcaauauucgcuguaacaucugcauuuga

SEQ ID NO: 192361 - RNA, 1701 nt, Artificial Sequence; identical to SEQ ID NO: 192258
  derived and/or modified CDS sequence (opt5) from hemagglutinin__InfluenzaA__AAZ83277

SEQ ID NO: 192362 - RNA, 1701 nt, Artificial Sequence; identical to SEQ ID NO: 192144
  derived and/or modified CDS sequence (opt5) from hemagglutinin__InfluenzaA__AAZ83288

SEQ ID NO: 192363 - RNA, 1701 nt, Artificial Sequence
  derived and/or modified CDS sequence (opt5) from hemagglutinin__InfluenzaA__AAZ83312
augaagaccaucauugcccugagcuacauccucugccugguguucgcucagaaacuucccggcaacgacaauuccacagccacgcugugucucgggcaccaugcggucccuaacggaacccugguuaagacaauuaccaaugaucaaaucgaggugacaaacgcuaccgaacuugugcagucuagcuccacaggcagaauuugcgacucuccgcaccagauccuggauggggagaauuguacccucaucgacgcccugcugggagauccccauugcgacggcuuucagaacaaagaaugggaucucuucgucgagcggagcaaggccuauuccaauuguuacccuuaugacgugcccgauuacgcuucucugcgcagccuuguugccuccagcgggacgcuggaauuuaacaaugagucuuucaacuggaccggaguggcucaaaauggcacauccagcgccugcaaaagacggucuauuaaguccuuuuucagccgccucaacuggcugcaccagcuuaaguauaaauacccugcgcugaaugucaccaugcccaacaaugacaaguuugauaaacucuauaucuggggcgugcaucacccuucuacagacuccgaucagaccagccuguacgcccaggcuuccgggagaguuacggugucuacaaagcggagccaacagaccgucauuccgaacaucggaucccgccccugggugagaggcgugagcucucggauuuccaucuacuggacaauugucaaaccuggggacauccugcucaucaacagcaccggaaaucugauugcuccccgcggcuauuucaagaucagaucuggaaagagcuccauuauccggucugacgccccuauugggaaauguaacagcgagugcaucacccccaauggcuccaucccgaacgauaagccuuuucagaauguuaaccgcauuacauacggcgccugucccagauaugugaaacagaauacgcuuaagcuggcgaccgggaugcggaacgugccugaaaaacaaacacgcggaaucuucggcgccauugcuggguuuaucgagaauggaugggaaggcauggucgacgggugguacggauucagacaccagaacagcgagggcaccggccaggccgcugaucucaagucuacacaagccgccauuaaucagaucaacgggaaacugaaucggcuuaucgagaagaccaacgaaaaguuucaucagauugagaaagaguucuccgaaguggaaggaagaauccaggaccuggagaaguauguugaggauacgaaaauugaccucuggagcuacaaugcugaacugcugguggcgcucgagaaccaacacacaaucgaucugaccgacucugaaaugaacaagcuguucgagcgcacccggaaacagcugagagaaaaugccgaggauaugggcaacgggugcuuuaagauuuaucauaagugugacaaugcuugcaucggauccauucgcaacggcacauacgaucacgacgucuaccgggacgaggcccucaauaacagauuccagaucaaagggguggaacuuaagagcggcuauaaagauuggauccuuuggauuuccuuugccaucucuugcuuccugcucuguguugugcugcugggauuuauuaugugggcuugccagaagggcaauauccgcuguaacauuugcaucuga

SEQ ID NO: 192364 - RNA, 1701 nt, Artificial Sequence
  derived and/or modified CDS sequence (opt5) from hemagglutinin__InfluenzaA__AAZ83323
augaagaccaucauugcccugagcuacauccucugccugguguucgcucagaaacuucccggcaacgacaauuccacagccacgcugugucucgggcaccaugcggucccuaacggaacccugguuaagacaauuaccaaugaucaaaucgaggugacaaacgcuaccgaacuugugcagucuagcuccacaggcagaauuugcgacucuccgcaccggauccuggauggggagaauuguacccucaucgacgcccugcugggagauccccauugcgacggcuuucagaacaaagaaugggaucucuucgucgagcgcagcaaggccuauuccaauuguuacccuuaugacgugcaggauuacgcuucucugagaagccuuguugccuccagcgggacgcuggaauuuaacaaugagucuuucaacuggaccggaguggcucaaaauggcacauccuaugccugcaaacggcgcagcauuaagucuuucuucuccagacucaacuggcugcaccagcuuaaguacaaauaucccgcgcugaaugucaccaugccuaacaaugacaaguuugauaaacucuacaucuggggcgugcaucaccccagcacagacucugaucagaccucccuguacgcccaggcuagcgggcggguuacgguguccacaaagcgcucucaacagaccgucauuagcaacaucggauccagaccuugggugcggggcgugagcucucgcauuuccaucuauuggacaauugucaaaccgggggacauccugcucaucaccagcaccggaaaccugauugcccccagaggcuacuucaagauccggucuggaaagagcuccauuaugcgcucugacgcuccuaucgggaaauguaauagcgagugcauuacacccaacggcuccaucccuaaugauaagcccuuucagaacguuaauagaaucacguauggcgccuguccgcgguacgugaaacagaacacccuuaagcuggcgacagggaugcgcaaugugccugaaaaacaaaccagaggaauuuucggcgccaucgcuggguuuauugagaacggaugggaaggcauggucgacgggugguauggauuccggcaccagaauagcgagggcacaggccaggccgcugaucucaagucuacccaagccgccaucaaccagauuaaugggaaacugaacagacuuaucgagaagacgaaugaaaaguuucaucagaucgagaaagaauuuuccgagguggaaggacgcauucaggaccuggagaaguacguugaggauacaaaaaucgaccucuggagcuauaacgcugaacugcugguggcgcucgagaaucaacacaccauugaucugaccgacucugaaaugaacaagcuguucgagcggacaagaaaacagcugcgcgaaaacgccgaggauaugggcaaugggugcuuuaagaucuaccauaagugugacaacgcuugcauuggauccauccggaauggcaccuacgaucacgacgucuauagagacgaggcccucaacaaucgcuuccagauuaaagggguggaacuuaagagcggcuacaaagauuggauccuuuggaucuccuuugccauuucuugcuuccugcucuguguugugcugcugggauuuaucaugugggcuugccagaagggcaacauucgguguaauaucugcauuuga

SEQ ID NO: 192365 - RNA, 1701 nt, Artificial Sequence; identical to SEQ ID NO: 192354
  derived and/or modified CDS sequence (opt5) from hemagglutinin__InfluenzaA__AAZ83371

SEQ ID NO: 192366 - RNA, 1701 nt, Artificial Sequence; identical to SEQ ID NO: 192327
  derived and/or modified CDS sequence (opt5) from hemagglutinin__InfluenzaA__AAZ83688

SEQ ID NO: 192367 - RNA, 1698 nt, Artificial Sequence
  derived and/or modified CDS sequence (opt5) from hemagglutinin__InfluenzaA__ABA06510
augaaggugaaacugcucauccugcuuugcaccuucacagccacguacgcugacaccauuuguaucggcuaucacgccaacaauagcacagauaccgucgacacaguucuggagaagaacgugaccgugacacauuccgucaaucuccuggaagauucucacaacgggaaacuuugccugcucaagggaauugcgccccugcagcugggcaauuguagcguggcuggguggauccucggaaacccugagugcgaacugcuuauugccaaagaguccuggucuuacaucguugaaaccccgaaucccgagaacggcgccuguuauccuggguacuuugcugacuaugaggaacugagagagcaacucagcuccgugucuagcuucgaacgguuugagaucuuccccaaggaguccagcuggccuaaucauacggucaccggagugucugccuccugcagccacaacggcaagucuuccuuuuaccgcaaucugcuuuggcugacaggcaaaaacgggcucuaucccaaucugagcaagucuuacgcuaacaauaaagaaaaggagguucugauucucuggggagugcaucacccuccgaacaucggcgaucagagaacccuguaccacacagaaaacgccuaugucuccguggugagcucccauuacucucggcgcuucacccccgagauuacgaaaagaccuaagguccgggaccaggaagggcgcaucaauuauuacuggacacuucuggagcccggagauaccauuaucuuugaggcgaacggcaaucucauugccccuugguaugcuuucgcccugagcagaggguuuggauccggcaucaucacaagcaacgcucccauggacgaaugugaugccaagugccagaccccgcaaggcgcgauuaauucuucccuuccuuuccagaacguucaccccgugaccaucggggaguguccuaaauacgugcggagcgccaagcugcgcauggucacaggacucagaaauauucccucuauccagagccggggccuguuuggggcuauugccggauucaucgaaggcggguggacgggaaugguggacggcugguauggcuaccaucaccagaacgagcaaggguccggauacgcugccgaucagaaaucuacccagaaugccaucaacggcauuacaaauaagguuaacagcgugaucgaaaagaugaauacccaguuuacagcugucgggaaagaguucaacaaacuggagcgcagaauggaaaaucucaacaagaagguggacgauggauuccuggacauuuggaccuauaacgcggagcuucugguucuccuggaaaaugagcggacgcuugacuuucacgauuccaacgugaaaaaucuguacgaaaaggucaaaagccaacucaagaacaaugccaaagagaucggcaacgggugcuucgaguuuuaucauaaguguaauaacgaaugcauggagucugugaagaauggcacauacgacuaucccaaauacuccgaagagagcaagcugaaccgcgagaaaauugauggagucaagcuggacucuaugggcguguaucagauccucgcuaucuacuccaccguugccagcucccuggugcuucuggucucucucggggccauuagcuucuggaugugcuccaauggaucucugcaguguagaaucugcauuuga

SEQ ID NO: 192368 - RNA, 1698 nt, Artificial Sequence
  derived and/or modified CDS sequence (opt5) from hemagglutinin__InfluenzaA__ABA08464
augaaggccaaacugcucgugcugcuuugcaccuucacagcuacguacgccgacaccaucuguauuggcuaucacgcgaacaauagcacagauaccgucgacacaguucuggagaagaacgugaccgugacacauuccgucaaucuccuggaagauucucacaacgggaaacuuugccugcucaagggaaucgcuccccugcagcugggcaauuguagcguggccggguggauucucggaaacccugagugcgaacugcuuaucuccaaagagucuuggagcuacauuguugaaaccccgaaucccgagaacggcacguguuauccuggguacuuugccgacuaugaggaacugagagagcaacucuccucugugagcuccuucgaacgguuugagaucuuccccaagggaagcucuuggccuaaucauaccgucacaggcguguccgcuagcugcucucacaacggcaaguccagcuuuuaccgcaaucugcuuuggcugaccgggaaaaacggacucuaucccaaucugucuauguccuacguuaacaauaaggagaaagaagugcugguccucuggggcgugcaucacccuccgaacaucggggaucagagagcccuguaccacacagagaacgcuuaugugagcgucguuuccucucauuacagccggcgcuucacccccgaaauugccaagagaccuaaagugcgggaccaggagggacgcaucaauuauuacuggacgcuucuggaacccggcgauacaauuaucuuugaggcgaacgggaaucucauugccccuugguaugcuuucgcccuguccagaggauuuggcagcggcaucauuaccucuaacgcucccauggacgagugugaugccaagugccagacaccgcaaggggcgaucaauuccagccuuccuuuccagaacgugcaccccgucaccaucggagaauguccuaaguacgugcggucugccaaacugcgcaugguuaccggccucagaaauauucccagcauccagucccgggggcuguuuggagcuauugccggcuucaucgaagggggauggacaggcaugguggacggcugguauggguaccaucaccagaacgaacaaggaucuggcuacgcugccgaucaaaagagcacgcagaaugccauuaacgggaucaccaauaaagucaacuccgugaucgagaagaugaauacacaguuuaccgcuguuggaaaagaguucaacaagcuggagcgcagaauggagaaucucaacaaaaagguggacgauggcuuccuggacauuuggacauauaacgcggaacuucugguccuccuggagaaugaacggacccuugacuuucacgauagcaacgugaagaaucuguacgagaaagucaagucucagcucaaaaacaaugccaaggaaaucgggaacggcugcuucgaguuuuaucauaaauguaauaacgagugcauggaauccgugaagaauggaacguacgacuaucccaaguacagcgaggaaucuaaacugaaccgcgagaagauugauggcguuaaacuggaguccauggggguguaucagauccucgcuauuuacagcacagucgccuccucucuggugcuucugguuagccucggagccaucuccuucuggaugugcucuaauggcagccugcaguguagaaucugcauuuga

SEQ ID NO: 192369 - RNA, 1698 nt, Artificial Sequence; identical to SEQ ID NO: 192368
  derived and/or modified CDS sequence (opt5) from hemagglutinin__InfluenzaA__ABA08486

SEQ ID NO: 192370 - RNA, 1698 nt, Artificial Sequence
  derived and/or modified CDS sequence (opt5) from hemagglutinin__InfluenzaA__ABA08508
augaaggugaaacugcucauccugcuuugcaccuucacagccacguacgcugacaccauuuguaucggcuaucacgccaacaauagcacagauaccgucgacacaguucuggagaagaacgugaccgugacacauuccgucaaucuccuggaagauucucacaacgggaaacuuugccugcucaagggaauugcgccccugcagcugggcaauuguagcguggcuggguggauccucggaaacccugagugcgaacugcuuauuuccaaagagucuuggagcuacaucguugaaaccccgaaucccgagaacggcgccuguuauccuggguacuuugccgacuaugaggaacugagagagcaacucuccucugugagcuccuucgaacgguuugagaucuuccccaaggagagcucuuggccuaaucauacggucaccggaguguccgcuagcugcucucacaacggcaaguccagcuuuuaccgcaaucugcuuuggcugacaggcaaaaacgggcucuaucccaaucugucuaaguccuacgccaacaauaaaaagaaagaaguucugauucucuggggagugcaucacccuccgaacaucggcguccagagaacccuguacuauacagagaacgcuuacgugagcguggucuccucucacuauagccggcgcuucacccccgaaauuacgaagagaccuaagguucgggaucaggaggggcgcaucaauuacuauuggacacuucuggaacccggagacaccauuaucuuugaggccaacggcaaucucauugcgccuugguacgccuucgcucuguccagaggguuuggaagcggcaucaucacaucuaacgcccccauggaugagugugacgcuaaaugccagaccccgcaaggcgccauuaauuccagccuuccuuuccagaacgugcaucccgugaccaucggggaauguccuaaguauguccggucugcgaaacugcgcauggugacaggacucagaaauauucccagcauccagucccggggccuguuuggggccauugcuggauucaucgagggcggguggacgggaaugguugauggcugguacggcuaccaccaucagaacgaacaagggucuggauaugccgcugaccaaaagagcacccagaaugccaucaacggcauuacaaauaaagugaacuccgucaucgagaagaugaauacccaguuuacagccguggggaaagaguucaacaagcuggaacgcagaauggagaaucucaacaagaaaguugaugacggauuccuggauauuuggaccuacaacgcugaacuucuggugcuccuggagaaugaacggacgcuugacuuucacgacagcaacgucaagaaucuguaugagaaagugaagucucagcucaaaaacaaugcgaaggaaaucggcaacgggugcuucgaguuuuaccacaaguguaauaacgagugcauggaauccgucaaaaauggcacauaugauuaccccaaguauagcgaggaaucuaaacugaaccgcgagaagauugacggagugaaacuggauuccaugggcguuuaccagauccucgccaucuacagcaccguggcuuccucucugguccuucuggugagccucggggccauuuccuucuggaugugcucuaauggaagccugcaguguagaaucugcauuuga

SEQ ID NO: 192371 - RNA, 1698 nt, Artificial Sequence
  derived and/or modified CDS sequence (opt5) from hemagglutinin__InfluenzaA__ABA12707
augaaggugaaacugcucguccugcuuugcaccuucacagccacguacgcugacaccaucuguauuggcuaucacgccaacaauagcacagauaccguugacacagugcuggagaagaacgugaccgucacacauuccgugaaucuccuggaagauucucacaacgggaaacuuugccugcucaagggaaucgcgccccugcagcugggcaauuguagcguugcuggguggauucucggaaacccugagugcgaacugcuuaucuccaaagagucuuggagcuacauuguggaaaccccgaaucccgagaacggcacguguuauccuggguacuuugccgacuaugaggaacugagagagcaacucuccucugucagcuccuucgaacgguuugagaucuuccccaaggagagcucuuggccuaaucauaccgugacaggaguuuccgccagcugcucucacaacggcaaguccagcuuuuaccgcaaucugcuuuggcugaccggcaaaaacgggcucuaucccaaucugucuaaguccuacgcuaacaauaaagaaaaggaggugcugguccucuggggagugcaucacccuccgaacaucggcgaucagagagcccuguaccacacagaaaacgcuuaugugagcgucguuuccucucauuacagccggcgcuucacccccgagauugccaaaagaccuaaggugcgggaccaggaagggcgcaucaauuauuacuggacgcuucuggagcccggagauacaauuaucuuugaggcgaacggcaaucucauugccccuagauaugcuuucgcccugucccggggguuuggaagcggcaucauuaccucuaacgcucccauggacgaaugugaugccaagugccagacaccgcaaggcgcgaucaauuccagccuuccuuuccagaacgugcaccccgucaccaucggggaguguccuaaauacgugcgcucugccaagcugagaaugguuaccggacuccggaauauucccagcauccagucccgcggccuguuuggggcuauugccggauucaucgaaggcggguggacaggaaugguggacggcugguauggcuaccaucaccagaacgagcaagggucuggauacgcugccgaucagaaaagcacgcagaaugccauuaacggcaucaccaauaaggucaacuccgugaucgaaaagaugaauacacaguuuaccgcuguugggaaagaguucaacaaacuggagagacggauggaaaaucucaacaagaagguggacgauggauuccuggacauuuggacauauaacgcggagcuucugguccuccuggaaaaugagcgcacccuugacuuucacgauagcaacgugaaaaaucuguacgaaaaggucaaaucucaacucaagaacaaugccaaagagaucggcaacgggugcuucgaguuuuaucauaaguguaaugacgaaugcauggaguccgugaagaacggcacguacgauuaucccaaauacagcgaagagucuaagcugaauagagagaaaauugacggaguuaagcuggaauccaugggcguguaucagauccucgcuauuuacagcacagucgccuccucucuggugcuucugguuagccucggggccaucuccuucuggaugugcucuaacggaagccugcagugucggaucugcauuuga

SEQ ID NO: 192372 - RNA, 1698 nt, Artificial Sequence
  derived and/or modified CDS sequence (opt5) from hemagglutinin__InfluenzaA__ABA12715
augaaggccaaacugcucgugcugcuuugcaccuucacagcuacguacgccgacaccaucuguauuggcuaucacgcgaacaauagcacagauaccgucgacacaguucuggagaagaacgugaccgugacacauuccgucaaucuccuggaagauucucacaacgggaaacuuugccugcucaagggaaucgcuccccugcagcugggcaauuguagcguggccggguggauucucggaaacccugagugcgaacugcuuaucuccaaagagucuuggagcuacauuguugaaaccccgaaucccgagaacggcacguguuauccuggguacuuugccgacuaugaggaacugagagagcaacucuccucugugagcuccuucgaacgguuugagaucuuccccaagggaagcucuuggccuaaucauaccgucacaggcguguccgcuagcugcucucacaacggcaaguccagcuuuuaccgcaaucugcuuuggcugaccgggaaaaacggacucuaucccaaucugucuauguccuacguuaacaauaaggagaaagaagugcugguccucuggggcgugcaucacccuccgaacaucggggaucagagagcccuguaccacacagagaacgcuuaugugagcgucguuuccucucauuacagccggcgcuucacccccgaaauugccaagagaccuaaagugcgggaccaggagggacgcaucaauuauuacuggacgcuucuggaacccggcgauacaauuaucuuugaggcgaacgggaaucucauugccccuugguaugcuuucgcccuguccagaggauuuggcagcggcaucauuaccucuaacgcucccauggacgagugugaugccaagugccagacaccgcaaggggcgaucaauuccagccuuccuuuccagaacgugcaccccgucaccaucggagaauguccuaaguacgugcggucuaccaaacugcgcaugguuacaggccucagaaauauucccagcauccagucccgggggcuguuuggagccauugcuggcuucaucgaagggggauggacgggcaugguggacggcugguauggguaccaucaccagaacgaacaaggaucuggcuacgccgcugaucaaaagagcacccagaaugccauuaacgggaucacaaauaaagucaacuccgugaucgagaagaugaauacccaguuuacagccguuggaaaagaguucaacaagcuggagcgcagaauggagaaucucaacaaaaagguggacgauggcuuccuggacauuuggaccuauaacgcugaacuucugguccuccuggagaaugaacggacgcuugacuuucacgauagcaacgugaagaaucuguacgagaaagucaagucucagcucaaaaacaaugcgaaggaaaucgggaacggcugcuucgaguuuuaucauaaaugugacaaugagugcauggaauccgugaagaacggaacauacgauuaucccaaguacagcgaggaaucuaaacugaaucgcgagaagauugacggcguuaaacuggaguccauggggguguaucagauccucgccauuuacagcaccgucgcuuccucucugguguuccuuguuagccugggagccaucuccuuuuggaugugcucuaacggcagccuccaguguagaaucugcauuuga

SEQ ID NO: 192373 - RNA, 1698 nt, Artificial Sequence
  derived and/or modified CDS sequence (opt5) from hemagglutinin__InfluenzaA__ABA12729
augaaggugaaacugcucguccugcuuugcaccuucacagccacguacgcugacaccaucuguauuggcuaucacgccaacaauagcacagauaccguugacacagugcuggagaagaacgugaccgucacacauuccgugaaucuccuggaagauucucacaacgggaaacuuugccugcucaagggaaucgcgccccugcagcugggcaauuguagcguugcuggguggauucucggaaacccugagugcgaacugcuuaucuccaaagagucuuggagcuacauuguggaaaccccgaaucccgagaacggcacguguuauccuggguacuuugccgacuaugaggaacugagagagcaacucuccucugucagcuccuucgaacgguuugagaucuuccccaaggagagcucuuggccuaaucauaccgugacaggaguuuccgccagcugcucucacaacggcaaguccagcuuuuaccgcaaucugcuuuggcugaccggcaaaaacgggcucuaucccaaucugucuaaguccuacgcuaacaauaaagaaaaggaggugcugguccucuggggagugcaucacccuccgaacaucggcgaucagagagcccuguaccacacagaaaacgcuuauauuagcguggucuccucucauuacagccggcgcuucacccccgagaucgccaaaagaccuaagguucgggaccaggaagggcgcauuaauuauuacuggacgcuucuggagcccggagauacaaucauuuuugaggcgaacggcaaucucaucgccccuagauaugcuuucgcccugucccggggguuuggaagcggcauuaucaccucuaacgcucccauggacgaaugugaugccaagugccagacaccgcaaggcgcgaucaauuccagccuuccuuuccagaacgugcaccccgugaccauuggggaguguccuaaauacguccgcucugccaagcugagaauggugaccggacuccggaauauccccagcauucagucccgcggccuguuuggggcuaucgccggauucauugaaggcggguggacaggaaugguugacggcugguauggcuaccaucaccagaacgagcaagggucuggauacgcugccgaucagaaaagcacgcagaaugccaucaacggcaucaccaauaaggugaacuccgucauugaaaagaugaauacacaguuuaccgcuguggggaaagaguucaacaaacuggagagacggauggaaaaucucaacaagaagguugacgauggauuccuggacaucuggacauauaacgcggagcuucuggugcuccuggaaaaugagcgcacccuugacuuucacgauagcaacgucaaaaaucuguacgaaaaggugaaaucucaacucaagaacaaugccaaagagauuggcaacgggugcuucgaguuuuaucauaaguguaaugacgaaugcauggaguccgucaagaacggcacguacgauuaucccagauacagcgaagagucuaaacugaaucgggagaagaucgacggagugaaacuggaauccaugggcguuuaucagauucucgcuaucuacagcacaguggccuccucucugguccuucuggugagccucggggccaucuccuucuggaugugcucuaacggaagccugcaguguagaauuugcaucuga

SEQ ID NO: 192374 - RNA, 1701 nt, Artificial Sequence; identical to SEQ ID NO: 192358
  derived and/or modified CDS sequence (opt5) from hemagglutinin__InfluenzaA__ABA12740

SEQ ID NO: 192375 - RNA, 1701 nt, Artificial Sequence; identical to SEQ ID NO: 192327
  derived and/or modified CDS sequence (opt5) from hemagglutinin__InfluenzaA__ABA12751

SEQ ID NO: 192376 - RNA, 1701 nt, Artificial Sequence
  derived and/or modified CDS sequence (opt5) from hemagglutinin__InfluenzaA__ABA12762
augaagaccaucauugcccugagcuacauccucugccugguguucgcucagaaauuucccggcaacgacaauuccacagccacgcuuugucuggggcaccaugcggucccuaacggaaccauuguuaagacaaucaccaaugaucaaauugaggugacaaacgcuaccgaacucgugcagucuagcuccacaggcgggaucugcgacucuccgcaccagauccuggauggagagaauuguacccuuauugacgcccugcucggcgauccccagugcgacggguuccaaaacaaaaagugggaucuguuugucgaaagaagcaaagccuauuccaauuguuacccuuaugacgugcccgauuacgcuucucugcggagccucguugccuccagcggaacgcuggaguucaacaaugaaucuuuuaacuggaccggcgugacacagaauggcaccuccagcgcuugcaagcgcagaucuaacaauuccuucuuuagccggcuuaacuggcugacacaucucaaguucaaauauccugcccugaaugucaccaugcccaacaacgagaaguuugacaaacuuuacaucuggggagugcaccauccugggacggauaaugaccagauuucucuguaugcgcaggccuccggccgcaucacaguuagcaccaagagaucccaacagacagugauuccgaacaucgggucucggccccgcgucagagauauuccuagccggaucuccaucuacuggaccauugugaaacccggagacauccuccugauuaauagcaccggcaaccugaucgcuccucgcggguacuucaagauuagaucuggaaaguccagcaucaugcggucugacgcccccaucggcaaauguaauagcgagugcauuacaccgaacggcuccaucccuaaugauaagcccuuucagaacgugaaucgcauuacguauggggcuuguccuagauacgucaaacagaacacccucaagcuggccacaggaaugcggaauguucccgaaaaacaaacccgcggcaucuucggggcgauugccggauuuaucgagaacggcugggaagggaugguggacggaugguauggcuucagacaccaaaauucugagggcaucgggcaggcugccgaucuuaagagcacacaggcugccauuaaccagaucaauggaaaacugaaccggcucauuggcaagaccaacgagaaguuccaccagaucgaaaaagaguuuuccgaaguggaggggcgcauucaggaccuggaaaaguacgucgaggauacgaaaaucgaccuuuggagcuauaaugccgagcugcucguggcucuggaaaaccaacauacaauugaucugaccgacucugagaugaauaaacucuucgaaagaaccaagaagcagcugcgggagaacgcggaagauaugggaaauggcugcuuuaagaucuaccacaaaugugacaacgccugcaucggguccauuagaaauggcacauaugaucaugacguuuaccgcgacgaggcucuuaacaaucgguuccagaucaagggaguggagcugaaaagcggcuacaaggauuggauucucuggaucucuuuugccauuuccugcuuccugcuuugugucgugcugcucggguuuaucaugugggccugccagaaaggaaacaucagauguaauauuugcaucuga

SEQ ID NO: 192377 - RNA, 1701 nt, Artificial Sequence
  derived and/or modified CDS sequence (opt5) from hemagglutinin__InfluenzaA__ABA12773
augaagaccaucauugcccugagcuacaucuucugccucgugcugggccaggacuuucccgggaacgauaauuccacagcuacgcuuugucugggacaccaugccgucccuaacggcacccucguuaaaacaauuaccaaugaccaaaucgaggugacaaacgcgaccgaacuggugcagucuagcuccacagggaagauuugcaauaacccgcacagaauccuugauggaaucgacuguacccugauugaugcucuccugggcgacccccauugcgauggguuccagaaugagacgugggaccuguuugucgaacggucuaaagccuucagcaacuguuauccuuacgaugugcccgacuaugccucccuccgcucucugguugcuagcuccggaacccuugaguuuaucaaugaaggcuucacauggaccggcgugacacagaacgggggaagcaaugccugcaagagaggcccugauucuggguuuuucucccggcugaacuggcucuacaaaagcggaucuaccuaucccguccugaaugugacgaugccuaacaaugacaacuuugauaaacuuuacauuuggggcguucaccauccguccacagaccaagagcagaccagccuguaugugcaggcuucugggcgcgucacaguguccaccaagagaagccagcaaaccaucauucccaacaucggaucccggccuugggugcgcggccucucuagcagaauuuccaucuacuggacaaucgucaagcccggcgacauucugguuaucaauagcaacgggaaucugauugccccucggggauacuucaagaugcgcacgggcaaaucuuccaucaugagaagcgaugcgcccauugggaccuguaucucugagugcaucacaccgaacggaagcauuccuaaugacaagcccuuucagaacgugaauaaaaucaccuauggcgccuguccuaaguacgugaagcagaacacacucaaacuggcuaccgggaugcggaauguccccgaaaagcagacgcgcggacuuuucggcgccauugcuggcuuuaucgagaacgggugggaaggaaugauugauggcugguauggguucagacaccaaaauuccgagggaacaggccaggccgcggaccugaaaucuacccaggccgcuaucgaucaaaucaacgggaagcucaaucgggugauugagaaaaccaacgaaaaguuccaccagaucgagaaagaauuuagcgagguugaaggccgcauucaggaccuggagaaguacguggaggauacaaagaucgaccuuugguccuauaaugccgaacugcucgucgcucuggagaaccagcauaccauugaucugacagacagcgaaaugaacaaacucuucgagaagacgagacggcaacugagagaaaaugccgaggauaugggaaacggcugcuuuaaaaucuaccacaagugugacaaugccugcauugggucuauccgcaacggaaccuaugaccaugauguguaccgggacgaggcucuuaauaacagauuccagaucaaaggcguugaacugaaguccggguacaaggauuggauucucuggaucagcuuugcgauuucuugcuuccugcuuugugugguccugcucggauuuaucaugugggccugccagaaaggcaauauucgcuguaacaucugcaucuga

SEQ ID NO: 192378 - RNA, 1701 nt, Artificial Sequence
  derived and/or modified CDS sequence (opt5) from hemagglutinin__InfluenzaA__ABA12780
augaagaccaucauugcccugagcuacauccucugccugguguucgcucagaaacuucccggcaacgacaauuccacagccacgcugugucucgggcaccaugcggucccuaacggaaccauuguuaagacaaucaccaaugaucaaauugaggugacaaacgcuaccgaacuggugcagucuagcuccacaggcgggaucugcgacucuccgcaccagauccuugauggagagaauuguacccugauugacgcccuccugggcgauccccagugcgacggguuucaaaacaaaaagugggaucuguucgucgaaagaagcaaagccuauuccaauuguuacccuuaugacgugcccgauuacgcuucucuccggagccugguugccuccagcggaacgcuugaguuuaacaaugaaucuuucaacuggaccggcgugacacagaauggcaccuccagcgcuugcaagcgcagaucuaacaauuccuuuuucagccggcugaacuggcucacacaucugaaguuuaaauauccugcccuuaaugucaccaugcccaacaacgagaaguucgacaaacuguacaucuggggagugcaccauccugggacgaauaacgaucagauuucucucuaugcgcaggccuccggccgcaucacaguuagcaccaagagaucccaacagacagugauuccgaauaucgagucucggccccgcgucagagacauuccuagccggaucuccaucuacuggaccauugugaaacccggggauauccugcugauuaacagcaccggaaaucucaucgcuccucgcggcuacuuuaagauuagaucugggaaguccagcaucaugcggucugacgcccccaucggaaaauguaacagcgaaugcauuacaccgaauggcuccaucccuaacgacaagcccuuccagaaugugaaccgcauuacguauggcgcuuguccuagauacgucaaacagaauacccugaagcuggccacagggaugcggaacguucccgagaaacaaacccgcggaaucuuuggcgcgauugccggguucaucgaaaauggaugggagggcaugguggaugggugguauggauuuagacaccagaacucugagggcaucggccaggcugccgaccuuaagagcacacaagcugccauuaaucagaucaacgggaaacucaaccggcugauuggaaagaccaaugaaaaguuccaccagaucgagaaagaguucuccgaaguggaaggccgcauucaggaucuugagaaguacgucgaggacacgaaaaucgaucuguggagcuauaacgccgaacuccugguggcucuggagaaucaacauacaauugaccucaccgauucugaaaugaacaagcuguuugagagaaccaaaaagcagcuucgggaaaaugcggaggacauggggaacggaugcuucaagaucuaccacaaaugugauaaugccugcaucggcuccauuagaaacgggacauaugaccaugauguuuaccgcgacgaggcucugaauaaccgguuucagaucaagggcguggaacucaaaagcggauacaaggacuggauucuguggaucucuuucgccauuuccugcuuucuucugugugucgcccuccugggcuucaucaugugggcuugccagaaagggaauaucagauguaacauuugcaucuga

SEQ ID NO: 192379 - RNA, 1701 nt, Artificial Sequence
  derived and/or modified CDS sequence (opt5) from hemagglutinin__InfluenzaA__ABA16214
augaagaccaucauugcccugagcuacaucuccugccucguguucgcucagaaacugcccggcaacgacaauucuacagccacgcuuugucuggggcaccaugcggucccuaacggaacccucguuaagacaauuaccaaugaucaaaucgaggugacaaacgcuaccgaacuggugcagagcuccucuacaggcagaauuugcgacagcccgcaccggauccuugaugggaaaaauuguacccugaucgacgcccuccugggagauccccauugcgacggcuuucagaacgagaagugggaucuguucgucgaacgcuccaaagccuuuucuaauuguuauccuuacgacgugcccgauuaugcuagccucagaucccugguugccagcucugggacgcuugaguucauuaacgaaggauuuaauuggaccggcgugacacaguccggcgggagcuacgcuugcaagcggggaucugucaaguccuucuuuagccgccugaacuggcucuaugagucugaguccaaauacccugcccugaaugugaccaugcccaacaauggcaaguucgacaaacuuuauaucuggggaguucaccauccuagcacagauaaggaacaaaccaaccuguacgugagagcguccgggcgggucacggugucuacaaaacgcagccagcagaccgugauuccgaauaucggccccagaccuuggguccgggggcucuccagccgcauuucuaucuacuggacaauuguuaagcccggagacauccugcugaucaacuccaccggcaaccucauugccccuagaggcuauuuuaagauccggaccgggaaaagcucuauuaugcgcagcgaugcucccaucggaacauguuccucuggcugcauuacgccgaaugggagcaucccuaacgacaagcccuuccagaaugugaacaaaaucaccuacggagccuguccuagauaugugaagcaaaauacacugaaacuugcuaccggcaugcggaacguccccgagaagcagacacgcgggauuuuuggagccaucgcgggcuucauugaaaauggcugggaggggaugguggacggaugguacggcuuuagacaccagaacuccgaggggaccggacaggccgcugaucugaaaagcacgcaagccgcuaucgaccagauuaauggcaagcucaaccggcugaucgaaaagacaaaugagaaauuccaccagaucgaaaaggaguucucugaaguugaggggcgcauucaagaucuugagaaauauguggaagacaccaagaucgaucugugguccuacaacgccgagcuccuggucgcccuggaaaaucagcauaccauugacaugacagauagcgagaugaacaaacucuuugaaaagaccagaaagcagcugcgggagaaugcugaggacaugggcaacggaugcuucaaaaucuaucacaagugugauaacgcgugcauuggcucuaucagaaaugggacauacgaccaugauguguaccgcgacgaagcccuuaacaaucgguuucagauuaaaggaguugagcugaaguccggcuauaaagacuggauccucuggaucagcuucgcuauuuccugcuuucugcuuugugugguccugcucggguucaucaugugggccugccaaaagggaaacauuagauguaauaucugcauuuga

SEQ ID NO: 192380 - RNA, 1701 nt, Artificial Sequence; identical to SEQ ID NO: 192328
  derived and/or modified CDS sequence (opt5) from hemagglutinin__InfluenzaA__ABA18026

SEQ ID NO: 192381 - RNA, 1698 nt, Artificial Sequence
  derived and/or modified CDS sequence (opt5) from hemagglutinin__InfluenzaA__ABA18037
augaaggccaaacugcucgugcugcuuugcaccuucacagcuacguacgccgacaccaucuguauuggcuaucacgcgaacaauagcacagauaccgucgacacaguucuggagaagaacgugaccgugacacauuccgucaaucuccuggaagauucucacaacgggaaacuuugccugcucaagggaaucgcuccccugcagcugggcaauuguagcguggccggguggauucucggaaacccugagugcgaacugcuuaucuccaaagagucuuggagcuacauuguugaaaccccgaaucccgagaacggcacguguuauccuggguacuuugccgacuaugaggaacugaaggagcaacucuccucugugagcuccuucgaaagauuugagaucuuccccaagggaagcucuuggccuaaucauaccgucacaggcguguccgcuagcugcucucacaacggcaaauccagcuuuuaccggaaucugcuuuggcugaccgggaagaacggacucuaucccaaucugucuauguccuacguuaacaauaaagagaaggaagugcugguccucuggggcgugcaucacccuccgaacaucggggaucagcgcgcccuguaccacacagagaacgcuuaugugagcgucguuuccucucauuacagcagacgguucacccccgaaauugccaaacgcccuaaggugagagaccaggagggacggaucaauuauuacuggacgcuucuggaacccggcgauacaauuaucuuugaggcgaacgggaaucucauugccccuugguaugcuuucgcccugucccgcggauuuggcagcggcaucauuaccucuaacgcucccauggacgagugugaugccaagugccagacaccgcaaggggcgaucaauuccagccuuccuuuccagaacgugcaccccgucaccaucggagaauguccuaaauacgugagaucugccaagcugcggaugguuaccggccuccgcaauauucccagcauccaguccagagggcuguuuggagcuauugccggcuucaucgaagggggauggacaggcaugguggacggcugguauggguaccaucaccagaacgaacaaggaucuggcuacgcugccgaucagaaaagcacgcagaaugccauuaacgggaucaccaauaaggucaacuccgugaucgagaaaaugaauacacaguuuaccgcuguuggaaaggaguucaacaaacuggagcggcgcauggagaaucucaacaagaagguggacgauggcuuccuggacauuuggacauauaacgcggaacuucugguccuccuggagaaugaaagaacccuugacuuucacgauagcaacgugaaaaaucuguacgagaaggucaaaucucaacucaagaacaaugccaaagaaaucgggaacggcugcuucgaguuuuaucauaaguguaauaacgagugcauggaauccgugaagaauggaacguacgacuaucccaaauacagcgaggaaucuaagcugaaccgggagaaaauugauggcguuaagcuggaguccauggggguguaucagauccucgcuauuuacagcacagucgccuccucucuggugcuucugguuagccucggagccaucuccuucuggaugugcucuaauggcagccugcagugucgcaucugcauuuga

SEQ ID NO: 192382 - RNA, 1701 nt, Artificial Sequence; identical to SEQ ID NO: 192327
  derived and/or modified CDS sequence (opt5) from hemagglutinin__InfluenzaA__ABA18048

SEQ ID NO: 192383 - RNA, 1701 nt, Artificial Sequence
  derived and/or modified CDS sequence (opt5) from hemagglutinin__InfluenzaA__ABA18123
augaagaccaucauugcccugagcuacauccucugccugguguucgcucagaaacuucccggcaacgacaauuccacagccacgcugugucucgggcaccaugcggucccuaacggaacccugguuaagacaauuaccaaugaucaaaucgaggugacaaacgcuaccgaacuugugcagucuagcuccacaggcagaauuugcgacucuccgcaccagauccuggauggggagaauuguacccucaucgacgcccugcugggagauccccauugcgacggcuuucagaacaaagaaugggaucucuucgucgagcggagcaaggccuauuccaauuguuacccuuaugacgugcccgauuacguuucucugcgcagccuuguggcuuccagcgggacgcuggaauuuaacaaugagucuuucaacuggaccggagucgcccaaaauggcacauccagcgcuugcaaaagacggucuaacaaguccuuuuucagccgccucaauuggcugcaccagcuuaaguauaaauacccugcccugaacgugaccaugcccaauaacgagaaguuugacaaacucuauauuuggggcguucaucacccugggacagauucugaccagaucucccuguacgcgcaggccagcggaagagugaccgucuccacgaagcggucucaacagacagugauuccgaacaucggcagcgggcccugggugcgcggagucuccagcagaauuucuaucuacuggaccauuguuaaaccuggcgauauccugcucaucaauuccacagggaaccugauugcuccccggggauauuucaagauccgcagcggcaagucuagcauuaugagauccgacgccccuaucggcaaauguaauucugaaugcauuacccccaacgggagcaucccgaaugacaagccuuuucagaacgugaaucggaucaccuacggagcuuguccccgcuaugugaaacagaacacacuuaagcuggccacgggcaugagaaaugucccugagaaacaaacccgggggauuuucggagcgaucgccggcuuuauugaaaacgggugggagggaaugauggauggcugguacggcuuccgccaccaaaauuccgaggggacaggacaggcugccgaccucaagagcacccaggcugccaucaaccagauuaauggcaaacugaacagacuuaucgaaaagacaaaugagaaguuucaucagaucgaaaaagaguucucugaaguggaggggcggauucaggaucuggagaaguauguugaagacaccaaaaucgaucucugguccuacaacgccgagcugcugguggcucucgaaaaccaacacacgauugaccugacagauagcgagaugaauaaacuuuucgaaagaaccaagaagcagcugcgcgagaacgcggaggacaugggaaauggcugcuuuaagaucuaucauaaaugugauaacgccugcauugggucuauccggaauggcaccuacgaccacgaugucuacagagacgaagcucucaacaaucgcuuccagauuaagggaguggagcugaaauccggcuauaaggacuggauccuuuggaucagcuuugccauuuccugcuuccugcucuguaucguucugcugggguuuauuaugugggccugccagaaaggaaacauccgguguaauauuugcaucuga

SEQ ID NO: 192384 - RNA, 1701 nt, Artificial Sequence; identical to SEQ ID NO: 192327
  derived and/or modified CDS sequence (opt5) from hemagglutinin__InfluenzaA__ABA18134

SEQ ID NO: 192385 - RNA, 1698 nt, Artificial Sequence; identical to SEQ ID NO: 192371
  derived and/or modified CDS sequence (opt5) from hemagglutinin__InfluenzaA__ABA18145

SEQ ID NO: 192386 - RNA, 1701 nt, Artificial Sequence; identical to SEQ ID NO: 192328
  derived and/or modified CDS sequence (opt5) from hemagglutinin__InfluenzaA__ABA18156

SEQ ID NO: 192387 - RNA, 1701 nt, Artificial Sequence
  derived and/or modified CDS sequence (opt5) from hemagglutinin__InfluenzaA__ABA26700
augaagaccaucauugcccugagcuacauccucugccugguguucgcucagaaacuucccggcaacgacaauuccacagccacgcugugucucgggcaccaugcggucccuaacggaaccauuguuaagacaaucaccaaugaucaaauugaggugacaaacgcuaccgaacuggugcagucuagcuccacaggcgggaucugcaauucuccgcaccagauccuugacggagagaacuguacccugauugaugcccuccugggcgacccccagugcgauggguuucaaaauaaaaagugggaccuguucgucgaaagaagcaaagccuauuccaacuguuacccuuaugaugugcccgacuacgcuucucuccggagccugguugccuccagcggaacgcuugaguuuaauaacgaaucuuucaauuggaccggcgugacacagaacggcaccuccagcgcuugcaagcgcagaucuaauaacuccuuuuucagccggcugaauuggcucacacaucugaaguuuaaauauccugcccuuaacgucaccaugcccaacaaugagaaguucgauaaacuguacaucuggggagugcaccauccugggacggacaacgaucagauuucucucuaugcgcaggccccgggccgcaucacaguuuccaccaagagaagccaacagacagugauucccaauaucgggucccggccucgcgucagagacauucccucucggaucagcaucuacuggaccauugugaaaccuggagauauccugcugauuaacuccaccggcaaucucaucgcuccccgcggguacuuuaagauuagaagcggaaagucuuccaucaugcggagcgacgccccgaucggcaaauguaacucugagugcauuacaccuaauggcagcauccccaacgacaagccuuuccagaaugugaaccgcauuacguauggggcuugucccagauacgucaaacagaauacccugaaacuugccacaggaaugcggaacguucccgaaaagcaaacccgcggcaucuuuggggcgauugccggauucaucgagaauggcugggaagggaugguggauggaugguauggcuuuagacaccagaacuccgagggcaucgggcaggcugccgaccugaagucuacacaagcugccauuaaucagaucaacggaaaacucaaccggcugauuggcaagaccaaugagaaguuccaccagaucgaaaaagaguucagcgaaguggaggggcgcauucaggaucuugaaaaguacgucgaggacacgaaaaucgaucugugguccuauaacgccgagcuccugguggcucuggaaaaucaacauacaauugaccucaccgauagcgagaugaacaagcuguuugaaagaaccaaaaagcagcuucgggagaaugcggaagacaugggaaacggcugcuucaagaucuaccacaaaugugauaaugccugcaucgggucuauuagaaacggcacauaugaccaugauguuuaccgcgacgaggcucugaauaaccgguuucagaucaagggaguggagcucaaauccggcuacaaggacuggauucuguggaucagcuucgccauuucuugcuuucuucugugugucgcccuccugggguucaucaugugggcuugccagaaaggaaauaucagauguaacauuugcaucuga

SEQ ID NO: 192388 - RNA, 1701 nt, Artificial Sequence
  derived and/or modified CDS sequence (opt5) from hemagglutinin__InfluenzaA__ABA26711
augaagaccaucauugcccugagcuacauccucugccugguguucgcucagaaacuucccggcaacgacaauuccacagccacgcugugucucgggcaccaugcggucccuaacggaaccauuguuaagacaaucaccaaugaucaaauugaggugacaaacgcuaccgaacuggugcagucuagcuccacaggcgggaucugcgacucuccgcaccagauccuugauggagagaauuguacccugauugacgcccuccugggcgauccccagugcgacggguuucaaaacaaaaagugggaucuguucgucgaaagaagcaaagccuauuccaauuguuacccuuaugacgugcccgauuacgcuucucuccggagccugguugccuccagcggaacgcuugaguuuaacaaugaaucuuucaacuggaccggcgugacacagaauggcaccuccagcgcuugcaagcgcagaucuaacaauuccuuuuucagccggcugaacuggcucacacaucugaaguuuaaauauccugcccuuaaugucaccaugcccaacaacgagaaguucgacaaacuguacaucuggggagugcaccauccugggacggauaaugaccagauuucucucuaugcgcaggccuccggccgcaucacaguuagcaccaagagaucccaacagacagugauuccgaacaucgggucucggccccgcgucagagauauuccuagccggaucuccaucuacuggaccauugugaaacccggagacauccugcugauuaauagcaccggcaaccucaucgcuccucgcggguacuuuaagauuagaucuggaaaguccagcaucaugcggucugacgcccccaucggcaaauguaagagcgagugcauuacaccgaauggcuccaucccuaacgauaaacccuuccagaaugugaaccgcauuacguauggggcuuguccuagauacgucaagcagaauacccugaaacuugccacaggaaugcggaacguucccgaaaagcaaacccgcggcaucuuuggggcgauugccggauucaucgagaauggcugggaagggaugguggacggaugguauggcuuuagacaccagaacucugagggcaucgggcaggcugccgaucugaaaagcacacaagcugccauuaaucagaucaacggaaagcucaaucggcugauuggcaagaccaacgagaaauuccaccagaucgaaaaggaguucuccgaaguggaggggcgcauucaggaccuugaaaaauacgucgaggauacgaagaucgaccuguggagcuauaacgccgagcuccugguggcucuggaaaaucaacauacaauugaucucaccgacucugagaugaacaaacuguuugaaagaaccaagaagcagcuucgggagaaugcggaagauaugggaaacggcugcuucaaaaucuaccacaagugugacaaugccugcaucggguccauuagaaacggcacauaugaucaugacguuuaccgcgacgaggcucugaauaaccgguuucagaucaaaggaguggagcucaagagcggcuacaaagauuggauucuguggaucucuuucgccauuuccugcuuucuucugugugucgcccuccugggguucaucaugugggcuugccagaagggaaauaucagauguaacauuugcaucuga

SEQ ID NO: 192389 - RNA, 1701 nt, Artificial Sequence
  derived and/or modified CDS sequence (opt5) from hemagglutinin__InfluenzaA__ABA26722
augaagaccaucauugcccugagcuacauccucugccugguguucgcucagaaacuucccggcaacgacaauuccacagccacgcugugucucgggcaccaugcggucccuaacggaaccauuguuaagacaaucaccaaugaucaaauugaggugacaaacgcuaccgaacuggugcagucuagcccgacaggcgggaucugcgacagcccccaccagauccuugauggagagaauuguacccugauugacgcccuccugggcgauccucagugcgacggguuucaaaacaaaaagugggaucuguucgucgaaagaucuaaagcccauagcaauuguuaucccuacgacgugccugauuaugcuucccuccggucucugguugccagcuccggaacgcuugaguuuaacaaugaauccuucaacuggaccggcgugacacagaauggcaccucuuccgcuugcaagcgcagaagcaacaagucuuucuucucccggcugaauuggcucacacaccugaaauuuaaguaccccgcccuuaacgucaccaugccuaauaacgagaaauucgacaagcuguauaucuggggagugcaucacccggggacggauaacgaccagauuagccucuacgcgcaggccucuggccgcaucacaguuuccaccaaaagaagccaacagacagugauucccaauaucgggucccggccucgcgucagagaugugcccucucggauuagcaucuauuggaccaucgugaagccuggagacauucugcugaucaacuccaccggcaaucucauugcuccccgcggguacuuuaagaucagaagcggaaaaucuuccauuaugcggagcgacgccccgaucggcaaguguaacucuggcugcaucacaccuaaugggagcauucccaacgauaaaccuuuccagaaugucaaccgcaucacguacggagcuugucccagauauguuaagcagaauacccugaaacuugccacaggcaugcggaacgugcccgagaagcaaacccgcgggauuuuuggagcgaucgccggcuucauugaaaaugggugggagggaaugguggacggcugguacggcuuuagacaccagaacuccgaagggacaggacaggcugccgaucugaaaucuacccaagcugccaucaaucagaucaacggcaagcucaaucggcugauugggaagacgaacgagaaauuccaucagaucgagaaggaauuuagcgaggucgaaggacgcauucaggaccuugagaaauauguggaagauacaaagaucgaccugugguccuacaacgccgagcuccugguugcucuggagaaucaacacaccauugaucucaccgacagcgaaaugaacaaacuguuugagagaacaaagaagcagcuucgggaaaaugcggaggauaugggcaacgggugcuucaaaaucuaucauaagugugacaaugccugcauuggcucuaucagaaacggaaccuacgaucacgacguguaucgcgacgaagcucugaauaaccgguuucagaucaaaggcgucgagcucaaguccggguacaaagauuggauucuguggaucagcuucgccauuucuugcuuucuucuguguguggcccuccugggauucaucaugugggcuugccagaagggcaauauuagauguaacaucugcaucuga

SEQ ID NO: 192390 - RNA, 1701 nt, Artificial Sequence; identical to SEQ ID NO: 192315
  derived and/or modified CDS sequence (opt5) from hemagglutinin__InfluenzaA__ABA26733

SEQ ID NO: 192391 - RNA, 1701 nt, Artificial Sequence; identical to SEQ ID NO: 192315
  derived and/or modified CDS sequence (opt5) from hemagglutinin__InfluenzaA__ABA26755

SEQ ID NO: 192392 - RNA, 1701 nt, Artificial Sequence; identical to SEQ ID NO: 192354
  derived and/or modified CDS sequence (opt5) from hemagglutinin__InfluenzaA__ABA26766

SEQ ID NO: 192393 - RNA, 1701 nt, Artificial Sequence; identical to SEQ ID NO: 192354
  derived and/or modified CDS sequence (opt5) from hemagglutinin__InfluenzaA__ABA26788

SEQ ID NO: 192394 - RNA, 1701 nt, Artificial Sequence; identical to SEQ ID NO: 192354
  derived and/or modified CDS sequence (opt5) from hemagglutinin__InfluenzaA__ABA26799

SEQ ID NO: 192395 - RNA, 1698 nt, Artificial Sequence
  derived and/or modified CDS sequence (opt5) from hemagglutinin__InfluenzaA__ABA42247
augaaggugaaacugcucguccugcuuugcaccuucacagccacguacgcugacaccaucuguauuggcuaucacgccaacaauagcacagauaccguugacacagugcuggagaagaacgugaccgucacacauuccgugaaucuccuggaagauucucacaacgggaaacuuugccugcucaagggaaucgcgccccugcagcugggcaauuguagcguugcuggguggauucucggaaacccugagugcgaacugcuuaucuccaaagagucuuggagcuacauuguggaaaccccgaaucccgagaacggcacguguuauccuggguacuuugccgacuaugaggaacugagagagcaacucuccucugucagcuccuucgaacgguuugagaucuuccccaaggagagcucuuggccuaaucauaccgugacaggaguuuccgccagcugcucucacaacggcaaguccagcuuuuacaaaaaucugcuuuggcugaccggcaagaacgggcucuaucccaaucugucuaaauccuacgcuaacaauaaggaaaaagaggugcugguccucuggggagugcaucacccuccgaacaucggcgaucagcgcgcccuguaccacacagaaaacgcuuaugugagcgucguuuccucucauuacagcagacgguucacccccgagauugccaagcgcccuaaggugagagaccaggaagggcggaucaauuauuacuggacgcuucuggagcccggagauacaauuaucuuugaggcgaacggcaaucucauugccccucgcuaugcuuucgcccuguccagaggguuuggaagcggcaucauuaccucuaacgcucccauggacgaaugugaugccaaaugccagacaccgcaaggcgcgaucaauuccagccuuccuuuccagaacgugcaccccgucaccaucggggaguguccuaaguacgugcggucugccaaacugcgcaugguuaccggacucagaaauauucccagcauccagucccggggccuguuuggggcuauugccggauucaucgaaggcggguggacaggaaugguggacggcugguauggcuaccaucaccagaacgagcaagggucuggauacgcugccgaucaaaagagcacgcagaaugccauuaacggcaucaccaauaaagucaacuccgugaucgaaaagaugaauacacaguuuaccgcuguugggaaagaguucaacaagcuggagcgcagaauggaaaaucucaacaagaaaguggacgauggauuccuggacauuuggacauauaacgcggagcuucugguccuccuggaaaaugagcggacccuugacuuucacgauagcaacgugaagaaucuguacgaaaaagucaagucucagcucaaaaacaaugccaaggagaucggcaacgggugcuucgaguuuuaucauaaguguaaugacgaaugcauggaguccgugaaaaacggcacguacgauuaucccaaguacagcgaagagucuaaacugaaucgcgagaagauugacggaguuaaacuggaauccaugggcguguaucagauccucgcuauuuacagcacagucgccuccucucuggugcuucugguuagccucggggccaucuccuucuggaugugcucuaacggaagccugcaguguagaaucugcauuuga

SEQ ID NO: 192396 - RNA, 1698 nt, Artificial Sequence; identical to SEQ ID NO: 192368
  derived and/or modified CDS sequence (opt5) from hemagglutinin__InfluenzaA__ABA42258

SEQ ID NO: 192397 - RNA, 1701 nt, Artificial Sequence; identical to SEQ ID NO: 192327
  derived and/or modified CDS sequence (opt5) from hemagglutinin__InfluenzaA__ABA42269

SEQ ID NO: 192398 - RNA, 1698 nt, Artificial Sequence
  derived and/or modified CDS sequence (opt5) from hemagglutinin__InfluenzaA__ABA42280
augaaggugaaacugcucauccugcuuugcaccuucacagccacguacgcugacaccauuuguaucggcuaucacgccaacaauagcacagauaccgucgacacaguucuggagaagaacgugaccgugacacauuccgucaaucuccuggaagauucucacaacgggaaacuuugccugcucaagggaauugcgccccugcagcugggcaauuguagcguggcuggguggauccucggaaacccugagugcgaacugcuuauuuccaaagagucuuggagcuacaucguugaaaccccgaaucccgagaacggcgccuguuauccuggguacuuugccgacuaugaggaacugagagagcaacucuccucugugagcuccuucgaacgguuugagaucuuccccaaggagagcucuuggccuaaucauacggucaccggaguguccgcuagcugcucucacaacggcaaguccagcuuuuaccgcaaucugcuuuggcugacaggcaaaaacgggcucuaucccaaucugucuaaguccuacgccaacaauaaagaaaaggagguucugauucucuggggagugcaucacccuccgaacaucggcgaucagagaacccuguaccacacagaaaacgcuuaugucagcgugguguccucucauuacagccggcgcuucacccccgagauuacgaaaagaccuaagguccgggaccaggaagggcgcaucaauuauuacuggacacuucuggagcccggagauaccauuaucuuugaggccaacggcaaucucauugcgccuugguaugccuucgcucuguccagaggguuuggaagcggcaucaucacaucuaacgcccccauggacgaaugugaugcuaagugccagaccccgcaaggcgccauuaauuccagccuuccuuuccagaacguucaccccgugaccaucggggaguguccuaaauacgugcggucugcgaagcugcgcauggucacaggacucagaaauauucccagcauccagucccggggccuguuuggggccauugcuggauucaucgaaggcggguggacgggaaugguggacggcugguauggcuaccaucaccagaacgagcaagggucuggauacgccgcugaucagaaaagcacccagaaugccaucaacggcauuacaaauaagguuaacuccgugaucgaaaagaugaauacccaguuuacagccgucgggaaagaguucaacaaacuggagcgcagaauggaaaaucucaacaagaagguggacgauggauuccuggacauuuggaccuauaacgcugagcuucugguucuccuggaaaaugagcggacgcuugacuuucacgauagcaacgugaaaaaucuguacgaaaaggucaaaucucaacucaagaacaaugcgaaagagaucggcaacgggugcuucgaguuuuaucauaaguguaauaacgaaugcauggaguccgugaagaauggcacauacgacuaucccaaauacagcgaagagucuaagcugaaccgcgagaaaauugauggagucaagcuggacuccaugggcguguaucagauccucgccaucuacagcaccguugcuuccucucuggugcuucuggucagccucggggccauuuccuucuggaugugcucuaauggaagccugcaguguagaaucugcauuuga

SEQ ID NO: 192399 - RNA, 1701 nt, Artificial Sequence
  derived and/or modified CDS sequence (opt5) from hemagglutinin__InfluenzaA__ABA42291
augaagaccaucauugcccugagcuacauccucugccugguguucgcucagaaacuucccggcaacgacaauuccacagccacgcugugucucgggcaccaugcggucccuaacggaaccauuguuaagacaaucaccaaugaucaaauugaggugacaaacgcuaccgaacuggugcagucuagcuccacaggcgggaucugcgacucuccgcaccagauccuugauggagagaauuguacccugauugacgcccuccugggcgauccccagugcgacggguuucaaaacaaaaagugggaucuguucgucgaaagaagcaaagccuauuccaauuguuacccuuaugacgugcccgauuacgcuucucuccggagccugguugccuccagcggaacgcuugaguuuaacaaugaaucuuucaacuggaccggcgugacacagaauggcaccuccagcgcuugcaagcgcagaucuaacaauuccuuuuucagccggcugaacuggcucacacaucugaaguuuaaauauccugcccuuaaugucaccaugcccaacaacgagaaguucgacaaacuguacaucuggggagugcaccauccugggacggauaaugaccagauuucucucuaugcgcaggccuccggccgcaucacaguuagcaccaagagaucccaacagacagugauuccgaacaucgggucucggccccgcgucagagauauuccuagccggaucuccaucuacuggaccauugugaaacccggagacauccugcugauuaauagcaccggcaaccucaucgcuccucgcggguacuuuaagauuagaucuggaaaguccagcaucaugcggucugacgcccccaucggcaaauguaagagcgagugcauuacaccgaauggcuccaucccuaacgauaaacccuuccagaaugugaaccgcauuacguauggggcuuguccuagauacgucaagcagaauacccugaaacuugccacaggaaugcggaacguucccgaaaagcaaacccgcggcaucuuuggggcgauugccggauucaucgagaauggcugggaagggaugguggacggaugguauggcuuuagacaccagaacucugagggcaucgggcaggcugccgaucugaaaagcacacaagcugccauuaaucagaucaacggaaagcucaaucggcugauuggcaagaccaacgagaaauuccaccagaucgaaaaggaguucuccgaaguggaggggcgcauucaggaccuugaaaaauacgucgaggauacgaagacagaccuguggagcuauaacgccgagcuccugguggcucuggaaaaucaacauaccaucgaucucaccgacucugagaugaacaaacuguuugaaagaacaaagaagcagcuucgggagaaugcggaagauaugggaaacggcugcuucaaaauuuaccacaagugugacaaugccugcaucggguccaucagaaacggcaccuaugaucaugacguuuaccgcgacgaggcucugaauaaccgguuucagauuaaaggaguggagcucaagagcggcuacaaagauuggauccuguggauuucuuucgccaucuccugcuuucuucugugugucgcccuccugggguucauuaugugggcuugccagaagggaaauaucagauguaacaucugcauuuga

SEQ ID NO: 192400 - RNA, 1701 nt, Artificial Sequence; identical to SEQ ID NO: 192123
  derived and/or modified CDS sequence (opt5) from hemagglutinin__InfluenzaA__ABA42302

SEQ ID NO: 192401 - RNA, 1701 nt, Artificial Sequence; identical to SEQ ID NO: 192177
  derived and/or modified CDS sequence (opt5) from hemagglutinin__InfluenzaA__ABA42313

SEQ ID NO: 192402 - RNA, 1701 nt, Artificial Sequence; identical to SEQ ID NO: 192123
  derived and/or modified CDS sequence (opt5) from hemagglutinin__InfluenzaA__ABA42346

SEQ ID NO: 192403 - RNA, 1701 nt, Artificial Sequence; identical to SEQ ID NO: 192177
  derived and/or modified CDS sequence (opt5) from hemagglutinin__InfluenzaA__ABA42357

SEQ ID NO: 192404 - RNA, 1701 nt, Artificial Sequence
  derived and/or modified CDS sequence (opt5) from hemagglutinin__InfluenzaA__ABA42379
augaagaccaucauugcccugagcuacauccucugccugguguucgcucagaaacuucccggcaacgacaauuccacagccacgcugugucucgggcaccaugcggucccuaacggaacccugguuaagacaauuaccaaugaucaaaucgaggugacaaacgcuaccgaacuugugcagucuagcuccacaggcagaauuugcgacucuccgcaccagauccuggauggggagaauuguacccucaucgacgcccugcugggagauccccauugcgacggcuuucagaacaaagaaugggaucucuucgucgagcggagcaaggccuauuccaauuguuacccuuaugacgugcccgauuacguuucucugcgcagccuuguggcuuccagcgggacgcuggaauuuaacaaugagucuuucaacuggaccggagucgcccaaaauggcacauccagcgcuugcaaaagacggucugacaaguccuuuuucagccgccucaacuggcugcaccagcuuaaguauaaauacccugcccugaaugugaccaugcccaacaaugagaaguuugauaaacucuauauuuggggcguucaucacccugggacagacucugaucagaucucccuguacgcgcaggccagcggaagagugaccgucuccacgaagcggucucaacagacagugauuccgaacaucggcagccgccccugggugagaggggucuccagcaaaauuucuaucuacuggaccauuguuaagccuggagacauccugcucaucaacuccacaggcaaucugauugcuccccggggguauuucaagauccgcagcggaaaaucuagcauuaugagauccgacgccccuaucggcaaguguaacucugaaugcauuacccccaauggcagcaucccgaacgauaaaccuuuucagaaugugaaccggaucaccuacgggcccuguccucgcuaugugaagcagaauacacuuaaacuggcuacgggaaugagaaacguccccgagaagcaaacccggggcauuuucggggccaucgcgggauuuauugaaaauggcugggaggggaugauggacggaugguacggcuuccgccaccagaacuccgagggcacagggcaggccgcugaucucaaaagcacccaagccgcuaucaaucagauuaacggaaagcugaauagacuuaucgaaaagacaaacgagaaauuucaucagaucgaaaaggaguucucugaaguggagggccggauucaggaccuggagaaauauguugaagauaccaagaucgaccucugguccuacaaugccgagcugcugguggcccucgaaaaccaacacacgauugaucugacagacagcgagaugaacaaacuuuucgaaagaaccaagaagcagcugcgcgagaaugcugaggauauggggaacggaugcuuuaaaaucuaucauaagugugacaaugcgugcauuggcucuauccggaacgggaccuacgaucacgacgucuacagagacgaagcccucaauaaccgcuuccagauuaaaggcguggagcugaaguccggauauaaagauuggauccuuuggaucagcuuugcuauuuccugcuucguucuguguaucgugcuccugggcuuuauuaugugggccugccagaaggggaauauccgguguaacauuugcaucuga

SEQ ID NO: 192405 - RNA, 1701 nt, Artificial Sequence; identical to SEQ ID NO: 192152
  derived and/or modified CDS sequence (opt5) from hemagglutinin__InfluenzaA__ABA42390

SEQ ID NO: 192406 - RNA, 1701 nt, Artificial Sequence
  derived and/or modified CDS sequence (opt5) from hemagglutinin__InfluenzaA__ABA42401
augaagaccaucauugcccugagcuacauccucugccugguguucgcucagaaacuucccggcaacgacaauuccacagccacgcugugucucgggcaccaugcggucccuaacggaacccugguuaagacaauuaccaaugaucaaaucgaggugacaaacgcuaccgaacuugugcagucuagcuccacaucuagaauuugcgacagcccgcaccagauccuggauggcgagaauuguacccucaucgacgcccugcugggggauccccauugcgacggauuucagaacaaagaaugggaucucuucgucgagcgguccaaggccuauucuaauuguuacccuuaugacgugcccgauuacguuagccugcgcucccuuguggcuagcucuggcacgcuggaauuuaacaaugaguccuucaacuggaccggggucgcccaaaauggaacaagcucugcuugcaaaagacgguccgacaagagcuuuuucucucgccucaacuggcugcaccagcuuaaguauaaauacccugcccugaaugugaccaugcccaacaaugagaaguuugauaaacucuauauuuggggcguucaucacccuggcacagacuccgaucagaucagccuguacgcgcaguccucugggagagugaccgucagcacgaagcggucccaacagacagugauuccgaacaucggaagcggccccugggugcgcggggucucuuccagaauuagcaucuacuggaccauuguuaaaccuggagacauccugcucaucaacucuacaggcaaucugauugcuccccggggguauuucaagauccgcagcggaaaguccucuauuaugagaagcgacgccccuaucggcaaauguaacuccaagugcauuacccccaauggcagcaucccgaacgauaaaccuuuucagaaugugaaccggaucaccuacggggccuguccccgcuaugugaagcagaauacacuuaaacuggcuacgggaaugagaaacgucccugaaaagcaaacccggggcauuuucggggccaucgcgggauuuauugagaauggcugggaagggaugauggacggaugguacggcuuccgccaccagaacucugagggcacagggcaggccgcugaucucaaauccacccaagccgcuaucaaucagauuaacggaaagcugaauagacuuaucgagaagacaaacgaaaaauuucaucagaucgagaaggaguucagcgaaguggaaggccggauucaggaccuggagaaauauguugaggauaccaagaucgaccucuggucuuacaaugccgaacugcugguggcccucgagaaccaacacacgauugaucugacagacuccgaaaugaacaaacuuuucgagagaaccaagaagcagcugcgcgaaaaugcugaggauauggggaacggaugcuuuaaaaucuaucauaagugugacaaugcgugcauuggcagcauccggaacgggaccuacgaucacgacgucuacagagacgaggcccucaauaaccgcuuccagauuaaaggcguggaacugaaguccggauauaaagauuggauccuuuggaucucuuuugcuauuagcugcuuccugcucuguaucguucugcugggcuuuauuaugugggccugccagaaggggaauauccgguguaacauuugcaucuga

SEQ ID NO: 192407 - RNA, 1701 nt, Artificial Sequence
  derived and/or modified CDS sequence (opt5) from hemagglutinin__InfluenzaA__ABA42412
augaagaccaucauugcccugagcuacauccucugccugguguucgcucagaaacuucccggcaacgacaauuccacagccacgcugugucucgggcaccaugcggucccuaacggaacccugguuaagacaauuaccaaugaucaaaucgaggugacaaacgcuaccgaacuugugcagucuagcuccacaggcagaauuugcgacucuccgcaccagauccuggauggggagaauuguacccucaucgacgcccugcugggagauccccauugcgacggcuuucagaacaaagaaugggaucucuucgucgagcggagcaaggccuauuccaauuguuacccuuaugacgugcccgauuacguuucucugcgcagccuuguggcuuccagcgggacgcuggaauuuaacaaugagucuuucaacuggaccggagucgcccaaaauggcacauccagcgcuugcaaaagacggucugacaaguccuuuuucagccgccucaacuggcugcaccagcuuaaguauaaauacccugcccugaaugugaccaugcccaacaaugagaaguuugauaaacucuauauuuggggcguucaucacccugggacagacucugaucagaucucccuguacgcgcaggccagcggaagagugaccgucuccacgaagcggucucaacagacagugauuccgaacaucggcagccgccccugggugagaggggucuccagcaaaauuucuaucuacuggaccauuguuaagccuggagacauccugcucaucaacuccacaggcaaucugauugcuccccggggguauuucaagauccgcagcggaaaaucuagcauuaugagauccgacgccccuaucggcaaguguaacucugaaugcauuacccccagcggcuccaucccgaaugauaaaccuuuucagaacgugaaucggaucaccuacgggcccuguccucgcuaugugaagcagaacacacuuaaacuggcuacgggaaugagaaauguccccgagaagcaaacccggggcauuuucggggccaucgcgggauuuauugaaaacggcugggaggggaugauggacggaugguacggcuuccgccaccagaauagcgagggcacagggcaggccgcugaucucaaaucuacccaagccgcuaucaaccagauuaauggaaagcugaacagacuuaucgaaaagacaaaugagaaauuucaucagaucgaaaaggaguucuccgaaguggagggccggauucaggaccuggagaaauauguugaagauaccaagaucgaccucuggagcuacaacgccgagcugcugguggcccucgaaaaucaacacacgauugaucugacagacucugagaugaacaaacuuuucgaaagaaccaagaagcagcugcgcgagaacgcugaggauauggggaauggaugcuuuaaaaucuaucauaagugugacaacgcgugcauuggcuccauccggaaugggaccuacgaucacgacgucuacagagacgaagcccucaacaaucgcuuccagauuaaaggcguggagcuuaagagcggauauaaagauuggauccuguggaucuccuuugcuauuucuugcuuccugcucuguaucguucugcugggcuuuauuaugugggccugccagaaggggaacauccgguguaauauuugcaucuga

SEQ ID NO: 192408 - RNA, 1701 nt, Artificial Sequence; identical to SEQ ID NO: 192119
  derived and/or modified CDS sequence (opt5) from hemagglutinin__InfluenzaA__ABA42443

SEQ ID NO: 192409 - RNA, 1701 nt, Artificial Sequence; identical to SEQ ID NO: 192123
  derived and/or modified CDS sequence (opt5) from hemagglutinin__InfluenzaA__ABA42454

SEQ ID NO: 192410 - RNA, 1701 nt, Artificial Sequence
  derived and/or modified CDS sequence (opt5) from hemagglutinin__InfluenzaA__ABA42465
augaagaccaucauugcccugagcuacauccucugccugguguucgcucagaaacuucccggcaacgacaauuccacagccacgcugugucucgggcaccaugcggucccuaacggaacccugguuaagacaauuaccaaugaucaaaucgaggugacaaacgcuaccgaacuugugcagucuagcuccacaucuagaauuugcgacagcccgcaccagauccuggauggcgagaauuguacccucaucgacgcccugcugggggauccccauugcgacggauuucagaacaaagaaugggaucucuucgucgagcgguccaaggccuauucuaauuguuacccuuaugacgugcccgauuacguuagccugcgcucccuuguggcuagcucuggcacgcuggaauuuaacaaugaguccuucaacuggaccggggucgcccaaaauggaacaagcucugcuugcaaaagacgguccgacaagagcuuuuucucucgccucaacuggcugcaccagcuuaaguauaaauacccugcccugaaugugaccaugcccaacaaugagaaguuugauaaacucuauauuuggggcguucaucacccuggcacagacuccgaucagaucagccuguacgcgcaggccuccgggagagugaccgucucuacgaagcggagccaacagacagugauuccgaacaucggaucccgccccuggggcagaggggugagcucucggauuuccaucuacuggaccauugucaaaccuggagacauccugcucaucaacagcacaggcaaucugauugcuccccgcggguauuucaagaucagaucuggaaagagcuccauuaugcggucugacgccccuaucggcaaauguaacagcgaaugcauuacccccaauggcuccaucccgaacgauaagccuuuucagaauguuaaccgcaucaccuacggggcuugucccagauaugugaaacagaauacacuuaagcuggccacgggaaugcggaacgugccugagaaacaaacccgcggcauuuucggggcgaucgccggauuuauugaaaauggcugggaggggaugauggacggaugguacggcuucagacaccagaacagcgagggcacagggcaggcugccgaucucaagucuacccaagcugccaucaaucagauuaacggaaaacugaaucggcuuaucgaaaagacaaacgagaaguuucaucagaucgaaaaagaguucuccgaagucgagggccgcauucaggaccuggagaaguauguggaagauaccaaaaucgaccucuggagcuacaaugccgagcugcugguugcucucgaaaaccaacacacgauugaucugacagacucugagaugaacaaacuuuucgaaagaaccaagaagcagcugcgggagaaugcggaggauauggggaacggaugcuuuaagaucuaucauaaaugugacaaugccugcauuggcuccaucagaaacgggaccuacgaucacgacguguaccgcgacgaagcucucaauaaccgguuccagauuaagggcgucgagcugaaaagcggauauaaggauuggauccuuuggaucuccuuugccauuucuugcuuccugcucuguaucgugcugcugggcuuuauuaugugggccugccagaaagggaauaucagauguaacauuugcaucuga

SEQ ID NO: 192411 - RNA, 1701 nt, Artificial Sequence
  derived and/or modified CDS sequence (opt5) from hemagglutinin__InfluenzaA__ABA42476
augaagaccaucauugcccugagcuacauccucugccugguguucgcucagaaacuucccggcaacgacaauuccacagccacgcugugucucgggcaccaugcggucccuaacggaacccugguuaagacaauuaccaaugaucaaaucgaggugacaaacgcuaccgaacuugugcagucuagcuccacaggcagaauuugcgacucuccgcaccagauccuggauggggagaauuguacccucaucgacgcccugcugggagauccccauugcgacggcuuucagaacaaagaaugggaucucuucgucgagcggagcaaggccuauuccaauuguuacccuuaugacgugcccgauuacguuucucugcgcagccuuguggcuuccagcgggacgcuggaauuuaacaaugagucuuucaacuggaccggagucgcccaaaauggcacauccagcgcuugcaaaagacggucugacaaguccuuuuucagccgccucaacuggcugcaccagcuuaaguauaaauacccugcccugaaugugaccaugcccaacaaugagaaguuugauaaacucuauauuuggggcguucaucacccugggacagacucugaucagaucucccuguacgcgcaggccagcggaagagugaccgucuccacgaagcggucucaacagacagugauuccgaacaucggcagccgccccugggugagaggggucuccagccggauuucuaucuacuggaccauuguuaaaccuggagacauccugcucaucaacuccacaggcaaucugauugcuccccgcggguauuucaagaucagaagcggaaagucuagcauuaugcgguccgacgccccuaucggcaaauguaacucugaaugcauuacccccaauggcagcaucccgaacgauaagccuuuucagaaugugaaccgcaucaccuacgggcccuguccuagauaugugaaacagaauacacuuaagcuggcuacgggaaugcggaacguccccgagaaacaaacccgcggcauuuucggggccaucgcgggauuuauugaaaauggcugggaggggaugauggacggaugguacggcuucagacaccagaacuccgagggcacagggcaggccgcugaucucaagagcacccaagccgcuaucaaucagauuaacggaaaacugaaucggcuuaucgaaaagacaaacgagaaguuucaucagaucgaaaaagaguucucugaaguggagggccgcauucaggaccuggagaaguauguugaagauaccaaaaucgaccucugguccuacaaugccgagcugcugguggcccucgaaaaccaacacacgauugaucugacagacagcgagaugaacaaacuuuucgaaagaaccaagaagcagcugcgggagaaugcugaggauauggggaacggaugcuuuaagaucuaucauaaaugugacaaugcgugcauuggcucuaucagaaacgggaccuacgaucacgacgucuaccgcaaugaagcccucaacaaucgguuccagauuaagggcguggagcugaaauccggauauaaggacuggauccuuuggaucagcuuugcuauuuccugcuuccugcucuguaucguucugcugggcuuuauuaugugggccugccagaaagggaacaucagauguaauauuugcaucuga

SEQ ID NO: 192412 - RNA, 1701 nt, Artificial Sequence
  derived and/or modified CDS sequence (opt5) from hemagglutinin__InfluenzaA__ABA42498
augaagaccaucauugcccugagcuacauccucugccugguguucgcucagaaacuucccggcaacgacaauuccacagccacgcugugucucgggcaccaugcggucccuaacggaacccugguuaagacaauuaccaaugaucaaaucgaggugacaaacgcuaccgaacuugugcagucuagcuccacaucuagaauuugcgacagcccgcaccagauccuggauggcgagaauuguacccucaucgacgcccugcugggggauccccauugcgacggauuucagaacaaagaaugggaucucuucgucgagcgguccaaggccuauucuaauuguuacccuuaugacgugcccgauuacguuagccugcgcucccuuguggcuagcucuggcacgcuggaauuuaacaaugaguccuucaacuggaccggggucgcccaaaauggaacaagcucugcuugcaaaagacgguccgacaagagcuuuuucucucgccucaacuggcugcaccagcuuaaguauaaauacccugcccugaaugugaccaugcccaacaaugagaaguuugauaaacucuauauuuggggcguucaucacccuggcacagacuccgaucagaucagccuguacgcgcaggccuccgggagagugaccgucucuacgaagcggagccaacagacagugauuccgaacaucggaucccgccccugggugagaggcgucagcucuauuaucuccauuuacuggaccaucguuaaaccuggggacauccugcucauuaacagcacaggaaaucugaucgcuccccggggcuauuucaagauucgcucuggaaagagcuccaucaugagaucugacgccccuauugggaaauguaacagcgaaugcaucacccccaauggcuccaucccgaacgauaagccuuuucagaaugugaaccggauuaccuacggcgcuuguccccgcuaugugaaacagaauacacuuaagcuggccacggggaugagaaacgucccugagaaacaaacccggggaaucuucggcgcgauugccggguuuaucgaaaauggaugggagggcaugauggacgggugguacggauuccgccaccagaacagcgagggcacaggccaggcugccgaucucaagucuacccaagcugccauuaaucagaucaacgggaaacugaauagacuuaucgaaaagacaaacgagaaguuucaucagauugaaaaagaguucuccgaaguggagggacggauccaggaccuggagaaguauguugaagauaccaaaauugaccucuggagcuacaaugccgagcugcugguggcucucgaaaaccaacacacgaucgaucugacagacucugagaugaacaaacuuuucgaaagaaccaagaagcagcugcgcgagaaugcggaggauaugggcaacgggugcuuuaagauuuaucauaaaugugacaaugccugcaucggauccauucggaacggcaccuacgaucacgacgucuacagagacgaagcucucaauaaccgcuuccagaucaaggggguggagcugaaaagcggcuauaaggauuggauccuuuggauuuccuuugccaucucuugcuuccugcucuguauuguucugcugggauuuaucaugugggccugccagaaaggcaauauucgguguaacaucugcaucuga

SEQ ID NO: 192413 - RNA, 1701 nt, Artificial Sequence; identical to SEQ ID NO: 192144
  derived and/or modified CDS sequence (opt5) from hemagglutinin__InfluenzaA__ABA42509

SEQ ID NO: 192414 - RNA, 1701 nt, Artificial Sequence
  derived and/or modified CDS sequence (opt5) from hemagglutinin__InfluenzaA__ABA42520
augaagaccaucauugcccugagcuacauccucugccugguguucgcucagaaacuucccgucaacgacaauuccacagccacgcugugucucggccaccaugcgguuccuaacgggacccuggugaagacaauuaccaaugauuauaucgaggugacaaacgcuaccgaacuuguccaaucuagcuccacaggaagaauuugcgacucuccgcaccagauccuggauggcgagaauuguacccucaucgacgcccugcugggggauccccauugcgacggauuucagaacaaagaaugggaucucuucguggagcggagcacggccuacuccaauuguuauccuuacgacguucccgauuaugcuucucugcgcagccuuguggccuccagcggcacccuggaauuuaacaaugagucuuucaacuggacaggggucgcucagaauggaaccuccagcgccugcaagagacggucuauuaaauccuuuuucagccgccucaacuggcugcaccaacuuaaguacaaguauccugcgcugaaugugacaaugcccaacaaugagaaauuugacaagcucuacaucuggggcguucaucacccuucuaccgauuccgaccagauuagccuguacgcccaggcuuccggcagagugacggucucuacaaaacggagccagcaaaccgugaucccgaacauugggucccgccccugggugagaggagucagcucuaucauuuccaucuauuggacaaucguuaagccuggcgauauucugcucaucaacagcaccgggaaucugauugcuccccggggauacuucaaaauccgcucuggcaagagcuccauuaugagaucuaacgccccuaucgggaaguguaauagcgaaugcaucacccccaacggauccauuccgaaugacaaaccuuuucagaacgugaaucggaucacauauggcgccuguccccgcuacgugaagcagaacacgcuuaaacuggcgaccggcaugagaaaugucccugagaagcagacacgggggauuuucggagccaucgcuggcuuuauugaaaacgggugggagggaaugguggacggcugguauggguuccgccaccaaaauagcgagggaaccggccaggccgcugaucucaaaucuacacaggccgccaucaaccaaaucaauggcaagcugaacagacuuauugagaaaaccaaugaaaaguuucaucagaucgaaaaggaguucuccgaaguugaggggcggauucaggaccuggagaaauacguggaagauacgaagaucgaccucuggagcuauaacgcugagcugcuggucgcgcucgaaaaccagcacacaauugaucugaccgacucugagaugaauaaacuuuucgaaagaacccgcaagcaacugcgggagaacgccgaggauaugggaaauggcugcuuuaaaaucuaccauaagugugacaacgcuugcauuggguccaucagaaauggaacauacgaucacgacguguaucgcgaugaagcccucaacaaucgguuccagaucaagggcguugagcugaaaagcggguacaaggacuggauucuuuggaucuccuuugccauuucuugcuuccugcucugugugguccugcugggcuuuaucaugugggcuugccagaaaggaaacauuagauguaauaucugcaucuga

SEQ ID NO: 192415 - RNA, 1701 nt, Artificial Sequence
  derived and/or modified CDS sequence (opt5) from hemagglutinin__InfluenzaA__ABA42531
augaagaccaucauugcccugagcuacauccucugccugguguucgcucagaaacuucccgucaacgacaauuccacagccacgcugugucucggccaccaugcgguuccuaacgggacccuggugaagacaauuaccaaugaucacaucgaggugacaaacgcuaccgaacuuguccaaucuagcuccacaggaagaauuugcgacucuccgcaucagauccuggauggcgagaauuguacccucaucgacgcccugcugggggauccccacugcgacggauuucagaacaaagaaugggaucucuucguggagcggagcacggccuauuccaauuguuaccuguaugacguuccugauuacgcuucucuucgcagccugguggccuccagcggcacccucgaauuuaacaaugagucuuucaacuggacaggggucgcucagaauggaaccuccagcgccugcaagagacggucuauuaaauccuuuuucagccgccugaacuggcuucaucaacugaaguauaaguaccccgcgcucaaugugacaaugccuaacaaugagaaauuugacaagcuguauaucuggggcguucaccaccccucuaccgauuccgaccagauuagccuguacgcccaggcuuccggcagagugacggucucuacaaaacggagccagcaaaccgugaucccuaacauugggucccgcccgugggugagaggagucagcucucggaucuccauuuacuggacaaucguuaagcccggcgauauccuccugauuaacagcaccgggaaucuuaucgccccucgcggauauuucaaaauuagaucuggcaagagcuccaucaugcggucuaacgcucccauugggaaguguaauagcgaaugcaucaccccuaacggauccauccccaaugacaaaccguuucagaacgugaaucgcauuacauacggcgccuguccuagauaugugaagcagaacacgcugaaacucgcgaccggcaugcggaauguccccgagaagcagacacgcgggaucuucggagccauugcuggcuuuaucgaaaacgggugggagggaaugguggacggcugguacggguucagacaucaaaauagcgagggaaccggccaggccgcugaucugaaaucuacacaggccgccauuaaccaaaucaauggcaaacuuaaccggcugaucgaaaagaccaaugagaaguuucaccagauugaaaaggaguucuccgaaguugaggggagaauccaggaccucgagaaauauguggaagauacgaagauugaccuguggagcuacaacgcugagcugcucgucgcgcuggaaaaccagcauacaaucgaucuuaccgacucugagaugaauaaacuguucgaacgcacccggaagcaacucagagagaacgccgaggauaugggaaauggcugcuuuaaaauuuaucacaagugugacaacgcuugcaucggguccauucgcaauggaacauacgaucacgacguguaccgggaugaagcccugaacaauagauuccagaucaagggcguugagcuuaaaagcggguauaaggacuggauccuguggauuuccuuugccaucucuugcuuccuccugugugugguccugcucggcuuuauuaugugggcuugccagaaaggaaacauccgcuguaauauuugcaucuga

SEQ ID NO: 192416 - RNA, 1701 nt, Artificial Sequence; identical to SEQ ID NO: 192144
  derived and/or modified CDS sequence (opt5) from hemagglutinin__InfluenzaA__ABA42542

SEQ ID NO: 192417 - RNA, 1701 nt, Artificial Sequence
  derived and/or modified CDS sequence (opt5) from hemagglutinin__InfluenzaA__ABA42553
augaagaccaucauugcccugagcuacauccucugccugguguucgcucagaaacuucccgucaacgacaauuccacagccacgcugugucucggccaccaugcgguuccuaacgggacccuggugaagacaauuaccaaugaucacaucgaggugacaaacgcuaccgaacuuguccaaucuagcuccacaggaagaauuugcgacucuccgcaucagauccuggauggcgagaauuguacccucaucgacgcccugcugggggauccccacugcgacggauuucagaacaaagaaugggaucucuucguggagcggagcacggcccauuccaauuguuauccuuacgacguucccgauuaugcuucucugcgcagccuuguggccuccagcggcacccuggaauuuaacaaugagucuuucaacuggacaggggucgcucagaauggaaccuccagcgccugcaagagacggucuauuaaauccuuuuucagccgccucaacuggcugcaccaacuuaaguacaaguauccugcgcugaaugugacaaugcccaacaaugagaaauuugacaagcucuacaucuggggcguucaccauccuucuaccgauuccgaccagauuagccuguaugcccaggcuuccggcagagugacggucucuacaaaacggagccagcaaaccgugaucccgaacauugggucccgccccugggugagaggagucagcucucggaucuccauuuacuggacaaucguuaagccuggcgauauccugcucauuaacagcaccgggaaucugaucgcuccccgcggauacuucaaaauuagaucuggcaagagcuccaucaugcggucuaacgccccuauugggaaguguaauagcgaaugcaucacccccaacggauccaucccgaaugacaaaccuuuucagaacgugaaucgcauuacauauggcgccugucccagauacgugaagcagaacacgcuuaaacuggcgaccggcaugcggaaugucccugagaagcagacacgcgggaucuucggagccauugcuggcuuuaucgaaaacgggugggagggaaugguggacggcugguauggguucagacaccaaaauagcgagggaaccggccaggccgcugaucucaaaucuacacaggccgccauuaaccaaaucaauggcaagcugaaccggcuuaucgagaaaaccaaugaaaaguuucaucagauugaaaaggaguucuccgaaguugaggggagaauccaggaccuggagaaauacguggaagauacgaagauugaccucuggagcuauaacgcugagcugcuggucgcgcucgaaaaccagcacacaaucgaucugaccgacucugagaugaauaaacuuuucgaacgcacccggaagcaacugagagagaacgccgaggauaugggaaauggcugcuuuaaaauuuaccacaagugugacaacgcuugcaucggguccauucgcaauggaacauaugaucaugacguguaccgggaugaagcccucaacaauagauuccagaucaagggcguugagcugaaaagcggguacaaggacuggauccuuuggauuuccuuugccaucucuugcuuccugcucugugugguccugcugggcuuuauuaugugggcuugccagaaaggaaacauccgcuguaauauuugcaucuga

SEQ ID NO: 192418 - RNA, 1701 nt, Artificial Sequence; identical to SEQ ID NO: 192144
  derived and/or modified CDS sequence (opt5) from hemagglutinin__InfluenzaA__ABA42564

SEQ ID NO: 192419 - RNA, 1701 nt, Artificial Sequence
  derived and/or modified CDS sequence (opt5) from hemagglutinin__InfluenzaA__ABA42928
augaagaccaucauugcccugagcuacauccucugccugguguucgcucagaaacuucccgucaacgacaauuccacagccacgcugugucucggccaccaugcgguuccuaacgggacccuggugaagacaauuaccaaugaucacaucgaggugacaaacgcuaccgaacuuguccaaucuagcuccacaggaagaauuugcgacucuccgcaucagauccuggauggcgagaauuguacccucaucgacgcccugcugggggauccccacugcgacggauuucagaacaaagaaugggaucucuucguggagcggagcacggccuauuccaauuguuacccuuaugacguucccgauuacgcuucucugcgcagccuuguggccuccagcggcacccuggaauuuaacaaugagucuuucaacuggacaggggucgcucagaauggaaccuccagcgccugcaagagacggucuauuaaauccuuuuucagccgccucaacuggcugcaucaacuuaaguauaaguacccugcgcugaaugugacaaugcccaacaaugagaaauuugacaagcucuauaucuggggcguucaccacccuucuaccgauuccgaccagauuagccuguacgcccaggcuuccggcagagugacggucucuacaaaacggagccagcaaaccgugaucccgaacauugggucccgccccugggugagaggagucagcucuaagaucuccauuuacuggacaaucguuaaaccuggcgauauccugcucauuaacagcaccgggaaucugaucgcuccccggggauauuucaagauucgcucuggcaagagcuccaucaugagaucuaacgccccuauugggaaauguaauagcgaaugcaucacccccaacggauccaucccgaaugacaagccuuuucagaacgugaaucggauuacauacggcgccuguccccgcuaugugaaacagaacacgcuuaagcuggcgaccggcaugagaaaugucccugagaaacagacacgggggaucuucggagccauugcuggcuuuaucgaaaacgggugggagggaauggugaauggcugguacggguuccgccaucaaaacagcgagggaaccggccaggccgcugaccucaagucuacacaggccgccauuaaucaaaucaacggcaaacugaauagacuuaucgaaaagaccaacgagaaguuucaccagauugaaaaagaguucuccgaaguugaggggcggauccaggaucuggagaaguauguggaagacacgaaaauugaucucuggagcuacaacgcugagcugcuggucgcgcucgaaaaucagcauacaaucgaccugaccgauucugagaugaacaagcuguucgaaagaacccgcaaacaacugcgggagaaugccgaggacaugggaaacggcugcuuuaagauuuaucacaagugugauaaugcuugcaucggguccauuagaaacggaacauacgaccacgauguguaccgcgacgaagcccucaauaaccgguuccagaucaaaggcguugagcuuaagagcggguauaaagauuggauccuuuggauuuccuuugccaucucuugcuuccugcucugugugguccugcugggcuuuauuaugugggcuugccagaagggaaauaucagauguaacauuugcaucuga

SEQ ID NO: 192420 - RNA, 1701 nt, Artificial Sequence; identical to SEQ ID NO: 192144
  derived and/or modified CDS sequence (opt5) from hemagglutinin__InfluenzaA__ABA42939

SEQ ID NO: 192421 - RNA, 1701 nt, Artificial Sequence
  derived and/or modified CDS sequence (opt5) from hemagglutinin__InfluenzaA__ABA42978
augaagaccaucauugcccugagcuacauccucugccugguguucgcucagaaacuucccgucaacgacaauuccacagccacgcugugucucggccaccaugcgguuccuaacgggacccuggugaagacaauuaccaaugaucacaucgaggugacaaacgcuaccgaacuuguccaaucuagcuccacaggaagaauuugcgacucuccgcaucagauccuggauggcgagaauuguacccucaucgacgcccugcugggggauccccacugcgacggauuucagaacaaagaaugggaucucuucguggagcggagcacggccuauuccaauuguuacccuuaugacguucccgauuacgcuucucugcgcagccuuguggccuccagcggcacccuggaauuuaacaaugagucuuucaacuggacaggggucgcucagaauggaaccuccagcgccugcaagagacggucuauuaaauccuuuuucagccgccucaacuggcugcaucaacuuaaguauaaguacccugcgcugaaugugacaauccccaacaaugagaaauuugacaagcucuauauuuggggcguucaccacccuucuaccgauuccgaccagaucagccuguacgcccaggcuuccggcagagugacggucucuacaaaacggagccagcaaaccgugauuccgaacaucgggucccgccccugggugagaggagucagcucucggauuuccaucuacuggacaaucguuaagccuggcgauauucugcucaucaacagcaccgggaaucugauugcccccagaggauauuucaaaaucagaucuggcaagagcuccauuaugcggucuaacgcuccuaucgggaaguguaauagcgaaugcaucacccccaacggauccauuccgaaugacaaaccuuuucagaacgugaaucgcaucacauacggcgccugucccagauaugugaagcagaacacgcuuaaacuggcgaccggcaugcggaaugucccugagaagcagacacgcgggauuuucggagccaucgcuggcuuuauugaaaacgggugggagggaaugguggacggcugguacggguucagacaucaaaauagcgagggaaccggccaggccgcugaucucaaaucuacacaggccgccaucaaccaaaucaauggcaagcugaaccggcuuauugagaaaaccaaugaaaaguuucaccagaucgaaaaggaguucuccgaaguugaggggcgcauucaggaccuggagaaauauguggaagauacgaagaucgaccucuggagcuacaacgcugagcugcuggucgcgcucgaaaaccagcauacaauugaucugaccgacucugagaugaauaaacuuuucgaacgcacccggaagcaacugagagagaacgccgaggauaugggaaauggcugcuuuaaaaucuaucacaagugugacaacgcuugcauuggguccauccgcaauggaacauacgaucacgacguguaccgggaugaagcccucaacaauagauuccagaucaagggcguugagcugaaaagcggguauaaggacuggauucuuuggaucuccuuugccauuucuugcuuccugcucugugugguccugcugggcuuuaucaugugggcuugccagaaaggaaacauucgcuguaauaucugcaucuga

SEQ ID NO: 192422 - RNA, 1701 nt, Artificial Sequence; identical to SEQ ID NO: 192315
  derived and/or modified CDS sequence (opt5) from hemagglutinin__InfluenzaA__ABA43167

SEQ ID NO: 192423 - RNA, 1701 nt, Artificial Sequence
  derived and/or modified CDS sequence (opt5) from hemagglutinin__InfluenzaA__ABA43178
augaagaccaucauugcccugagcuacauccucugccugguguucgcucagaaacuucccggcaacgacaauuccacagccacgcugugucucgggcaccaugcggucccuaacggaaccauuguuaagacaaucaccaaugaucaaauugaggugacaaacgcuaccgaacuggugcagucuagcuccacaggcgggaucugcgacucuccgcaccagauccuugauggagagaauuguacccugauugacgcccuccugggcgauccccagugcgacggguuucaaaacaaaaagugggaucuguucgucgaaagaagcaaagccuauuccaauuguuacccuuaugacgugcccgauuacgcuucucuccggagccugguugccuccagcggaacgcuugaguuuaacaaugaaucuuucaacuggaccggcgugacacagaauggcaccuccagcgcuugcaagcgcagaucuaacaauuccuuuuucagccggcugaacuggcucacacaucugaaguuuaaauauccugcccuuaaugucaccaugcccaacaacgagaaguucgacaaacuguacaucuggggagugcaccauccugggacggauaaugaccagauuucucucuaugcgcaggccuccggccgcaucacaguuagcaccaagagaucccaacagacagugauuccgaacaucgggucucggccccgcgucagagauauuccuagccggaucuccaucuacuggaccauugugaaacccggagacauccugcugauuaauagcaccggcaaccucaucgcuccucgcggguacuuuaagauuagaucuggaaaguccagcaucaugcggucugacgcccccaucggcaaauguaauagcgagugcauuacaccgaacggcuccaucccuaaugauaagcccuuccagaacgugaaucgcauuacguauggggcuuguccuagauacgucaaacagaacacccugaagcuggccacaggaaugcggaauguucccgaaaaacaaacccgcggcaucuuuggggcgauugccggauucaucgagaacggcugggaagggaugguggacggaugguauggcuuuagacaccaaaauucugagggcaucgggcaggcugccgaucuuaagagcacacaggcugccauuaaccagaucaauggaaaacucaaccggcugauuggcaagaccaacgagaaguuccaccagaucgaaaaagaguucuccgaaguggaggggcgcauucaggaccuugaaaaguacgucgaggauacgaaaaucgaccuguggagcuauaaugccgagcuccugguggcucuggaaaaccaacauacaauugaucucaccgacucugagaugaauaagcuguuugaaagaaccaaaaagcagcuucgggagaacgcggaagauaugggaaauggcugcuucaagaucuaccacaaaugugacaacgccugcaucggguccauuagaaauggcacauaugaucaugacguuuaccgcgacgaggcucugaacaaucgguuucagaucaagggaguggagcucaaaagcggcuacaaggauuggauucuguggaucucuuucgccauuuccugcuuucuucuguguaucgcccuccugggguucaucaugugggcuugccagaaaggaaacauuagauguaauaucugcauuuga

SEQ ID NO: 192424 - RNA, 1698 nt, Artificial Sequence
  derived and/or modified CDS sequence (opt5) from hemagglutinin__InfluenzaA__ABA43189
augaaggccaaacugcucgugcugcuuugcaccuucacagcuacguacgccgacaccaucugugucggcuaucacgcgaacaauagcacagauaccguugacacagugcuggagaagaacgugaccgucacacauuccgugaaucuccuggaagauucucacaacgggaaacuuugccugcucaagggaauugcuccccugcagcugggcaauuguagcguugccggguggauccucggaaacccugagugcgaacugcuuauuuccaaagagucuuggagcuacaucguggaaaccccgaaucccgagaacggcacguguuauccuggguacuuugccgacuaugaggaacugagagagcaacucuccucugucagcuccuucgaacgguuugagauuuuccccaagggaagcucuuggccuaaucauaccgugacaggcguuuccgcuagcugcucucacaacggcaaguccagcuuuuaccgcaaucugcuuuggcugaccgggaaaaacggacucuaucccaaucugucuauguccuacgugaacaauaaggagaaagaaguccuggugcucuggggcgugcaucacccuccgaacaucggggaucagagagcccuguaccacacagagaacgcuuaugucagcguuguguccucucauuacagccggcgcuucacccccgaaaucgccaagagaccuaaagugcgggaccaggagggacgcauuaauuauuacuggacgcuucuggaacccggcgauacaaucauuuuugaggcgaacgggaaucucaucgccccuugguaugcuuucgcccuguccagaggauuuggcagcggcauuaucaccucuaacgcucccauggacgagugugaugccaagugccagacaccgcaaggggcgauuaauuccagccuuccuuuccagaacguccaccccgugaccaucggagaauguccuaaguacguucggucugccaaacugcgcauggugaccggccucagaaauauccccagcauucagucccgggggcuguuuggagcuaucgccggcuucauugaagggggauggacaggcauggucgacggcugguauggguaccaucaccagaacgaacaaggaucuggcuacgcugccgaucaaaagagcacgcagaaugccaucaacgggauuaccaauaaagugaacuccguuaucgagaagaugaauacacaguuuaccgcugugggaaaagaguucaacaagcuggagcgcagaauggagaaucucaacaaaaaggucgacgauggcuuccuggacaucuggacauauaacgcggaacuucuggugcuccuggagaaugaacggacccuugacuuucacgauagcaacgucaagaaucuguacgagaaagugaagucucagcucaaaaacaaugccaaggaaauugggaacggcugcuucgaguuuuaucauaaauguaauaacgagugcauggaauccguuaagaauggaacguacgacuaucccaaguacagcgaggaaucuaaacugaaccgcgagaagaucgauggcgugaaacuggaguccaugggggucuaucagauucucgcuaucuacagcacaguggccuccucucugguucuucuggugagccucggagccauuuccuucuggaugugcucuaauggcagccugcaguguagaaucugcaucuga

SEQ ID NO: 192425 - RNA, 1701 nt, Artificial Sequence
  derived and/or modified CDS sequence (opt5) from hemagglutinin__InfluenzaA__ABA43200
augaagaccaucauugcccugagcuacauccucugccugguguucgcucagaaacuucccggcaacgacaauuccacagccacgcugugucucgggcaccaugcggucccuaacggaaccauuguuaagacaaucaccaaugaucaaauugaggugacaaacgcuaccgaacuggugcagucuagcuccacaggcgggaucugcgacucuccgcaccagauccuugauggagagaauuguacccugauugacgcccuccugggcgauccccagugcgacggguuucaaaacaaaaagugggaucuguucgucgaaagaagcaaagccuauuccaauuguuacccuuaugacgugcccgauuacgcuucucuccggagccugguugccuccagcggaacgcuugaguuuaacaaugaaucuuucaacuggaccggcgugacacagaauggcaccuccagcgcuugcaagcgcagaucuaacaauuccuuuuucagccggcugaacuggcucacacaucugaaguuuaaauauccugcccuuaaugucaccaugcccaacaacgagaaguucgacaaacuguacaucuggggagugcaccauccugggacggauaaugaccagauuucucucuaugcgcaggccuccggccgcaucacaguuagcaccaagagaucccaacagacagugauuccgaacaucgggucucggccccgcgucagagauauuccuagccggaucuccaucuacuggaccauugugaaacccggagacauccugcugauuaauagcaccggcaaccucaucgcuccucgcggguacuuuaagauuagaucuggaaaguccagcaucaugcggucugacgcccccaucggcaaauguaauagcgagugcauuacaccgaacggcuccaucccuaaugauaagcccuuccagaacgugaaucgcauuacguauggggcuuguccuagauacgucaaacagaacacccugaagcuggccacaggaaugcggaauguucccgaaaaacaaacccgcggcaucuuuggggcgauugccggauucaucgagaacggcugggaagggaugguggacggaugguauggcuuuagacaccaaaauucugagggcaucgggcaggcugccgaucuuaagagcacacaggcugccauuaaccagaucaauggaaaacucaaccggcugauuggcaagaccaacgagaaguuccaccagaucgaaaaagaguucuccgaaguggaggggcgcauucaggaccuugaaaaguacgucgaggauacgaaaaucgaccuguggagcuauaaugccgagcuccuggugguucuggaaaaccaacauacaauugaucucaccgacucugagaugaauaagcuguuugaaagaaccaaaaagcagcuucgggagaacgcugaagauaugggaaauggcugcuucaagaucuaccacaaaugugacaacgcgugcaucggguccauuagaaauggcacauaugaucaugacguguaccgcgacgaggcccugaacaaucgguuucagaucaagggagucgagcucaaaagcggcuacaaggauuggauucuguggaucucuuucgcuauuuccugcuuucuucugugugugguucuccugggguucaucaugugggccugccagaaaggaaacaucagauguaauauuugcaucuga

SEQ ID NO: 192426 - RNA, 1701 nt, Artificial Sequence
  derived and/or modified CDS sequence (opt5) from hemagglutinin__InfluenzaA__ABA43336
augaagaccaucauugcccugagcuacaucuucugccucguguuugcucagaaacugcccggcaacgacaauuccacagccacgcuuugucuggggcaccaugcggucccuaacggaacccucguuaagacaauuaccaaugaucaaaucgaggugacaaacgcuaccgaacuggugcaaaauucuagcacaggcagaauuugcgacuccccgcaccggauccuugaugggaaaaacuguacccugaucgacgcccuccugggagauccccauugcgacggcuuccagaauaaggagugggaucuguuugucgaacgcucuaaagccuauagcaacuguuacccuuaugacgugcccgauuacgcuucccucagaucucugguugccagcuccgggacgcuugaguucauuaaugaagacuuuaacuggaccggaguggcucagagcggcggcucuuaugccugcaagcggggguccgucaauagcuucuuuucucgccugaacuggcuccacgaguccgaguacaaguauccugcgcugaaugugacaaugcccaacaauggaaaauucgauaaacuuuacguuuggggcgugcaucacccuaucaccgacagagaacagacaaagcuguacguccgggccagcgggcgcgugaccgugucuacgaagagaucccagcagacagucauuccgaacaucggaagccggcccuggguucgcggccucuccucuagaauuagcaucuauuggaccauugugaaaccuggggauauccugcugaucaacuccacaggaaaucucauugcuccccggggcuacuuuaagauccgcaccggcaagagcucuauuaugagauccgacgccccuaucgggaccuguagcucugagugcauuacacccaacggaagcaucccgaaugacaaaccuuuccagaacgugaaucggaucacguauggcgcuuguccccgcuacgucaagcaaaacacccugaaacuugccacagggaugagaaaugugccugaaaagcagacccggggaauuuuuggcgcgaucgccggguucauugagaacggaugggagggcaugguugauggcugguauggguuuagacaccaaaauuccgaaggaacaggccaggcugccgaccugaaaucuacccaggcugccaucgaucagauuaacgggaagcucaaucgccugaucgagaaaacgaacgaaaaguuccaucagaucgagaaggaguucagcgaaguggagggacggauucaagaccuugaaaaauacgucgaggauacaaagaucgaccugugguccuauaaugccgaacuccugguggcucuggagaaccagcacaccauugaucucaccgacagcgaaaugaauaaacuguuugagaagacaagaaaacagcuucgcgagaacgcggaagauaugggcaacgggugcuucaagaucuaccauaagugugacaaugccugcauuggcucuauccggaacggaaccuacgaucacgacguuuauagagacgaggcucugaauaaccgcuuucagauuaaaggcguggaacucaaguccggguacaaagauuggauccuguggaucagcuucgccauuucuugcuuucuucugugugucgugcuccugggauucaucaugugggccugccaaaagggcaauauucgguguaacaucugcauuuga

SEQ ID NO: 192427 - RNA, 1707 nt, Artificial Sequence
  derived and/or modified CDS sequence (opt5) from hemagglutinin__InfluenzaA__ABA54915
auggagaaggugguccugcuccuggccaccgcuagccuuguuaaauccgaccagaucugcauuggcuaccacgccaacaauucuacagaacaaguggauacgaucauggagaagaacgugaccgucacacaugcgcaggacauucuggaaaagacccacaaugggaaacucugugaucuggacggagugaaaccccuuauccugagagauugcagcguugcuggcuggcuccuggggaacccuaugugugacgaguucauuaaugugccggaaugguccuauaucgucgagaaggccucucccgccaacgaucugugcuacccuggagacuuuaaugauuaugaggaacucaagcaucugcuuagccggaucaaccacuucgagaaaauucagaucauucccaaguccucuuggagcaaucaugaggcuuccagcggcgugucugccgcuuguccuuaccacgggaaacccuccuuuuuccgcaacguuguguggcugaucaagaaaaauagcgccuauccuacaauuaagagaucuuacaacaauaccaaccaggaagaccuccugguccuuuggggaauccaccauccgaaugaugcggccgagcaaacaaagcuguaucagaaccccaccacguacauuuccgugggcaccagcacacucaaccagcggcuggugccuaaaaucgcuacccgcucuaaggucaauggccaguccgggagaauggaauuuuucuggacaauccugaaacccaacgacgccauuaauuuugagagcaacggaaauuucaucgcuccugaauacgccuauaagauuguuaaaaagggcgauuccgcgaucaugaaaucugagcucgaauacgggaacugcaauaccaagugucaaacgcccaugggagccauuaacagcuccaugccguuucacaauauccauccucugacaaucggcgagugccccaaguaugugaaaagcaaccggcuugugcuggcuaccgggcuccgcaauacaccucagagagagcggcgcagaaagaaacggggacuguucggcgccauugcuggcuuuaucgaagggggauggcagggcauggucgacgggugguacggauaucaccacucuaacgagcagggcuccggguacgccgccgacaaggaaagcacccaaaaagcuauugauggagugaccaauaagguuaacucuaucauugacaagaugaauacacaguucgaggcggugggccgcgaauuuaacaaccuugagagacggaucgagaaucugaacaaaaagauggaagauggcuuccucgacgucuggacguauaaugccgagcugcuggugcucauggaaaacgagcgcacccuggauuuccaugacagcaauguuaaaaaccuuuacaauaaggugagacugcagcuccgggauaacgcuaaagaacuggggaauggauguuuugaguucuaccacaagugcgacaacgaguguauggaauccgucaagaauggcacauaugauuacccccaauauucugaggaagccagacuuaaccgcgaggagaucagcggggugaaacuggaauccaugggaaccuaccagauucucagcaucuauucuacagucgccuccagccuggcucuggccauuaugguggcgggccucucucuguggaugugcuccaaugggagccuucagugccggaucuguauuuga

SEQ ID NO: 192428 - RNA, 1698 nt, Artificial Sequence
  derived and/or modified CDS sequence (opt5) from hemagglutinin__InfluenzaA__ABA87080
augaaggugaaacugcucguccugcuuugcaccuucacagccacguacgcugacaccaucuguauuggcuaucacgccaacaauagcacagauaccguugacacagugcuggagaagaacgugaccgucacacauuccgugaaucuccuggaagauucucacaacgggaaacuuugccugcucaagggaaucgcgccccugcagcugggcaauuguagcguugcuggguggauucucggaaacccugagugcgaacugcuuaucuccaaagagucuuggagcuacauuaucgaaaccccgaaucccgagaacggcacguguuauccuggguacuuugccgacuaugaggaacugagagagcaacucuccucugugagcuccuucgaacgguuugagaucuuccccaaggagagcucuuggccuaaucauaccgucacaggaguguccgccagcugcucucacaacggcaaguccagcuuuuaccgcaaucugcuuuggcugaccggcaaaaacgggcucuaucccaaucugucuaaguccuacgcuaacaauaaagaaaaggagguucuggugcucuggggaguccaucacccuccgaacaugggcgaucagagagcccuguaccacacagaaaacgcuuaugugagcguggucuccucucauuacagccggcgcuucacccccgagauugccaaaagaccuaagguucgggaccaggaagggcgcaucaauuauuacuggacgcuucuggagcccggagauacaauuaucuuugaggcgaacggcaaucucauugccccuagauaugcuuucgcccugucccggggguuuggaagcggcaucauuaccucuaacgcucccauggacgaaugugaugccaagugccagacaccgcaaggcgcgaucaauuccagccuuccuuuccagaacgugcaccccgugaccaucggggaguguccuaaauacguccgcucugccaagcugagaauggugaccggacuccggaauauucccagcauccagucccgcggccuguuuggggcuauugccggauucaucgaaggcggguggacaggaaugguugacggcugguauggcuaccaucaccagaacgagcaagggucuggauacgcugccgaucagaaaagcacgcagaaugccauuaacggcaucaccaauaaggugaacuccgucaucgaaaagaugaauacacaguuuaccgcuguggggaaagaguucaacaaacuggagagacggauggaaaaucucaacaagaagguugacgauggauuccuggacauuuggacauauaacgcggagcuucuggugcuccuggaaaaugagcgcacccuugacuuucacgauagcaacgucaaaaaucuguacgaaaaggugaaaucucaacucaagaacaaugccaaagagaucggcaacgggugcuucgaguuuuaucauaaguguaaugacgaaugcauggaguccgucaagaacggcacguacgauuaucccaaauacagcgaagagucuaagcugaauagagagaaaauugacggagugaagcuggaauccaugggcguuuaucagauccucgcuauuuacagcacaguggccuccucucugguccuucuggugagccucggggccaucuccuucuggaugugcucuaacggaagccugcagugucggaucugcauuuga

SEQ ID NO: 192429 - RNA, 1698 nt, Artificial Sequence; identical to SEQ ID NO: 192368
  derived and/or modified CDS sequence (opt5) from hemagglutinin__InfluenzaA__ABA87091

SEQ ID NO: 192430 - RNA, 1698 nt, Artificial Sequence; identical to SEQ ID NO: 192368
  derived and/or modified CDS sequence (opt5) from hemagglutinin__InfluenzaA__ABA87231

SEQ ID NO: 192431 - RNA, 1701 nt, Artificial Sequence; identical to SEQ ID NO: 192327
  derived and/or modified CDS sequence (opt5) from hemagglutinin__InfluenzaA__ABA87242

SEQ ID NO: 192432 - RNA, 1701 nt, Artificial Sequence; identical to SEQ ID NO: 192328
  derived and/or modified CDS sequence (opt5) from hemagglutinin__InfluenzaA__ABA87253

SEQ ID NO: 192433 - RNA, 1698 nt, Artificial Sequence
  derived and/or modified CDS sequence (opt5) from hemagglutinin__InfluenzaA__ABB02781
augaaggugaaacugcucauccugcuuugcaccuucacagccacguacgcugacaccauuuguaucggcuaucacgccaacaauagcacagauaccgucgacacaguucuggagaagaacgugaccgugacacauuccgucaaucuccuggaagauucucacaacgggaaacuuugccugcucaagggaauugcgccccugcagcugggcaauuguagcguggcuggguggauccucggaaacccugagugcgaacugcuuauuuccaaagagucuuggagcuacaucguugaaaccccgaaucccgagaacggcgccuguuauccuggguacuuugccgacuaugaggaacugagagagcaacucuccucugugagcuccuucgaacgguuugagaucuuccccaaggagagcucuuggccuaaucauacggucaccggaguguccgcuagcugcucucacaacggcaaguccagcuuuuaccgcaaucugcuuuggcugacaggcaaaaacgggcucuaucccaaucugucuaaguccuacgccaacaauaaagaaaaggagguucugauucucuggggagugcaucacccuccgaacaucggcgaucagagaacccuguaccacacagaaaacgcuuaugucagcgugguguccucucauuacagccggcgcuucacccccgagauuacgaaaagaccuaagguccgggaccaggaagggcgcaucaauuauuacuggacacuucuggagcccggagauaccauuaucuuugaggccaacggcaaucucauugcgccuugguaugccuucgcucuguccagaggguuuggaagcggcaucaucacaucuaacgcccccauggacgaaugugaugcuaagugccagaccccgcaaggcgccauuaauuccagccuuccuuuccagaacguucaccccgugaccaucggggaguguccuaaauacgugcggucugcgaagcugcgcauggucacaggacucagaaauauucccagcauccagucccggggccuguuuggggccauugcuggauucaucgaaggcggguggacgggaaugguggacggcugguauggcuaccaucaccagaacgagcaagggucuggauacgccgcugaucagaaaagcacccagaaugccaucaacggcauuacaaauaagguuaacuccgugaucgaaaagaugaauacccaguuuacagccgucgggaaagaguucaacaaacuggagcgcagaauggaaaaucucaacaagaagguggacgauggauuccuggacauuuggaccuauaacgcugagcuucugguucuccuggaaaaugagcggacgcuugacuuucacgauagcaacgugaaaaaucuguacgaaaaggucaaaucucaacucaagaacaaugcgaaagagaucggcaacgggugcuucgaguuuuaucauaaguguaauaacgaaugcauggaguccgugaagaauggcacauacgacuaucccaaauacagcgaagagucuaagcugaaccgcgagaaaauugauggagucaagcuggacuccaugggcguguaucagauccucgccaucuacagcaccguugcuuccucucuggugcuucuggucagccucggggccauuuccuucuggaugugcucuaauggaagccugcaguguagagugugcaucuga

SEQ ID NO: 192434 - RNA, 1698 nt, Artificial Sequence; identical to SEQ ID NO: 192373
  derived and/or modified CDS sequence (opt5) from hemagglutinin__InfluenzaA__ABB02792

SEQ ID NO: 192435 - RNA, 1698 nt, Artificial Sequence; identical to SEQ ID NO: 192371
  derived and/or modified CDS sequence (opt5) from hemagglutinin__InfluenzaA__ABB02803

SEQ ID NO: 192436 - RNA, 1698 nt, Artificial Sequence
  derived and/or modified CDS sequence (opt5) from hemagglutinin__InfluenzaA__ABB02814
augaaggccaaacugcucgugcugcuuugcaccuucacagcuacguacgccgacaccaucuguauuggcuaucacgcgaacaauagcacagauaccgucgacacaguucuggagaagaacgugaccgugacacauuccgucaaucuccuggaagauucucacaacgggaaacuuugccugcucaagggaaucgcuccccugcagcugggcaauuguagcguggccggguggauucucggaaacccugagugcgaacugcuuaucuccaaagagucuuggagcuacauuguugaaaccccgaaucccgagaacggcacguguuauccuggguacuuugccgacuaugaggaacugagagagcaacucuccucugugagcuccuucgaacgguuugagaucuuccccaagggaagcucuuggccuaaucauaccgucacaggcguguccgcuagcugcucucacaacggcaaguccagcuuuuaccgcaaucugcuuuggcugaccgggaaaaacggacucuaucccaaucugucuauguccuacguuaacaauaaggagaaagaagugcugguccucuggggcgugcaucacccuccgaacaucggggaucagagagcccuguaccacacagagaacgcuuaugugagcgucguuuccucucauuacagccggcgcuucacccccgaaauugccaagagaccuaaagugcgggaccaggagggacgcaucaauuauuacuggacgcuucuggaacccggcgauacaauuaucuuugaggcgaacgggaaucucauugccccuugguaugcuuucgcccuguccagaggauuuggcagcggcaucauuaccucuaacgcucccauggacgagugugaugccaagugccagacaccgcaaggggcgaucaauuccagccuuccuuuccagaacgugcaccccgucaccaucggagaauguccuaaguacgugcggucugccaaacugcgcaugguuaccggccucagaaauauucccagcauccagucccgggggcuguuuggagcuauugccggcuucaucgaagggggauggacaggcaugguggacggcugguauggguaccaucaccagaacgaacaaggaucuggcuacgcugccgaucaaaagagcacgcagaaugccauuaacgggaucaccaauaaagucaacuccgugaucgagaagaugaauacacaguuuaccgcuguuggaaaagaguucaacaagcuggagcgcagaauggagaaucucaacaaaaagguggacgauggcuuccuggacauuuggacauauaacgcggaacuucugguccuccuggagaaugaacggacccuugacuuucacgauagcaacgugaagaaucuguacgagaaagucaagucucagcucaaaaacaaugccaaggaaaucgggaacggcugcuucgaguuuuaucauaaaugugacaaugagugcauggaauccgugaagaacggaacguacgauuaucccaaguacagcgaggaaucuaaacugaaucgcgagaagauugacggcguuaaacuggaguccauggggguguaucagauccucgcuauuuacagcacagucgccuccucucuggugcuucugguuagccucggagccaucuccuucuggaugugcucuaacggcagccugcaguguagaaucugcauuuga

SEQ ID NO: 192437 - RNA, 1698 nt, Artificial Sequence
  derived and/or modified CDS sequence (opt5) from hemagglutinin__InfluenzaA__ABB02825
augaaggccaaacugcucgugcugcuuugcaccuucacagcuacguacgccgacaccaucuguauuggcuaucacgcgaacaauagcacagauaccgucgacacaguucuggagaagaacgugaccgugacacauuccgucaaucuccuggaagauucucacaacgggaaacuuugccugcucaagggaaucgcuccccugcagcugggcaauuguagcguggccggguggauucucggaaacccugagugcgaacugcuuaucuccaaagagucuuggagcuacauuguugaaaccccgaaucccgagaacggcacguguuauccuggguacuuugccgacuaugaggaacugagagagcaacucuccucugugagcuccuucgaacgguuugagaucuuccccaagggaagcucuuggccuaaucauaccgucacaggcguguccgcuagcugcucucacaacggcaaguccagcuuuuaccgcaaucugcuuuggcugaccgggaaaaacggacucuaucccaaucugucuauguccuacguuaacaauaaggagaaagaagugcugguccucuggggcgugcaucacccuccgaacaucggggaucagagagcccuguaccacacagagaacgcuuaugugagcgucguuuccucucauuacagccggcgcuucacccccgaaauugccaagagaccuaaagugcgggaccaggagggacgcaucaauuauuacuggacgcuucuggaacccggcgauacaauuaucuuugaggcgaacgggaaucucauugccccuugguaugcuuucgcccuguccagaggauuuggcagcggcaucauuaccucuaacgcucccauggacgagugugaugccaagugccagacaccgcaaggggcgaucaauuccagccuuccuuuccagaacgugcaccccgucaccaucggagaauguccuaaguacgugcggucugccaaacugcgcaugguuaccggccucagaaauauucccagcauccagucccgggggcuguuuggagcuauugccggcuucaucgaagggggauggacaggcaugguggacggcugguauggguaccaucaccagaacgaacaaggaucuggcuacgcugccgaucaaaagagcacgcagaaugccauuaacgggaucaccaauaaagucaacuccgugaucgagaagaugaauacacaguuuaccgcuguuggaaaagaguucaacaagcuggagcgcagaauggagaaucucaacaaaaagguggacgauggcuuccuggacauuuggacauauaacgcggaacuucugguccuccuggagaaugaacggacccuugacuuucacgauagcaacgugaagaaucuguacgagaaagucaagucucagcucaaaaacaaugccaaggaaaucgggaacggcugcuucgaguuuuaucauaaaugugacaaugagugcauggaauccgugaagaacggaacguacgauuaucccaaguacagcgaggaaucuaaacugaaucgcgagagaauugacggcguuaagcuggaguccauggggguguaucagauccucgcuauuuacagcacagucgccuccucucuggugcuucugguuagccucggagccaucuccuucuggaugugcucuaacggcagccugcagugucggaucugcauuuga

SEQ ID NO: 192438 - RNA, 1701 nt, Artificial Sequence
  derived and/or modified CDS sequence (opt5) from hemagglutinin__InfluenzaA__ABB02836
augaagaccaucauugcccugagcuacauccucugccugguguucgcucagaaacuucccggcaacgacaauuccacagccacgcugugucucgggcaccaugcggucccuaacggaaccauuguuaagacaaucaccaaugaucaaauugaggugacaaacgcuaccgaacuggugcagucuagcuccacaggcgggaucugcgacucuccgcaccagauccuugauggagagaauuguacccugauugacgcccuccugggcgauccccagugcgacggguuucaaaacaaaaagugggaucuguucgucgaaagaagcaaagccuauuccaauuguuacccuuaugacgugcccgauuacgcuucucuccggagccugguugccuccagcggaacgcuugaguuuaacaaugaaucuuucaacuggaccggcgugacacagaauggcaccuccagcgcuugcaagcgcagaucuaacaauuccuuuuucagccggcugaacuggcucacacaucugaaguuuaaauauccugcccuuaaugucaccaugcccaacaacgagaaguucgacaaacuguacaucuggggagugcaccauccugggacggauaaugaccagauuucucucuaugcgcaggccuccggccgcaucacaguuagcaccaagagaaaccaacagacagugauuccgaauaucgggucccggccccgcgucagagauauuccuucucggaucagcaucuacuggaccauugugaaacccggagacauccugcugauuaacuccaccggcaaucucaucgcuccucgcggguacuuuaagauuagaagcggaaagucuuccaucaugcggagcgacgcccccaucggcaaauguaagucugagugcauuacaccgaacggcagcaucccuaaugauaaacccuuccagaacgugaaucgcauuacguauggggcuuguccuagauacgucaagcagaacacccugaaacuugccacaggaaugcggaauguucccgaaaagcaaacccgcggcaucuuuggggcgauugccggauucaucgagaacggcugggaagggaugguggacggaugguauggcuuuagacaccaaaauuccgagggcaucgggcaggcugccgaucugaaaucuacacaggcugccauuaaccagaucaauggaaagcucaaccggcugauuggcaagaccaacgagaaauuccaccagaucgaaaaggaguucagcgaaguggaggggcgcauucaggaccuugaaaaauacgucgaggauacgaagaucgaccugugguccuauaaugccgagcuccugguggcucuggaaaaccaacauacaauugaucucaccgacagcgagaugaauaaacuguuugaaagaaccaagaagcagcuucgggagaacgcggaagauaugggaaauggcugcuucaaaaucuaccacaagugugacaacgccugcaucgggucuauuagaaauggcacauaugaucaugacguuuaccgcgacgaggcucugaacaaucgguuucagaucaaaggaguggagcucaaguccggcuacaaagauuggauucuguggaucagcuucgccauuucuugcuuucuucugugugucgcccuccugggguucaucaugugggcuugccagaagggaaacaucagauguaauauuugcaucuga

SEQ ID NO: 192439 - RNA, 1701 nt, Artificial Sequence
  derived and/or modified CDS sequence (opt5) from hemagglutinin__InfluenzaA__ABB02847
augaagaccaucauugcccugagcuacauccucugccugguguucgcucagaaacuucccggcaacgacaauuccacagccacgcugugucucgggcaccaugcggucccuaacggaaccauuguuaagacaaucaccaaugaucaaauugaggugacaaacgcuaccgaacuggugcagucuagcuccacaggcgggaucugcgacucuccgcaccagauccuugauggagagaauuguacccugauugacgcccuccugggcgauccccagugcgacggguuucaaaacaaaaagugggaucuguucgucgaaagaagcaaagccuauuccaauuguuacccuuaugacgugcccgauuacgcuucucuccggagccugguugccuccagcggaacgcuugaguuuaacaaugaaucuuucaacuggaucggcgugacccagaauggcacauccagcgcuugcaagcgcagaucuaacaauuccuuuuucagccggcugaacuggcucacccaucugaaguuuaaauauccugcccuuaaugucacaaugcccaacaacgagaaguucgacaaacuguacauuuggggagugcaccauccugggaccgauaaugaccagaucucucucuaugcgcaggccuccggccgcauuacgguuagcacaaagagaucccaacagaccgugaucccgaacauugggucucggccccgcgucagagauaucccuagccggaucuccauuuacuggacaaucgugaaacccggagacauucugcugaucaauagcaccggcaaccucauugcuccucgcggguacuuuaagaucagaucuggaaaguccagcaucaugcggucugacgcccccauuggcaaauguaauagcgagugcaucaccccgaacggcuccauuccuaaugauaagcccuuccagaacgugaaucgcaucacauauggggcuuguccuagauacgucaaacagaacacgcugaagcuggccaccggaaugcggaauguucccgaaaaacaaacacgcggcauuuuuggggcgaucgccggauucaucgagaacggcugggaagggaugguggacggaugguauggcuuuagacaccaaaauucugagggcauugggcaggcugccgaucuuaagagcacccaggcugccaucaaccagauuaauggaaaacucaaccggcugaucggcaagacaaacgagaaguuccaccagauugaaaaagaguucuccgaaguggaggggagaauccaggaccuugaaaaguacgucgaggauaccaaaauugaccuguggagcuauaaugccgagcuccugguggcucuggaaaaccaacauacgaucgaucucacagacucugagaugaauaagcuguuugaacgcaccaaaaagcagcuucgggagaacgcggaagauaugggaaauggcugcuucaagaucuaccacaaaugugacaacgccugcauuggguccaucagaaauggcaccuaugaucaugacguuuaccgcgacgaggcucugaacaaucgguuucagauuaagggaguggagcucaaaagcggcuacaaggauuggauccuguggauuucuuucgccaucuccugcuuucuucugugugucgugcuccugggguucaucaugugggccugccagaaaggaaacauuagauguaauaucugcauuuga

SEQ ID NO: 192440 - RNA, 1701 nt, Artificial Sequence; identical to SEQ ID NO: 192119
  derived and/or modified CDS sequence (opt5) from hemagglutinin__InfluenzaA__ABB02858

SEQ ID NO: 192441 - RNA, 1701 nt, Artificial Sequence
  derived and/or modified CDS sequence (opt5) from hemagglutinin__InfluenzaA__ABB02869
augaagaccaucauugcccugagcuacauccucugccugguguucgcucagaaacuucccgucaacgacaauuccacagccacgcugugucucggccaccaugcgguuccuaacgggacccuggugaagacaauuaccaaugaucacaucgaggugacaaacgcuaccgaacuuguccaaucuagcuccacaggaagaauuugcgacucuccgcaucagauccuggauggcgagaauuguacccucaucgacgcccugcugggggauccccacugcgacggauuucagaacaaagaaugggaucucuucguggagcggagcacggccuauuccaauuguuacccuuaugacguucccgauuacgcuucucugcgcagccuuguggccuccagcggcacccuggaauuuaacaaugagucuuucaacuggacaggggucgcucagaauggaaccuccagcgccugcaagagacggucuauuaaauccuuuuucagccgccucaacuggcugcaucaacuuaaguauaaguacccugcgcugaaugugacaaugcccaacaaugagaaauuugacaagcucuauaucuggggcguucaccacccuucuaccgauuccgaccagauuagccuguacgcccaggcuuccggcagagugacggucucuacaaaacggagccagcaaaccgugaucccgaacauugggucccgccccugggugagaggagucagcucucggaucuccauuuacuggacaaucguuaagccuggcgauauccugcucauuaacagcaccgggaaucugaucgcccccagaggauauuucaaaauuagaucuggcaagagcuccaucaugcggucuaacgcuccuauugggaaguguaauagcgaaugcaucacccccaacggauccaucccgaaugacaaaccuuuucagaacgugaaucgcauuacauacggcgccugucccagauaugugaagcagaacacgcuuaaacuggcgaccggcaugcggaaugucccugagaagcagacacgcgggaucuucggagccauugcuggcuuuguggaaaacgggugggagggaaugguugacggcugguacggguucagacaucaaaauagcgagggaaccggccaggccgcugaucucaaaucuacacaggccgccaucaaccaaauuaauggcaagcugaaccggcuuaucgagaaaaccaaugaaaaguuucaccagaucgaaaaggaguucuccgaaguggaggggcgcauucaggaccuggagaaauaugucgaagauacgaagaucgaccucuggagcuacaacgcugagcugcugguggcgcucgaaaaccagcauacaauugaucugaccgacucugagaugaauaaacuuuucgaacgcacccggaagcaacugagagagaacgccgaggauaugggaaauggcugcuuuaaaaucuaucacaagugugacaacgcuugcauuggguccauccgcaauggaacauacgaucacgacguuuaccgggaugaagcccucaacaauagauuccagauuaagggcguggagcugaaaagcggguauaaggacuggauccuuuggaucuccuuugccauuucuugcuuccugcucugugucgugcugcugggcuuuaucaugugggcuugccagaaaggaaacauucgcuguaauaucugcauuuga

SEQ ID NO: 192442 - RNA, 1701 nt, Artificial Sequence
  derived and/or modified CDS sequence (opt5) from hemagglutinin__InfluenzaA__ABB02880
augaagaccaucauugcccugagcuacauccucugccugguguucgcucagaaacuucccgucaacgacaauuccacagccacgcugugucucggccaccaugcgguuccuaacgggacccuggugaagacaauuaccaaugaucacaucgaggugacaaacgcuaccgaacuuguccaaucuagcuccacaggaagaauuugcgacucuccgcaucagauccuggauggcgagaauuguacccucaucgacgcccugcugggggauccccacugcgacggauuucagaacaaagaaugggaucucuucguggagcggagcacggccuauuccaauuguuacccuuaugacguucccgauuacgcuucucugcgcagccuuguggccuccagcggcacccuggaauuuaacaaugagucuuucaacuggacaggggucgcucagaauggaaccuccagcgccugcaagagacggucuauuaaauccuuuuucagccgccucaacuggcugcaucaacuuaaguauaaguacccugcgcugaaugugacaaugcccaacaaugagaaauuugacaagcucuauaucuggggcguucaccacccuucuaccgauuccgaccagauuagccuguacgcccaggcuuccggcagagugacggucucuacaaaacggagccagcaaaccgugaucccgaacauugggucccgccccugggugagaggagucagcucucggaucuccauuuacuggacaaucguuaagccuggcgauauccugcucauuaacagcaccgggaaucugaucgcuccccgcggauauuucaaaauuagaucuggcaagagcuccaucaugcggucuaacgccccuauugggaaguguaauagcgaaugcaucacccccaacggauccaucccgaaugacaaaccuuuucagaacgugaaucgcauuacauacggcgccugucccagauaugugaagcagaacacgcuuaaacuggcgaccggcaugcggaaugucccugagaagcagacacgcgggaucuucggagccauugcuggcuuuaucgaaaacgggugggagggaaugguggacggcugguacggguucagacaucaaaauagcgagggaaccggccaggccgcugaucucaaaucuacacaggccgccauuaaccaaaucaaucggaagcugaacagacuuaucgagaaaaccaaugaaaaguuucaccagauugaaaaggaguucuccgaaguugagggccgcauccaggaccuggagaaauauguggaagauacgaagauugaccucuggagcuacaacgcugagcugcuggucgcgcucgaaaaccagcauacaaucgaucugaccgacucugagaugaauaaacuuuucgaacggaccagaaagcaacugcgcgagaacgccgaggauauggggaauggaugcuuuaaaauuuaucacaagugugacaacgcuugcaucggcuccauucggaaugggacauacgaucacgacguguacagagaugaagcccucaacaaucgcuuccagaucaagggaguugagcugaaaagcggcuauaaggacuggauccuuuggauuuccuuugccaucucuugcuuccugcucugugugguccugcugggguuuauuaugugggcuugccagaaaggcaacauccgguguaauauuugcaucuga

SEQ ID NO: 192443 - RNA, 1701 nt, Artificial Sequence
  derived and/or modified CDS sequence (opt5) from hemagglutinin__InfluenzaA__ABB02891
augaagaccaucauugcccugagcuacauccucugccugguguucgcucagaaacuucccgucaacgacaauuccacagccacgcugugucucggccaccaugcgguuccuaacgggacccuggugaagacaauuaccaaugaucacaucgaggugacaaacgcuaccgaacuuguccaaucuagcuccacaggaagaauuugcgacucuccgcaucagauccuggauggcgagaauuguacccucaucgacgcccugcugggggauccccacugcgacggauuucagaacaaagaaugggaucucuucguggagcggagcacggccuauuccaauuguuacccuuaugacguucccgauuacgcuucucugcgcagccuuguggccuccagcggcacccuggaauuuaacaaugagucuuucaacuggacaggggucgcucagaauggaaccuccagcgccugcaagagacggucuauuaaauccuuuuucagccgccucaacuggcugcaucaacuuaaguauaaguacccugcgcugaaugugacaaugcccaacaaugagaaauuugacaagcucuauaucuggggcguucaccacccuucuaccgauuccgaccagauuagccuguacgcccaggcuuccggcagagugacggucucuacaaaacggagccagcaaaccgugaucccgaacauugggucccgccccugggugagaggagucagcucuaucauuuccaucuacuggacaaucguuaagccuggcgauauucugcucaucaacagcaccgggaaucugauugcuccccggggauauuucaaaauccgcucuggcaagagcuccauuaugagaucuaacgccccuaucggggaauguaauagcgagugcaucacccccaacggauccauuccgaaugacaagccuuuucagaacgugaaucggaucacauacggcgccuguccccgcuaugugaaacagaacacgcuuaagcuggcgaccggcaugagaaaugucccugaaaaacagacacgggggauuuucggagccaucgcuggcuuuauugagaacgggugggagggaaugguggacggcugguacggguuccgccaucaaaauagcgaaggaaccggccaggccgcugaucucaagucuacacaggccgccaucaaccaaaucaauggcaaacugaacagacuuauugagaagaccaaugaaaaauuucaccagaucgagaaggaguucuccgaaguugaggggcggauucaggaccuggaaaaguauguggaggauacgaaaaucgaccucuggagcuacaacgcugaacugcuggucgcgcucgagaaccagcauacaauugaucugaccgacucugaaaugaauaagcuguucgagagaacccgcaaacaacugcgggagaacgccgaagauaugggaaauggcugcuuuaagaucuaucacaaaugugacaacgcuugcauuggguccaucagaaauggaacauacgaucacgacguguaccgcgaugaggcccucaacaaucgguuccagaucaagggcguugaacuuaagagcggguauaaagacuggauucuuuggaucuccuuugccauuucuugcuuccugcucugugugguccugcugggcuuuaucaugugggcuugccagaagggaaacauuagauguaauaucugcaucuga

SEQ ID NO: 192444 - RNA, 1701 nt, Artificial Sequence
  derived and/or modified CDS sequence (opt5) from hemagglutinin__InfluenzaA__ABB02902
augaagaccaucauugcccugagcuacauccucugccugguguucgcucagaaacuucccgucaacgacaauuccacagccacgcugugucucggccaccaugcgguuccuaacgggacccuggugaagacaauuaccaaugaucacaucgaggugacaaacgcuaccgaacuuguccaaucuagcuccacaggaagaauuugcgacucuccgcaucagauccuggauggcgagaauuguacccucaucgacgcccugcugggggauccccacugcgacggauuucagaacaaagaaugggaucucuucguggagcggagcacggccuauuccaauuguuacccuuaugacguucccgauuacgcuucucugcgcagccuuguggccuccagcggcacccuggaauuuaacaaugagucuuucaacuggacaggggucgcucagaauggaaccuccagcgccugcaagagacggucuauuaaauccuuuuucagccgccucaacuggcugcaucaacuuaaguauaaguacccugcgcugaaugugacaaugcccaacaaugagaaauuugacaagcucuauaucuggggcguucaccacccuucuaccgauuccgaccagauuagccuguacgcccaggcuuccggcagagugacggucucuacaaaacggagccagcaaaccgugaucccgaacauugggucccgccccugggugagaggagucagcucucggaucuccauuuacuggacaaucguuaagccuggcgauauccugcucauuaacagcaccgggaaucugaucgcuccccgcggauauuucaaaauuagaucuggcaagagcuccaucaugcggucuaacgccccuauugggaaguguaauagcgaaugcaucacccccaacggauccaucccgaaugacaaaccuuuucagaacgugaaucgcauuacauacggcgccugucccagauaugugaagcagaacacgcuuaaacuggcgaccggcaugcggaaugucccugagaagcagacacgcgggaucuucggagccauugcuggcuuuaucgaaaacgggugggagggaaugauggacggcugguacggguucagacaucaaaauagcgagggaaccggccaggccgcugaucucaaaucuacacaggccgccauuaaccaaaucaauggcaagcugaaccggcuuaucgagaaaaccaaugaaaaguuucaccagauugaaaaggaguucuccgaaguggaggggagaauccaggaccuggagaaauauguugaagauacgaagauugaccucuggagcuacaacgcugagcugcugguggcgcucgaaaaccagcauacaaucgaucugaccgacucugagaugaauaaacuuuucgaacgcacccggaagcaacugagagagaacgccgaggauaugggaaauggcugcuuuaaaauuuaucacaagugugacaacgcuugcaucggguccauucgcaauggaacauacgaucacgacgucuaccgggaugaagcccucaacaauagauuccagaucaagggcguggagcugaaaagcggguauaaggacuggauccuuuggauuuccuuugccaucucuugcuuccugcucuguguugugcugcugggcuuuauuaugugggcuugccagaaaggaaacauccgcuguaauauuugcaucuga

SEQ ID NO: 192445 - RNA, 1698 nt, Artificial Sequence
  derived and/or modified CDS sequence (opt5) from hemagglutinin__InfluenzaA__ABB02913
augaaggccaaacugcucgugcugcuuugcaccuucacagcuacguacgccgacaccaucuguauuggcuaucacgcgaacaauagcacagauaccgucgacacaguucuggagaagaacgugaccgugacacauuccgucaaucuccuggaagauucucacaacgggaaacuuugccugcucaagggaaucgcuccccugcagcugggcaauuguagcguggccggguggauucucggaaacccugagugcgaacugcuuaucuccaaagagucuuggagcuacauuguugaaaccccgaaucccgagaacggcacguguuauccuggguacuuugccgacuaugaggaacugagagagcaacucuccucugugagcuccuucgaacgguuugagaucuuccccaagggaagcucuuggccuaaucauaccgucacaggcguguccgcuagcugcucucacaacggcaaguccagcuuuuaccgcaaucugcuuuggcugaccgggaaaaacggacucuaucccaaucugucuauguccuacguuaacaauaaggagaaagaagugcugguccucuggggcgugcauagaccuccgaacaucggggaucagcgggcccuguaccacacagagaacgcuuaugugagcgucguuuccucucacuacagccgcagauucacccccgaaauugccaagcggccuaaagugcgcgaccaggagggaagaaucaauuauuacuggacgcuucuggaacccggcgauacaauuaucuuugaggcgaacgggaaucucauugccccuugguaugcuuucgcccugucccggggauuuggcagcggcaucauuaccucuaacgcucccauggacgagugugaugccaagugccagacaccgcaaggggcgaucaauuccagccuuccuuuccagaacgugcaucccgucaccaucggagaauguccuaaguacgugcgcucugccaaacugagaaugguuaccggccuccggaauauucccagcauccagucccgcgggcuguuuggagcuauugccggcuucaucgaagggggauggacaggcaugguggacggcugguauggguaccaccaucagaacgaacaaggaucuggcuacgcugccgaucaaaagagcacgcagaaugccauuaacagaaucaccaauaaagucaacuccgugaucgagaagaugaauacacaguuuaccgcuguugggaaagaguucaacaagcuggagcggcgcauggagaaucucaacaaaaagguggacgauggauuccuggacauuuggacauauaacgcggaacuucugguccuccuggagaaugaaagaacccuugacuuucacgauagcaacgugaagaaucuguacgagaaagucaagucucagcucaaaaacaaugccaaggaaaucggcaacgggugcuucgaguuuuaucacaaauguaauaacgagugcauggaauccgugaagaauggcacguacgacuaucccaaguacagcgaggaaucuaaacugaaccgggagaagauugauggaguuaaacuggaguccaugggcguguaucagauccucgcuauuuacagcacagucgccuccucucuggugcuucugguuagccucggggccaucuccuucuggaugugcucuaauggaagccugcaguguagaaucugcauuuga

SEQ ID NO: 192446 - RNA, 1698 nt, Artificial Sequence
  derived and/or modified CDS sequence (opt5) from hemagglutinin__InfluenzaA__ABB02924
augaaggugaaacugcucguccugcuuugcaccuucacagccacguacgcugacaccaucuguauuggcuaucacgccaacaauagcacagauaccguugacacagugcuggagaagaacgugaccgucacacauuccgugaaucuccuggaagauucucacaacgggaaacuuugccugcucaagggaaucgcgccccugcagcugggcaauuguagcguugcuggguggauucucggaaacccugagugcgaacugcuuaucuccaaagagucuuggagcuacauuguggaaaccccgaaucccgagaacggcacguguuauccuggguacuuugccgacuaugaggaacugagagagcaacucuccucugucagcuccuucgaacgguuugagaucuuccccaaggagagcucuuggccuaaucauaccgugacaggaguuuccgccagcugcucucacaacggcaaguccagcuuuuaccgcaaucugcuuuggcugaccggcaaaaacgggcucuaucccaaucugucuaaguccuacgcuaacaauaaagaaaaggaggugcugguccucuggggagugcaucacccuccgaacaucggcgaucagagagcccuguaccacacagaaaacgcuuaugugagcgucguuuccucucauuacagccggcgcuucacccccgagauugccaaaagaccuaaggugcgggaccaggaagggcgcaucaauuauuacuggacgcuucuggagcccggagauacaauuaucuuugaggcgaacggcaaucucauugccccuagauaugcuuucgcccugucccggggguuuggaagcggcaucauuaccucuaacgcucccauggacgaaugugaugccaagugccagacaccgcaaggcgcgaucaauuccagccuuccuuuccagaacgugcaccccgucaccaucggggaguguccuaaauacgugcgcucugccaagcugagaaugguuaccggacuccggaauauucccagcauccagucccgcggccuguuuggggcuauugccggauucaucgaaggcggguggacaggaaugguggacggcugguauggcuaccaucaccagaacgagcaagggucuggauacgcugccgaucagaaaagcacgcagaaugccauuaacggcaucaccaauaaggucaacgcugugaucgaaaagaugaauacacaguuuaccgcgguugggaaagaguucaacaaacuggagagacggauggaaaaucucaacaagaagguggacgauggauuccuggacauuuggacauauaacgccgagcuucugguccuccuggaaaaugagcgcacccuugacuuucacgauuccaacgugaaaaaucuguacgaaaaggucaaaagccaacucaagaacaaugcuaaagagaucggcaacgggugcuucgaguuuuaucauaaguguaaugacgaaugcauggagucugugaagaacggcacguacgauuaucccaaauacuccgaagagagcaagcugaauagagagaaaauugacggaguuaagcuggaaucuaugggcguguaucagauccucgccauuuacuccacagucgccagcucccuggugcuucugguuucucucggggcuaucagcuucuggaugugcuccaacggaucucugcagugucggaucugcauuuga

SEQ ID NO: 192447 - RNA, 1698 nt, Artificial Sequence
  derived and/or modified CDS sequence (opt5) from hemagglutinin__InfluenzaA__ABB02936
augaaggccaaacugcucgugcugcuuugcaccuucacagcuacguacgccgacaccaucuguauuggcuaucacgcgaacaauagcacagauaccgucgacacaguucuggagaagaacgugaccgugacacauuccgucaaucuccuggaagauucucacaacgggaaacuuugccugcucaagggaaucgcuccccugcagcugggcaauuguagcguggccggguggauucucggaaacccugagugcgaacugcuuaucuccaaagagucuuggagcuacauuguugaaaccccgaaucccgagaacggcacguguuauccugggcauuuugccgacuacgaggaacugagagagcaacucuccucugugagcuccuucgaacgguuugagaucuuccccaagggaagcucuuggccuaaucacaccgucacaggcguguccgcuagcugcucucauaacggcaaguccagcuuuuaucgcaaucugcuuuggcugaccgggaaaaacggacucuaccccaaucugucuauguccuauguuaacaauaaggagaaagaagugcugguccucuggggcgugcaccacccuccgaacaucggggaucagagagcccuguaccauacagagaacgcuuacgugagcgucguuuccucucacuauagccggcgcuucacccccgaaauugccaagagaccuaaagugcgggaccaggagggacgcaucaauuacuauuggacgcuucuggaacccggcgauacaauuaucuuugaggcgaacgggaaucucauugccccuugguacgcuuucgcccuguccagaggauuuggcagcggcaucauuaccucuaacgcucccauggacgagugugaugccaagugccagacaccgcaaggggcgaucaauuccagccuuccuuuccagaacgugcaucccgucaccaucggagaauguccuaaguaugugcggucugccaaacugcgcaugguuaccggccucagaaauauucccagcauccagucccgggggcuguuuggagcuauugccggcuucaucgaagggggauggacaggcaugguggacggcugguacggguaucaccaccagaacgaacaaggaucuggcuacgcugccgaucaaaagagcacgcagaaugccauuaacgggaucaccaauaaagucaacuccgugaucgagaagaugaauacacaguuuaccgcuguuggaaaagaguucaacaagcuggagcgcagaauggagaaucucaacaaaaagguggacgauggcuuccuggacauuuggacauacaacgcggaacuucugguccuccuggagaaugaacggacccuugacuuucaugauagcaacgugaagaaucuguaugagaaagucaagucucagcucaaaaacaaugccaaggaaaucgggaacggcugcuucgaguuuuaccacaaauguaauaacgagugcauggaauccgugaagaauggaacguaugacuaccccaaguauagcgaggaaucuaaacugaaccgcgagaagauugauggcguuaaacuggaguccauggggguguaccagauccucgcuauuuauagcacagucgccuccucucuggugcuucugguuagccucggagccaucuccuucuggaugugcucuaauggcagccugcaguguagaaucugcauuuga

SEQ ID NO: 192448 - RNA, 1701 nt, Artificial Sequence
  derived and/or modified CDS sequence (opt5) from hemagglutinin__InfluenzaA__ABB02947
augaagaccaucauugcccugagcuacauccucugccugguguucgcucagaaaauucccggcaacgacaauuccacagccacgcuuugucuggggcaccaugcggucccuaacggaacccucguuaagacaaucaccaaugaucaaauugaggugacaaacgcuaccgaacuggugcagucuagcuccacaggcagaaucugcgacucuccgcaccggauccuugauggggagaauuguacccugauugacgcccuccugggagauccccauugcgacggcuuucagaacaaagaaugggaucuguucgucgagcgcagcaaggccuauuccaauuguuacccuuaugacgugcaggauuacgcuucucucagaagccugguugccuccagcgggacgcuugaauuuaacaaugagucuuucaacuggaccggaguggcucaaaauggcacauccuaugccugcaaacggcgcagcaucaagucuuucuucuccagacugaacuggcuccaccagcugaaguacaaauaucccgcgcuuaaugucaccaugccuaacaaugacaaguuugauaaacuguacauuuggggcgugcaucaccccagcacagacucugaucagaccucccucuacgcccaggcuagcgggcggguuacgguguccacaaagcgcucucaacagaccgucaucccuaacauuggaagcagaccgugggugcggggcguguccagccgcaucucuauuuauuggacaaucgucaaacccggggacauccugcugauuaacuccaccggaaaucucaucgccccuagaggcuacuucaagauucggagcgggaagucuagcaucaugcgcuccgacgcucccauuggaaaauguaacucugagugcaucaccccuaauggcagcauccccaacgauaagccguuucagaauguuaacagaauuacauauggcgccuguccucgguacgugaaacagaauacgcugaagcuggcgaccgggaugcgcaacgugcccgaaaaacaaacaagaggaaucuucggcgccauugcuggguuuaucgagaauggaugggaaggcauggucgacgggugguauggauuccggcaccagaacuccgagggcaccggccaggccgcugaucuuaagagcacacaagccgccauuaaucagaucaacgggaaacucaauagacugaucgagaagaccaacgaaaaguuucaucagauugagaaagaauuuucugagguggaaggacgcauccaggaccuugagaaguacguugaggauacgaaaauugaccugugguccuauaaugcugaacuccugguggcgcuggagaaccaacacacaaucgaucucaccgacagcgaaaugaacaagcuguucgagcggaccagaaaacagcuucgcgaaaaugccgaggauaugggcaacgggugcuuuaagauuuaccauaagugugacaaugcuugcaucggaucuauucggaacggcacauacgaucacgacgucuauagagacgaggcccugaauaaccgcuuccagaucaaagggguggaacucaaguccggcuacaaagauuggauccuguggauuagcuuugccaucuccugcuuccuucuguguguugugcuccugggauuuauuaugugggcuugccagaagggcaauauccgguguaacauuugcaucuga

SEQ ID NO: 192449 - RNA, 1701 nt, Artificial Sequence; identical to SEQ ID NO: 192258
  derived and/or modified CDS sequence (opt5) from hemagglutinin__InfluenzaA__ABB02958

SEQ ID NO: 192450 - RNA, 1701 nt, Artificial Sequence; identical to SEQ ID NO: 192258
  derived and/or modified CDS sequence (opt5) from hemagglutinin__InfluenzaA__ABB02969

SEQ ID NO: 192451 - RNA, 1701 nt, Artificial Sequence
  derived and/or modified CDS sequence (opt5) from hemagglutinin__InfluenzaA__ABB02980
augaagaccaucauugcccugagcuacauccucugccugguguucgcucagaaacuucccggcaacgacaauuccacagccacgcugugucucgggcaccaugcggucccuaacggaacccugguuaagacaauuaccaaugaucaaaucgaggugacaaacgcuaccgaacuugugcagucuagcuccacaggcagaauuugcgacucuccgcaccagauccuggauggggagaauuguacccucaucgacgcccugcugggagauccccauugcgacggcuuucagaacaaagaaugggaucucuucgucgagcggagcaaggccuauuccaauuguuacccuuaugacgugcccgauuacgcuucucugcgcagccuuguugccuccagcgggacgcuggaauuuaacaaugagucuuucaacuggaccggaguggcucaaaauggcacauccagcgccugcaaaagacggucuaacaaguccuuuuucagccgccucaauuggcugcaccagcuuaaguauaaauacccugcgcugaacgucaccaugcccaauaacgagaaguuugacaaacucuauauuuggggcgugcaucacccuucuacagauuccgaccagaucagccuguacgcccaggcuuccgggagaguuaccgugucuacgaagcggagccaacagacagucauuccgaacaucggaucccgccccugggugagaggcgugagcucuauuaucuccauuuacuggaccaucgucaaaccuggggauauccugcucauuaauagcacaggaaaccugaucgcuccccggggcuauuucaagauucgcucuggaaagagcuccaucaugagaucugacgccccuauugggaaauguaauagcgaaugcaucacccccaacggcuccaucccgaaugacaagccuuuucagaacguuaaucggauuaccuacggcgccuguccccgcuaugugaaacagaacacacuuaagcuggcgacggggaugagaaaugugccugagaaacaaacccggggaaucuucggcgccauugcuggguuuaucgaaaacggaugggagggcauggucgaugggugguacggauuccgccaccagaauagcgagggcacaggccaggccgcugaccucaagucuacccaagccgccauuaaccagaucaaugggaaacugaacagacuuaucgaaaagacaaaugagaaguuucaucagauugaaaaagaguucuccgaaguggagggacggauccaggaucuggagaaguauguugaagacaccaaaauugaucucuggagcuacaacgcugagcugcugguggcgcucgaaaaccaacacacgaucgaccugacagauucugagaugaauaaacuuuucgaaagaaccaagaagcagcugcgcgagaacgccgaggacaugggcaaugggugcuuuaagauuuaucauaaaugugauaacgcuugcaucggauccauucggaauggcaccuacgaccacgaugucuacagagacgaagcccucaacaaucgcuuccagaucaaggggguggagcugaaaagcggcuauaaggacuggauccuuuggauuuccuuugccaucucuugcuuccugcucuguguugugcugcugggauuuauuaugugggcuugccagaaaggcaacauccgguguaauauuugcaucuga

SEQ ID NO: 192452 - RNA, 1701 nt, Artificial Sequence
  derived and/or modified CDS sequence (opt5) from hemagglutinin__InfluenzaA__ABB02991
augaagaccaucauugcccugagcuacauccucugccugguguucgcucagaaacuucccggcaacgacaauuccacagccacgcugugucucgggcaccaugcggucccuaacggaacccugguuaagacaauuaccaaugaucaaaucgaggugacaaacgcuaccgaacuugugcagucuagcuccacaggcagaauuugcgacaauccgcaccagauccuggauggggagaacuguacccucaucgacgcccugcugggagauccccauugcgacggcuuucagaauaaagaaugggaucucuucgucgagcggucuaaggccuauagcaacuguuacccuuaugacgugcccgauuacgcuucccugcgcucucuuguugccagcuccgggacgcuggaauuuaauaacgagagcuucaauuggaccggaguggcucaaaacggcacaucuuccgccugcaaaagacggagcaauaaguccuuuuucucucgccucaacuggcugcaccagcuuaaguauaaauacccugcgcugaaugucaccaugcccaacaacgagaaguuugacaaacucuauauuuggggcgugcaucacccuagcacagauucugaccagaucucccuguacgcccaggcuagcgggagaguuaccguguccacgaagcggucucaacagacagucauuccgaauaucggaagccgccccugggugagaggcguguccagcauuaucucuauuuacuggaccaucgucaaaccuggggauauccugcucauuaacuccacaggaaaucugaucgcuccccggggcuauuucaagauucgcagcgggaagucuagcaucaugagauccgacgccccuauuggaaaauguaacucugaaugcaucacccccaauggcagcaucccgaacgacaagccuuuucagaauguuaaccggauuaccuacggcgccuguccccgcuaugugaaacagaauacacuuaagcuggcgacggggaugagaaacgugccugagaaacaaacccggggaaucuucggcgccauugcuggguuuaucgaaaauggaugggagggcauggucgaugggugguacggauuccgccaccagaacuccgagggcacaggccaggccgcugaccucaagagcacccaagccgccauuaaucagaucaacgggaaacugaauagacuuaucgaaaagacaaacgagaaguuucaucagauugaaaaagaguucucugaaguggagggacggauccaggaucuggagaaguauguugaagacaccaaaauugaucucugguccuacaacgcugagcugcugguggcgcucgaaaaucaacacacgaucgaccugacagauagcgagaugaacaaacuuuucgaaagaaccaagaagcagcugcgcgagaaugccgaggacaugggcaacgggugcuuuaagauuuaucauaaaugugauaaugcuugcaucggaucuauucggaacggcaccuacgaccacgaugucuacagagacgaagcccucaauaaccgcuuccagaucaaggggguggagcugaaauccggcuauaaggacuggauccuuuggauuagcuuugccaucuccugcuuccugcucuguguugugcugcugggauuuauuaugugggcuugccagaaaggcaauauccgguguaacauuugcaucuga

SEQ ID NO: 192453 - RNA, 1701 nt, Artificial Sequence
  derived and/or modified CDS sequence (opt5) from hemagglutinin__InfluenzaA__ABB03002
augaagaccaucauugcccugagcuacauccucugccugguguucgcucagaaacuucccggcaacgacaauuccacagccacgcugugucucgggcaccaugcggucccuaacggaacccugguuaagacaauuaccaaugaucaaaucgaggugacaaacgcuaccgaacuugugcagucuagcuccacaggcagaauuugcaauucuccgcaccagauccuggacggggagaacuguacccucaucgaugcccugcugggagacccccauugcgauggcuuucagaauaaagaaugggaccucuucgucgagcggagcaaggccuauuccaacuguuacccuuaugaugugcccgacuacgcuucucugcgcagccuuguugccuccagcgggacgcuggaauuuaauaacgagucuuucaauuggaccggaguggcucaaaacggcacauccagcgccugcaaaagacggucuaauaaguccuuuuucagccgccucaacuggcugcaccagcuuaaguauaaauacccugcgcugaaugucaccaugcccaacaacgagaaguuugauaaacucuauauuuggggcgugcaucacccuucuacagacuccgaucagaucagccuguacgcccaggcuuccgggagaguuaccgugucuacgaagcggagccaacagacagucauuccgaauaucggauccggccccugggugcgcggggugagcucuagaauuuccaucuacuggaccauugucaaaccuggagacauccugcucaucaacagcacaggcaaucugauugcuccccggggguauuucaagauccgcucuggaaagagcuccauuaugagaucugaugccccuaucggcaaauguaacagcgaaugcauuacccccaauggcuccaucccgaacgacaagccuuuucagaauguuaaccggaucaccuacggggccuguccccgcuaugugaaacagaauacacuuaagcuggcgacgggaaugagaaacgugccugagaaacaaacccggggcauuuucggggccaucgcuggauuuauugaaaauggcugggaggggauggucgacggaugguacggcuuccgccaccagaacagcgagggcacagggcaggccgcugaucucaagucuacccaagccgccaucaaucagauuaacggaaaacugaauagacuuaucgaaaagacaaacgagaaguuucaucagaucgaaaaagaguucuccgaaguggagggccggauucaggaccuggagaaguauguugaagauaccaaaaucgaccucuggagcuacaacgcugagcugcugguggcgcucgaaaaucaacacacgauugaucugacagacucugagaugaacaaacuuuucgaaagaaccaagaagcagcugcgcgagaaugccgaggauauggggaacggaugcuuuaagaucuaucauaaaugugacaaugcuugcauuggcuccauccggaacgggaccuacgaucacgacgucuacagagaugaagcccucaauaaccgcuuccagauuaagggcguggagcugaaaagcggauauaaggacuggauccuuuggaucuccuuugccauuucuugcuuccugcucuguguugugcugcugggcuuuaucaugugggcuugccagaaagggaauauucgguguaacaucugcauuuga

SEQ ID NO: 192454 - RNA, 1701 nt, Artificial Sequence
  derived and/or modified CDS sequence (opt5) from hemagglutinin__InfluenzaA__ABB03013
augaagaccaucauugcccugagcuacauccucugccugguguucgcucagaaacuucccggcaacgacaauuccacagccacgcugugucucgggcaccaugcggucccuaacggaacccugguuaagacaauuaccucugaucaaaucgaggugacaaaugcuaccgaacuugugcagagcuccucuacaggcagaauuugcgacagcccgcaccggauccuggauggggagaacuguacccucaucgacgcccugcugggagauccccauugcgacggcuuucagaauaaagaaugggaucucuucgucgagcgcuccaaggccuauucuaacuguuacccuuaugacgugcccgauuacgcuagccugagaucccuuguugccagcucugggacgcuggaauuuaauaacgaguccuucaauuggaccggaguggcucagaacggcaccagcuuugccugcaaacggcgcucuauuaaguccuucuuuagcagacucaauuggcugcaccaacuuaaguauaaauacccugcgcugaacgucacaaugcccaauaacgacaaguucgauaaacucuauaucuggggcgugcaucacccugggacagacucugaucagaccucccuguacgcccaggcuagcggacggguuacgguguccacaaagcgcucucagcaaaccgucauuccgaauaucggcagcgggcccugggugagaggaguguccagccggauuucuaucuacuggacaauugucaaaccuggcgacauccugcucaucaacuccaccgggaaccugauugcccccagaggauauuuuaagaucagaagcggcaagucuagcauuaugcgguccgacgcuccuaucggcaaauguaauucugagugcauuacccccaacgggagcaucccgaaugauaagccuuuccagaacguuaaucgcaucacauacggagccugucccagauaugugaaacagaacacgcuuaagcuggcgaccggcaugcggaaugugccugaaaaacagacacgcgggauuuuuggagccaucgcuggcuucauugagaacgggugggaaggaauggucgacggcugguacggcuuuagacaccaaaauuccgaggggaccggacaggccgcugaucucaagagcacacaggccgccaucaaccaaauuaauggcaaacugaaccggcuuaucgagaagaccaaugaaaaguuccaucagaucgagaaagaguucacggaaguggaagggcgcauucaggaccuggagaaguauguugaggauacaaaaaucgaccucuggucuuacaacgcugaacugcugguggcgcucgagaaucagcacaccauugaucugaccgacuccgaaaugaacaaacuuuuugagcgcacacggaagcaacugagagaaaacgccgaggauaugggaaauggcugcuucaagaucuaucauaagugugacaacgcuugcauugggagcauccgcaauggcaccuacgaucacgacgucuaccgggacgaggcccucaacaauagauuucagauuaaaggaguggaacugaagucuggcuauaaagauuggauccuuuggaucuccuucgccacaagcugcuuucugcucuguguugugcugcugggguucauuaugugggcuugccagaagggaaacauccgcuguaauauuugcaucuga

SEQ ID NO: 192455 - RNA, 1701 nt, Artificial Sequence
  derived and/or modified CDS sequence (opt5) from hemagglutinin__InfluenzaA__ABB03024
augaagaccaucauugcccugagcuacauccucugccugguguucgcucagaaacuucccggcaacgacaauuccacagccacgcugugucucgggcaccaugcggucccuaacggaacccugguuaagacaauuaccaaugaucaaaucgaggugacaaacgcuaccgaacuugugcagucuagcuccacaggcagaauuugcgacucuccgcaccagauccuggauggggagaauuguacccucaucgacgcccugcugggagauccccauugcgacggcuuucagaacaaagaaugggaucucuucgucgagcggagcaaggccuauuccaauuguuacccuuaugacgugcccgauuacgcuucucugcgcagccuuguugccuccagcgggacgcuggaauuuaacaaugagucuuucaacuggaccggaguggcucaaaauggcacauccagcgccugcaaaagacggucuaacaaguccuuuuucagccgccucaauuggcugcaccagcuuaaguauaaauacccugcgcugaacgucaccaugcccaauaacgagaaguuugacaaacucuauauuuggggcgugcaucacccuucuacagauuccgaccagaucagccuguacgcccaggcuuccgggagaguuaccgugucuacgaagcggagccaacagacagucauuccgaacaucggaucccgccccuggauuagaggcgugagcucucggaucuccauuuacuggaccaucgugaaaccuggggauauccugcucauuaauagcacaggaaaccugaucgcuccccgcggcuauuucaagauuagaucuggaaagagcuccaucaugcggucugacgccccuauugggaaauguaauagcgaaugcaucacccccaacggcuccaucccgaaugacaagccuuuucagaacgucaaucgcauuaccuacggcgccugucccagauauguuaaacagaacacacuuaagcuggcgacggggaugcggaaugugccugagaaacaaacccgcggaaucuucggcgccauugcuggguuuaucgaaaacggaugggagggcaugguggaugggugguacggauucagacaccagaauagcgagggcacaggccaggccgcugaccucaagucuacccaagccgccauuaaccagaucaaugggaaacugaaccggcuuaucgaaaagacaaaugagaaguuucaucagauugaaaaagaguucuccgaagucgagggaagaauccaggaucuggagaaguauguggaagacaccaaaauugaucucuggagcuacaacgcugagcugcugguugcgcucgaaaaccaacacacgaucgaccugacagauucugagaugaauaaacuuuucgaacgcaccaagaagcagcugcgggagaacgccgaggacaugggcaaugggugcuuuaagauuuaucauaaaugugauaacgcuugcaucggauccauuagaaauggcaccuacgaccacgauguguaccgcgacgaagcccucaacaaucgguuccagaucaagggggucgagcugaaaagcggcuauaaggacuggauccuuuggauuuccuuugccaucucuugcuuccugcucugugugguucugcugggauuuauuaugugggcuugccagaaaggcaacaucagauguaauauuugcaucuga

SEQ ID NO: 192456 - RNA, 1701 nt, Artificial Sequence
  derived and/or modified CDS sequence (opt5) from hemagglutinin__InfluenzaA__ABB03035
augaagaccaucauugcccugagcuacauccucugccugguguucgcucagaaacuucccggcaacgacaauuccacagccacgcugugucucgggcaccaugcggucccuaacggaacccugguuaagacaauuaccucugaucaaaucgaggugacaaaugcuaccgaacuugugcagagcuccucuacaggcagaauuugcgacagcccgcaccggauccuggauggggagaacuguacccucaucgacgcccugcugggagauccccauugcgacggcuuucagaauaaagaaugggaucucuucgucgagcgcuccaaggccuauucuaacuguuacccuuaugacgugcccgauuacgcuagccugagaucccuuguugccagcucugggacgcuggaauuuaauaacgaguccuucaauuggaccggaguggcucagaacggcaccagcuuugccugcaaacggcgcucuauuaaguccuucuuuagcagacucaauuggcugcaccaacuuaaguauaaauacccugcgcugaacgucgccaugcccaauaacgacaaguucgauaaacucuauaucuggggcgugcaucacccugggacagacucugaucagacaucccuguacgcucaggccagcggacggguuaccguguccacgaagcgcucucagcaaacagucauuccgaauaucggcagcagacccugggugcgcgggguguccagccggauuucuaucuacuggaccauugucaaaccuggagacauccugcucaucaacuccacaggcaaccugauugcucccagaggguauuuuaagauccggagcggaaagucuagcauuaugcgcuccgacgccccuaucggcaaauguaauucugagugcauuacccccaacggcagcaucccgaaugauaagccuuuccagaacguuaauagaaucaccuacggggcguguccccgguaugugaaacagaacacacuuaagcuggccacgggaaugcgcaaugugccugaaaaacagaccagaggcauuuuuggggcuaucgccggauucauugagaacggcugggaagggauggucgacggaugguacggcuuucggcaccaaaauuccgagggcacagggcaggcugccgaucucaagagcacccaggccgcuaucaaccaaauuaauggaaaacugaacagacuuaucgagaagacaaaugaaaaguuccaucagaucgagaaagaguucaccgaaguggaaggccgcauucaggaccuggagaaguauguugaggauacgaaaaucgaccucuggucuuacaacgcggaacugcugguggcccucgagaaucagcacacaauugaucugaccgacuccgaaaugaacaaacuuuuugagcggaccagaaagcaacugcgcgaaaacgcugaggauauggggaauggaugcuucaagaucuaucauaagugugacaacgccugcauuggcagcauccggaaugggacauacgaucacgacgucuacagagacgaggcccucaacaaucgcuuucagauuaaaggcguggaacugaagucuggauauaaagauuggauccuuuggaucuccuucgcuaccagcugcuuucugcucuguguugugcugcugggcuucauuaugugggccugccagaaggggaacauccgguguaauauuugcaucuga

SEQ ID NO: 192457 - RNA, 1701 nt, Artificial Sequence
  derived and/or modified CDS sequence (opt5) from hemagglutinin__InfluenzaA__ABB03046
augaagaccaucauugcccugagcuacauccucugccugguguucgcucagaaacuucccggcaacgacaauuccacagccacgcugugucucgggcaccaugcggucccuaacggaacccugguuaagacaauuaccaaugaucaaaucgaggugacaaacgcuaccgaacuugugcagucuagcuccacaggcagaauuugcgacucuccgcaccagauccuggauggggagaauuguacccucaucgacgcccugcugggagauccccauugcgacggcuuucagaacaaagaaugggaucucuucgucgagcggagcaaggccuauuccaauuguuacccuuaugacgugcccgauuacgcuucucugcgcagccuuguugccuccagcgggacgcuggaauuuaacaaugagucuuucaacuggaccggaguggcucaaaauggcacauccagcgccugcaaaagacggucuaacaaguccuuuuucagccgccucaauuggcugcaccagcuuaaguauaaauacccugcgcugaacgucaccaugcccaauaacgagaaguuugacaaacucuauauuuggggcgugcaucacccuucuacagauuccgaccagaucagccuguacgcccaggcuuccgggagaguuaccgugucuacgaagcggagccaacagacagucauuccgaacaucggaucccgccccugggugagaggcgugagcucugggauuuccaucuacuggaccauugucaaaccuggagauauccugcucaucaauagcacaggcaaccugauugcuccccggggguauuucaagauccgcucuggaaagagcuccauuaugagaucugacgccccuaucggcaaauguaauagcgaaugcauuacccccaacggcuccaucccgaaugacaagccuuuucagaacguuaaucggaucaccuacggggccuguccccgcuaugugaaacagaacacacuuaagcuggcgacgggaaugagaaaugugccugagaaacaaacccggggcauuuucggggccaucgcuggauuuauugaaaacggcugggaggggauggucgauggaugguacggcuuccgccaccagaauagcgagggcacagggcaggccgcugaccucaagucuacccaagccgccaucaaccagauuaauggaaaacugaacagacuuaucgaaaagacaaaugagaaguuucaucagaucgaaaaagaguucuccgaaguggagggccggauucaggaucuggagaaguauguugaagacaccaaaaucgaucucuggagcuacaacgcugagcugcugguggcgcucgaaaaccaacacacgauugaccugacagauucugagaugaauaaacuuuucgaaagaaccaagaagcagcugcgcgagaacgccgaggacauggggaauggaugcuuuaagaucuaucauaaaugugauaacgcuugcauuggcuccauccggaaugggaccuacgaccacgaugucuacagagacgaagcccucaacaaucgcuuccagauuaagggcguggagcugaaaagcggauauaaggacuggauccuuuggaucuccuuugccauuucuugcuuccugcucuguguugcucugcugggcuuuaucaugugggccugccagaaagggaacauucgguguaauaucugcauuuga

SEQ ID NO: 192458 - RNA, 1701 nt, Artificial Sequence
  derived and/or modified CDS sequence (opt5) from hemagglutinin__InfluenzaA__ABB03057
augaagaccaucauugcccugagcuacauccucugccugguguucgcucaggagcuucccggcaacgacaauuccacagccacgcugugucucgggcaccaugcggucccuaacggaaccauuguuaaaacaaucaccaaugaucaaauugaagugacaaacgcuaccgagcuggugcagucuagcuccacaggcgggaucugcgacucuccgcaccagauccuugauggagaaaauuguacccugauugacgcccuccugggcgauccccagugcgacggguuucaaaacaagaaaugggaucuguucgucgagagaagcaaggccuauuccaauuguuacccuuaugacgugcccgauuacgcuucucuccggagccugguugccuccagcggaacgcuugaauuuaacaaugagucuuucaacuggaccggcgugacacagaauggcaccuccagcgcuugcaaacgcagaucuaacaauuccuuuuucagccggcugaacuggcucacacaucugaaguuuaaguauccugcccuuaaugucaccaugcccaacaacgagaaauucgacaagcuguacaucuggggagugcaccauccugggacggauaaugaccagacaucucucuaugcgcaggccuccggccgcauuaccguuagcacaaaaagaucccaacagaccgugaucccgaacauugggucucggccccgcgucagagauaucccuagccggauuuccaucuacuggaccaucgugaagcccggagacauucugcugaucaauagcacaggcaaccucauugcuccucgcggguacuuuaaaaucagaucuggaaaguccagcauuaugcggucugacgcccccaucggcaaguguaauagcgaaugcaucacgccgaacggcuccauuccuaaugauaaacccuuccagaacgugaaucgcaucaccuauggggcuuguccuagauacgucaagcagaacacacugaaacuugccaccggaaugcggaauguucccgagaagcaaacacgcggcauuuuuggggcgaucgccggauucauugaaaacggcugggaggggaugguggacggaugguauggcuuuagacaccaaaauucugagggcaucgggcaggcugccgaucugaaaagcacccaggcugccaucaaccagauuaauggaaagcucaaccggcugaucggcaaaacgaacgaaaaguuccaccagauugagaaggaguucuccgaaguggaagggagaauccaggaccuugagaaauacgucgaggauacaaagauugaccuguggagcuauaaugccgaacuccugguggcucuggagaaccaacauaccaucgaucucaccgacucugaaaugaauaaacuguuugagcgcacaaagaaacagcuucgggaaaacgcggaggauaugggaaauggcugcuucaagauuuaccacaagugugacaacgccugcaucggguccaucagaaauggcaccuaugaucaugacguuuaccgcgacgaggcucugaacaaucgguuucagauuaaaggaguggaacucaagcugggcuacaaagauuggauccuuuggauuagcuucgccaucucuugcuuucugcucugugucgcccugcugggguucauuaugugggcuugccagaagggaaacaucagauguaauaucugcauuuga

SEQ ID NO: 192459 - RNA, 1701 nt, Artificial Sequence; identical to SEQ ID NO: 192358
  derived and/or modified CDS sequence (opt5) from hemagglutinin__InfluenzaA__ABB03068

SEQ ID NO: 192460 - RNA, 1701 nt, Artificial Sequence; identical to SEQ ID NO: 192315
  derived and/or modified CDS sequence (opt5) from hemagglutinin__InfluenzaA__ABB03079

SEQ ID NO: 192461 - RNA, 1701 nt, Artificial Sequence; identical to SEQ ID NO: 192315
  derived and/or modified CDS sequence (opt5) from hemagglutinin__InfluenzaA__ABB03090

SEQ ID NO: 192462 - RNA, 1698 nt, Artificial Sequence
  derived and/or modified CDS sequence (opt5) from hemagglutinin__InfluenzaA__ABB03101
augaaggugaaacugcucauccugcuuugcaccuucacagccacguacgcugacaccauuuguaucggcuaucacgccaacaauagcacagauaccgucgacacaguucuggagaagaacgugaccgugacacauuccgucaaucuccuggaagauucucacaacgggaaacuuugccugcucaagggaauugcgccccugcagcugggcaauuguagcguggcuggguggauccucggaaacccugagugcgaacugcuuauuuccaaagagucuuggagcuacaucguugaaaccccgaaucccgagaacggcgccuguuauccuggguacuuugccgacuaugaggaacugagagagcaacucuccucugugagcuccuucgaacgguuugagaucuuccccaaaaagagcucuuggccuaaucauacggucaccggaguguccgcuagcugcucucacaacggcaaguccagcuuuuaccgcaaucugcuuuggcugacaggcaagaacgggcucuaucccaaucugucuaaauccuacgccaacaauaaggagaaagaaguucugauucucuggggagugcaucacccuccgaacaucggcgaucagagaacccuguaccacacagagaacgcuuaugucagcgugguguccucucauuacagccggcgcuucacccccgaaauuacgaagagaccuaagguccgggaccaggaggggcgcaucaauuauuacuggacacuucuggaacccggagauaccauuaucuuugagacaaacggcaaucucauugccccuugguaugcguucgcccuguccagaggguuuggaagcggcaucaucaccucuaacgcucccauggacgagugugaugccaaaugccagaccccgcaaggcgcuauuaauuccagccuuccuuuccagaacguucaccccgugacaaucggggaauguccuaaguacgugcggucugccaaacugcgcauggucacgggacucagaaauauucccagcauccagucccggggccuguuuggggcgauugccggauucaucgagggcggguggaccggaaugguggacggcugguauggcuaccaucaccagaacgaacaagggucuggauacgcugccgaucaaaagagcacacagaaugcuaucaacggcauuaccaauaaaguuaacuccgugaucgagaagaugaauacacaguuuaccgccgucgggaaagaguucaacaagcuggaacgcagaauggagaaucucaacaagaaaguggacgauggauuccuggacauuuggacguauaacgccgaacuucugguucuccuggagaaugaacggacacuugacuuucacgauagcaacgugaagaaucuguacgagaaagucaagucucagcucaaaaacaaugcuaaggaaaucggcaacgggugcuucgaguuuuaucauaaguguaauaacgagugcauggaauccgugaaaaauggcaccuacgacuaucccaaguacagcgaggaaucuaaacugaaccgcgagaagauugauggagucaaacuggacuccaugggcguguaucagauccucgcgaucuacagcaccguugccuccucucuggugcuucuggucagccucggggcuauuuccuucuggaugugcucuaauggaagccugcaguguagaaucugcauuuga

SEQ ID NO: 192463 - RNA, 1701 nt, Artificial Sequence
  derived and/or modified CDS sequence (opt5) from hemagglutinin__InfluenzaA__ABB03112
augaagaccaucauugcccugagcuacauccucugccugguguucgcucagaaacuucccggcaacgacaauuccacagccacgcugugucucgggcaccaugcggucccuaacggaaccauuguuaagacaaucaccaaugaucaaauugaggugacaaacgcuaccgaacuggugcagucuagcuccacaggcgggaucugcgacucuccgcaccagauccuugauggagagaauuguacccugauugacgcccuccugggcgauccccagugcgacggguuucaaaacaaaaagugggaucuguucgucgaaagaagcaaagccuauuccaauuguuacccuuaugacgugcccgauuacgcuucucuccggagccugguugccuccagcggaacgcuugaguuuaacaaugaaucuuucaacuggaccggcgugacacagaauggcaccuccagcgcuugcaagcgcagaucuaacaaguccuuuuucagccggcugaauuggcucacacaucugaaauauaaguacccugcccuuaacgucaccaugcccaauaacgagaaauuugacaagcuguauaucuggggagugcaccauccugggacggauucugaccagauuucccucuacgcgcaggccagcggccgcaucacaguuuccaccaaaagaucucaacagacagugauuccgaacaucgggagccggccccgcgucagagauguguccagccggauuucuaucuacuggaccaucgugaagccuggagacauucugcugaucaauuccaccggcaaccucauugcuccccgcggguauuucaagaucagaagcggaaaaucuagcauuaugcgguccgacgccccuaucggcaaguguaauucugagugcaucacacccaacggcagcauuccgaaugauaaaccuuuucagaacgucaauaagaucacguacggggcuuguccccgcuauguuaaacagaacacccugaagcuggccacaggaaugagaaaugugccugaaaaacaaacccggggcauuuucggggcgaucgccggauuuauugagaacggcugggaagggaugguggacggaugguacggcuuccgccaccagaacuccgagggcacagggcaggcugccgaucuuaagagcacccaagcugccaucaaccagaucaauggaaagcucaacagacugauuggcaaaacgaaugagaaguuucaccagaucgaaaaagaguucucugaagucgaggggcggauucaggaccuugaaaaguauguggaggauacaaaaaucgaccugugguccuacaacgccgagcuccugguugcucuggaaaaccaacauaccauugaucucaccgacagcgagaugaauaagcuguucgaaagaacaaagaaacagcuucgcgagaacgcggaagauaugggaaauggcugcuuuaagaucuaucacaaaugugacaauaccugcauugagucuauccggaaugggacauacgaucaugacguguacagagacgaggcccugaacaaucgcuuccagaucaagggcgucgaacucaaauccggauauaaggauuggauucuguggaucagcuuugcuauuuccugcuuccuucuguguguggcccuccugggcuuuaucaugugggccugccagaaggggaacauucgguguaauaucugcaucuga

SEQ ID NO: 192464 - RNA, 1698 nt, Artificial Sequence
  derived and/or modified CDS sequence (opt5) from hemagglutinin__InfluenzaA__ABB03123
augaaggugaaacugcucguccugcuuugcaccuucacagccacguacgcugacaccaucuguauuggcuaucacgccaacaauagcacagauaccguugacacagugcuggagaagaacgugaccgucacacauuuugugaaucuccuggaagauucccacaacgggaaacuuugccugcucaagggaaucgcgccccugcagcugggcaauuguucuguugcuggguggauucucggaaacccugagugcgaacugcuuaucagcaaagaguccuggucuuacauuguggaaaccccgaaucccgagaacggcacguguuauccuggguacuucgccgacuaugaggaacugagagagcaacucagcuccgucucuagcuuugaacgguucgagaucuuucccaaggaguccagcuggccuaaucauaccgugacaggaguuucugccuccugcagccacaacggcaagucuuccuucuaccgcaaucugcuuuggcugaccggcaaaaacgggcucuaucccaaucugagcaagucuuacgcuaacaauaaagaaaaggaggugcugguccucuggggagugcaucacccuccgaacaucggcgaucagagagcccuguaccacacagaaaacgcuuauguguccgucguuagcucccauuacucucggcgcuuuacccccgagauugccaaaagaccuaaggugcgggaccaggaagggcgcaucaauuauuacuggacgcuucuggagcccggagauacaauuaucuucgaggcgaacggcaaucucauugccccuagauaugcuuuugcccugagccggggguucggauccggcaucauuaccagcaacgcucccauggacgaaugugaugccaagugccagacaccgcaaggcgcgaucaauucuucccuuccuuuucagaacgugcaccccgucaccaucggggaguguccuaaauacgugcgcagcgccaagcugagaaugguuaccggacuccggaauauucccucuauccagagccgcggccuguucggggcuauugccggauuuaucgaaggcggguggacaggaaugguggacggcugguauggcuaccaucaccagaacgagcaaggguccggauacgcugccgaucagaaaucuacgcagaaugccauuaacggcaucaccaauaaggucaacagcgugaucgaaaagaugaauacacaguucaccgcuguugggaaagaguucaacaaacuggagagacggauggaaaaucucaacaagaagguggacgauggauuucuggacauuuggacauauaacgcggagcuucugguccuccuggaaaaugagcgcacccuugacuuccacgauuccaacgugaaaaaucuguacgaaaaggucaaaagccaacucaagaacaaugccaaagagaucggcaacgggugcuuugaguucuaucauaaguguaaugacgaaugcauggagucugugaagaacggcacguacgauuaucccaaauacuccgaagagagcaagcugaauagagagaaaauugacggaguuaagcuggaaucuaugggcguguaucagauccucgcuauuuacuccacagucgccagcucccuggugcuucugguuucucucggggccaucagcuuuuggaugugcuccaacggaucucugcagugucggaucugcauuuga

SEQ ID NO: 192465 - RNA, 1698 nt, Artificial Sequence
  derived and/or modified CDS sequence (opt5) from hemagglutinin__InfluenzaA__ABB03134
augaaggugaaacugcucauccugcuuugcaccuucacagccacguacgcugacaccauuuguaucggcuaucacgccaacaauagcacagauaccgucgacacaguucuggagaagaacgugaccgugacacauuccgucaaucuccuggaagauucucacaacgggaaacuuugccugcucaagggaauugcgccccugcagcugggcaauuguagcguggcuggguggauccucggaaacccugagugcgaacugcuuauuuccaaagagucuuggagcuacaucguugaaaccccgaaucccgagaacggcacguguuauccuggguacuuugccgacuaugaggaacugagagagcaacucuccucugugagcuccuucgaacgguuugagaucuuccccaaggagagcucuuggccuaaucauaccgucacaggaguguccgccagcugcucucacaacggcaaguccagcuuuuaccgcaaucugcuuuggcugaccgagaaaaacggccucuaucccacacugucuaaguccuacgcuaauaacaaagaaaaggaaguucugauucucuggggagugcaucacccuccgaauaucggggaucagagaacccuguaccacacggagaacgccuaugucagcgugguguccucucauuacagccggcgcuucacacccgaaauuaccaaaagaccuaagguccgggaccaggagggccgcaucaacuauuacuggacacuucuggagcccggggauaccauuaucuuugaagcuaauggaaaccucauugccccuugguaugcguucgcccuguccagaggcuuugggagcggaaucaucaccucuaaugcucccauggacgagugugaugccaagugccagacaccgcaaggcgcuauuaacuccagccuuccuuuccagaauguucaccccgugacgaucggcgaauguccuaaauacgugcggucugccaagcugcgcauggucaccgggcucagaaacauucccagcauccagucccggggacuguuuggcgcgauugccggguucaucgagggaggcuggacagggaugguggacggaugguauggcuaccaucaccagaaugaacaaggcucuggguacgcugccgaucagaaaagcacccagaacgcuaucaauggaauuacaaacaagguuaauuccgugaucgagaaaaugaacacccaguuuacggccgucggcaaggaguucaauaaacuggaacgcagaauggagaaccucaauaagaagguggacgauggguuccuggacauuuggacauauaacgccgaacuucugguucuccuggagaacgaacggacccuugacuuucacgauagcaaugugaaaaaccuguacgagaaggucaaaucucaacucaagaauaacgcuaaagagaucggaaauggcugcuucgaauuuuaucauaaguguaacaaugagugcauggaauccgugaagaacgggaccuacgacuaucccaaauacagcgaggagucuaagcugaaucgcgagaaaauugauggcgucaagcuggaauccaugggaguguaucagauccucgcgaucuacagcacaguugccuccucucuggugcuucuggucagccucggcgcuauuuccuucuggaugugcucuaacgggagccugcaguguagaaucugcauuuga

SEQ ID NO: 192466 - RNA, 1698 nt, Artificial Sequence; identical to SEQ ID NO: 192371
  derived and/or modified CDS sequence (opt5) from hemagglutinin__InfluenzaA__ABB03145

SEQ ID NO: 192467 - RNA, 1701 nt, Artificial Sequence
  derived and/or modified CDS sequence (opt5) from hemagglutinin__InfluenzaA__ABB04283
augaagaccaucauugcccugagcuacaucuucugccucguguuugcucagaaccugcccggcaaugacaacuccacagccacgcuuugucuggggcaccaugcggucccuaauggaacccucguuaaaacaauuaccaacgaucaaaucgaggugacaaaugcuaccgaacuggugcagucuagcuccacaggcagaauuugcgacucuccgcaccggauccuugaugggaagaacuguacccugaucgacgcccuccugggagauccccauugcgacggcuuccagaaugagaaaugggaucuguuugucgaacgcagcaaggccuucuccaacuguuauccuuacgacgugcccgauuaugcuucucucagaagccugguugccuccagcgggacgcuugaguuuauuaaugaaggauucaacuggaccggcgugacacagucuggcggguccuacgcuugcaaacggggaagcgacaagucuuucuucucccgccugaauuggcucuaugagagcgagucuaaguacccugcccugaacgucaccaugcccaauaacggcaauuuugauaaacuuuauaucuggggagugcaccauccuuccacagacaaggaacaaaccaaccuguacguuagagcgagcgggcgggugacggucuccacaaaacgcucucagcagaccauuaucccgaacauuggccccagaccuugggugcgggggcucagcucccgcaucagcauuuacuggacaaucgugaagcccggagauauccugcugauuaauucuuccggcaaccucaucgccccuagaggcuauuucaaaauucggaccggaaagagcucuaucaugcgcagcgacgcucccauugggaccuguuccucugagugcaucacaccgaauggcagcaucccuaacgacaagcccuuucagaaugucaacaaaauuacguacggggccuguccuaaguauguuaaacaaaauacccugaagcuggcuacaggaaugagaaacauccccgaaaaacagacccggggcauuuucggggccaucgcgggauuuauugagaauggcugggagggcaugguggaugggugguacggauuccgccaccagaacuccgaaggcacagggcaggccgcugaccuuaagagcacccaagccgcuaucgaucagaucaauggaaaacucaacagagugauugagaagacgaaugaaaaguuccaccagaucgagaaagaauuuucugaggucgagggccggauucaagaccuggaaaaguauguggaggauacaaaaaucgaccuuugguccuacaacgccgaacugcucguugcccuggagaaucagcauaccauugaucugaccgacagcgaaaugaacaagcucuuugagaaaacaagacgccagcugcgggagaacgcugaagauauggggaauggcugcuuuaagaucuaucacaagugugacaacgcgugcauuggaucuaucagaaauggcaccuacgaucaugacguguaccgcgacgaggcccuuaacaaucgguuccagaucaaaggggucgaacugaaguccggauauaaagauuggauucucuggaucagcuuugcuauuuccugcuuccugcuuugugugguucugcucggcuuuaucaugugggccugccaaaaggggaacauuagauguaauaucugcaucuga

SEQ ID NO: 192468 - RNA, 1701 nt, Artificial Sequence
  derived and/or modified CDS sequence (opt5) from hemagglutinin__InfluenzaA__ABB04294
augaagaccaucauugcccugagcuacaucuucugccucgugcugggccaggaccuucccgggaacgauaauuccacagcuacgcugugucucggacaccaugccgucccuaacggcacccugguuaaaacaauuaccaaugaccaaaucgaggugacaaacgcgaccgaacuugugcagucuagcuccacagggaagauuugcaauaacccgcacagaauccuggauggaaucaauuguacccucauugacgcucugcugggcgauccccauugcgacggguuucagaacgagaaaugggaucucuucgucgaacggucuaaggccuuuagcaauuguuauccuuacgacgugcccgauuaugccucccugcgcucucuuguugcuagcuccggaacgcuggaguucaucaacgaaggcuuuaauuggaccggcgugacacagaacgggggaagcaaugccugcaaaagaggcccugacucuggguucuuuucccggcucaacuggcuguacaagagcggaucuaccuaucccguccuuaaugugacaaugccuaacaacgauaauuucgacaagcuguacauuuggggcguucaccauccguccaccgaucaagagcagacgaaccucuaugugcaggcuagcgggcgcgucacagugucuaccaaaagaucccagcaaacaaucauucccaauaucggaagccggccuugggugcgcggccuguccucuagaauuagcaucuacuggaccaucgucaagcccggcgacauucugguuaucaacuccaaugggaaccucauugccccucggggauacuuuaaaaugcgcaccggcaagagcucuaucaugagauccgacgcgcccauugggacauguaucagcgagugcaucacgccgaauggaucuauuccuaacgauaaacccuuccagaaugugaacaagaucaccuauggcgccuguccuaaguacgugaaacagaauacacugaaacuugcuaccgggaugcggaacguccccgaaaagcagacacgcggaauuuuuggcgccaucgcuggcuucauugagaaugggugggaaggaaugaucgacggcugguauggguuuagacaccaaaacagcgagggaaccggccaggccgcggaucugaaguccacgcaggccgcuaucgaccaaauuaaugggaaacucaaccgggugaucgagaagacaaacgaaaaauuccaccagauugagaaggaguucucugaaguugaaggccgcauccaggaucuggagaaguacguggaggacaccaaaauugaucuuuggagcuauaaugccgaacugcucgucgcucuggagaaccagcauaccaucgaccugacagauuccgaaaugaauaagcucuuugagaaaaccagacggcaacugagagaaaacgccgaggacaugggaaauggcugcuucaagauuuaccacaaaugugauaacgccugcaucgggagcauccgcaauggaacauaugaccaugacguguaccgggaugaggcucuuaacaauagauuucagauuaagggcguugaacugaagucuggguacaaagacuggauccucuggauuuccuucgcgaucagcugcuuucugcuuugugugguccugcucggauucauuaugugggccugccagaagggcaacauccgcuguaauaucugcauuuga

SEQ ID NO: 192469 - RNA, 1701 nt, Artificial Sequence
  derived and/or modified CDS sequence (opt5) from hemagglutinin__InfluenzaA__ABB04305
augaagaccaucauugcccugagcuacaucuucugccucguguuugcucagaaacugcccgagaacgacaauuccacagccacgcuuugucugggccaccaugcggucccuaacgggacccucguuaagacaauuaccaaugaucaaaucgaagugacaaacgcuaccgagcuggugcagucuagcuccacaggaagaauuugcgacucuccgcaccggauccuugauggcaaaaauuguacccugaucgacgcccuccugggggauccccauugcgacggauuccagaacgaaaagugggaucuguuugucgagcgcagcaaagccuucuccaauuguuauccuuacgacgugcccgauuaugcuucucucagaagccugguugccuccagcggcacgcuugaauuuauuaacgagggguucaauuggaccggagugacacagucuggcggcuccuacgcuugcaagcgggggagcgucaacuccuuuuucucucgccugaauuggcucuauaagagcgagucuaaauacccugugcugaacguuaccaugcccaauaacggaaaguuugacaaacuuuauaucuggggcgugcaccauccuuccacagauaaggaacaaaccaaucuguacgucagagccagcgggaaagugacgguguccacaaagcggucucagcagaccgucauuccgaacaucggaagccgccccuggguuagaggccucuccagccggauuucuaucuacuggacaauugugaagccuggggacauccugcugaucaacuccaccggaaaucucauugcgccccgcggcuauuucaaaaucagaaccggcaagagcucuauuaugcggagcgaugccccuaucgggacauguuccucugagugcauuacgcccaacggaagcaucccgaaugacaaaccuuuucagaacgugaauaagaucaccuacggcgcuuguccccgcuaugucaaacaaaacacacugaagcuggccaccgggaugagaaaugugccugaaaaacagacacggggaauuuucggcgcuaucgccggguuuauugagaacggaugggagggcaugguugacggcugguacggguuccgccaccaaaauuccgaaggaaccggccaggcggccgaucuuaagagcacgcaggcugccaucgaccagauuaacgggaagcucaauagacugaucgagaaaacaaacgaaaaguuccaccagaucgagaaagaauuuucugagguggagggacggauucaagaucuugaaaaguaugucgaggacaccaaaaucgaucugugguccuacaaugcugaacuccugguggcccuggagaaccagcauaccauugaccucacagauagcgaaaugaauaagcuguucgagaagaccagaaaacagcuucgcgagaacgccgaagacaugggcaacgggugcuuuaagaucuaucacaaaugugauaaugcuugcauuggcucuauccggaacggaacauacgaccaugauguuuacagagacgaggcgcugaauaaccgcuuccagauuaagggcguggaacucaaauccggguauaaggacuggauccuguggaucagcuuugccauuuccugcuuccuucugugugucgugcuccugggauuuaucaugugggcuugccaaaagggcaauauucgguguaacaucugcauuuga

SEQ ID NO: 192470 - RNA, 1701 nt, Artificial Sequence
  derived and/or modified CDS sequence (opt5) from hemagglutinin__InfluenzaA__ABB04316
augaagaccaucauugcccugagcuacaucuucugccucguguuugcucagaaacugcccggcaacgacaauuccacagccacgcuuugucuggggcaccaugcggucccuaacggaacccucguuaagacaauuaccaaugaucaaaucgaggugacaaacgcuaccgaacuggugcagucuagcuccacaggcagaauuugcgacucuccgcaccggauccuugaugggaaaaauuguacccugaucgacgcccuccugggagauccccauugcgacggcuuccagaacgagaagugggaucuguuugucgaacgcagcaaagccuauuccaauuguuacccuuaugacgugcccgauuacgcuucucucagaagccugguugccuccagcgggacgcuugaguucauuaacgaagacuuuaauuggaccggagugacacagucuggcggcuccuaugcuugcaagcgggggagcgucaagucuuucuuuucccgccugaacuggcuccacgagagcgaguacaaauauccugcccugaaugugaccaugcccaacaauggaaaguucgauaaacuuuacaucuggggcguucaucacccuucuacagacagagaacaaaccaaccuguacgugcgggcguccgggcgcgucacggugagcacaaagagaucccagcagaccgugauuccgaauaucggaucucggcccuggguccgcggccucagcuccagaauuagcaucuauuggacaauuguuaaaccuggggauauccugcugaucaacucuaccggaaaccucauugcuccccggggcuacuuuaagauccgcaccggcaaguccagcauuaugagaucugacgccccuaucgggacauguagcuccgagugcauuacgcccaauggaucuaucccgaacgacaaaccuuuccagaaugugaacaagaucaccuauggcgccuguccccgguacgugaaacaaaauacacugaaacuugcuaccgggaugcgcaacgucccugaaaagcagacaagaggaauuuuuggcgccaucgcgggguucauugagaauggaugggagggcaugguggauggcugguauggguuucggcaccagaacagcgaaggaaccggccaggccgcugaccugaaguccacgcaagccgcuaucgaucagauuaaugggaaacucaacagacugaucgagaagacaaaugaaaaguuccaucagaucgagaaagaguucagcgaaguugagggacgcauucaagaccuugaaaaguacguggaggauaccaaaaucgaccuguggucuuauaacgccgaacuccuggucgcccuggagaaucagcacaccauugaucucacagacuccgaaaugaacaagcuguuugagaaaacccggaagcagcuuagagagaaugcugaagauaugggcaacgggugcuucaagaucuaccauaaaugugacaacgcgugcauuggcagcauccgcaauggaacauacgaucacgacguguaucgggacgaggcccugaacaauagauuucagauuaagggcguugaacucaaaucuggguacaagaacuggauccuguggaucuccuucgcuauuagcugcuuucuucugugugugguccuccugggauucaucaugugggccugccaaaaaggcaauauucgcuguaacaucugcauuuga

SEQ ID NO: 192471 - RNA, 1701 nt, Artificial Sequence
  derived and/or modified CDS sequence (opt5) from hemagglutinin__InfluenzaA__ABB04327
augaagaccaucauugcccugagcuacaucuucugccucguguuugcucagaaacugcccggcaacgacaauuccacagccacgcuuugucuggggcaccaugcggucccuaacggaacccucguuaagacaauuaccaaugaucaaaucgaggugacaaacgcuaccgaacuggugcagucuagcuccacaggcagaauuugcgacucuccgcaccggauccuugaugggaaaaauuguacccugaucgacgcccuccugggagauccccauugcgacggcuuccagaacgagaagugggaucuguuugucgaacgcagcaaagccuucuccaauuguuauccuuacgacgugcccgauuaugcuucucucagaagccugguugccuccagcgggacgcuugaguuuauuaacgaaggauucaauuggaccggcgugacacagucuggcggguccuacgcuugcaagcggggaagcgucaacuccuuuuucucucgccugaauuggcucuauaagagcgaguacaaauauccugcccugaacgugaccaugcccaauaacggcaaguuugacaaacuuuacaucuggggaguucaccauccuucuacagagaaggaacaaaccaaucuguacgugagagcguccgggcgggucacggugagcacaaaacgcucccagcagaccgugauuccgaacaucggcucuauucccugggucagagggcucagcucccggaucagcauuuauuggacaaucguuaagccuggagauauccugcugauuaacucuaccggcaaucucaucgcuccccgcggcuacuucaagauuagaaccgggaaauccagcaucaugcggucugacgccccuauuggaacauguagcuccgagugcaucacgcccaacggcucuaucccgaaugauaagccuuuucagaacgugaauaaaauuaccuauggggccuguccccgcuacgugaagcaaaacacacugaaacuugcuaccggaaugagaaaugucccugaaaagcagacacggggcaucuucggggccauugcgggauuuaucgagaacggcugggagggcaugguggacgggugguauggauuccgccaccagaauagcgaaggcaccgggcaggccgcugaccugaaauccacgcaagccgcuauugaucagaucaacggaaagcucaauagacugaucgagaagacaaacgaaaaauuccaccagauugagaaggaauuuagcgagguugagggccggauccaagaccuugaaaaauacguggaggauaccaagauugaccuguggucuuauaaugccgaacuccuggucgcccuggagaaccagcauaccaucgaucucacagacuccgaaaugaauaaacuguucgagaagaccagaaagcagcuucgcgagaacgcugaagauauggggaacggcugcuuuaaaauuuaccacaagugugacaaugcgugcaucggaagcauucggaacggcacauacgaucaugacguguauagagaugaggcccugaauaaccgcuuccagaucaaagggguugaacucaagucuggauacaaagacuggauccuguggauuuccuuugcuaucagcugcuuccuucugugugugguccuccugggcuuuauuaugugggccugccaaaaggggaauauccgguguaacauuugcaucuga

SEQ ID NO: 192472 - RNA, 1701 nt, Artificial Sequence
  derived and/or modified CDS sequence (opt5) from hemagglutinin__InfluenzaA__ABB04338
augaagaccaucauugcccugagcuacaucuucugccucgugcugggccaggacuuucccgggaacgauaauuccacagcuacgcuuugucugggacaccaugccgucccuaacggcacccucguuaaaacaauuaccaaugaccaaaucgaggugacaaacgcgaccgaacuggugcagucuagcuccacagggaagauuugcaauaacccgcacagaauccuugauggaaucgacuguacccugauugaugcucuccugggcgacccccauugcgauggguuccagaaugagacgugggaccuguuugucgaacggucuaaagccuucagcaacuguuauccuuacgaugugcccgacuaugccucccuccgcucucugguugcuagcuccggaacccuugaguuuaucaaugaaggcuucacauggaccggcgugacacagaacgggggaagcaaugccugcaagagaggcccugauucuggguuuuucucccggcugaacuggcucuacaaaagcggaucuaccuaucccguccugaaugugacgaugccuaacaaugacaacuuugauaaacuuuacauuuggggcguucaccauccguccacagaccaagagcagaccagccuguaugugcaggcuucugggcgcgucacaguguccaccaagagaagccagcaaaccaucauucccaacaucggaucccggccuugggugcgcggccucucuagcagaauuuccaucuacuggacaaucgucaagcccggcgacauucugguucugaauagcaacgggaaucucaucgccccucggggauacuucaagaugcgcacgggcaaaucuuccauuaugagaagcgaugcgcccaucgggaccuguauuucugagugcaucacaccgaacggaagcaucccuaaugacaagcccuuucagaacgugaauaaaauuaccuauggcgccuguccuaaguacgugaagcagaacacacugaaacuugcuaccgggaugcggaauguccccgaaaagcagacgcgcggacuguucggcgccaucgcuggcuuuauugagaacgggugggaaggaaugaucgauggcugguauggguucagacaccaaaauuccgagggaacaggccaggccgcggaccucaaaucuacccaggccgcuauugaucaaaucaacgggaagcugaaucgggugaucgagaaaaccaacgaaaaguuccaccagauugagaaagaauuuagcgagguugaaggccgcauccaggaccuugagaaguacguggaggauacaaagauugaccugugguccuauaaugccgaacuccuggucgcucuggagaaccagcauaccaucgaucucacagacagcgaaaugaacaaacuguucgagaagacgagacggcaacuuagagaaaaugccgaggauaugggaaacggcugcuuuaaaauuuaccacaagugugacaaugccugcaucgggucuauucgcaacggaaccuaugaccaugauguguaccgggacgaggcucugaauaacagauuccagaucaaaggcguugaacucaaguccggguacaaggauuggauccuguggauuagcuuugcgaucucuugcuuccuucugugugugguccuccugggauuuauuaugugggccugccagaaaggcaauauccgcuguaacauuugcaucuga

SEQ ID NO: 192473 - RNA, 1701 nt, Artificial Sequence
  derived and/or modified CDS sequence (opt5) from hemagglutinin__InfluenzaA__ABB04349
augaagaccaucauugcccugagcuacaucuucugccucguguuugcucagaaacugcccggcaacgacaauuccacagccacgcuuugucuggggcaccaugcggucccuaacggaacccucguuaagacaauuaccaaugaucaaaucgaggugacaaacgcuaccgaacuggugcagucuagcuccacaggcagaauuugcgacucuccgcaccggauccuugaugggaaaaauuguacccugaucgacgcccuccugggagauccccauugcgacggcuuccagaacgagaagugggaucuguuugucgaacgcagcaaagccuucuccaauuguuauccuuacgacgugcccgauuaugcuucucucagaagccugguugccuccagcgggacgcuugaguuuauuaacgaaggauucaauuggaccggcgugacacagucuggcggguccuacgcuugcaagcggggaagcgucaacagcuuuuucucccgccugaauuggcucuauaagagcgagucuaaauacccugugcugaacguuaccaugcccaauaacggcaaguuugacaaacuuuauaucuggggagugcaccauccuuccacagauaaggagcaaaccaaucuguacgucagagccagcgggaaagugacgguguccacaaagcggucucagcagaccgucauuccgaacaucggcagccgccccuggguuagagggcucuccagccggauuucuaucuacuggacaauugugaagccuggagacauccugcugaucaacuccaccggcaaucucauugcgccccgcggcuauuucaaaaucagaaccgggaagucuucuauuaugcggagcgaugccccuaucggaacauguaacuccgaaugcauuacgcccaauggcucuaucccgaacgacaaaccuuuucagaaugugaacaagaucaccuacggggcuuguccccgcuaugucaaacaaaauacacugaaacuugccaccggaaugagaaacgugccugagaaacagacacggggcauuuucggggcuaucgccggauuuauugaaaauggcugggagggcaugguugacgggugguacggauuccgccaccagaacagcgagggcaccgggcaggcggccgaucugaaguccacgcaagcugccaucgaccagauuaauggaaagcucaacagacugaucgaaaagacaaaugagaaguuccaccagaucgaaaaagaguuuagcgaaguggagggccggauucaagaucuugagaaguaugucgaagacaccaaaaucgaucuguggucuuacaacgcugagcuccugguggcccuggaaaaucagcauaccauugaccucacagauuccgagaugaacaagcuguucgaaaagaccagaaaacagcuucgcgagaacgccgaggacauggggaauggcugcuuuaagaucuaucacaaaugugauaacgcuugcauuggaagcauccggaauggcacauacgaccaugauguuuacagagacgaagcgcugaacaaucgcuuccagauuaaggggguggagcucaaaucuggauauaaggacuggauccuguggaucuccuuugccauuagcugcuuccuucugugugucgugcuccugggcuuuaucaugugggcuugccaaaaggggaacauucgguguaauaucugcauuuga

SEQ ID NO: 192474 - RNA, 1701 nt, Artificial Sequence
  derived and/or modified CDS sequence (opt5) from hemagglutinin__InfluenzaA__ABB04360
augaagaccaucauugcccugagcuacaucuucugccucguguuugcucagaaacugcccggcaacgacaauuccacagccacgcuuugucuggggcaccaugcggucccuaacggaacccucguuaagacaauuaccaaugaucaaaucgaggugacaaacgcuaccgaacuggugcagucuagcuccacaggcagaauuugcgacucuccgcaccggauccuugaugggaaaaauuguacccugaucgacgcccuccugggagauccccauugcgacggcuuccagaacgagaagugggaucuguuugucgaacgcagcaaagccuauuccaauuguuacccuuaugacgugcccgauuacgcuucucucagaagccugguugccuccagcgggacgcuugaguucauuaacgaagacuuuaauuggaccggagugacacagucuggcggcuccuaugcuugcaagcgggggagcgucaacucuuucuuuucccgccugaauuggcuccacaagagcgaguacaaauauccugcccugaacgugaccaugcccaauaacggaaaguucgauaaacuuuacaucuggggcguucaucacccuucuacagacagagagcaaaccaaucuguacgugcgggcguccgggcgcgucacggugagcacaaagagaucccagcagaccgugauuccgaacaucggaucucggcccuggguccgcggccucagcuccagaauuagcaucuauuggacaauuguuaaaccuggggauauccugcugaucaacucuaccggaaaucucauugcuccccggggcuacuuuaagauccgcaccggcaaguccagcauuaugagaucugacgccccuaucgggacauguagcuccgaaugcauuacgcccaacggaucuaucccgaaugacaaaccuuuccagaacgugaauaagaucaccuauggcgccuguccccgguacgugaaacaaaacacacugaaacuugcuaccgggaugcgcaaugucccugagaaacagacaagaggaauuuuuggcgccaucgcgggguucauugaaaacggaugggagggcaugguggauggcugguauggguuucggcaccagaauagcgagggaaccggccaggccgcugaccugaaguccacgcaagccgcuaucgaucagauuaacgggaaacucaauagacugaucgaaaagacaaacgagaaguuccaucagaucgaaaaagaguucagcgaaguugagggacgcauucaagaccuugagaaguacguggaagauaccaaaaucgaccuguggucuuauaaugccgagcuccuggucgcccuggaaaaccagcacaccauugaucucacagacuccgagaugaauaagcuguuugaaaagacccggaagcagcuuagagagaacgcugaggauaugggcaacgggugcuucaagaucuaccauaaaugugacaaugcgugcauuggcagcauccgcaacggaacauacgaucacgacguguaucgggacgaagcccugaauaacagauuucagauuaagggcguugagcucaaaucuggguacaaggauuggauccuguggaucuccuucgcuauuagcugcuuucuucugugugugguccuccugggauucaucaugugggccugccaaaaaggcaauauucgcuguaacaucugcauuuga

SEQ ID NO: 192475 - RNA, 1701 nt, Artificial Sequence
  derived and/or modified CDS sequence (opt5) from hemagglutinin__InfluenzaA__ABB04371
augaagaccaucauugcccugagcuacaucuucuaucucgcucugggccaggaccuucccgggaacgauaauuccaaagccacacugugccucggacaccaugcggugccuaacggcacgcuggucaagaccauuacagacgaucaaaccgagguuacaaaugcuaccgaacuugugcagucuagcuccacagggaaaaucuguaacaauccgcaccggauucuggacggaauggauugcacccucaucgacgcccugcugggcgauccccauugugacguguuucagaacgagacgugggaucucuucgucgaaagaucuaaggccuuuagcaauugcuacccuuaugacgugcccgauuacgcuucccugcgcucucuuguugccagcuccgggaccauggaguucaucacagaaggauuuaccuggacagaggugacccagaacggcggcagcaaugcuuguaaaagagggccugacucuggauucuuuucccggcugaacuggcucacgaaaagcggccgcacauaucccguccugaaugugaccaugccuaacaaugauaacuucgacaagcuguacauuuggggaguucaccauccgucuacagaccaagagcagaccaaucuguaugugcagaccuccgggagagucacagugagcacgcggcgcucucagcaaaccaucauucccaacaucggcuccagaccuugggugcgggggcucagcucccgcauuucuaucuacuggacaauugucaaacccggagauguucuggugaucaacagcaauggcaaccugaucgccccuagaggcuacuuuaagaugcggaccgggaaauccagcauuaugcgcucugacgcgcccaucgauacaugcauuuccgaauguaucaccccgaauggaagcauuccuaacgacaagcccuuccagaaugugaacaaaaucacguauggcgccugcccuaaguacgucaagcagaauacacucaaacuggcuaccgggaugagaaacgugcccgagaagcagacccggggacuuuuuggcgccaucgcuggguucauugaaaauggaugggagggcaugaucgauggcugguauggguuucgccaccaaaacucugagggaacaggccaggccgcggaccugaaaagcacccaggccgcuauugaucaaaucaaugggaagcucaacagaauuaucgaaaagacaaaugagaaguuccaccagaucgaaaaagaguucuccgaaguugagggacggauucaggaccuggagaaguacguggaagauacgaagaucgaccuuuggucuuauaacgccgagcugcucgucgcucuggaaaaucagcauaccauugaucugacagacagcgagaugaacaaacucuuugaaaagaccagacgccaacugcgggagaacgccgaggacaugggcaauggguguuucaaaaucuaccacaagugcgauaacgccuguauugaauccaucagaaauggcacauaugaccaugauguguaccgcgacgaggcucuuaacaaucgguuucagauuaaaggaguugaacuuaagagcggcuacaaggauuggauccucuggaucucuuucgcgauuuccugcuuucugcuuugcgugguccugcucggguucaucaugugggccugucagagaggaaacauucgcugcaauaucuguauuuga

SEQ ID NO: 192476 - RNA, 1701 nt, Artificial Sequence
  derived and/or modified CDS sequence (opt5) from hemagglutinin__InfluenzaA__ABB04906
augaagaccaucauugcccugagcuacauccucugccugguguucgcucagaaacuucccggcaacgacaauuccacagccacgcugugucucgggcaccaugcggucccuaacggaacccugguuaagacaauuaccaaugaucaaaucgaggugacaaacgcuaccgaacuugugcagucuagcuccacaggcagaauuugcgacucuccgcaccggauccuggaugggaaaaauuguacccucaucgacgcccugcugggagauccccauugcgacggcuuucagaacaaggagugggaucucuucgucgaacgcagcaaagccuauuccaauuguuacccuuaugacgugcccgauuacgcuucucugagaagccuuguugccuccagcgggacgcuggaguuuauuaacgaagacuucaauuggaccggaguggcucagaacggcgauucuuaugccugcaagcggggcuccgucaagagcuuuuucucucgccucaauuggcugcacaaauccgaguacaaguauccugcgcuuaacgugacaaugcccaauaacgacaaauuugauaagcuguacaucuggggaguucaucacccuagcaccgacagagagcaaacaucucucuacauucgggccuccgggaaagugaccgucagcacgaagcgcucccagcagacagugaucccgaauauuggcucuagacccugggugcgggggcugagcucccgcaucagcauuuauuggaccaucgucaagccuggagacauccugcucauuaacucuacaggcaaccugaucgcucccagaggguacuucaaaauucggaccggaaaguccagcaucaugcgcucugaugccccuauuggcaccuguagcuccgaaugcaucacacccaauggcucuaucccgaacgacaaaccuuuucagaauguuaacagaauuacguauggggcuuguccccgguacgugaagcaaaauacccuuaaacuggccacaggaaugcgcaacgugccugagaagcagaccagaggcaucuucggggcgauugccggauuuaucgaaaauggcugggaggggauggucgauggaugguauggcuuccggcaccagaacagcgagggcacagggcaggcugccgaccucaaauccacccaagcugccauugaucagaucaauggaaagcugaacagacuuaucgaaaagacgaaugagaaauuucaucagauugaaaaggaguucagcgaaguggagggccgcauccaagaccuggagaaauacguugaagauacaaagauugaccucuggucuuauaacgccgagcugcugguggcucucgaaaaucagcacaccaucgaucugaccgacuccgagaugaacaaacuuuucgaaaagacacggaagcagcugagagagaaugcggaggauauggggaacggaugcuuuaaaauuuaccauaagugugacaacgccugcaucggcagcauucgcaaugggaccuacgaccacgaugucuaucgggacgaagcucucaacaauagauuccagaucaaaggcguggagcugaagucuggauacaaagauuggauccuuuggauuuccuuugccaucagcugcuuccugcucuguguugugcugcugggcuuuauuaugugggccugccaaaaggggaacauccgcuguaauauuugcaucuga

SEQ ID NO: 192477 - RNA, 1701 nt, Artificial Sequence
  derived and/or modified CDS sequence (opt5) from hemagglutinin__InfluenzaA__ABB04917
augaagaccaucauugcccugagcuacaucuucugccucguguuugcucagaaacugcccggcaacgacaauuccacagccacgcuuugucuggggcaccaugcggucccuaacggaacccucguuaagacaauuaccaaugaucaaaucgaggugacaaacgcuaccgaacuggugcagauuucuagcacaggcagaaucugcgacuccccgcaccggauccuugaugggaaaaauuguacccugauugacgcccuccugggagauccccauugcgacggcuuccagaacgagaagugggaucuguuugucgaacgcucuaaagccuucagcaauuguuauccuuacgacgugcccgauuaugcuucccucagaucucugguugccagcuccgggacgcuugaguuuaucaacgaaggauucaauuggaccggcgugacacagagcggcgggucuuauaccugcaagcggggauccgucaacagcuuuuucucucgccugaauuggcucuacgaguccgagagcaaguacccugugcugaacguuacaaugcccaauaacggcaaauuugacaaacuuuauauuuggggagugcaccauccuucuaccgauaaggaacaaacgaaucuguacgucagagcuuccgggcgggugacagugagcaccaagcgcucccagcagacagucaucccgaacauuggcucuagacccuggguucgggggcucagcucccgcaucagcauuuacuggaccaucgugaaaccuggagacauccugcugauuaacucuaccggcaaucucaucgcccccagaggcuauuucaagauucggacagggaaguccagcaucaugcgcucugaugcgccuauuggaacguguagcuccgagugcaucacccccaacggcucuaucccgaaugacaaaccuuuucagaacgugaauaagauuacauacggggccugucccagauaugucaaacaaaacacccugaaacuugcuacaggaaugcggaaugugccugaaaagcagacccgcggcaucuucggggccauugcuggauuuaucgagaacggcugggagggcaugguugacgggugguacggauucagacaccagaauagcgaaggcacggggcaggccgcggaucugaaguccacacaagccgcuauugaccagaucaacggaaaacucaaucggcugaucgagaagaccaacgaaaaguuccaccagauugagaaagaauuuagcgagguggagggcagaauccaagaucuugaaaaguaugucgaggacaccaaaauugaucuguggucuuacaaugccgaacuccugguggcucuggagaaccagcauacaaucgaccucaccgauuccgaaaugaauaagcuguucgagaaaacacgcaagcagcuucgggagaacgccgaagacauggggaacggcugcuuuaagauuuaucacaaaugugauaaugccugcaucggaagcauuagaaacggcacguacgaccaugauguuuaccgcgacgaggcucugaauaaccgguuccagaucaaggggguggaacucaaaucuggauauaaggacuggauccuguggauuuccuuugcgaucagcugcuuccuucugugugucgugcuccugggcuuuauuaugugggccugccaaaaagggaauaucagauguaacauuugcaucuga

SEQ ID NO: 192478 - RNA, 1701 nt, Artificial Sequence
  derived and/or modified CDS sequence (opt5) from hemagglutinin__InfluenzaA__ABB04928
augaagaccaucauugcccugagcuacaucuucugccucguguuugcucaggaccugcccggcaacgauaauuccacagccacgcuuugucuggggcaccaugcggucccuaacggaacccucguuaaaacaauuaccaaugaccaaaucgaggugacaaacgcuaccgaacuggugcagucuagcuccacaggcaagauuugcaauaacccgcacagaauccuugaugggaucaauuguacccugauugacgcccuccugggagauccccauugcgacggcuuccagaacgagaaaugggaucuguuugucgaacggucuaaggccuucagcaauuguuauccuuacgacgugcccgauuaugcuucccuccgcucucugguugccagcuccgggacgcuugaguuuaucaacgaaggauucaauuggauuggcgugacccagaacggcgggagcaaugcuugcaaaagaggaacagacucuggcuuuuucucccggcugaacuggcucuacaagagcgggucuaccuauccuguccaaaaugugacaaugcccaacaacgauaauuccgacaagcuguacaucuggggaguucaccauccuagcaccgauaaagagcagacggaccuuuaugugcaggccucuggcaaggucacaguguccaccaaacgcagccagcaaacaauuaucccgaacgugggguccagacccuggguccggggacugucuagccgcauuuccaucuacuggaccaucguuaagccuggcgacauucucgugaucaauagcaacggcaaucugauugcgcccagaggguacuuuaaaaugcggaccggaaagucuuccaucaugcgcagcgaugccccuauuggcacauguucuagcgagugcaucacgcccaacggguccaucccgaaugacaagccuuuccagaacgugaauaaaauuaccuauggagcuugucccaaguacgucaaacagaacacacugaagcucgccaccggcaugagaaaugugccugaaaaacagacacgggggaucuuuggagcuauugccggcuucaucgagaacggcugggaagggaugauugauggaugguauggcuuucgccaccaaaauucugaggggaccggacaggcggccgaccuuaagagcacgcaggcugccaucgaucaaaucaacggcaaacugaauagaguuauugagaagacaaacgaaaaguuccaccagaucgagaaagaguucuccgaaguggaagggcggauucaggaccuggagaaguacgucgaggauaccaaaaucgaccucuggagcuauaacgcugaacugcuuguggcccuggagaaucagcauaccauugaucucacagacucugaaaugaacaagcuguuugagaaaacccgcagacaacugcgggaaaaugccgaggauaugggcaacggaugcuucaagaucuaccacaagugugacaaugcuugcauuggcuccaucagaaacgggacauaugaccaugauguuuaccgcgacgaggcgcucaauaaccgguuucagaucaaaggaguggaacuuaagagcggcuacaaagauuggauucuguggaucucuuucgccauuuccugcuuucugcucugugucgugcugcuuggguucaucaugugggcuugccagaagggaaauauuagauguaacaucugcaucuga

SEQ ID NO: 192479 - RNA, 1701 nt, Artificial Sequence
  derived and/or modified CDS sequence (opt5) from hemagglutinin__InfluenzaA__ABB04939
augaagaccaucauugcccugagcuacaucuucugccucguguuugcucagaaacugcccggcaacgacaauuccacagccacgcuuugucuggggcaccaugcggucccuaacggaacccucguuaagacaauuaccaaugaucaaaucgaggugacaaacgcuaccgaacuggugcagucuagcuccacaggcagaauuugcgacucuccgcaccggauccuugaugggaaaaauuguacccugaucgacgcccuccugggagauccccauugcgacggcuuccagaacgagaagugggaucuguuugucgaacgcagcaaagccuucuccaauuguuauccuuacgacgugcccgauuaugcuucucucagaagccugguugccuccagcgggacgcuugaguuuauuaacgaaggauucaauuggaccggcgugacacagucuggcggguccuauaccugcaagcggggaagcgucaacagcuuuuucucccgccugaauuggcucuacgagagcgagucuaaguacccugugcugaacguuacaaugcccaauaacggcaaauuugacaagcuguauaucuggggagugcaccauccuuccaccgauaaagaacaaacgaaucuguacgucagagcuagcgggcgggugacaguguccaccaagcgcucucagcagacagucauuccgaacaucggcagcagacccuggguucgggggcucuccagccgcauuucuaucuacuggaccauugugaaaccuggagacauccugcugaucaacuccauuggcaaucucaucgcccccagaggcuauuucaagauucggaccgggaagucuucuaucaugcgcagcgaugcgccuauuggaaucuguuccucugagugcaucacacccaacggcagcauuccgaaugacaaaccuuuucagaacgugaauaagaucacguacggggccugucccagauaugucaaacaaaacacccugaaacuugcuacaggaaugcggaaugugccugaaaagcagacccgcggcauuuucggggccaucgcuggauuuauugagaacggcugggagggcaugguugacgggugguacggauucagacaccaaaauuccgaaggcacagggcaggccgcggaucuuaagagcacccaggccgcuguggaccagaucaacggaaaacucaaucggcugaucgagaagacgaacgaaaaguuccaccagauugagaaagaauuuucugaggucgagggcagaauccaagaucuugaaaaguauguggaggacacaaaaauugaucugugguccuacaaugccgaacuccugguugcucuggagaaccagcauaccaucgaccucaccgauagcgaaaugaauaagcuguucgagaaaacacgcaagcagcuucgggagaacgccgaagacauggggaacggcugcuuuaagauuuaucacaaaugugauaaugccugcaucggaucuauuagaaacggcaccuacgaccaugauguguaccgcgacgaggcucugaauaaccgguuccagaucaagggggucgaacucaaauccggauauaaggacuggauccuguggauuagcuuugcgaucuccugcuuccuucugugugugguccuccugggcuuuauuaugugggccugccaaaaagggaauaucagauguaacauuugcaucuga

SEQ ID NO: 192480 - RNA, 1701 nt, Artificial Sequence
  derived and/or modified CDS sequence (opt5) from hemagglutinin__InfluenzaA__ABB04950
augaagaccaucauugcccugagcuacaucuucugccucguguuugcucagaaacugcccggcaacgacaauuccacagccacgcuuugucuggggcaccaugcggucccuaacggaacccucguuaagacaauuaccaaugaucaaaucgaggugacaaacgcuaccgaacuggugcagucuagcuccacaggcagaauuugcgacucuccgcaccggauccuugaugggaaaaauuguacccugaucgacgcccuccugggagauccccauugcgacggcuuccagaacgagaagugggaucuguuugucgaacgcagcaaagccuucuccaauuguuauccuuacgacgugcccgauuaugcuucucucagaagccugguugccuccagcgggacgcuugaguuuauuaacgaaggauucaauuggaccggcgugacacagucuggcggguccuauaccugcaagcggggaagcgucaacuccuuuuucucucgccugaauuggcucuacgagagcgagucuaaguacccugugcugaacguuacaaugcccaauaacggcaaauuugacaaacuuuauaucuggggagugcaccauccuuccaccgauaaggaacaaacgaaucuguacgucagagcuagcgggaaggugacaguguccaccaaacggucucagcagacagucauuccgaacaucggcagccgccccuggguuagagggcucuccagccggauuucuaucuacuggaccauugugaagccuggagacauccugcugaucaacuccaccggcaaucucauugcgccccgcggcuauuucaagaucagaacagggaaaagcucuauuaugcggagcgaugccccuaucggaacguguuccucugagugcauuacccccaacggcagcaucccgaaugacaagccuuuucagaacgugaauaaaaucacauacggggccuguccccgcuaugucaagcaaaacacccugaaacuugcuacaggaaugagaaaugugccugaaaagcagacccggggcauuuucggggccaucgcuggauuuauugagaacggcugggagggcaugguugacgggugguacggauuccgccaccaaaauuccgaaggcacggggcaggccgcggaucugaaaagcacacaggccgcuaucgaccagauuaacggaaagcucaauagacugaucgagaagaccaacgaaaaauuccaccagaucgagaaggaauuuucugagguggagggccggauucaagaucuugaaaaauaugucgaggacaccaagaucgaucugugguccuacaaugccgaacuccugguggcucuggagaaccagcauacaauugaccucaccgauagcgaaaugaauaaacuguucgagaagacaagaaagcagcuucgcgagaacgccgaagacauggggaacggcugcuuuaaaaucuaucacaagugugauaaugccugcauuggaucuauccggaacggcacguacgaccaugauguuuacagagacgaggcucugaauaaccgcuuccagauuaaagggguggaacucaaguccggauauaaagacuggauccuguggaucagcuuugcgauuuccugcuuccuucugugugucgugcuccugggcuuuaucaugugggccugccaaaaggggaauauucgguguaacaucugcauuuga

SEQ ID NO: 192481 - RNA, 1701 nt, Artificial Sequence
  derived and/or modified CDS sequence (opt5) from hemagglutinin__InfluenzaA__ABB04983
augaagaccaucauugcccugagcuacauccucugccugguguucgcucagaaacuucccggcaacgacaauuccacagccacgcugugucucgggcaccaugcggucccuaacggaacccugguuaagacaauuaccaaugaucaaaucgaggugacaaacgcuaccgaacuugugcagucuagcuccacagacagaauuugcgauucuccgcaccagauccuggacggcgagaauuguacccucaucgaugcccugcugggggacccccauugcgauggauuucagaacaaagaaugggaccucuucgucgagcggagcaaggccuauuccaauuguuacccuuaugaugugcccgacuacguuucucugcgcagccuuguggcuuccagcggcacgcuggaauuuaacaaugagucuuucaacuggaccggggucgcccaaaauggaacauccagcgcuugcaaaagacggucugauaaguccuuuuucagccgccucaacuggcugcaccagcuuaaguauaaauacccugcccugaaugugaccaugcccaacaaugagaaguuugacaaacucuauauuuggggcguucaucacccuggcacagauucugaccagaucucccuguacgcgcaggccagcgggagagugaccgucuccacgaagcggucucaacagacagugauuccgaacaucggaagccgccccugggugagaggcgucuccagccggauuucuaucuacuggaccauuguuaaaccuggggacauccugcucaucaacuccacaggaaaucugauugcuccccgcggcuauuucaagaucagaagcgggaagucuagcauuaugcgguccgaugccccuaucggaaaauguaacucugaaugcauuacccccaauggcagcaucccgaacgacaagccuuuucagaaugugaaccgcaucaccuacggccccuguccuagauaugugaaacagaauacacuuaagcuggcuacggggaugcggaacguccccgagaaacaaacccgcggaauuuucggcgccaucgcgggguuuauugaaaauggaugggagggcaugauggaugggugguacggauucagacaccagaacuccgagggcacaggccaggccgcugaccucaagagcacccaagccgcuaucaaucagauuaacgggaaacugaaucggcuuaucgaaaagacaaacgagaaguuucaucagaucgaaaaagaguucucugaaguggagggacgcauucaggaucuggagaaguauguugaagacaccaaaaucgaucucugguccuacaaugccgagcugcugguggcccucgaaaaccaacacacgauugaccugacagauagcgagaugaacaaacuuuucgaaagaaccaagaagcagcugcgggagaaugcugaggacaugggcaacgggugcuuuaagaucuaucauaaaugugauaaugcgugcauuggaucuaucagaaacggcaccuacgaccacgacgucuaccgcgaugaagcccucaauaaccgguuccagauuaaggggguggagcugaaauccggcuauaaggacuggauccuuuggaucagcuuugcuauuuccugcuuccugcucuguaucguucugcugggauuuauuaugugggccugccagaaaggcaauaucagauguaacauuugcaucuga

SEQ ID NO: 192482 - RNA, 1701 nt, Artificial Sequence; identical to SEQ ID NO: 192244
  derived and/or modified CDS sequence (opt5) from hemagglutinin__InfluenzaA__ABB04994

SEQ ID NO: 192483 - RNA, 1701 nt, Artificial Sequence
  derived and/or modified CDS sequence (opt5) from hemagglutinin__InfluenzaA__ABB05005
augaagaccaucauugcccugagccacauccucugccugguguucgcucagaaacuucccgucaacgacaauuccacagccacgcugugucucggccaucacgcgguuccuaacgggacccuggugaagacaauuaccaaugaucauaucgaggugacaaacgcuaccgaacuuguccaaucuagcuccacaggaagaauuugcgacucuccgcaccagauccuggauggcgagaauuguacccucaucgacgcccugcugggggauccccauugcgacggauuucagaacaaagaaugggaucucuucguggagcggagcacggccuacuccaauuguuauccuuacgacguucccgauuaugcuucucugcgcagccuuguggccuccagcggcacccuggaauuuaacaaugagucuuucaacuggacaggggucgcucagaauggaaccuccagcgccugcaagagacggucuauuaaauccuuuuucagccgccucaacuggcugcaccaacuuaaguacaaguauccugcgcugaaugugacaaugcccaacaaugagaaauuugacaagcucuacaucuggggcguucaccauccuucuaccgauuccgaccagauuagccuguaugcccaggcuuccggcagagugacggucucuacaaaacggagccagcaaaccgugaucccggauauugggucccgccccugggugagaggagucagcucucggaucuccauuuacuggacaaucguuaagccuggcgacauccugcucauuaacagcaccgggaaccugaucgcccccagaggauacuucaaaauuagaucuggcaagagcuccaucaugcggucuaaugcuccuauugggaaguguaacagcgaaugcaucacccccaauggauccgugccgaacgacaaaccuuuucagaaugugaaccgcaucacauauggcgccugucccagauacgucaagcagaauacgcuuaaacuggcgaccggcaugcggaacgugccugagaagcagacacgcgggauuuucggagccaucgcuggcuuuauugaaaaugggugggagggaaugguugauggcugguauggguucagacaccaaaacagcgagggaaccggccaggccgcugaccucaaaucuacacaggccgccaucaaucaaauuaacggcaagcugaaucggcuuaucgagaaaaccaacgaaaaguuucaucagaucgaaaaggaguucuccgaaguggaggggcgcauucaggaucuggagaaauacgucgaagacacgaagaucgaucucuggagcuauaaugcugagcugcugguggcgcucgaaaaccagcacacaauugaccugaccgauucugagaugaacaaacuuuucgaacgcacccggaagcaacugagagagaaugccgaggacaugggaaacggcugcuuuaaaaucuaccacaagugugauaaugcuugcauuggguccauccgcaacggaacauaugaccaugauguuuaccgggacgaagcccucaauaacagauuccagauuaagggcguggagcugaaaagcggguacaaggacuggauccuuuggaucuccuuugccauuucuugcuuccugcucugugucgugcugcugggcuuuaucaugugggcuugccagaaaggaaauauucgcuguaacaucugcauuuga

SEQ ID NO: 192484 - RNA, 1701 nt, Artificial Sequence
  derived and/or modified CDS sequence (opt5) from hemagglutinin__InfluenzaA__ABB05183
augaagaccaucauugcccugagcuacauccucugccugguguucgcucagaaacuucccgucaacgacaauuccacagccacgcugugucucggccaccaugcgguuccuaacgggacccuggugaagacaauuaccaaugagcacaucgaagugacaaacgcuaccgagcuuguccaaucuagcuccacaggaagaauuugcgauucuccgcaucagauccuggacggcgaaaauuguacccucaucgaugcccugcugggggacccccacugcgauggauuucagaacaaagagugggaccucuucguggaacggagcacggccuauuccaauuguuacccuuaugauguucccgacuacgcuucucugcgcagccuuguggccuccagcggcacccuggaguuuaacaaugagucuuucaacuggacaggggucgcucagaauggaaccuccagcgccugcaagagacggucuauuaaauccuuuuucagccgccucaacuggcugcaucaacuuaaguauaaguacccugcgcugaaugugacaaugcccaacaaugaaaaauuugauaagcucuauaucuggggcguucaccacccuucuaccgacuccgaucagauuagccuguacgcccaggcuuccggcagagugacggucucuacaaaacggagccagcaaaccgugaucccgaacauugggucccgccccugggugagaggagucagcucucggaucuccauuuacuggacaaucguuaagccuggcgacauccugcucauuaacagcaccgggaaucugaucgcuccccgcggauauuucaaaauuagaucuggcaagagcuccaucaugcggucuaacgccccuauugggaaguguaauagcgagugcaucacccccaacggauccaucccgaaugauaaaccuuuucagaacgugaaucgcauuacauacggcgccugucccagauaugugaagcagaacacgcuuaaacuggcgaccggcaugcggaaugucccugaaaagcagacacgcgggaucuucggagccauugcuggcuuuaucgagaacgggugggagggaaugguggacggcugguacggguucagacaucaaaauagcgaaggaaccggccaggccgcugaccucaaaucuacacaggccgccauuaaccaaaucaauggcaagcugaaccggcuuaucgagaaaaccaaugaaaaguuucaccagauugagaaggaguucuccgaaguugaggggagaauccaggaucuggaaaaauauguggaggacacgaagauugaucucuggagcuacaacgcugaacugcuggucgcgcucgagaaccagcauacaaucgaccugaccgauucugaaaugaauaaacuuuucgagcgcacccggaagcaacugagagagaacgccgaagacaugggaaauggcugcuuuaaaguguaucacaagugugauaacgcuugcauuggguccauccgcaauggaacauacgaccacgauguuuaccgggacgaggcccucaacaauagauuccagauuaagggcguggaacugaaaagcggguauaaggauuggauccuuuggaucuccuuugccauuucuugcuuccugcucugugucgugcugcugggcuuuaucaugugggcuugccagaaaggaaacauucgcuguaauaucugcauuuga

SEQ ID NO: 192485 - RNA, 1701 nt, Artificial Sequence
  derived and/or modified CDS sequence (opt5) from hemagglutinin__InfluenzaA__ABB05194
augaagaccaucauugcccugagcuacauccucugccugguguucgcucagaaacuucccggcaacgacaauuccacagccacgcugugucucgggcaccaugcggucccuaacggaacccugguuaagacaauuaccaaugaucaaaucgaggugacaaacgcuaccgaacuugugcagucuagcuccacaggcagaauuugcgacucuccgcaccagauccuggauggggagaauuguacccucaucgacgcccugcugggagauccccauugcgacggcuuucagaacaaagaaugggaucucuucgucgagcggagcaaggccuauuccaauuguuacccuuaugacgugcccgauuacgcuucucugcgcagccuuguugccuccagcgggacgcuggaauuuaacaaugagucuuucaacuggaccggaguggcucaaaauggcacauccagcgccugcaaaagacggucuaacaaguccuuuuucagccgccucaauuggcugcaccagcuuaaguauaaauacccugcgcugaacgucauuaugcccaauaacgagaaguuugacaaacucuauaucuggggcgugcaucacccuucuaccgauuccgaccagauuagccuguacgcccaggcuuccgggagaguuacagugucuaccaagcggagccaacagacggucaucccgaacauuggaucccgccccugggugagaggcgugagcucucggaucuccauuuacuggacaaucgucaaaccuggggauauccugcucauuaauagcaccggaaaccugaucgcccccagaggcuauuucaagauuagaucugggaagucuuccguuaugcggucugacgcuagcaucggaaaauguaauuccgaaugcauuacaccuaacggcagcauccccaaugacaagccguuucagaacgugaaucgcaucaccuacggcgccuguccuagauaugugaaacagaacacccuuaagcuggcgacagggaugcggaauguccccgagaaacaaacgcgcggaauuuucggcgccaucgcuggguuuauugaaaacggaugggagggcaugguggaugggugguacggauucagacaccagaauagcgagggcaccggccaggccgcugaccucaaguccacacaagccgccaucaaccagauuaaugggaaacugaaccggcuuaucgaaaagaccaaugagaaguuucaucagaucgaaaaagaguucagcgaaguugagggacgcauucagaaccuggagaaguauguggaagauacaaaaaucgaccucuggucuuacaacgcugagcugcuggucgcgcucgaaaaucaacacaccauugaucugacggacuccgagaugaacaaacuuuucgaacgcacaaagaagcagcugcgggagaaugccgaggauaugggcaacgggugcuuuaagaucuaucauaaaugugacaaugcuugcauuggaagcaucagaaacggcaccuacgaucacgacguguaccgcgaugaagcccucaauaaccgguuccagauuaaggggguugagcugaaauccggcuauaaggacuggauccuuuggaucucuuuugccauuagcugcuuccugcucugugugguccugcugggauuuaucaugugggcuugccagaaaggcaauauuagauguaacaucugcauuuga

SEQ ID NO: 192486 - RNA, 1701 nt, Artificial Sequence
  derived and/or modified CDS sequence (opt5) from hemagglutinin__InfluenzaA__ABB05205
augaagaccaucauugcccugagcuacauccucugccugguguucgcucagaaacuucccggcaacgacaauuccacagccacgcugugucucgggcaccaugcggucccuaacggaacccugguuaagacaauuaccaaugaucaaaucgaggugacaaacgcuaccgaacuugugcagucuagcuccacaggcagaauuugcgacucuccgcaccagauccuggauggggagaauuguacccucaucgacgcccugcugggagauccccauugcgacggcuuucagaacaaagaaugggaucucuucgucgagcggagcaaugccuauuccaacuguuacccuuaugacgugcccgauuacgcuucucugcgcagccuuguugccuccagcgggacgcuggaauuuaauucugaguccuucaacuggaccggaguggcucaaaauggcacaagcucugccugcaagagacgguccaacaagagcuuuuucucucgccucaauuggcugcaccagcuuaaguauaaguacccugcgcugaacgucaccaugcccaauaacgagaaauuugacaagcucuauauuuggggcgugcaucacccugggacagauuccgaccagaucagccuguacgcccaggcuuccggaagaguuaccgugucuacgaaacggagccaacagacagucauuccgaacaucggcucccgccccugggugagaggggugagcucucggauuuccaucuacuggaccauugucaagccuggagauauccugcucaucaauagcacaggcaaccugauugcccccagaggguauuucaaaaucagaucuggaaagagcuccauuaugcggucugacgcuccuaucggcaaguguaauagcgaaugcauuacccccaacggcuccaucccgaauaacaaaccuuuucagaauguuaaccgcaucaccuacggggccugucccagauaugugaagcagaauacacuuaaacuggcgacgggaaugcggaacgugccugagaagcaaacccgcggcauuuucggggccaucgcuggauuuauugaaaauggcugggaggggauggucgacggaugguacggcuucagacaccagaacagcgagggcacagggcaggccgcugaucucaaaucuacccaagccgccaucaaucagauuaacggaaagcugaaucggcuuaucgagaaaacaaacgaaaaguuucaucagaucgaaaaggaguucuccgaaguggagggccgcauucaggaccuggagaaauauguugaagauaccaagaucgaccucuggagcuacaacgcugagcugcugguggcgcucgaaaaucaacacacgauugaucugacagacucugagaugaacaaacuuuucgaacgcaccaagaaacagcugcgggagaaugccgaggauauggggaacggaugcuuuaagaucuaucauaagugugacaaugcuugcauuggcuccaucagaaacgggaccuacgaucacgacgucuaccgcgaugaagcccucaauaaccgguuccagauuaaaggcguggagcugaaaagcggauauaaagacuggauccuuuggaucuccuuugccauuucuugcuuccugcucuguguugugcugcugggcuuuaucaugugggcuugccagaaggggaauauuagauguaacaucugcauuuga

SEQ ID NO: 192487 - RNA, 1701 nt, Artificial Sequence; identical to SEQ ID NO: 192144
  derived and/or modified CDS sequence (opt5) from hemagglutinin__InfluenzaA__ABB05216

SEQ ID NO: 192488 - RNA, 1701 nt, Artificial Sequence
  derived and/or modified CDS sequence (opt5) from hemagglutinin__InfluenzaA__ABB46392
augaagaccaucauugcccugagcuacaucuucugccucgcuuuugcccaggaccugcccggcaacgauaauuccacagcgacgcuuugucuggggcaccaugcugugccuaacggaacccucgucaaaacaauuaccaaugaccaaaucgagguuacaaacgccaccgaacuggugcagucuagcuccacaggcaagauuugcgauaauccgcacagaauccuugacgggaucaacuguacccugauugaugcccuccugggagacccccauugcgauggcuuccagaaugagaaaugggaccuguuuguggaacggucuaaggcuuucagcaacuguuauccuuacgauguccccgacuaugccucccuccgcucucugguggcuagcuccgggacgcuugaguuuaucaaugaaggauucaacuggaccggcguuacacagaauggcgggagcucugccugcaaaagaggaccugauaacggcuuuuucucccggcugaauuggcucuacaagagcgggucuaccuaucccgugcaaaacgucacaaugccuaauaacgacaacuccgauaagcuguacauuuggggagugcaccauccgaauaccgacaaagagcagacggaccuuuauguucaggcgagcggcaaggugacagucucuaccaaacgcucccagcaaacaaucauucccaacguggggagcagaccuugggugcggggacuguccucucgcgucagcaucuacuggaccauuguuaagcccggcgauauccucgugaucaauuccaacggcaaucugauugccccuagaggguacuuuaaaaugcggaccggaaagagcucuaucaugcgcuccgacgcucccauuggcacauguagcucugagugcaucacgccgaacgggagcauuccuaaugauaagcccuuccagaacgugaauaaaaucaccuauggagccuguccuaaguacgucaaacagaacacacugaagcucgcuaccggcaugagaaaugugcccgaaaaacagacacgggggaucuuuggagccauugcgggcuucaucgagaacggcugggaagggaugauugacggaugguauggcuuucgccaccaaaauuccgaggggaccggacaggccgcugaucugaagucuacgcagacagccaucgaccaaauuaacggcaaacuuaauagaguuaucgagaagaccaacgaaaaguuccaccagaucgagaaagaguucagcgaaguggaagggcggauucaggaucuggagaaguacgucgaggacaccaaaaucgaucucugguccuauaacgcugaacugcuuguggcccuggagaaucagcauacaauugaccucaccgauagcgaaaugaacaagcuguuugagaaaacacgcagacaacugcgggaaaaugccgaggacaugggcaacggaugcuucaagaucuaccacaagugugacaaugcuugcauuggcucuaucagaaacgggacguaugaucaugacguuuaccgcgaugaggcgcucaauaaccgguuucagauuaaaggaguggaacugaaguccggcuacaaagacuggauccuuuggaucagcuucgccauuucuugcuuucugcucugugucgugcugcuuggguucaucaugugggcuugccagaagggaaauauuagauguaacaucugcauuuga

SEQ ID NO: 192489 - RNA, 1701 nt, Artificial Sequence
  derived and/or modified CDS sequence (opt5) from hemagglutinin__InfluenzaA__ABB46414
augaagaccaucauugcccugagcuacauccucugccugguguucgcucagaaacuucccggcaacgacaauuccacagccacgcugugucucgggcaccaugcggucccuaacggaacccugguuaagacaauuaccaaugaucaaaucgaggugacaaacgcuaccgaacuugugcagucuagcuccacaggcagaauuugcgacucuccgcaccggauccuggauggggagaauuguacccucaucgacgcccugcugggagauccccauugcgacggcuuucagaacaaagaaugggaucucuucgucgagcgcagcaaggccuauuccaauuguuacccuuaugacgugcccgauuacgcuucucugagaagccuuguugccuccagcgggacgcuggaauuuaacaaugagucuuucaacuggaccggaguggcucagaauggcacauccagcgccugcaaacggcgcucuauuaaguccuuuuucagcagacucaacuggcugcaccaacuuaaguauaaauacccugcgcugaaugucaccaugcccaacaaugacaaguuugauaaacucuauaucuggggcgugcaucacccuucuacagacuccgaucagaccagccuguacgcccaggcuuccgggcggguuacggugucuacaaagcgcagccagcaaaccgucauuccgaacaucggauccagacccugggugcggggcgugagcucucgcauuuccaucuacuggacaauugucaaaccuggggacauccugcucaucaacagcaccggaaaucugauugcccccagaggcuauuucaagauccggucuggaaagagcuccauuaugcgcucugacgcuccuaucgggaaauguaacagcgagugcauuacccccaauggcuccaucccgaacgauaagccuuuucagaauguuaacagaaucacauacggcgccuguccccgguaugugaaacagaauacgcuuaagcuggcgaccgggaugcgcaacgugccugaaaaacagacaagaggaauuuucggcgccaucgcuggguuuauugagaauggaugggaaggcauggucgacgggugguacggauuccggcaccaaaacagcgagggcaccggccaggccgcugaucucaagucuacacaggccgccaucaaucaaauuaacgggaaacugaauagacuuaucgagaagaccaacgaaaaguuucaucagaucgagaaagaguucuccgaaguggaaggacgcauucaggaccuggagaaguauguugaggauacgaaaaucgaccucuggagcuacaaugcugaacugcugguggcgcucgagaaccagcacacaauugaucugaccgacucugaaaugaacaagcuguucgagcggaccagaaaacaacugcgcgaaaaugccgaggauaugggcaacgggugcuuuaagaucuaucauaagugugacaaugcuugcauuggauccauccggaacggcacauacgaucacgacgucuacagagacgaggcccucaauaaccgcuuccagauuaaagggguggaacuuaagagcggcuauaaagauuggauccuuuggaucuccuuugccauuucuugcuuccuguuuuguguugugcuccugggauucaucaugugggcuugccagaagggcaauauucgguguaacaucugcauuuga

SEQ ID NO: 192490 - RNA, 1701 nt, Artificial Sequence
  derived and/or modified CDS sequence (opt5) from hemagglutinin__InfluenzaA__ABB46425
augaagaccaucauugcccugagcuacauccucugccugguguucgcucagaaacuucccggcaacgacaauuccacagccacgcugugucucgggcaccaugcggucccuaacggaacccugguuaagacaauuaccucugaucaaaucgaggugacaaaugcuaccgaacuugugcagagcuccucuacaggcaaaauuugcgacagcccgcacagaauccuggauggggagaacuguacccucaucgacgcccugcugggagauccccauugcgacggcuuucagaauaaggaaugggaucucuucgucgagcgguccaaagccuauucuaacuguuacccuuaugacgugcccgauuacgcuagccugcgcucccuuguugccagcucugggacgcuggaauuuaauaacgaguccuucaauuggaccggaguggcucagaacggcaccagcuuugccugcaagagacggucuauuaaguccuucuuuagccgccucaauuggcugcaccaacuuaaauauaaguacccugcgcugaacgucacaaugcccaauaacgacaaauucgauaagcucuauaucuggggcgugcaucacccuucuacagacuccgaucagaccagccuguacgcccaggcuuccgggagaguuacggugucuacaaaacggagccagcaaaccgucauuccgaauaucggaucccgccccugggugagaggcgugagcucucggauuuccaucuacuggacaauugucaagccuggggacauccugcucaucaacagcaccggaaaccugauugcccccagaggcuauuuuaagaucagaucugggaaaagcuccauuaugcggucugacgcuccuaucggaaaguguaauagcgagugcauuacccccaacggcuccaucccgaaugauaaaccuuuccagaacguuaaucgcaucacauacggcgccugucccagauaugugaagcagaacacgcuuaaacuggcgaccgggaugcggaaugugccugaaaagcagacacgcggaauuuuuggcgccaucgcuggguucauugagaacggaugggaaggcauggucgacgggugguacggauuuagacaccaaaauagcgagggcaccggccaggccgcugaucucaaaucuacacaggccgccaucaaccaaauuaaugggaagcugaaccggcuuaucgagaagaccaaugaaaaauuccaucagaucgagaaggaguucuccgaaguggaaggacgcauucaggaccuggagaaauauguugaggauacgaagaucgaccucuggagcuacaacgcugaacugcugguggcgcucgagaaucagcacacaauugaucugaccgacucugaaaugaacaaacuuuuugagcgcacccggaagcaacugagagaaaacgccgaggauaugggcaaugggugcuucaagaucuaucauaaaugugacaacgcuugcauuggauccauccgcaauggcacauacgaucacgacgucuaccgggacgaggcccucaacaauagauuucagauuaaggggguggaacugaaaagcggcuauaaggauuggauccuuuggaucuccuucgccauuucuugcuuucugcucuguguugugcugcugggauucaucaugugggcuugccagaaaggcaacauucgcuguaauaucugcauuuga

SEQ ID NO: 192491 - RNA, 1701 nt, Artificial Sequence
  derived and/or modified CDS sequence (opt5) from hemagglutinin__InfluenzaA__ABB46436
augaagaccaucauugcccugagcuacauccucugccugguguucgcucagaaacuucccggcaacgacaauuccacagccacgcugugucucgggcaccaugcggucccuaacggaaccauuguuaagacaaucaccaaugaucaaauugaggugacaaacgcuaccgaacuggugcagucuagcuccacaggcgggaucugcgacucuccgcaccagauccuugauggagagaauuguacccugauugacgcccuccugggcgauccccagugcgacggguuucaaaacaaaaagugggaucuguucgucgaaagaagcaaagccuauuccaauuguuacccuuaugacgugcccgauuacgcuucucuccggagccugguugccuccagcggaacgcuugaguuuaacaaugaaucuuucaacuggaccggcgugacacagaauggcaccuccagcgcuugcaagcgcagaucuaacaauuccuuuuucagccggcugaacuggcucacacaucugaaguuuaaauauccugcccuuaaugucaccaugcccaacaacgagaaguacgacaaacuguauaucuggggagugcaccauccugggacggauaaugaccagauuucucucuacgcgcaggccuccggccgcaucacaguuagcaccaagagaucccaacagacagugauuccgaacaucgggucucggccccgcgucagagauauuccuagccggaucuccaucuacuggaccauugugaaacccggagacauccugcugauuaauagcaccggcaaccucaucgcuccucgcggguauuucaagauuagaucuggaaaguccagcaucaugcggucugacgcccccaucggcaaauguaauagcgagugcauuacaccgaacggcuccaucccuaaugauaagcccuuucagaacgugaaucgcauuacguacggggcuuguccuagauaugucaaacagaacacccugaagcuggccacaggaaugcggaauguucccgaaaaacaaacccgcggcaucuucggggcgauugccggauuuaucgagaacggcugggaagggaugguggacggaugguacggcuucagacaccaaaauucugagggcaucgggcaggcugccgaucuuaagagcacacaggcugccauuaaccagaucaauggaaaacucaaccggcugauuggcaagaccaacgagaaguuucaccagaucgaaaaagaguucuccgaaguggaggggcgcauucaggaccuugaaaaguaugucgaggauacgaaaaucgaccuguggagcuacaaugccgagcuccugguggcucuggaaaaccaacauacaauugaucucaccgacucugagaugaauaagcuguucgaaagaaccaaaaagcagcuucgggagaacgcggaagauaugggaaauggcugcuuuaagaucuaucacaaaugugacaacgccugcaucggguccauuagaaauggcacauacgaucaugacguuuaccgcgacgaggcucugaacaaucgguuccagaucaagggaguggagcucaaaagcggcuauaaggauuggauucuguggaucucuuuugccauuuccugcuuccuucugugugucgcccuccugggguuuaucaugugggcuugccagaaaggaaacaucagauguaauauuugcaucuga

SEQ ID NO: 192492 - RNA, 1701 nt, Artificial Sequence; identical to SEQ ID NO: 192425
  derived and/or modified CDS sequence (opt5) from hemagglutinin__InfluenzaA__ABB46447

SEQ ID NO: 192493 - RNA, 1701 nt, Artificial Sequence
  derived and/or modified CDS sequence (opt5) from hemagglutinin__InfluenzaA__ABB46458
augaagaccaucauugcccugagcuacauccucugccugguguucgcucagaaacuucccggcaacgacaauuccacagccacgcugugucucgggcaccaugcggucccuaacggaaccauuguuaagacaaucaccaaugaucaaauugaggugacaaacgcuaccgaacuggugcagucuagcuccacaggcgggaucugcgacucuccgcaccagauccuugauggagagaauuguacccugauugacgcccuccugggcgauccccagugcgacggguuucaaaacaaaaagugggaucuguucgucgaaagaagcaaagccuauuccaauuguuacccuuaugacgugcccgauuacgcuucucuccggagccugguugccuccagcggaacgcuugaguuuaacaaugaaucuuucaacuggaccggcgugacacagaauggcaccuccagcgcuugcaagcgcagaucuaacaauuccuuuuucagccggcugaacuggcucacacaucugaaguuuaaauauccugcccuuaaugucaccaugcccaacaacgagaaguucgacaaacuguacaucuggggagugcaccauccugggacggauaaugaccagauuucucucuaugcgcaggccuccggccgcaucacaguuagcaccaagagaaaccaacagacagugauuccgaauaucgggucccggccccgcgucagagauauuccuucucggaucagcaucuacuggaccauugugaaacccggagacauccugcugauuaacuccaccggcaaucucaucgcuccucgcggguacuuuaagauuagaagcggaaagucuuccaucaugcggagcgacgcccccaucggcaaauguaagucugagugcauuacaccgaacggcagcaucccuaaugauaaacccuuccagaacgugaaucgcauuacguauggggcuuguccuagauacgucaagcagaacacccugaaacuugccacaggaaugcggaauguucccgaaaagcaaacccgcggcaucuuuggggcgauugccggauucaucgagaacggcugggaagggaugguggacggaugguauggcuuuagacaccaaaauuccgagggcaucgggcaggcugccgaucugaaaucuacacaggcugccauuaaccagaucaauggaaagcucaaccggcugauuggcaagaccaacgagaaauuccaccagaucgaaaaggaguucagcgaaguggaggggcgcauucaggaccuugaaaaauacgucgaggauacgaagaucgaccugugguccuauaaugccgagcuccugguggcucuggaaaaccaacauacaauugaucucaccgacagcgagaugaauaaacuguuugaaagaaccaagaagcagcuucgggagaacgcggaagauaugggaaauggcugcuucaaaaucuaccacaagugugacaacgccugcaucgggucuauuagaaauggcacauaugaucaugacguuuaccgcgacgaggcucugaacaaucgguuucagaucaaaggaguggagcucaaguccggcuacaaagauuggauucuguggaucagcuucgccauuucuugcuuucuucugugugucgcccuccugggguucaucauguggggaugccagaagggcaacaucagauguaauauuugcaucuga

SEQ ID NO: 192494 - RNA, 1701 nt, Artificial Sequence
  derived and/or modified CDS sequence (opt5) from hemagglutinin__InfluenzaA__ABB51961
augaagaccaucauugcccugagcuacauccucugccugguguucgcucagaaacuucccggcaacgacaauuccacagccacgcugugucucgggcaccaugcggucccuaacggaaccauuguuaagacaaucaccaaugaucaaauugaggugacaaacgcuaccgaacuggugcagucuuuuagcacaggcgggaucugcgacuccccgcaccagauccuugauggagagaauuguacccugauugacgcccuccugggcgauccccagugcgacggguuccaaaacaaaaagugggaucuguuugucgaaagaucuaaagccuauagcaauuguuacccuuaugacgugcccgauuacgcuugcguucggucccucguggccucuagcggaacgcuggaguucaacaaugaauccuuuaacugggcuggcgucacccagaauggcacaagcucugccuguaagcgcagauccaacaagagcuucuuuucucggcuuaauuggcugacccaucucaaauauaaguacccugcgcugaacgugacaaugcccaauaacgagaaauucgacaaacuuuauaucuggggaguucaccauccugggaccgauuccgaccagauuagccuguacgcccaggcuucuggccgcaucacgguguccacacaaagaugcaagcagcucgucauuccgaacaucgggagccggccccgcgugagagauguguccucucggauuagcaucuacuggaccaucgucaauccuggagacauucugcugaucaacuccacaggcaaucucauugcccccagaggguauuuuaagaucagaagcggaaagucuuccauuaugcggagcgacgcuccuaucggcaaauguaacucugagugcaucacccccaauggcagcauuccgaacgauaagccuuuccagaauguuaaccgcaucaccuacggggccugucccagauaugugaaacagaauacacugaaacuugcgacgggaaugcggaacgugccugaaaagcaaacccgcggcauuuuuggggccaucgcuggauucauugagaauggcugggaagggauggucgacggaugguacggcuuuagacaccagaacuccgagggcacagggcaggccgcugaucugaagucuacccaagccgccaucaaucagaucaacggaaaacucaaucggcugauuggcaagacaaacgagaaguuccaccagaucgaaaaagaguucagcgaaguggaggggcgcauucaggaccuugaaaaguauguugaggauaccaaaaucgaccugugguccuacaacgcugagcuccugguggcgcuggaaaaucaacauacgauugaucucacagacagcgagaugaacaagcuguuugaacgcaccaaaaagcagcuucgggagaaugccgaagauaugggaaacggcugcuucaagaucuaucacaaaugcgacaaugcuuguauugagucuaucagaaacgggaccuacgaucaugacgucuaccgcgacgaggcccugaauaaccgguuucagaucaagggcguggaacucaaauccggauauaaggauuggauucuguggaucagcuucgccauuucuugcuuucuucuguguguugcucuccugggcuucaucaugugggccugccagaaagggaauauuagauguaacaucugcaucuga

SEQ ID NO: 192495 - RNA, 1698 nt, Artificial Sequence
  derived and/or modified CDS sequence (opt5) from hemagglutinin__InfluenzaA__ABB51962
augaaggccaaacugcucgugcugcuuugcaccuucacagcuacguacgccgacaccaucuguauuggcuaucacgcgaacaauagcacagauaccgucgacacaguucuggagaagaacgugaccgugacacauuccgucaaucuccuggaagauucucacaacgggaaacuuugccugcucaagggaaucgcuccccugcagcugggcaauuguagcguggccggguggauucucggaaacccugagugcgaacugcuuaucuccaaagagucuuggagcuacauuguugaaaccccgaaucccgagaacggcacguguuauccuggguacuuugccgacuaugaggaacugagagagcaacucuccucugugagcuccuucgaacgguuugagaucuuccccaagggaagcucuuggccuaaucauaccgucacaggcguguccgcuagcugcucucacaacggcaaguccagcuuuuaccgcaaucugcuuuggcugaccgggaaaaacggacucuaucccaaucugucuauguccuacguuaacaauaaggagaaagaagugcugguccucuggggcgugcaucacccuccgaacaucgggaaccagagagcccuguaccacacagagaaugcuuaugugagcgucguuuccucucauuacagccggcgcuucacccccgaaauugccaagagaccuaaagugcgggaucaggagggacgcaucaacuauuacuggacgcuucuggaacccggcgacacaauuaucuuugaggcgaaugggaaccucauugccccuugguaugcuuucgccauguccagaggauuuggcagcggcaucucuaccuccaaugcucccaugggggagugugaugccaaguuccagacaccgcaaggaggcauuaacaucagccugccuuuucagaaugugcaccccgucaccaucggggaaugcccuaacuacgugcggucugcgaagcugcgcaugguuaccggacuuagaaauauucccagcauccagucccggggccucuucggggccauugcuggauuuaucgagggcggcuggacagggaugguggacggaugguauggcuaccaucaccagaacgaacaagggucuggauacgccgcugaucagaaaagcacgcagaaugccauuaacggcaucaccaauaaggucaacuccgugaucgagaaaaugaauacacaguucaccgccguugggaaggaguucaacaaacuggaacgcagaauggagaaccugaauaagaaaguggacgauggcuuucucgacauuuggacauauaacgcugaacugcuuguccugcucgagaaugaacggacccuggauuuccacgacagcaacgugaagaaucuuuacgagaaggucaaaucucaacugaagaacaaugcgaaagaaaucggaaacggcuguuccgaguuuuaucauaagugcaauaacgaguguauggaaagcgugaaaaaugggacguacgacuaucccaaguacucugaggaauccaagcucaaccgcgagaaaauugauggaguuaagcuggagagcaugggcguguaucagauccuggccauuuacuccacagucgcuucuagccucgugcugcuuguuucccugggggccaucucuuucuggaugugcagcaauggaucccuccagugcagaaucuguauuuga

SEQ ID NO: 192496 - RNA, 1701 nt, Artificial Sequence
  derived and/or modified CDS sequence (opt5) from hemagglutinin__InfluenzaA__ABB51963
augaagaccaucauugcccugagcuacauccucugccugguguucgcucagaaacuucccggcaacgacaauuccacagccacgcugugucucgggcaccaugcggucccuaacggaaccauuguuaagacaaucaccaaugauagaauugaggugacaaacgcuaccgaacuggugcaaucuagcuccacaggcgggaucugcgacucuccgcaccagauccuugauggagagaauuguacccugauugacgcccuccugggcgauccccagugcgacggguuucagaacaaaaagugggaucuguucgucgaacggagcaaagccuauuccaauuguuacccuuaugacgugcccgauuacgcuucucuccgcagccugguugccuccagcggaacgcuugaguuuaacaaugaaucuuucaacuggaccggcgugacacaaaauggcaccuccagcgcuugcaagagacggucuaacaauuccuuuuucagccgccugaacuggcucacacaucugaaguuuaaauauccugcccuuaaugucaccaugcccaacaacgagaaguucgacaaacuguacaucuggggagugcaccauccugggacggauaaugaccagauuucucucuaugcgcaggccuccggcagaaucacaguuagcaccaagcggucccagcaaacagugauuccgaacaucgggucucgccccagaguccggcacauuccuagccgcaucuccaucuacuggaccauugugaaucccggagauauccugcugauuaacagcaccggcaaucucaucgcuccuagaggguacuuuaaaauucggucuggaaaguccagcaucaugcgcucugacgcccccaucggcaaguguaacagcgagugcauuacaccgaauggcuccaucccuaacgacaaacccuuccagaaugugaacagaauuacguauggggcuuguccucgguacgucaagcagaauacccugaaacuugccacaggaaugcgcaacguucccgaaaagcagaauagaggcaucuuuggggcgauugccggauucaucgagaacggcugggaagggaugguggauggaugguauggcuuucggcaccaaaauucugagggcaucgggcaggcugccgaccugaaaagcacccaggcugccauuaaccaaaucaacgagaagcucaauagacugauuggaaaaacaaacgaaaaguuccaucagaucgagaaggaguucuccgaaguggaaggccgcauucaggaucuugagaaauacgucgaggacaccaagaucgaucuguggagcuauaaugccgaacuccugguggcucuggagaaccagcacacgauugaccucacagauucugaaaugaauaaacuguuugagcggaccaagaaacaacuuagagaaaacgcggaggacauggggaauggaugcuucaagguuuaccauaagugugauaacgccugcaucggcuccauccgcaaugggaccuaugaccacaacguguaccgggaugaggcucugaauaacagauuucagauuaaaggcgucgaacucaagagcggauacaaagacuggauccuguggauuucuuucgccaucuccugcuuucuucuguguguggcccuccugggcuucauuaugugggcuugccagaaggggaauauccgcuguaacaucugcauuuga

SEQ ID NO: 192497 - RNA, 1701 nt, Artificial Sequence; identical to SEQ ID NO: 192354
  derived and/or modified CDS sequence (opt5) from Hemagglutinin__InfluenzaA__ABB51964

SEQ ID NO: 192498 - RNA, 1698 nt, Artificial Sequence
  derived and/or modified CDS sequence (opt5) from hemagglutinin__InfluenzaA__ABB53603
augaaggugaaacugcucauccugcuuugcaccuucacagccacguacgcugacaccauuuguaucggcuaucacgccaacaauagcacagauaccgucgacacaguucuggagaagaacgugaccgugacacauuccgucaaucuccuggaagauucucacaacgggaaacuuugccugcucaagggaauugcgccccugcagcugggcaauuguagcguggcuggguggauccucggaaacccugagugcgaacugcuuauuuccaaagagucuuggagcuacaucguugaaaccccgaaucccgagaacggcgccuguuauccuggguacuuugccgacuaugaggaacugagagagcaacucuccucugugagcuccuucgaacgguuugagaucuuccccaaggagagcucuuggccuaaucauacggucaccggaguguccgcuagcugcucucacaacggcaaguccagcuuuuaccgcaaucugcuuuggcugacaggcaaaaacgggcucuaucccaaucugucuaaguccuacgccaacaauaaaaagaaagaaguucugauucucuggggagugcaucacccuccgaacaucggcaaccagagaacccuguacuauacagagaaugcuuacgucagcgugguguccucucacuauagccggcgcuucacccccgaaauuacgaagagaccuaagguccgggaucaggaggggcgcaucaacuacuauuggacacuucuggaacccggagacaccauuaucuuugaggccaauggcaaccucauugcgccuugguacgccuucgcucuguccagaggguuuggaagcggcaucaucacaucuaaugcccccauggaugagugugacgcuaaaugccagaccccgcaaggcgccauuaacuccagccuuccuuuccagaauguucaucccgugaccaucggggaauguccuaaguaugugcggucugcgaaacugcgcauggucacaggacucagaaacauucccagcauccagucccggggccuguuuggggccauugcuggauucaucgagggcggguggacgggaaugguggauggcugguacggcuaccaccaucagaaugaacaagggucuggauaugccgcugaccaaaagagcacccagaacgccaucaauggcauuacaaacaaaguuaauuccgugaucgagaagaugaacacccaguuuacagccgucgggaaagaguucaauaagcuggaacgcagaauggagaaccucaacaagaaaguggaugacggauuccuggauauuuggaccuacaaugcugaacuucugguucuccuggagaacgaacggacgcuugacuuucacgacagcaaugugaagaaccuguaugagaaagucaagucucagcucaaaaauaacgcgaaggaaaucggcaaugggugcuucgaguuuuaccacaaguguaacaaugagugcauggaauccgugaaaaacggcacauaugauuaccccaaguauagcgaggaaucuaaacugaaucgcgagaagauugacggagucaaacuggauuccaugggcguguaccagauccucgccaucuacagcaccguugcuuccucucuggugcuucuggucagccucggggccauuuccuucuggaugugcucuaacggaagccugcaguguagaaucugcauuuga

SEQ ID NO: 192499 - RNA, 1701 nt, Artificial Sequence; identical to SEQ ID NO: 192327
  derived and/or modified CDS sequence (opt5) from hemagglutinin__InfluenzaA__ABB53614

SEQ ID NO: 192500 - RNA, 1701 nt, Artificial Sequence; identical to SEQ ID NO: 192327
  derived and/or modified CDS sequence (opt5) from hemagglutinin__InfluenzaA__ABB53625

SEQ ID NO: 192501 - RNA, 1701 nt, Artificial Sequence; identical to SEQ ID NO: 192354
  derived and/or modified CDS sequence (opt5) from hemagglutinin__InfluenzaA__ABB53652

SEQ ID NO: 192502 - RNA, 1701 nt, Artificial Sequence
  derived and/or modified CDS sequence (opt5) from hemagglutinin__InfluenzaA__ABB53663
augaagaccaucuucgcccugagcuacauucucugccugguguuugcucagaaacuucccggcaacgacaauuccacagccacgcugugucucgggcaccaugcggucccuaacggaaccaucguuaagacaauuaccaaugaucaaaucgaggugacaaacgcuaccgaacuggugcagucuagcuccacaggcgggauuugcgacucuccgcaccagauccuugauggagagaauuguacccugaucgacgcccuccugggcgauccccagugcgacggguuccaaaacaaaaagugggaucuguuugucgaaagaagcaaagcccauuccaauuguuauccuuacgacgugcccgauuaugcuucucuccggagccugguugccuccagcggaacgcuugaguucaacaaugaaucuuuuaacuggaccggcgugacacagaauggcaccuccagcgcuugcaagcgcagaucuaacaauuccuucuuuagccggcugaacuggcucacacaccugaaguucaaauacccugcccuuaaugucaccaugcccaacaacgagaauuuugacaagcuguauauuuggggagugcaucacccugggacggauaacgaccagaucucucucuacgcgcaggccuccggccgcauuacaguuagcaccaaaagaucccaacagacagugaucccgaauauugggucucggccccgcgucagagauaucccuagccggauuuccaucuauuggaccaucgugaagcccggagacauucugcugaucaacagcaccggcaaucucauugcuccucgcggguacuucaaaaucagaucuggaaaguccagcauuaugcggucugacgcccccaucggcaaguguaacagcgagugcaucacaccgaauggcuccauuccuaacgauaaacccuuucagaaugugaaccgcaucacguacggggcuuguccuagauaugucaagcagaauacccugaaacuugccacaggaaugcggaacguucccgaaaagcaaacccgcggcauuuucggggcgaucgccggauuuauugagaauggcugggaagggaugguggacggaugguacggcuucagacaccagaacucugagggcaucgggcaggcugccgaucugaaaagcacacaagcugccaucaaucagauuaacggaaagcucaaccggcugaucggcaaaaccaaugagaaguuccaucagauugaaaaggaguuuuccgaaguggaggggagaauccaggaccuugaaaaauaugucgaggauacgaagauugaccuguggagcuacaacgccgagcuccugguggcucuggaaaaucaacacacaaucgaucucaccgacucugagaugaacaaacuguucgaacgcaccaagaaacagcuucgggagaaugcggaagauaugggaaacggcugcuuuaagauuuaucauaagugugacaaugccugcaucggguccaucagaaacggcacauacgaucacgacguuuaucgcgacgaggcucugaauaaccgguuccagauuaaaggaguggagcucaagagcggcuacaaagauuggauccuguggauuucuuuugccaucuccugcuuccuucugugugucgcccuccugggguuuauuaugugggcuugccagaagggaaauaucagauguaacaucugcauuuga

SEQ ID NO: 192503 - RNA, 1701 nt, Artificial Sequence; identical to SEQ ID NO: 192327
  derived and/or modified CDS sequence (opt5) from hemagglutinin__InfluenzaA__ABB53685

SEQ ID NO: 192504 - RNA, 1701 nt, Artificial Sequence
  derived and/or modified CDS sequence (opt5) from hemagglutinin__InfluenzaA__ABB53696
augaagaccaucauugcccugagcuacauccucugccugguguucgcucagaaacuucccggcaacgacaauuccacagccacgcugugucucgggcaccaugcggucccuaacggaacccugguuaagacaauuaccaaugaucaaaucgaggugacaaacgcuaccgaacuugugcagucuagcuccacaggcagaauuugcgacucuccgcaccagauccuggauggggagaauuguacccucaucgacgcccugcugggagauccccauugcgacggcuuucagaacaaagaaugggaucucuucgucgagcggagcaaggccuauuccaauuguuacccuuaugacgugcccgauuacgcuucucugcgcagccuuguugccuccagcgggacgcuggaauuuaacaaugagucuuucaacuggaccggaguggcucaaaauggcacauccagcgccugcaaaagacggucuaacaaguccuuuuucagccgccucaauuggcugcaccagcuuaaguauaaauacccugcgcugaacgucaccaugcccaauaacgagaaguuugacaaacucuauauuuggggcgugcaucacccuucuacagauuccgaccagaucagccuguacgcccaggcuuccgggagaguuaccgugucuacgaagcggagccaacagacagucauuccgaacaucggaucccgccccugggugagaggcgugagcucucggauuuccaucuacuggaccauugucaaaccuggggauauccugcucaucaauagcacaggaaaccugauugcccccagaggcuauuucaagaucagaucuggaaagagcuccauuaugcggucugacgcuccuaucgggaaauguaauagcgaaugcauuacccccaacggcuccaucccgaaugacaagccuuuucagaacguuaaucgcaucaccuacggcgccugucccagauaugugaaacagaacacacuuaagcuggcgacggggaugcggaaugugccugagaaacaaacccgcggaauuuucggcgccaucgcuggguuuauugaaaacggaugggagggcauggucgaugggugguacggauucagacaccagaauagcgagggcacaggccaggccgcugaccucaagucuacccaagccgccaucaaccagauuaaugggaaacugaaccggcuuaucgaaaagacaaaugagaaguuucaucagaucgaaaaagaguucuccgaaguggagggacgcauucaggaucuggagaaguauguugaagacaccaaaaucgaucucuggagcuacaacgcugagcugcugguggcgcucgaaaaccaacacacgauugaccugacagauucugagaugaauaaacuuuucgaacgcaccaagaagcagcugcgggagaacgccgaggacaugggcaaugggugcuuuaagaucuaucauaaaugugauaacgcuugcauuggauccaucagaaauggcaccuacgaccacgaugucuaccgcgacgaagcccucaacaaucgguuccagauuaaggggguggagcugaaaagcggcuauaaggacuggauccuuuggaucuccuuugccauuucuugcuuccugcucuguaucgcucugcugggauuuauuaugugggccugccagaaaggcaacaucagauguaauguuugcauuuga

SEQ ID NO: 192505 - RNA, 1698 nt, Artificial Sequence; identical to SEQ ID NO: 192368
  derived and/or modified CDS sequence (opt5) from hemagglutinin__InfluenzaA__ABB53707

SEQ ID NO: 192506 - RNA, 1701 nt, Artificial Sequence; identical to SEQ ID NO: 192315
  derived and/or modified CDS sequence (opt5) from hemagglutinin__InfluenzaA__ABB53718

SEQ ID NO: 192507 - RNA, 1698 nt, Artificial Sequence
  derived and/or modified CDS sequence (opt5) from hemagglutinin__InfluenzaA__ABB53740
augaaggugaaacugcucguccugcuuugcaccuucacagccacguacgcugacaccaucuguauuggcuaucacgccaacaauagcacagauaccguugacacagugcuggagaagaacgugaccgucacacauuccgugaaucuccuggaagauucucacaacgggaaacuuugccugcucaagggaaucgcgccccugcagcugggcaauuguagcguugcuggguggauucucggaaacccugagugcgaacugcuuaucuccaaagagucuuggagcuacauuguggaaaccccgaaucccgagaacggcacguguuauccuggguacuuugccgacuaugaggaacugagagagcaacucuccucugucagcuccuucgaacgguuugagaucuuccccaaggagagcucuuggccuaaucauaccgugacaggaguuuccgccagcugcucucacaacggcaaguccagcuuuuaccgcaaucugcuuuggcugaccggcaaaaacgggcucuaucccaaucugucuaaguccuacgcuaacaauaaagaaaaggaggugcugguccucuggggagugcaucacccuccgaacaugggcgaucagagagcccuguaccacacagaaaacgcuuaugugagcgucguuuccucucauuacagccggcgcuucacccccgagaucgccaaaagaccuaaggugcgggaccaggaagggcgcauuaauuauuacuggacgcuucuggagcccggagagacaaucauuuuugaagcgaacggcaaucucaucgccccuagauaugcuuucgcccugucccggggguuuggaagcggcauuaucaccucuaacgcucccauggaugagugugacgccaagugccagacaccgcaaggcgcgauuaauuccagccuuccuuuccagaacgugcaccccgucaccaucggggaauguccuaaauacgugcgcucuaccaagcugagaaugguuacaggacuccggaauauccccagcauucagucccgcggccuguuuggggccaucgcuggauucauugagggcggguggacgggaaugguggauggcugguauggcuaccaucaccagaacgaacaagggucuggauacgccgcugaccagaaaagcacccagaaugccaucaacggcauuacaaauaaggucaacuccgugaucgagaaaaugaauacccaguuuacagccguugggaaggaguucaacaaacuggaaagacggauggagaaucucaacaagaagguggaugacggauuccuggauaucuggaccuauaacgcugaacuucugguccuccuggagaaugaacgcacgcuugacuuucacgacagcaacgugaaaaaucuguacgagaaggucaaaucucaacucaagaacaaugcgaaagagauuggcaacgggugcuucgaauuuuaucauaaguguaaugaugagugcauggaauccgugaagaacggcacauacgacuaucccaaauacagcgaggagucuaagcugaauagagagaaaaucgauggaguuaagcuggaauccaugggcguguaucagauucucgccaucuacagcaccgucgcuuccucucuggugcuucugguuagccucggggccauuuccuucuggaugugcucuaacggaagccugcagugucggaucugcaucuga

SEQ ID NO: 192508 - RNA, 1701 nt, Artificial Sequence
  derived and/or modified CDS sequence (opt5) from hemagglutinin__InfluenzaA__ABB53751
augaagaccaucauugcccugagcuacaucuccugccucguguucgcucagaaccugcccggcaaugacaacucuacagccacgcuuugucuggggcaccaugcggucccuaauggaacccucguuaaaacaauuaccaacgaucaaaucgaggugacaaaugcuaccgaacuggugcagagcuccucuacaggcagaauuugcgacagcccgcaccggauccuugaugggaagaacuguacccugaucgacgcccuccugggagauccccauugcgacggcuuucagaaugagaaaugggaucuguucgucgaacgcuccaaggccuuuucuaacuguuauccuuacgacgugcccgauuaugcuagccucagaucccugguugccagcucugggacgcuugaguucauuaaugaaggauuuaacuggaccggcgugacacaguccggcgggagcuacgcuugcaaacggggaucugacaauuccuucuuuagccgccugaacuggcucuauaagucugaguccaaguacccuguccugaaugugaccaugcccaacaauggcaacuucgauaaacuuuauaucuggggaguucaccauccuagcacagacaaggagcaaaccaaccuguacgugagagccuccgggcgggucacggugucuacaaaacgcagccagcagaccauuaucccgaauauuggcuccagacccugggugcgggggcucagcucuggaaucuccauuuacuggacaaucgucaagccuggcgauauccugcugauuaacagcaauggcaaccucaucgcgccccgcggguauuuuaaaauuagaaccggaaagucuagcauccugcgguccgacgccccuauuggcaccuguucuagcgaaugcaucacacccaauggguccaucccgaacgacaagccuuuccagaauguuaacaaaauuacguacggagcuugucccaaguaugugaaacaaaauacccuuaagcuggccacaggcaugcgcaacgugccugagaaacagaccagagggaucuuuggagcuauugccggcuucaucgaaaauggcugggaggggauggucgauggaugguacggcuuucggcaccagaacagcgaggggacaggacaggcggccgaccucaagucuacccaagcugccauugaucagaucaauggcaaacugaaccgcgugaucgaaaagacgaaugagaaguuccaccagauugaaaaagaguucuccgaaguugaggggagaauccaagaccuugagaaguauguggaagauacaaaaauugaccuguggagcuacaacgcugagcuccuggucgcccuggaaaaccagcauaccaucgaucucaccgacucugagaugaauaagcuguuugagaaaacacggagacagcuucgcgaaaacgccgaggauaugggcaauggaugcuucaagauuuaucacaagugugacaacgcuugcaucggcuccauucggaaugggaccuacgaucaugacguguacagagacgaagcgcugaacaaucgcuuucagaucaaaggaguugagcucaagagcggcuauaaagauuggauccuguggauuuccuucgccaucucuugcuuucuucugugugugguccuccugggguucauuaugugggcuugccaaaagggaaacauccgguguaauauuugcaucuga

SEQ ID NO: 192509 - RNA, 1701 nt, Artificial Sequence
  derived and/or modified CDS sequence (opt5) from hemagglutinin__InfluenzaA__ABB60007
augaagaccaucauugcccugagcuacauccucugccugguguucgcucagaaacuucccggcaacgacaauuccacagccacgcugugucucgggcaccaugcggucccuaacggaacccugguuaagacaauuaccaaugaucaaaucgaggugacaaacgcuaccgaacuugugcagucuagcuccacagacagaauuugcgauucuccgcaccggauccuggacggcgagaauuguacccucaucgaugcccugcugggggacccccauugcgauggauuucagaacaaagaaugggaccucuucgucgagcgcagcaaggccuauuccaauuguuacccuuaugaugugcccgacuacgcuucucugagaagccuuguugccuccagcggcacgcuggaauuuaacaaugagucuuucaacuggaccgggguggcucagaauggaacauccuaugccugcaaacggcgcagcauuaagucuuucuucuccagacucaacuggcugcaccaacuuaaguacaaauauccugcgcugaaugucaccaugcccaacaaugauaaguuugacaaacucuacaucuggggcgugcaucacccuagcacagauucugaccagaccucccuguacgcccaggcuagcggccggguuacgguguccacaaagcgcucucagcaaaccgucauuccgaacaucgggagcagacccugggugcggggaguguccagccgcauuucuaucuauuggacaauugucaaaccuggcgacauccugcucaucaacuccaccgggaaucugauugcccccagaggauacuucaagauccggagcggcaagucuagcauuaugcgcuccgaugcuccuaucgggaaauguaacucugagugcauuacccccaauggaagcaucccgaacgacaagccuuuucagaauguuaacagaaucacauauggcgccuguccccgguacgugaaacagaauacgcuuaagcuggcgaccggcaugcgcaacgugccugaaaaacagacaagagggauuuucggagccaucgcuggcuuuauugagaaugggugggaaggaauggucgauggcugguauggguuccggcaccaaaacuccgagggaaccggccaggccgcugaccucaagagcacacaggccgccaucaaucaaauuaacggcaaacugaauagacuuaucgagaagaccaacgaaaaguuucaucagaucgagaaagaauuuucugagguggaagggcgcauucaggaucuggagaaguacguugaggacacgaaaaucgaucucugguccuauaaugcugaacugcugguggcgcucgagaaccagcacacaauugaccugaccgauagcgaaaugaacaaacuuuucgagcggaccagaaagcaacugcgcgaaaaugccgaggacaugggaaacggcugcuuuaagaucuaccauaagugugauaaugcuugcauugggucuauccggaacggaacauacgaccacgacgucuauagagaugaggcccucaauaaccgcuuccagauuaaaggcguggaacugaaguccggguacaaagacuggauccuuuggaucagcuuugccauuuccugcuuccugcucuguguugugcugcugggcuuuaucaugugggcuugccagaagggaaauauucgguguaacaucugcauuuga

SEQ ID NO: 192510 - RNA, 1701 nt, Artificial Sequence
  derived and/or modified CDS sequence (opt5) from hemagglutinin__InfluenzaA__ABB77853
augaagaccaucauugcccugagcuacaucuccugccucguguucgcucagaaacugcccggcaacgacaauucuacagccacgcuuugucuggggcaccaugcggucccuaacggaacccucguuaagacaauuaccaaugaucaaaucgaggugacaaacgcuaccgaacuggugcagagcuccucuacaggcagaauuugcgacagcccgcaccggauccuugauggggagaauuguacccugaucgacgcccuccugggagauccccauugcgacggcuuucagaacaaagaaugggaucuguucgucgagcgcuccaaggccuauucuaauuguuacccuuaugacgugcccgauuacgcuagccucagaucccugguugccagcucugggacgcuugaauuuaacaaugaguccuucaacuggaccggaguggcucagaauggcacaagcuaugccugcaaacggcgcucuauuaaguccuuuuucagcagacugaacuggcuccaccaacugaaguacaaauauccugcgcuuaaugucaccaugcccaacaaugacaaguuugauaaacuguacaucuggggcgugcaucacccuucuacagacuccgaucagaccagccucuacgcccaggcuuccgggcggguuacggugucuacaaagcgcagccagcaaaccgucauuccgaacaucggauccagacccugggugcggggcgugagcucucgcauuuccaucuauuggacaauugucaaaccuggggacauccugcugaucaacagcaccggaaaucucauugcccccagaggcuacuucaagauccggucuggaaagagcuccauuaugcgcucugacgcuccuaucgggaaauguaacagcgagugcauuacccccgauggcuccaucccgaaugacaagccuuuucagaacguuaauagaaucacauauggcgccuguccccgguacgugaaacagaacacgcugaaacuugcgaccgggaugcgcaaugugccugaaaagcagacaagaggaauuuucggcgccaucgcuggguuuauugagaacggaugggaaggcauggucgaugggugguauggauuccggcaccaaaauagcgagggcaccggccaggccgcugaccugaagucuacacaggccgccaucaaccaaauuaaugggaaacucaacagacugaucgagaagaccaaugaaaaguuucaucagaucgagaaagaguucuccgaaguggaaggacgcauucaggaucuugagaaguacguugaggacacgaaaaucgaucuguggagcuauaacgcugaacuccugguggcgcuggagaaucagcacacaauugaccucaccgauucugaaaugaacaagcuguucgagcggaccagaaaacaacuucgcgaaaacgccgaggacaugggcaaugggugcuuuaagaucuaccauaagugugauaacgcuugcauuggauccauccggaauggcacauacgaccacgacgucuauagagaugaggcccugaacaaucgcuuccagauuaaagggguggaacucaagagcggcuacaaagacuggauccuguggaucuccuuugccauuucuugcuuccuucuguguguugugcuccugggauuuaucaugugggcuugccagaagggcaacauucgguguaauaucugcauuuga

SEQ ID NO: 192511 - RNA, 1701 nt, Artificial Sequence
  derived and/or modified CDS sequence (opt5) from hemagglutinin__InfluenzaA__ABB79731
augaagaccaucauugcccugagcuacauccucugccugguguucgcucaggagcuucccggcaacgacaauuccacagccacgcugugucucgggcaccaugcggucccuaacggaaccauuguuaaaacaaucaccaaugaucaaauugaagugacaaacgcuaccgagcuggugcaaaauucuagcacaggcgggaucugcgacuccccgcaccagauccuugauggagaaaacuguacccugauugacgcccuccugggcgauccccagugcgacggguuucagaauaagaaaugggaucuguucgucgagagaucuaaggccuauagcaacuguuacccuuaugacgugcccgauuacgcuucccuccggucucugguugccagcuccggaacgcuugaauuuaauaacgagagcuucaauuggaccggcgugacacagaacggcaccucuuccgcuugcaaacgcagaagcaauaacucuuucuucucccggcugaauuggcucacacaucugaaguuuaaguauccugcccuuaacgucaccaugcccaacaaugagaaauucgacaagcuguacaucuggggagugcaccauccugggacggauaacgaccagacaagccucuaugcgcaggccucuggccgcauuaccguuuccacaaaaagaagccaacagaccgugaucccgaauauugggucccggccccgcgucagagauaucccuucucggauuagcaucuacuggaccaucgugaagcccggagacauucugcugaucaacuccacaggcaaucucauugcuccucgcggguacuuuaaaaucagaagcggaaagucuuccauuaugcggagcgacgcccccaucggcaaguguaacucugaaugcaucacgccgaauggcagcauuccuaacgauaaacccuuccagaaugugaaccgcaucaccuauggggcuuguccuagauacgucaagcagaauacacugaaacuugccaccggaaugcggaacguucccgagaagcaaacacgcggcauuuuuggggcgaucgccggauucauugaaaauggcugggaggggaugguggacggaugguauggcuuuagacaccagaacuccgagggcaucgggcaggcugccgaucugaaaucuacccaagcugccaucaaucagauuaacggaaagcucaaccggcugaucggcaaaacgaaugaaaaguuccaccagauugagaaggaauuuagcgagguggaagggagaauccaggaccuugagaaauacgucgaggauacaaagauugaccugugguccuauaacgccgaacuccugguggcucuggagaaucaacauaccaucgaucucaccgacagcgaaaugaacaaacuguuugagcgcacaaagaaacagcuucgggaaaaugcggaggauaugggaaacggcugcuucaagauuuaccacaagugugacaaugccugcaucgggucuaucagaaacggcaccuaugaucaugacguuuaccgcgacgaggcucugaauaaccgguuucagauuaaaggaguggaacucaaguccggcuacaaagauuggauccuguggauuagcuucgccaucucuugcuuucuucugugugucgcccuccugggguucauuaugugggcuugccagaagggaaauaucagauguaacaucugcauuuga

SEQ ID NO: 192512 - RNA, 1701 nt, Artificial Sequence
  derived and/or modified CDS sequence (opt5) from hemagglutinin__InfluenzaA__ABB79788
augaagaccaucauugcccugagcuacaucuucugccucguguuugcucagaaacugcccggcaacgacaauuccacagccacgcuuugucuggggcaccaugcggucccuaacggaacccucguuaagacaauuaccaaugaucaaaucgaggugacaaacgcuaccgaacuggugcagucuagcuccacaggcagaauuugcgacucuccgcaccggauccuugaugggaaaaauuguacccugaucgacgcccuccugggagauccccauugcgacggcuuccagaacgagaagugggaucuguuugucgaacgcagcaaagccuucuccaauuguuauccuuacgacgugcccgauuaugcuucucucagaagccugguugccuccagcgggacgcuugaguuuauuaacgaaggauucaauuggaccggcgugacacagucuggcggguccuacgcuugcaagcggggaagcgucaacuccuuuuucucucgccugaauuggcucuaugagagcgagucuaaguacccugugcugaacguuaccaugcccaauaacggcaaauuugacaaacuuuauaucuggggagugcaccauccuauuacagauaaggaacaaaccaaucuguacgucagagccuccgggcgggugacggugagcacaaagcgcucccagcagaccgucaucccgaacauuggcucuagacccuggguucgggggcucagcucccgcaucagcauuuacuggacaaucgugaaaccuggagacauccugcugauuaacucuaccggcaaucucaucgcgcccagaggcuauuucaagauucggaccgggaaguccagcaucaugcgcucugaugccccuauuggaacauguagcuccgagugcaucacgcccaacggcucuaucccgaaugacaaaccuuuucagaacgugaauaagauuaccuacggggcuugucccagauaugucaaacaaaacacacugaaacuugccaccggaaugcggaaugugccugaaaagcagacacgcggcaucuucggggcuauugccggauuuaucgagaacggcugggagggcaugguugacgggugguacggauucagacaccagaauagcgaaggcaccgggcaggcggccgaucugaaguccacgcaagcugccauugaccagaucaacggaaaacucaaucggcugaucgagaagacaaacgaaaaguuccaccagauugagaaagaauuuagcgagguggagggcagaauccaagaucuugaaaaguaugucgaggacaccaaaauugaucuguggucuuacaaugcugaacuccugguggcccuggagaaccagcauaccaucgaccucacagauuccgaaaugaauaagcuguucgagaaaacccgcaagcagcuucgggagaacgccgaagacauggggaacggcugcuuuaagauuuaucacaaaugugauaaugcuugcaucggaagcauuagaaacggcacauacgaccaugauguuuaccgcgacgaggcgcugaauaaccgguuccagaucaaggggguggaacucaaaucuggauauaaggacuggauccuguggauuuccuuugccaucagcugcuuccuucugugugucgugcuccugggcuuuauuaugugggcuugccaaaaagggaauaucagauguaacauuugcaucuga

SEQ ID NO: 192513 - RNA, 1701 nt, Artificial Sequence
  derived and/or modified CDS sequence (opt5) from hemagglutinin__InfluenzaA__ABB79799
augaagaccaucauugcccugagcuacaucuucugccucguguuugcucagaaacugcccggcaacgacaauuccacagccacgcuuugucuggggcaccaugcggucccuaacggaacccucguuaagacaauuaccaaugaucaaaucgaggugacaaacgcuaccgaacuggugcagucuagcuccacaggcagaauuugcgacucuccgcaccggauccuugaugggaaaaauuguacccugaucgacgcccuccugggagauccccauugcgacggcuuccagaacgagaagugggaucuguuugucgaacgcagcaaagccuucuccaauuguuauccuuacgacgugcccgauuaugcuucucucagaagccugguugccuccagcgggacgcuugaguuuauuaacgaaggauucaauuggaccggcgugacacagucuggcggguccuacgcuugcaagcggggaagcgucaacuccuuuuucucucgccugaauuggcucuaugagagcgagucuaaguacccugugcugaacguuaccaugcccaauaacggcaaauuugacaaacuuuauaucuggggagugcaccauccuuccacagauaaggaacaaaccaaucuguacgucagagccagcgggaaggugacgguguccacaaaacggucucagcagaccgucauuccgaacaucggcagccgccccuggguuagagggcucuccagccggauuucuaucuacuggacaauugugaagccuggagacauccugcugaucaacuccaccggcaaucucauugcgccccgcggcuauuucaagaucagaaccgggaaaagcucuauuaugcggagcgaugccccuaucggaacauguuccucugagugcauuacgcccaacggcagcaucccgaaugacaagccuuuucagaacgugaauaaaaucaccuacggggcuuguccccgcuaugucaagcaaaacacacugaaacuugccaccggaaugagaaaugugccugaaaagcagacacggggcauuuucggggcuaucgccggauuuauugagaacggcugggagggcaugguugacgggugguacggauuccgccaccaaaauuccgaaggcaccgggcaggcggccgaucugaaaagcacgcaggcugccaucgaccagauuaacggaaagcucaauagacugaucgagaagacaaacgaaaaauuccaccagaucgagaaggaauuuucugagguggagggccggauucaagaucuugaaaaauaugucgaggacaccaagaucgaucugugguccuacaaugcugaacuccugguggcccuggagaaccagcauaccauugaccucacagauagcgaaaugaauaaacuguucgagaagaccagaaagcagcuucgcgagaacgccgaagacauggggaacggcugcuuuaaaaucuaucacaagugugauaaugcuugcauuggaucuauccggaacggcacauacgaccaugauguuuacagagacgaggcgcugaauaaccgcuuccagauuaaagggguggaacucaaguccggauauaaagacuggauccuguggaucagcuuugccauuuccugcuuccuucugugugucgugcuccugggcuuuaucaugugggcuugccaaaaggggaauauucgguguaacaucugcauuuga

SEQ ID NO: 192514 - RNA, 1701 nt, Artificial Sequence
  derived and/or modified CDS sequence (opt5) from hemagglutinin__InfluenzaA__ABB79810
augaagaccaucauugcccugagcuacauccucugccugguguucgcucagaaacuucccggcaacgacaauuccacagccacgcugugucucgggcaccaugcggucccuaacggaacccugguuaagacaauuaccaaugaucaaaucgaggugacaaacgcuaccgaacuugugcagucuagcuccacaggcagacugugcgacucuccgcaccggauucucgaugggaaaaauuguacccugaucgacgcccugcucggagauccccauugcgacggcuuucagaacaaggagugggaucuguucgucgaacgcagcaaagccuauuccaauuguuacccuuaugacgugcccgauuacgcuucucuuagaagccugguugccuccagcgggacgcucgaguuuaucaacgaagacuucaauuggaccggaguggcucaggauggcggcucuuaugccugccggcgcggguccgucaacagcuuuuucucuagacugaauuggcuucacaagcuggaguacaaguauccugcgcucaacgugacaaugcccaauaacggaaaauuugacaagcuguacauuuggggcguucaucacccuuccaccgauagcgaccaaacaucucuguacgugcgggccuccgggcgcgucaccgugagcacgaaaagaucccagcagacagugaucccgaauauuggaucucggcccuggguccgcggccagagcuccagaaucagcauuuauuggaccaucguuaagccuggggacauucuccugaucgauucuacaggaaaccuuaucgcuccccggggcuacuucaaaauucgcaacggcaaguccagcaucaugagaucugacgccccuauugggaauuguagcuccgagugcaucacccccaacggaucuauuccgaaugauaagccuuuucaaaacgugaaucggaucaccuauggcgcuuguccccgcuacgugaaacagcacacacugaagcucgccacggggaugagaaacgucccugaaaaacagacccggggaaucuucggcgcgauugccggguuuaucgagaauggaugggaaggcaugguggacggcugguauggguucagacaucagaacagcgagggaacaggccaagcugccgaucugaaguccacccaggcugccauugaccagaucaaugggaaacuuaaccgccugauugagaagacaaaugaaaaauuucaccaaaucgagaaggaguucagcgaaguugaaggacggauccaggaucucgagaaguacguggaggacaccaaaauugaucuguggucuuauaacgccgaacugcucgucgcucuggagaaucagcauacgaucgaccuuacagauuccgaaaugaacaagcuguucgagagaacccgcaaacagcuccgggaaaaugcggaggacaugggcaacgggugcuuuaagauuuaccacaaaugugacaacgccugcaucggcagcauuagaaauggaaccuacgaucacgacguguaucgcgaugaggcucugaacaaucgguuccaaaucaagggcguugaacuuaagucuggguacaaagacuggauucuguggaucuccuuugccaucagcugcuuccuccugugugugguccugcucggauuuauuaugugggccugccagaagggcaacaucagauguaauauuugcaucuga

SEQ ID NO: 192515 - RNA, 1701 nt, Artificial Sequence
  derived and/or modified CDS sequence (opt5) from hemagglutinin__InfluenzaA__ABB79957
augaagaccaucauugcccugagcuacauccucugccugguguucgcucagaaacuucccggcaacgacaauuccacagccacgcugugucucgggcaccaugcggucccuaacggaacccugguuaagacaauuaccaaugaucaaaucgaggugacaaacgcuaccgaacuugugcagucuagcuccacaggcagacugugcgacucuccgcaccggauucucgaugggaaaaauuguacccugaucgacgcccugcucggagauccccauugcgacggcuuucagaacaaggagugggaucuguucgucgaacgcagcaaagccuauuccaauuguuacccuuaugacgugcccgauuacgcuucucuuagaagccugguugccuccagcgggacgcucgaguuuaucaacgaagacuucaauuggaccggaguggcucaggauggcggcucuuaugccugccggcgcggguccgucaacagcuuuuucucuagacugaauuggcuucacaagcuggaguacaaguauccugcgcucaacgugacaaugcccaauaacggaaaauuugacaagcuguacauuuggggcguucaucacccuuccaccgauagcgaccaaacaucucuguacgugcgggccuccgggcgcgucaccgugagcacgaaaagaucccagcagacagugaucccgaauauuggaucucggcccuggguccgcggccagagcuccagaaucgggauuuauuggaccaucguuaagccuggagacauucuccugaucaacagcacaggcaaccuuaucgcuccccggggcuacuucaaaauucgcaaugggaagucuuccaucaugagaagcgaugccccuauuggaaacuguucuagcgagugcaucacccccaauggcuccauuccgaacgacaagccuuuucaaaaugugaaccggaucaccuauggggcuuguccccgcuacgugaaacagcacacacugaagcucgccacgggaaugagaaaugucccugaaaaacagacccggggcaucuucggggcgauugccggauuuaucgagaacggcugggaaggcaugguggaugggugguauggauucagacaucagaauagcgagggcacagggcaagcugccgaccugaagucuacccaggcugccauugaucagaucaacggaaaacuuaaucgccugauugagaagacaaacgaaaaauuucaccaaaucgagaaggaguucuccgaaguugaaggccggauccaggaccucgagaaguacguggaggauaccaaaauugaccuguggagcuauaaugccgaacugcucgucgcucuggagaaccagcauacgaucgaucuuacagacucugaaaugaauaagcuguucgagagaacccgcaaacagcuccgggaaaacgcggaggauauggggaacggcugcuuuaagauuuaccacaaaugugacaaugccugcaucggauccauuagaaacggcaccuacgaccacgauguguaucgcgacgaggcucugaauaaccgguuccaaaucaaggggguugaacuuaagagcggauacaaagauuggauucuguggaucucuuuugccaucuccugcuuccuccugugugugguccugcucggcuuuauuaugugggccugccagaaggggaauaucagauguaacauuugcaucuga

SEQ ID NO: 192516 - RNA, 1701 nt, Artificial Sequence
  derived and/or modified CDS sequence (opt5) from hemagglutinin__InfluenzaA__ABB79968
augaagaccaucauugcccugagcuacauccucugccugguguucgcucagaaacuucccggcaacgacaauuccacagccacgcugugucucgggcaccaugcggucccuaacggaacccugguuaagacaauuaccaaugaucaaaucgaggugacaaacgcuaccgaacuugugcagucuagcuccacaggcagacugugcgacucuccgcaccggauucucgaugggaaaaauuguacccugaucgacgcccugcucggagauccccauugcgacggcuuucagaacaaggagugggaucuguucgucgaacgcagcaaagccuauuccaauuguuacccuuaugacgugcccgauuacgcuucucuuagaagccugguugccuccagcgggacgcucgaguuuaucaacgaagacuucaauuggaccggaguggcucaggauggcggcucuuaugccugccggcgcggguccgucaacagcuuuuucucuagacugaauuggcuucacaagcuggaguacaaguauccugcgcucaacgugacaaugcccaauaacggaaaauuugacaagcuguacauuuggggcguucaucacccuuccaccgauagcgaccaaacaucucuguacgugcgggccuccgggcgcgucaccgugagcacgaaaagaucccagcagacagugaucccgaauauuggaucucggcccuggguccgcggccagagcuccagaaucagcauuuauuggaccaucguuaagccuggggacauucuccugaucaacucuacaggaaaccuuaucgcuccccggggcuacuucaaaauucgcaauggcaaguccagcaucaugagaucugaugccccuauugggaacuguagcuccgagugcaucacccccaauggaucuauuccgaacgacaagccuuuucaaaaugugaaccggaucaccuauggcgcuuguccccgcuacgugaaacagcacacacugaagcucgccacggggaugagaaaugucccugaaaaacagacccggggaaucuucggcgcgauugccggguuuaucgagaacggaugggaaggcaugguggauggcugguauggguucagacaucagaauagcgagggaacaggccaagcugccgaccugaaguccacccaggcugccauugaucagaucaacgggaaacuuaaucgccugauugagaagacaaacgaaaaauuucaccaaaucgagaaggaguucagcgaaguugaaggacggauccaggaccucgagaaguacguggaggauaccaaaauugaccuguggucuuauaaugccgaacugcucgucgcucuggagaaccagcauacgaucgaucuuacagacuccgaaaugaauaagcuguucgagagaacccgcaaacagcuccgggaaaacgcggaggauaugggcaacgggugcuuuaagauuuaccacaaaugugacaaugccugcaucggcagcauuagaaacggaaccuacgaccacgauguguaucgcgacgaggcucugaauaaccgguuccaaaucaagggcguugaacuuaagucuggguacaaagauuggauucuguggaucuccuuugccaucagcugcuuccuccugugugugguccugcucggauuuauuaugugggccugccagaagggcaauaucagauguaacauuugcaucuga

SEQ ID NO: 192517 - RNA, 1698 nt, Artificial Sequence
  derived and/or modified CDS sequence (opt5) from hemagglutinin__InfluenzaA__ABB79979
augaaggccaaacugcucgugcugcuuugcaccuucacagcuacguacgccgacaccaucuguauuggcuaucacgcgaacaauagcacagauaccgucgacacaguucuggagaagaacgugaccgugacacauuccgucaaucuccuggaagauucucacaacgggaaacuuugccugcucaagggaaucgcuccccugcagcugggcaauuguagcguggccggguggauucucggaaacccugagugcgaacugcuuaucuccaaagagucuuggagcuacauuguugaaaccccgaaucccgagaacggcacguguuauccuggguacuuugccgacuaugaggaacugagagagcaacucuccucugugagcuccuucgaacgguuugagaucuuccccaagggaagcucuuggccuaaucauaccgucacaggcguguccgcuagcugcucucacaacggcaaguccagcuuuuaccgcaaucugcuuuggcugaccgggaaaaacggacucuaucccaaucugucuauguccuacguuaacaauaaggagaaagaagugcugguccucuggggcgugcaucacccuccgaacaucggggaucagagagcccuguaccacacagagaacgcuuaugugagcgucguuuccucucauuacagccggcgcuucacccccgaaauugccaagagaccuaaagugcgggaccaggagggacgcaucaauuaucacuggacgcuucuggaacccggcgauacaauuaucuuugaggcgaacgggaaucucauugccccuugguacgcuuucgcccuguccagaggauuuggcagcggcaucauuaccucuaacgcucccauggacgagugugaugccaagugccagacaccgcaaggggcgaucaauuccagccuuccuuuccagaacgugcaucccgucaccaucggagaauguccuaaguaugugcggucugccaaacugcgcaugguuaccggccucagaaauauucccagcauccagucccgggggcuguuuggagcuauugccggcuucaucgaagggggauggacaggcaugguggacggcugguacggguaucaccaccagaacgaacaaggaucuggcuacgcugccgaucaaaagagcacgcagaaugccauuaacgggaucaccaauaaagucaacuccgugaucgagaagaugaauacacaguuuaccgcuguuggaaaagaguucaacaagcuggagcgcagaauggagaaucucaacaaaaagguggacgauggcuuccuggacauuuggacauacaacgcggaacuucugguccuccuggagaaugaacggacccuugacuuucaugauagcaacgugaagaaucuguaugagaaagucaagucucagcucaaaaacaaugccaaggaaaucgggaacggcugcuucgaguuuuaccacaaauguaauaacgagugcauggaauccgugaagaauggaacguaugacuaccccaaguauagcgaggaaucuaaacugaaccgcgagaagauugauggcguuaaacuggaguccauggggguguaccagauccucgcuauuuauagcacagucgccuccucucuggugcuucugguuagccucggagccaucuccuucuggaugugcucuaauggcagccugcaguguagaaucugcauuuga

SEQ ID NO: 192518 - RNA, 1698 nt, Artificial Sequence
  derived and/or modified CDS sequence (opt5) from hemagglutinin__InfluenzaA__ABB79990
augaaggccaaacugcucgugcugcuuugcaccuucacagcuacguacgccgacaccaucuguauuggcuaucacgcgaacaauagcacagauaccgucgacacaguucuggagaagaacgugaccgugacacauuccgucaaucuccuggaagauucucacaacgggaaacuuugccugcucaagggaaucgcuccccugcagcugggcaauuguagcguggccggguggauucucggaaacccugagugcgaacugcuuaucuccaaagagucuuggagcuacauuguugaaaccccgaaucccgagaacggcacguguuauccuggguacuuugccgacuaugaggaacugagagagcaacucuccucugugagcuccuucgaacgguuugagaucuuccccaagggaagcucuuggccuaaucauaccgucacaggcguguccgcuagcugcucucacaacggcaaguccagcuuuuaccgcaaucugcuuuggcugaccgggaaaaacggacucuaucccaaucugucuauguccuacguuaacaauaaggagaaagaagugcugguccucuggggcgugcaucacccuccgaacaucggggaucagaaggcccuguaccacacagagaacgcuuaugugagcgucguuuccucucauuacagcagacgguucacccccgaaauugccaaacgcccuaaggugagagaccaggagggacggaucaauuauuacuggacgcuucuggaacccggcgauacaauuaucuuugaggcgaacgggaaucucauugccccuugguaugcuuucgcccugucccgcggauuuggcagcggcaucauuaccucuaacgcucccauggacgagugugaugccaagugccagacaccgcaaggggcgaucaauuccagccuuccuuuccagaacgugcaccccgucaccaucggagaauguccuaaauacgugagaucugccaagcugcggaugguuaccggccuccgcaauauucccagcauccaguccagagggcuguuuggagcuauugccggcuucaucgaagggggauggacaggcaugguggacggcugguauggguaccaucaccagaacgaacaaggaucuggcuacgcugccgaucagaaaagcacgcagaaugccauuaacgggaucaccaauaaggucaacuccgugaucgagaaaaugaauacacaguuuaccgcuguuggaaaggaguucaacaaacuggagcggcgcauggagaaucucaacaagaagguggacgauggcuuccuggacauuuggacauauaacgcggaacuucugguccuccuggagaaugaaagaacccuugacuuucacgauagcaacgugaaaaaucuguacgagaaggucaaaucucaacucaagaacaaugccaaagaaaucgggaacggcugcuucgaguuuuaucauaaguguaauaacgagugcauggaauccgugaagaauggaacguacgacuaucccaaauacagcgaggaaucuaagcugaaccgggagaaaauugauggcguuaagcuggaguccauggggguguaucagauccucgcuauuuacagcacagucgccuccucucuggugcuucugguuagccucggagccaucuccuucuggaugugcucuaauggcagccugcagugucgcaucugcauuuga

SEQ ID NO: 192519 - RNA, 1701 nt, Artificial Sequence
  derived and/or modified CDS sequence (opt5) from hemagglutinin__InfluenzaA__ABB80001
augaagaccaucauugcccugagcuacacacucugccugguguucgcucagaaacuucccggcaacgacaauuccacggccacccugugucucgggcaccaugcggucccuaacggaacaaucguuaagaccauuacaaaugaucaaaucgaggugaccaacgcuacagaacuggugcagucuagcuccaccggcgggauuugcgacucuccgcaccagauccuugauggagagaauuguacgcugaucgacgcccuccugggcgauccccagugcgacggguuucaaaacaaaaagugggaucuguucgucgaaagaagcaaagccuauuccaauuguuacccuuaugacgugcccgauuacgcuucucuccggagccugguugccuccagcggaacccuugaguuuaacaaugaaucuuucaacuggacaggcgugacccagaauggcacauccagcgcuugcaagcgcagaucuaacaauuccuuuuucagccggcugaacuggcucacccaucugaaguuuaaauauccugcccuuaaugucacgaugcccaacaacgagaaguucgacaaacuguacauuuggggagugcaccauccugggacagauaaugaccagaucucucucuaugcgcaggccuccggccgcauuaccguuagcacaaagagaucccaacagaccgugaucccgaacauugggucucggccccgcgucagagauaucccuagccggauuuccaucuacuggaccaucgugaaacccggagacauucugcugaucaauagcacaggcaaccucauugcuccucgcggguacuuuaagaucagaucuggaaaguccagcauuaugcggucugacgcccccaucggcaaauguaauagcgagugcaucacgccgaacggcuccauuccuaaugauaagcccuuccagaacgugaaucgcaucaccuauggggcuuguccuagauacgucaaacagucuacacugaaacuugccaccggaaugcggaacguucccgaaaaacaaacacgcggcauuuuuggggcgaucgccggauucauugagaauggcugggaagggaugguggacggaugguauggcuuuagacaccagaacagcgagggcaucgggcaggcugccgaucugaaguccacccaagcugccaucaaucagauuaacggaaaacucaaucggcugaucggcaagacgaacgagaaguuccaccagauugaaaaagaguucagcgaaguggaggggagaauccaggaccuugaaaaguacgucgaggauacaaaaauugaccuguggucuuauaacgccgagcuccugguggcucuggaaaaucaacauaccaucgaucucaccgacuccgagaugaacaagcuguuugaacgcacaaagaagcagcuucgggagaaugcggaagauaugggaaacggcugcuucaagauuuaccacaaaugugacaaugccugcaucgggagcaucagaaacggcaccuaugaucaugacguuuaccgcgacgaggcucugaauaaccgguuucagauuaagggaguggagcucaaaucuggcuacaaggauuggauccuguggauuuccuucgccaucagcugcuuucuucugugugucgcccuccugggguucauuaugugggcuugccagaaaggaaauaucagauguaacaucugcauuuga

SEQ ID NO: 192520 - RNA, 1701 nt, Artificial Sequence; identical to SEQ ID NO: 192315
  derived and/or modified CDS sequence (opt5) from hemagglutinin__InfluenzaA__ABB80012

SEQ ID NO: 192521 - RNA, 1701 nt, Artificial Sequence
  derived and/or modified CDS sequence (opt5) from hemagglutinin__InfluenzaA__ABB80023
augaagaccaucauugcccugagcuacaucuucuaucucgcucugggccaggaccuucccgggaacgauaauuccaaagccacacugugccucggacaccaugcggugccuaacggcacgcuggucaagaccauuacaaaugaccaaaccgagguuacaaacgcuaccgaacuugugcagucuagcuccacagggaaaaucuguaauaacccgcaccggauucuggauggaauggacugcacccucaucgaugcccugcugggcgacccccauugugauguguuucagaaugagacgugggaccucuucgucgaaagaucuaaggccuuuagcaacugcuacccuuaugaugugcccgacuacgcuucccugcgcucucuuguugccagcuccgggacccuggaguucaucacagaaggauuuaccuggacagaggugacccagaauggcggcagcaacgcuuguaaaagagggccugauucuggauucuuuucccggcucaauuggcugacgaaaagcggccgcacauaucccguccuuaacgugaccaugccuaauaacgacaauuucgauaagcuguacauuuggggaguucaccauccgucuacagaccaagagcagaccaaccucuaugugcagaccuccgggagagucacagugagcacgcggcgcucucagcaaaccaucauucccaacaucggcuccagaccuugggugcgggggcugagcucccgcauuucuaucuacuggacaauugucaaacccggagacguucuggugaucaauagcaacggcaaucucaucgccccuagaggcuacuuuaagaugcggaccgggaaauccagcauuaugcgcucugaugcgcccaucgacacaugcauuuccgaauguaucaccccgaacggaagcauuccuaaugauaagcccuuccagaacgugaauaaaaucacguauggcgccugcccuaaguacgucaagcaggacacacugaaacuugcuaccgggaugagaaacgugcccgagaagcagacccggggacuguuuggcgccaucgcuggguucauugaaaauggaugggagggcaugaucgauggcugguauggguuucgccaccaaaacucugagggaacaggccaggccgcggaccucaaaagcacccaggccgcuauugaucaaaucaaugggaagcugaacagaauuaucgaaaagacaaaugagaaguuccaccagaucgaaaaagaguucuccgaaguugagggacggauucaggaccuugagaaguacguggaagauacgaagaucgaccuguggucuuauaacgccgagcuccuggucgcucuggaaaaucagcauaccauugaucucacagacagcgagaugaacaaacuguuugaaaagaccagacgccaacuucgggagaacgccgaggacaugggcaauggguguuucaaaaucuaccacaagugcgauaacgccuguauugaauccaucagaaauggcacauaugaccaugauguguaccgcgacgaggcucugaacaaucgguuucagauuaaaggaguugaacucaagagcggcuacaaggauuggauccuguggaucucuuucgcgauuuccugcuuucuucugugcgugguccuccugggguucaucaugugggccugucagagaggaaacauucgcugcaauaucuguauuuga

SEQ ID NO: 192522 - RNA, 1701 nt, Artificial Sequence
  derived and/or modified CDS sequence (opt5) from hemagglutinin__InfluenzaA__ABB80034
augaagaccaucauugcccugagcuacaucuucugccucgugcugggccaggaccuucccgggaacgauaauuccacagcuacgcugugucucggacaccaugccgucccuaacggcacccugguuaaaacaauuaccgacgaucaaaucgaggugacaaaugcgaccgaacuugugcagucuagcuccacagggaagauuugcaacaauccgcacagaauccuggacggacucgauuguacccugaucgacgcucugcucggcgauccccauugcgacgucuuucagaacgagacgugggaucuguucguggaacggucuaaagccuuuagcaauuguuauccuuacgacguucccgauuaugccucccuucgcucucugguggcuagcuccgggacccucgaguucauuacagaaggauuuaccuggacaggcgucacccagaacggcgggagcaaugccugcaagagaggaccuggcucuggguucuuuucccggcugaacuggcuuacgaaaagcggaucuacauaccccgugcugaauguuaccaugccuaacaaugacaacuucgauaagcucuauaucuggggcgugcaccauccguccacaaaucaagagcagaccagccuguacguccaggcuucugggcgcgugaccguguccacaagacggagccagcaaacgauuauccccaacauuggaucccgcccuugggucagaggccugucuagccggaucuccauuuauuggaccaucguuaagcccggcgacgugcucgugaucaacagcaaugggaaccugauugccccucgcggauacuuuaaaaugagaacaggcaagucuuccaucaugcggagcgacgcgaccauugauacauguaucucugagugcauuacccccaaugggagcaucccgaacgacaaaccuuuccagaaugucaacaagaucacguacggagccugucccaaauaugugaagcagaauacacuuaagcuggcuaccggcaugcgcaacguuccugaaaaacagaccagagggcucuuuggagccauugcuggcuucaucgagaauggcugggaagggaugauugauggaugguacggcuuucggcaccaaaacuccgaggggacaggacaggccgcggaccugaagucuacccaggccgcuaucgaucaaauuaauggcaaacuuaaccgcgugaucgagaagacaaaugaaaaauuccaccagaucgagaaggaguucagcgaagucgaagggcggauucaggaccuggagaaauauguggaggauacgaagaucgaccucugguccuacaacgccgaacugcugguugcucucgagaaucagcauaccauugaucugacagacagcgaaaugaacaaacuuuuugagaagaccagaagacaacugcgcgaaaacgccgaggauaugggcaauggaugcuucaagaucuaucacaaaugugacaacgccugcauugagucuauccggaauggcacauacgaccaugauguguauagagacgaagcucucaacaaucgcuuucagauuaagggggucgagcugaaauccggauacaaggauuggauccuuuggaucagcuucgcgauuucuugcuuucugcucugugugguccugcugggcuucaucaugugggccugccagcgggggaacauuagauguaauaucugcauuuga

SEQ ID NO: 192523 - RNA, 1698 nt, Artificial Sequence; identical to SEQ ID NO: 192436
  derived and/or modified CDS sequence (opt5) from hemagglutinin__InfluenzaA__ABB80045

SEQ ID NO: 192524 - RNA, 1701 nt, Artificial Sequence
  derived and/or modified CDS sequence (opt5) from hemagglutinin__InfluenzaA__ABB80081
augaagaccaucauugcccugagcuacaucuccugccucguguucgcucagaaacugcccggcaacgacaauucuacagccacgcuuugucuggggcaccaugcggucccuaacggaacccucguuaagacaauuaccaaugaucaaaucgaggugacaaacgcuaccgaacuggugcagagcuccucuacaggcagaauuugcgacagcccgcaccggauccuugauggggagaauuguacccugaucgacgcccuccugggagauccccauugcgacggcuuucagaacaaagaaugggaucuguucgucgagcgcuccaaggccuauucuaauuguuacccuuaugacgugcccgauuacgcuagccucagaucccugguugccagcucugggacgcuugaauuuaacaaugaguccuucaacuggaccggaguggcucagaauggcacaagcuaugccugcaaacggcgcucuauuaaguccuuuuucagcagacugaacuggcuccaccaacugaaguacaaauauccugcgcuuaaugucaccaugcccaacaaugacaaguuugauaaacuguacaucuggggcgugcaucacccuucuacagacuccgaucagaccagccucuacgcccaggcuuccgggcggguuacggugucuacaaagcgcagccagcaaaccgucauuccgaacaucggauccagacccugggugcggggcgugagcucucgcauuuccaucuauuggacaauugucaaaccuggggacauccugcugaucaacagcaccggaaaucucauugcccccagaggcuacuucaagauccggucuggaaagagcuccauuaugcgcucugacgcuccuaucgggaaauguaacagcgagugcauuacccccaauggcuccaucccgaacgauaagccuuuucagaauguuaacagaaucacauauggcgccuguccccgguacgugaaacagaauacgcugaaacuugcgaccgggaugcgcaacgugccugaaaagcagacaagaggaauuuucggcgccaucgcuggguuuauugagaauggaugggaaggcauggucgacgggugguauggauuccggcaccaaaacagcgagggcaccggccaggccgcugaucugaagucuacacaggccgccaucaaucaaauuaacgggaaacucaauagacugaucgagaagaccaacgaaaaguuucaucagaucgagaaagaguucuccgaaguggaaggacgcauucaggaccuugagaaguacguugaggauacgaaaaucgaccuguggagcuauaaugcugaacuccugguggcgcuggagaaccagcacacaauugaucucaccgacucugaaaugaacaagcuguucgagcggaccagaaaacaacuucgcgaaaaugccgaggauaugggcaacgggugcuuuaagaucuaccauaagugugacaaugcuugcauuggauccauccggaacggcacauacgaucacgacgucuauagagacgaggcccugaauaaccgcuuccagauuaaagggguggaacucaagagcggcuacaaagauuggauccuguggaucuccuuugccauuucuugcuuccuucuguguguugugcuccugggauuuaucaugugggcuugccagaagggcaauauucgguguaacaucugcauuuga

SEQ ID NO: 192525 - RNA, 1701 nt, Artificial Sequence
  derived and/or modified CDS sequence (opt5) from hemagglutinin__InfluenzaA__ABB80092
augaagaccaucauugcccugagcuacaucuccugccucguguucgcucagaaacugcccggcaacgacaauucuacagccacgcuuugucuggggcaccaugcggucccuaacggaacccucguuaagacaauuaccaaugaucaaaucgaggugacaaacgcuaccgaacuggugcagagcuccucuacaggcagaauuugcgacagcccgcaccggauccuugauggggagaauuguacccugaucgacgcccuccugggagauccccauugcgacggcuuucagaacaaagaaugggaucuguucgucgagcgcuccaaggccuauucuaauuguuacccuuaugacgugcccgauuacgcuagccucagaucccugguugccagcucugggacgcuugaauuuaacaaugaguccuucaacuggaccggaguggcucagaauggcacaagcuaugccugcaaacggcgcucuauuaaguccuuuuucagcagacugaacuggcuccaccaacugaaguacaaauauccugcgcuuaaugucaccaugcccaacaaugacaaguuugauaaacuguacaucuggggcgugcaucacccuucuacagacuccgaucagaccagccucuacgcccaggcuuccgggcggguuacggugucuacaaagcgcagccagcaaaccgucauuccgaacaucggauccagacccugggugcggggcgugagcucucgcauuuccaucuauuggacacuggucaaaccuggggacauucugcucaucaacagcaccggaaaucugaucgcccccagaggcuacuucaagauucggucuggaaagagcuccaucaugcgcucugacgcuccuauugggaaauguaacagcgagugcaucacccccaauggcuccauuccgaacgauaagccuuuucagaauguuaacagaaucacauauggcgccuguccccgguacgugaaacagaauacgcuuaagcuggcgaccgggaugcgcaacgugccugaaaaacagacaagaggaaucuucggcgccauugcuggguuuaucgagaauggaugggaaggcauggucgacgggugguauggauuccggcaccaaaacagcgagggcaccggccaggccgcugaucucaagucuacacaggccgccauuaaucaaaucaacgggaaacugaauagacuuauugagaagaccaacgaaaaguuucaucagaucgagaaagaguucuccgaaguggaaggacgcauccaggaccuggagaaguacguugaggauacgaaaauugaccucuggagcuauaaugcugaacugcugguggcgcucgagaaccagcacacaaucgaucugaccgacucugaaaugaacaagcuguucgagcggaccagaaaacaacugcgcgaaaaugccgaggauaugggcaacgggugcuuuaagauuuaccauaagugugacaaugcuugcaucggauccauucggaacggcacauacgaucacgacgucuauagagacgaggcccucaauaaccgcuuccagaucaaagggguggaacuuaagagcggcuacaaagauuggauucuuuggaucuccuuugccaucucuugcuuccugcucuguguugugcugcugggauuuauuaugugggcuugccagaagggcaauauccgguguaacauuugcaucuga

SEQ ID NO: 192526 - RNA, 1701 nt, Artificial Sequence; identical to SEQ ID NO: 192327
  derived and/or modified CDS sequence (opt5) from hemagglutinin__InfluenzaA__ABB80137

SEQ ID NO: 192527 - RNA, 1701 nt, Artificial Sequence; identical to SEQ ID NO: 192524
  derived and/or modified CDS sequence (opt5) from hemagglutinin__InfluenzaA__ABB80159

SEQ ID NO: 192528 - RNA, 1701 nt, Artificial Sequence; identical to SEQ ID NO: 192095
  derived and/or modified CDS sequence (opt5) from hemagglutinin__InfluenzaA__ABB80185

SEQ ID NO: 192529 - RNA, 1701 nt, Artificial Sequence
  derived and/or modified CDS sequence (opt5) from hemagglutinin__InfluenzaA__ABB80207
augaagaccaucauugcccugagcuacauccucugccugguguucgcucagaaacuucccggcaacgacaauuccacagccacgcugugucucgggcaccaugcggucccuaacggaacccugguuaagacaauuaccaaugaucaaaucgaggugacaaacgcuaccgaacuugugcagucuagcuccacaggcagaauuugcgacucuccgcaccggauccuggauggggagaauuguacccucaucgacgcccugcugggagauccccauugcgacgauuuucagaacaaagaaugggaccucuucgucgagcgcagcaaggccuauuccaauuguuacccuuaugaugugcccgacuacgcuucucugagaagccuuguugccuccagcggcacgcuggaauuuaacaaugagucuuucaacuggaccgggguggcucagaauggaacauccuaugccugcaaacggcgcagcauuaagucuuucuucuccagacucaacuggcugcaccaacuuaaguacaaauauccugcgcugaaugucaccaugcccaacaaugauaaguuugacaaacucuacaucuggggcgugcaucacccuagcacagauucugaccagaccucccuguacgcccaggcuagcggccggguuacgguguccacaaagcgcucucagcaaaccgucauuccgaacaucgggagcagacccugggugcggggaguguccagccgcauuucuaucuauuggacaauugucaaaccuggcgacauccugcucaucaacuccaccgggaaucugauugcccccagaggauacuucaagauccggagcggcaagucuagcauuaugcgcuccgaugcuccuaucgggaaauguaacucugagugcauuacccccaauggaagcaucccgaacgacaagccuuuucagaauguuaacagaaucacauauggcgccuguccccgguacgugaaacagaauacgcuuaagcuggcgaccggcaugcgcaacgugccugaaaaacagacaagagggauuuucggagccaucgcuggcuuuauugagaaugggugggaaggaauggucgauggcugguauggguuccggcaccaaaacuccgagggaaccggccaggccgcugaccucaagagcacacaggccgccaucaaucaaauuaacggcaaacugaauagacuuaucgagaagaccaacgaaaaguuucaucagaucgagaaagaauuuucugagguggaagggcgcauucaggaucuggagaaguacguugaggacacgaaaaucgaucucugguccuauaaugcugaacugcugguggcgcucgagaaccagcacacaauugaccugaccgauagcgaaaugaacaaacuuuucgagcggaccagaaagcaacugcgcgaaaaugccgaggacaugggaaacggcugcuuuaagaucuaccauaagugugauaaugcuugcauugggucuauccggaacggaacauacgaccacgacgucuauagagaugaggcccucaauaaccgcuuccagauuaaaggcguggaacugaaguccggguacaaagacuggauccuuuggaucagcuuugccauguccugcuuccugcucuguguugugcugcugggcuuuauuaugugggcuugccagaagggaaauauccgguguaacauuugcaucuga

SEQ ID NO: 192530 - RNA, 1701 nt, Artificial Sequence
  derived and/or modified CDS sequence (opt5) from hemagglutinin__InfluenzaA__ABB80229
augaagaccaucauugcccugagcuacauccucugccugguguucgcucagaaacuucccggcaacgacaauuccacagccacgcugugucucgggcaccaugcggucccuaacggaacccugguuaagacaauuaccaaugaucaaaucgaggugacaaacgcuaccgaacuugugcagucuagcuccacaggcagaauuugcgacucuccgcaccggauccuggauggggagaauuguacccucaucgacgcccugcugggagauccccauugcgacggcuuucagaacaaagaaugggaucucuucgucgagcgcagcaaggccuauuccaauuguuacccuuaugacgugcccgauuacgcuucucugagaagccuuguugccuccagcgggacgcuggaauuuaacaaugagucuuucaacuggaccggaguggcucagaauggcacauccuaugccugcaaacggcgcagcauuaagucuuucuucuccagacucaacuggcugcaccaacuuaaguacaaauauccugcgcugaaugucaccaugcccaacaaugacaaguuugauaaacucuacaucuggggcgugcaucacccuagcacagacucugaucagaccucccuguacgcccaggcuagcgggcggguuacgguguccacaaagcgcucucagcaaaccgucauuccgaacaucggaagcagacccugggugcggggcguguccagccgcauuucuaucuauuggacaauugucaaaccuggggacauccugcucaucaacuccaccggaaaucugauugcccccagaggcuacuucaagauccggagcgggaagucuagcauuaugcgcuccgacgcuccuaucggaaaauguaacucugagugcauuacccccaauggcagcaucccgaacgauaagccuuuucagaauguuaacagaaucacauauggcgccuguccccgguacgugaaacagaauacgcuuaagcuggcgaccgggaugcgcaacgugccugaaaaacagacaagaggaauuuucggcgccaucgcuggguuuauugagaauggaugggaaggcauggucgacgggugguauggauuccggcaccaaaacuccgagggcaccggccaggccgcugaucucaagagcacacaggccgccaucaaucaaauuaacgggaaacugaauagacuuaucgagaagaccaacgaaaaguuucaucagaucgagaaagaauuuucugagguggaaggacgcauucaggaccuggagaaguacguugaggauacgaaaaucgaccucugguccuauaaugcugaacugcugguggcgcucgagaaccagcacacaauugaucugaccgacagcgaaaugaacaaacuuuucgagcggaccagaaagcaacugcgcgaaaaugccgaggauaugggcaacgggugcuuuaagaucuaccauaagugugacaaugcuugcauuggaucuauccggaacggcacauacgaucacgacgucuauagagacgaggcccucaauaaccgcuuccagauuaaagggguggaacugaaguccggcuacaaagauuggauccuuuggaucagcuuugccauguccugcuuccugcucuguguugugcugcugggauuuauuaugugggcuugccagaagggcaauauccgguguaacauuugcaucuga

SEQ ID NO: 192531 - RNA, 1701 nt, Artificial Sequence; identical to SEQ ID NO: 192524
  derived and/or modified CDS sequence (opt5) from hemagglutinin__InfluenzaA__ABB80240

SEQ ID NO: 192532 - RNA, 1701 nt, Artificial Sequence
  derived and/or modified CDS sequence (opt5) from hemagglutinin__InfluenzaA__ABB80251
augaagaccaucauugcccugagcuacauccucugccugguguucgcucagaaacuucccggcaacgacaauuccacagccacgcugugucucgggcaccaugcggucccuaacggaacccugguuaagacaauuaccaaugaucaaaucgaggugacaaacgcuaccgaacuugugcagucuagcuccacaggcagaauuugcgacucuccgcaccggauccuggauggggagaauuguacccucaucgacgcccugcugggagauccccauugcgacggcuuucagaacaaagaaugggaucucuucgucgagcgcagcaaggccuauuccaauuguuacccuuaugacgugcccgauuacgcuucucugagaagccuuguugccuccagcgggacgcuggaauuuaacaaugagucuuucaacuggaccggaguggcucagaauggcacauccagcgccugcaaacggcgcucuauuaaguccuuuuucagcagacucaacuggcugcaccaacuuaaguauaaauacccugcgcugaaugucaccaugcccaacaaugacaaguuugauaaacucuauaucuggggcgugcaucacccuucuacagacuccgaucagaccagccuguacgcccaggcuuccgggcggguuacggugucuacaaagcgcagccagcaaaccgucauuccgaacaucggauccagacccugggugcggggcgugagcucucgcauuuccaucuacuggacaauugucaaaccuggggacauccugcucaucaacagcaccggaaaucugauugcccccagaggcuauuucaagauccggucuggaaagagcuccauuaugcgcucugacgcuccuaucgggaaauguaacagcgagugcauuacccccaauggcuccaucccgaacgauaagccuuuucagaauguuaacagaaucacauacggcgccuguccccgguaugugaaacagaauacgcuuaagcuggcgaccgggaugcgcaacgugccugaaaaacagacaagaggaauuuucggcgccaucgcuggguuuauugagaauggaugggaaggcauggucgacgggugguacggauuccggcaccaaaacagcgagggcaccggccaggccgcugaucucaagucuacacaggccgccaucaaucaaauuaacgggaaacugaauagacuuaucgagaagaccaacgaaaaguuucaucagaucgagaaagaguucuccgaaguggaaggacgcauucaggaccuggagaaguauguugaggauacgaaaaucgaccucuggagcuacaaugcugaacugcugguggcgcucgagaaccagcacacaauugaucugaccgacucugaaaugaacaagcuguucgagcggaccagaaaacaacugcgcgaaaaugccgaggauaugggcaacgggugcuuuaagaucuaucauaagugugacaaugcuugcauuggauccauccggaacggcacauacgaucacgacgucuacagagacgaggcccucaauaaccgcuuccagauuaaagggguggaacuuaagagcggcuauaaagauuggauccuuuggaucuccuuugccauuucuugcuuccugcucuguguugugcugcugggacucaucaugugggcuugccagaagggcaauauucgguguaacaucugcauuuga

SEQ ID NO: 192533 - RNA, 1701 nt, Artificial Sequence
  derived and/or modified CDS sequence (opt5) from hemagglutinin__InfluenzaA__ABB80492
augaagaccaucauugcccugagcuacauccucugccugguguucgcucagaaacuucccggcaacgacaauuccacagccacgcugugucucgggcaccaugcggucccuaacggaacccugguuaagacaauuaccaaugaucaaaucgaggugacaaacgcuaccgaacuugugcagaauagcagcacaggcagaauuugcgacuccccgcaccggauccuggauggggagaacuguacccucaucgacgcccugcugggagauccccauugcgacggcuuucagaauaaagaaugggaucucuucgucgagcgcucuaaggccuauagcaacuguuacccuuaugacgugcccgauuacgcuucccugagaucucuuguugccagcuccgggacgcuggaauuuaauaacgagagcuucaauuggaccggaguggcucagaacggcacaucuuaugccugcaaacggcgcuccauuaagagcuuuuucucuagacucaauuggcugcaccaacuuaaguacaaauauccugcgcugaacgucaccaugcccaauaacgacaaguuugauaaacucuacaucuggggcgugcaucacccuuccacagacagcgaucagaccucucuguacgcccaggcuuccgggcggguuacggugagcacaaagcgcucccagcaaaccgucauuccgaacaucggaucuagacccugggugcggggcgugagcucccgcauuagcaucuauuggacaauugucaaaccuggggacauccugcucaucaauucuaccggaaaccugauugcccccagaggcuacuucaagauccgguccgggaagucuucuauuaugcgcagcgacgcuccuaucggaaaauguaauuccgagugcauuacccccaacggcucuaucccgaaugauaagccuuuucagaacguuaauagaaucacauauggcgccuguccccgguacgugaaacagaacacgcuuaagcuggcgaccgggaugcgcaaugugccugaaaaacagacaagaggaauuuucggcgccaucgcuggguuuauugagaacggaugggaaggcauggucgacgggugguauggauuccggcaccaaaauagcgagggcaccggccaggccgcugaucucaaguccacacaggccgccaucaaccaaauuaaugggaaacugaacagacuuaucgagaagaccaaugaaaaguuucaucagaucgagaaagaguucagcgaaguggaaggacgcauucaggaccuggagaaguacguugaggauacgaaaaucgaccucuggucuuauaacgcugaacugcugguggcgcucgagaaccagcacacaauugaucugaccgacuccgaaaugaauaaacuuuucgagcggaccagaaagcaacugcgcgaaaacgccgaggauaugggcaaugggugcuuuaagaucuaccauaagugugacaacgcuugcauuggaagcauccggaauggcacauacgaucacgacgucuauagagacgaggcccucaacaaucgcuuccagauuaaagggguggaacugaagucuggcuacaaagauuggauccuuuggaucuccuuugccaugagcugcuuccugcucuguguugugcugcugggauuuauuaugugggcuugccagaagggcaacauccgguguaauauuugcaucuga

SEQ ID NO: 192534 - RNA, 1701 nt, Artificial Sequence
  derived and/or modified CDS sequence (opt5) from hemagglutinin__InfluenzaA__ABB80503
augaagaccaucauugcccugagcuacaucuccugccucguguucgcucagaaacugcccggcaacgacaauaacacagccacgcuuugucuggggcaccaugcggucccuaauggaacccucguuaagacaauuaccaacgaucaaaucgaggugacaaaugcuaccgaacuggugcagucuagcuccacaggcagaauuugcgacucuccgcaccggauccuugauggggagaacuguacccugaucgacgcccuccugggagauccccauugcgacggcuuucagaauaaagaaugggaucuguucgucgagcgcagcaaggccuauuccaacuguuacccuuaugacgugcccgauuacgcuucucucagaagccugguugccuccagcgggacgcuugaauuuaauaacgagucuuucaauuggaccggaguggcucagaacggcacauccuaugccugcaaacggcgcagcauuaagucuuucuucuccagacugaauuggcuccaccaacugaaguacaaauauccugcgcuuaacgucaccaugcccaauaacgacaaguuugauaaacuguacaucuggggcgugcaucacccuagcacagacucugaucagaccucccucuacgcccaggcuagcgggcggguuacgguguccacaaagcgcucucagcaaaccgucauuccgaacaucggaagcagacccugggugcggggcguguccagccgcauuucuaucuauuggacaauugucaaaccuggggacauccugcugaucaauuccaccggaaaccucauugcccccagaggcuacuucaagauccggagcgggaagucuagcauuaugcgcuccgacgcuccuaucggaaaauguaauucugagugcauuacccccaacggcagcaucccgaaugauaagccuuuucagaacguuaauagaaucacauauggcgccuguccccgguacgugaaacagaacacgcugaagcuggcgaccgggaugcgcaaugugccugaaaaacagacaagaggaauuuucggcgccaucgcuggguuuauugagaacggaugggaaggcauggucgacgggugguauggauuccggcaccaaaauuccgagggcaccggccaggccgcugaucuuaagagcacacaggccgccaucaaccaaauuaaugggaaacucaacagacugaucgagaagaccaaugaaaaguuucaucagaucgagaaagaauuuucugagguggaaggacgcauucaggaccuugagaaguacguugaggauacgaaaaucgaccugugguccuauaacgcugaacuccugguggcgcuggagaaccagcacacaauugaucucaccgacagcgaaaugaauaagcuguucgagcggaccagaaaacaacuucgcgaaaacgccgaggauaugggcaaugggugcuuuaagaucuaccauaagugugacaacgcuugcauuggaucuauccggaauggcacauacgaucacgacgucuauagagacgaggcccugaacaaucgcuuccagauuaaagggguggaacuccgguccggcuacaaggauuggauccuguggaucagcuuugccauuuccugcuuccuucuguguguugugcuccugggauuuaucaugugggcuugccagaaaggcaacauuagauguaauaucugcauuuga

SEQ ID NO: 192535 - RNA, 1701 nt, Artificial Sequence; identical to SEQ ID NO: 192524
  derived and/or modified CDS sequence (opt5) from hemagglutinin__InfluenzaA__ABB80514

SEQ ID NO: 192536 - RNA, 1701 nt, Artificial Sequence
  derived and/or modified CDS sequence (opt5) from hemagglutinin__InfluenzaA__ABB80529
augaagaccaucauugcccugagcuacaucuccugccucguguucgcucagaaacugcccggcaacgacaauucuacagccacgcuuugucuggggcaccaugcggucccuaacggaacccucguuaagacaauuaccaaugaucaaaucgaggugacaaacgcuaccgaacuggugcagagcuccucuacaggcagaauuugcgacagcccgcaccggauccuugauggggagaauuguacccugaucgacgcccuccugggagauccccauugcgacggcuuucagaacaaagaaugggaucuguucgucgagcgcuccaaggccuauucuaauuguuacccuuaugacgugcccgauuacgcuagccucagaucccugguugccagcucugggacgcuugaauuuaacaaugaguccuucaacuggaccggaguggcucagaauggcacaagcuaugccugcaaacggcgcucuauuaaguccuuuuucagcagacugaacuggcuccaccaacugaaguacaaauauccugcgcuuaaugucaccaugcccaacaaugacaaguuugauaaacuguacaucuggggcgugcaucacccuucuacagacuccgaucagaccagccucuacgcccaggcuuccgggcggguuacggugucuacaaagcgcagccagcaaaccgucauuccgaacaucggauccagacccugggugcggggcgugagcucucgcauuuccaucuauuggacaauugucaaaccuggggacauccugcugaucaacagcaccggaaaucucauugcccccagaggcuacuucaagauccggucuggaaagagcuccauuaugcgcucugacgcuccuaucgggaaauguaacagcgagugcauuacccccaauggcuccaucccgaacgauaagccuuuucagaauguuaacagaaucacauauggcgccuguccccgguacgugaaacagaauacgcugaaacuugcgaccgggaugcgcaacgugccugacaagcagacaagaggaauuuucggcgccaucgcuggguuuauugaaaauggaugggagggcauggucgaugggugguauggauuccggcaccaaaacagcgaaggcaccggccaggccgcugaccugaagucuacacaggccgccaucaaucaaauuaacgggaaacucaauagacugaucgagaagaccaacgagaaguuucaucagaucgaaaaagaguucuccgaaguggagggacgcauucaggaucuugaaaaguacguugaggacacgaaaaucgaucuguggagcuauaaugcugagcuccugguggcgcuggaaaaccagcacacaauugaccucaccgauucugagaugaacaagcuguucgaacggaccagaaaacaacuucgcgagaaugccgaagacaugggcaacgggugcuuuaagaucuaccauaagugugauaaugcuugcauuggauccauccggaacggcacauacgaccacgacgucuauagagaugaggcccugaauaaccgcuuccagauuaaagggguggagcucaagagcggcuacaaagacuggauccuguggaucuccuuugccauuucuugcuuccuucuguguguugugcuccugggauuuaucaugugggcuugccagaagggcaauauucgguguaacaucugcauuuga

SEQ ID NO: 192537 - RNA, 1701 nt, Artificial Sequence
  derived and/or modified CDS sequence (opt5) from hemagglutinin__InfluenzaA__ABB80641
augaagaccaucauugcccugagcuacauccucugccugguguucgcucagaaaauucccggcaacgacaauuccacagccacgcuuugucuggggcaccaugcggucccuaacggaacccucguuaagacaaucaccaaugaucaaauugaggugacaaacgcuaccgaacuggugcagucuagcuccacaggcagaaucugcgacucuccgcaccggauccuugauggggagaauuguacccugauugacgcccuccugggagauccccauugcgacggcuuucagaacaaagaaugggaucuguucgucgagcgcagcaaggccuauuccaauuguuacccuuaugacgugucugauuacgcuagccucagaucccugguugccagcucugggacgcuugaauuuaacaaugaguccuucaacuggaccggaguggcucagaauggcacaagcuaugccugcaaacggcgcucuaucaaguccuuuuucagcagacugaacuggcuccaccaacugaaguacaaauaucccgcgcuuaaugucaccaugccuaacaaugacaaguuugauaaacuguacauuuggggcgugcaucaccccucuacagacuccgaucagaccagccucuacgcccaggcuuccgggcggguuacggugucuacaaagcgcagccagcaaaccgucaucccuaacauuggauccagaccgugggugcggggcgugagcucucgcaucuccauuuauuggacaaucgucaaacccggggacauccugcugauuaacagcaccggaaaucucaucgccccuagaggcuacuucaagauucggucuggaaagagcuccaucaugcgcucugacgcucccauugggaaauguaacagcgagugcaucaccccuaauggcuccauccccaacgauaagccguuucagaauguuaacagaauuacauauggcgccuguccucgguacgugaaacagaauacgcugaaacuugcgaccgggaugcgcaacgugcccgaaaagcagacaagaggaaucuucggcgccauugcuggguuuaucgagaauggaugggaaggcauggucgacgggugguauggauuccggcaccaaaacagcgagggcaccggccaggccgcugaucugaagucuacacaggccgccauuaaucaaaucaacgggaaacucaauagacugaucgagaagaccaacgaaaaguuucaucagauugagaaagaguucuccgaaguggaaggacgcauccaggaccuugagaaguacguugaggauacgaaaauugaccuguggagcuauaaugcugaacuccugguggcgcuggagaaccagcacacaaucgaucucaccgacucugaaaugaacaagcuguucgagcggaccagaaaacaacuucgcgaaaaugccgaggauaugggcaacgggugcuuuaagauuuaccauaagugugacaaugcuugcaucggauccauucggaacggcacauacgaucacgacgucuauagagacgaggcccugaauaaccgcuuccagaucaaagggguggaacucaagagcggcuacaaagauuggauccuguggauuuccuuugccaucucuugcuuccuucuguguguugugcuccugggauuuauuaugugggcuugccagaagggcaauauccgguguaacauuugcaucuga

SEQ ID NO: 192538 - RNA, 1701 nt, Artificial Sequence
  derived and/or modified CDS sequence (opt5) from hemagglutinin__InfluenzaA__ABB80661
augaagaccaucauugcccugagcuacauccucugccugguguucgcucagaaaauucccggcaacgacaauuccacagccacgcuuugucuggggcaccaugcggucccuaacggaacccucguuaagacaaucaccaaugaucaaauugaggugacaaacgcuaccgaacuggugcagucuagcuccacaggcagaaucugcgacucuccgcaccggauccuugauggggagaauuguacccugauugacgcccuccugggagauccccauugcgacggcuuucagaacaaagaaugggaucuguucgucgagcgcagcaaggccuauuccaauuguuacccuuaugacgugcccgauuacgcuucucucagaagccugguugccuccagcgggacgcuugaauuuaacaaugagucuuucaacuggaccggaguggcucagaauggcacauccuaugccugcaaacggcgcagcaucaagucuuucuucuccagacugaacuggcuccaccaacugaaguacaaauauccugcgcuuaaugucaccaugcccaacaaugacaaguuugauaaacuguacauuuggggcgugcaucacccuagcacagacucugaucaggccucccucuacgcucaggccagcgggcggguuaccguguccacgaagcgcucucagcaaacagucaucccgaacauuggaagcagacccugggugcggggcguguccagccgcaucucuauuuauuggaccaucgucaaaccuggggacauccugcugauuaacuccacaggaaaucucaucgcucccagaggcuacuucaagauucggagcgggaagucuagcaucaugcgcuccgacgccccuauuggaaaauguaacucugagugcaucacccccaauggcagcaucccgaacgauaagccuuuucagaauguuaacagaauuaccuauggcgcguguccccgguacgugaaacagaauacacugaagcuggccacggggaugcgcaacgugccugaaaaacagaccagaggaaucuucggcgcuauugccggguuuaucgagaauggaugggaaggcauggucgacgggugguauggauuccggcaccaaaacuccgagggcacaggccaggcugccgaucuuaagagcacccaggccgcuauuaaucaaaucaacgggaaacucaauagacugaucgagaagacaaacgaaaaguuucaucagauugagaaagaauuuucugagguggaaggacgcauccaggaccuugagaaguacguugaggauaccaaaauugaccugugguccuauaaugcggaacuccugguggcccuggagaaccagcacacgaucgaucucacagacagcgaaaugaacaagcuguucgagcggaccagaaaacaacuucgcgaaaaugcugaggauaugggcaacgggugcuuuaagauuuaccauaagugugacaaugccugcaucggaucuauucggaacggcaccuacgaucacgacgucuauagagacgaggcccugaauaaccgcuuccagaucaaagggguggaacucaaguccggcuacaaagauuggauccuguggauuagcuuugcuaucuccugcuuccuucuguguguugugcuccugggauuuauuaugugggccugccagaagggcaauauccgguguaacauuugcaucuga

SEQ ID NO: 192539 - RNA, 1701 nt, Artificial Sequence
  derived and/or modified CDS sequence (opt5) from hemagglutinin__InfluenzaA__ABB80672
augaagaccaucauugcccugagcuacauccucugccugguguucgcucagaaacuucccggcaacgacaauuccacagccacgcugugucucgggcaccaugcggucccuaacggaacccugguuaagacaauuaccaaugaucaaaucgaggugacaaacgcuaccgaacuugugcagggcucuagcacagggagaauuugcgacuccccgcaccagauccuggauggaaagaauuguacccucaucgacgcccugcugggcgauccccauugcgacggguuucagaacaaggagugggaucucuucgucgaacggucuacggccuauagcaauuguuacccuuaugacgugcccgauuacgcuucccugcgcucucuuguugccagcuccggaacccuggaguuuacaaaagaaggcuucaacuggaccggcguggcucaagacgggacaagcuaugccugcaagagaggaucugucaaguccuuuuucagccggcucaauuggcugcacaaacuugaguacaaguauccugcgcugaacgugaccaugcccaauaacgauaaauuugacaagcucuacauuuggggcguucaucacccuucuacggauuccgaccagacaagccuguacgugcaggccucugggcgcgucaccguguccacaaaaagaagccagcaaaccgugaucccgaauauuggaucccggcccuggguccgcggcguuucuagcagaaucuccauuuauuggaccaucgugaagccuggggacauucugcucaucaacagcacaggaaaucugaucgcuccccggggcuacuucaagauucgcucuggcaaauccagcaucaugagaucugaugccccuauugacaacuguaacagcgagugcaucacgcccaauggguccauuccgaacgauaagccuuuucagaaugugaaccggaucaccuauggagcuuguccccgcuacgucaaacagaauacacuuaagcuggccaccggcaugagaaacgugccugaaaaacagacacgggggaucuucggagcgauugccggcuuuaucgagaaugggugggaaggaaugguugacggcugguauggcuuccgccaccaaaacucugaggggaccggacaggcugccgaucucaagagcacgcaggcugccauuaaucaaaucaacggcaaacugaauagacuuauugagaagacaaacgaaaaguuucaucagaucgagaaagaguucuccgaaguggaagggcggauccaggaccuggagaaguacgucgaggauaccaaaauugaccucuggagcuauaaugccgaacugcugguggcucucgagaaccagcacaccaucgaucugacagacucugaaaugaauaaacuuuucgagagaacccgcaaacaacugcgggaaaacgcggaggauaugggaaacggcugcuuuaagauuuaccauaagugugacaaugccugcaucggguccauuagaaacggcacauacgaccacgauguuuaucgcgacgaggcucucaauaaccgguuccagaucaaaggaguggaacuuaagagcggcuacaaagauuggauucuguggaucucuuuugccaucuccugcuuccugcucugugucgugcugcugggguuuauuaugugggccugccagaagggaaauaucagauguaacauuugcaucuga

SEQ ID NO: 192540 - RNA, 1701 nt, Artificial Sequence
  derived and/or modified CDS sequence (opt5) from hemagglutinin__InfluenzaA__ABB80682
augaagaccaucauugcccugagcuacaucuccugccucguguucgcucagaaacugcccggcaacgacaauucuacagccacgcuuugucuggggcaccaugcggucccuaacggaacccucguuaagacaauuaccaaugaucaaaucgaggugacaaacgcuaccgaacuggugcagagcuccucuacaggcagaauuugcgacagcccgcaccggauccuugauggggagaauuguacccugaucgacgcccuccugggagauccccauugcgacggcuuucagaacaaagaaugggaucuguucgucgagcgcuccaaggccuauucuaauuguuacccuuaugacgugcccgauuacgcuagccucagaucccugguugccagcucugggacgcuugaauuuaacaaugaguccuucaacuggaccggaguggcucagaauggcacaagcuaugccugcaaacggcgcucuauuaaguccuuuuucagcagacugaacuggcuccaccaacugaaguacaaauauccugcgcuuaaugucaccaugcccaacaaugacaaguuugauaaacuguacaucuggggcgugcaucacccuucuacagacuccgaucagaccagccucuacgcccaggcuuccgggcggguuacggugucuacaaagcgcagccagcaaaccgucauuccgaacaucggauccagacccugggugcggggcgugagcucucgcauuuccaucuauuggacaauugucaaaccuggggacauccugcugaucaacagcaccggaaaucucauugcccccagaggcuacuucaagauccggucuggaaagagcuccauuaugcgcucugacgcuccuaucgggaaauguaacagcgagugcauuacccccaauggcuccaucccgaacgauaagccuuuucagaauguuaacagaaucacauauggcgccuguccccgguacgugaaacagaauacgcugaagcuggcgaccgggaugcgcaacgugccugaaaaacagacaagaggaauuuucggcgccaucgcuggguuuauugagaauggaugggaaggcauggucgacgggugguauggauuccggcaccaaaacagcgagggcaccggccaggccgcugaucugaagucuacacaggccgccaucaaucaaauuaacgggaaacucaauagacugaucgagaagaccaacgaaaaguuucaucagaucgagaaagaguucuccgaaguggaaggacgcauucaggaccuugagaaguacguugaggauacgaaaaucgaccuguggagcuauaaugcugaacuccugguggcgcuggagaaccagcacacaauugaucucaccgacucugaaaugaacaagcugcuugagcggaccagaaaacaacugcgcgaaaaugccgaggauaugggcaacgggugcuucaagaucuaccauaagugugacaaugcuugcauuggauccauccggaacggcacauacgaucacgacgucuauagagacgaggcccucaauaaccgcuuucagauuaaagggguggaacuuaagagcggcuacaaagauuggauccuuuggaucuccuucgccauuucuugcuuucugcucuguguugugcugcugggauucaucaugugggcuugccagaagggcaauauucgguguaacaucugcauuuga

SEQ ID NO: 192541 - RNA, 1701 nt, Artificial Sequence
  derived and/or modified CDS sequence (opt5) from hemagglutinin__InfluenzaA__ABB80693
augaagaccaucauugcccugagcuacaucuccugccucguguucgcucagaaacugcccggcaacgacaauucuacagccacgcuuugucuggggcaccaugcggucccuaacggaacccucguuaagacaauuaccaaugaucaaaucgaggugacaaacgcuaccgaacuggugcagagcuccucuacaggcagaaugugcgacagcccgcaccggauucuugauggggagaauuguacccugaucgacgcccuccugggagauccccauugcgacggcuuucagaacaaagaaugggaucuguucgucgagcgcuccaaggccuauucuaauuguuacccuuaugacgugcccgauuacgcuagccucagaucccugguugccagcucugggacgcuugaauuuaacaaugaguccuucaacuggaccggaguggcucagaauggcacaagcuaugccugcaaacggcgcucuaucaaguccuuuuucagcagacugaacuggcuccaccaacugaaguacaaauauccugcgcuuaaugucaccaugcccaacaaugacaaguuugauaaacuguacauuuggggcgugcaucacccuucuacagacuccgaucagaccagccucuacgcccaggcuuccgggcggguuacggugucuacaaagcgcagccagcaaaccgucaucccgaacauuggauccagacccugggugcggggcgugagcucucgcaucuccauuuauuggacaaucgucaaaccuggggacauucugcugaucaacagcaccggaaaucucaucgcccccagaggcuacuucaagauucggucuggaaagagcuccaucaugcgcucugacgcuccuauugggaaauguaacagcgagugcaucacccccaauggcuccauuccgaacgauaagccuuuucagaauguuaacagaaucacauauggcgccuguccccgguacgugaaacagaauacgcugaaacuugcgaccgggaugcgcaacgugccugaaaagcagacaagaggaaucuucggcgccauugcuggguuuaucgagaauggaugggaaggcauggucgacgggugguauggauuccggcaccaaaacagcgagggcaccggccaggccgcugaucugaagucuacacaggccgccauuaaucaaaucaacgggaaacucaauagacugauugagaagaccaacgaaaaguuucaucagaucgagaaagaguucuccgaaguggaaggacgcauccaggaccuugagaaguacguugaggauacgaaaauugaccuguggagcuauaaugcugaacuccugguggcgcuggagaaccagcacacaaucgaucucaccgacucugaaaugaacaagcuguucgagcggaccagaaaacaacuucgcgaaaaugccgaggauaugggcaacgggugcuuuaagauuuaccauaagugugacaaugcuugcaucggauccauucggaacggcacauacgaucacgacgucuauagagacgaggcccugaauaaccgcuuccagaucaaagggguggaacucaagagcggcuacaaagauuggauucuguggaucuccuuugccaucucuugcuuccuucuguguguugugcuccugggauuuauuaugugggcuugccagaagggcaauauccgguguaacauuugcaucuga

SEQ ID NO: 192542 - RNA, 1701 nt, Artificial Sequence
  derived and/or modified CDS sequence (opt5) from hemagglutinin__InfluenzaA__ABB80704
augaagaccaucauugcccugagcuacauccucugccugguguucgcucagaaaauucccggcaacgacaauuccacagccacgcuuugucuggggcaccaugcggucccuaacggaacccucguuaagacaaucaccaaugaucaaauugaggugacaaacgcuaccgaacuggugcagucuagcuccacaggcagaaucugcgacucuccgcaccggauccuugauggggagaauuguacccugauugacgcccuccugggagauccccauugcgacggcuuucagaacaaagaaugggaucuguucgucgagcgcagcaaggccuauuccaauuguuacccuuaugacgugcccgauuacgcuucucucagaagccugguugccuccagcgggacgcuugaauuuaacaaugagucuuucaacuggaccggaguggcucagaauggcacauccuaugccugcaaacggcgcagcaucaagucuuucuucuccagacugaacuggcuccaccaacugaaguacaaauauccugcgcuuaaugucaccaugcccaacaaugacaaguuugauaaacuguacauuuggggcgugcaucacccuagcacagacucugaucagaccucccucuacgcccaggcuagcgggcggguuacgguguccacaaagcgcucucagcaaaccgucaucccgaacauuggaagcagacccugggugcggggcguguccagccgcaucucuauuuauuggacaaucgucaaaccuggggacauccugcugauuaacuccaccggaaaucucaucgcccccagaggcuacuucaagauucggagcgggaagucuagcaucaugcgcuccgacgcuccuauuggaaaauguaacucugagugcaucacccccaauggcagcaucccgaacgauaagccuuuucagaauguuaacagaauuacauauggcgccuguccccgguacgugaaacagaauacgcugaagcuggcgaccgggaugcgcaacgugccugaaaaacagacaagaggaaucuucggcgccauugcuggguuuaucgagaauggaugggaaggcauggucgacgggugguauggauuccggcaccaaaacuccgagggcaccggccaggccgcugaucuuaagagcacacaggccgccauuaaucaaaucaacgggaaacucaauagacugaucgagaagaccaacgaaaaguuucaucagauugagaaagaauuuucugagguggaaggacgcauccaggaccuugagaaguacguugaggauacgaaaauugaccugugguccuauaaugcugaacuccugguggcgcuggagaaccagcacacaaucgaucucaccgacagcgaaaugaacaagcuguucgagcggaccagaaaacaacuucgcgaaaaugccgaggauaugggcaacgggugcuuuaagauuuaccauaagugugacaaugcuugcaucggaucuauucggaacggcacauacgaucacgacgucuauagagacgaggcccugaauaaccgcuuccagaucaaagggguggaacucaaguccggcuacaaagauuggauccuguggauuagcuuugccaucuccugcuuccuucuguguguugugcuccugggauuuauuaugugggcuugccagaagggcaauauccgguguaacauuugcaucuga

SEQ ID NO: 192543 - RNA, 1701 nt, Artificial Sequence; identical to SEQ ID NO: 192524
  derived and/or modified CDS sequence (opt5) from hemagglutinin__InfluenzaA__ABB80715

SEQ ID NO: 192544 - RNA, 1701 nt, Artificial Sequence
  derived and/or modified CDS sequence (opt5) from hemagglutinin__InfluenzaA__ABB80724
augaagaccaucauugcccugagcuacauccucugccugguguucgcucagaaacuucccggcaacgacaauuccacagccacgcugugucucgggcaccaugcggucccuaacggaacccugguuaagacaauuaccaaugaucaaaucgaggugacaaacgcuaccgaacuugugcagucuagcuccacaggcagaauuugcgacucuccgcaccggauccuggauggggagaauuguacccucaucgacgcccugcugggagauccccauugcgacggcuuucagaacaaagaaugggaucucuucgucgagcgcagcaaggccuauuccaauuguuacccuuaugacgugcccgauuacgcuucucugagaagccuuguugccuccagcgggacgcuggaauuuaacaaugagucuuucaacuggaccggaguggcucagaauggcacauccuaugccugcaaacggcgcagcauuaagucuuucuucuccagacucaacuggcugcaccaacuuaaguacaaauauccugcgcugaaugucaccaugcccaacaaugacaaguuugauaaacucuacaucuggggcgugcaucacccuagcacagacucugaucaggccucccuguacgcucaggccagcgggcggguuaccguguccacgaagcgcucucagcaaacagucauuccgaacaucggaagcagacccugggugcggggcguguccagccgcauuucuaucuauuggaccauugucaaaccuggggacauccugcucaucaacuccacaggaaaucugauugcucccagaggcuacuucaagauccggagcgggaagucuagcauuaugcgcuccgacgccccuaucggaaaauguaacucugagugcauuacccccaauggcagcaucccgaacgauaagccuuuucagaauguuaacagaaucaccuauggcgcguguccccgguacgugaaacagaauacacuuaagcuggccacggggaugcgcaacgugccugaaaaacagaccagaggaauuuucggcgcuaucgccggguuuauugagaauggaugggaaggcauggucgacgggugguauggauuccggcaccaaaacuccgagggcacaggccaggcugccgaucucaagagcacccaggccgcuaucaaucaaauuaacgggaaacugaauagacuuaucgagaagacaaacgaaaaguuucaucagaucgagaaagaauuuucugagguggaaggacgcauucaggaccuggagaaguacguugaggauaccaaaaucgaccucugguccuauaaugcggaacugcugguggcccucgagaaccagcacacgauugaucugacagacagcgaaaugaacaaacuuuucgagcggaccagaaagcaacugcgcgaaaaugcugaggauaugggcaacgggugcuuuaagaucuaccauaagugugacaaugccugcauuggaucuauccggaacggcaccuacgaucacgacgucuauagagacgaggcccucaauaaccgcuuccagauuaaagggguggaacugaaguccggcuacaaagauuggauccuuuggaucagcuuugcuauguccugcuuccugcucuguguugugcugcugggauuuauuaugugggccugccagaagggcaauauccgguguaacauuugcaucuga

SEQ ID NO: 192545 - RNA, 1701 nt, Artificial Sequence; identical to SEQ ID NO: 192530
  derived and/or modified CDS sequence (opt5) from hemagglutinin__InfluenzaA__ABB80737

SEQ ID NO: 192546 - RNA, 1701 nt, Artificial Sequence
  derived and/or modified CDS sequence (opt5) from hemagglutinin__InfluenzaA__ABB80748
augaagaccaucauugcccugagcuacaucuccugccucguguucgcucagaaacugcccggcaacgacaauucuacagccacgcuuugucuggggcaccaugcggucccuaacggaacccucguuaagacaauuaccaaugaucaaaucgaggugacaaacgcuaccgaacuggugcagagcuccucuacaggcagaauuugcgacagcccgcaccggauccuugauggggagaauuguacccugaucgacgcccuccugggagauccccauugcgacggcuuucagaacaaagaaugggaucuguucgucgagcgcuccaaggccuauucuaauuguuacccuuaugacgugcccgauuacgcuagccucagaucccugguugccagcucugggacgcuugaauuuaacaaugaguccuucaacuggaccggaguggcucagaauggcacaagcuaugccugcaaacggcgcucuauuaaguccuuuuucagcagacugaacuggcuccaccaacugaaguacaaauauccugcgcuuaaugucaccaugcccaacaaugacaaguuugauaaacuguacaucuggggcgugcaucacccuucuacagacuccgaucagaccagccucuacgcccaggcuuccgggcggguuacggugucuacacagcgcagccaacagaccgucauuccgaacaucggauccagacccugggugcggggcgugagcucucgcauuuccaucuauuggacaauugucaagccuggggacauccugcugaucaacagcaccggaaaucucauugcccccagaggcuacuucaaaauccggucuggaaagagcuccauuaugcgcucugacgcuccuaucgggaaguguaacagcgagugcauuacccccaauggcuccaucccgaacgauaaaccuuuucagaauguuaacagaaucacauauggcgccuguccccgguacgugaagcagaauacgcugaaacuugcgaccgggaugcgcaacgugccugaaaagcaaacaagaggaauuuucggcgccaucgcuggguuuauugagaauggaugggaaggcauggucgacgggugguauggauuccggcaccagaacagcgagggcaccggccaggccgcugaucugaaaucuacacaagccgccaucaaucagauuaacgggaagcucaauagacugaucgagaaaaccaacgaaaaguuucaucagaucgagaaggaguucuccgaaguggaaggacgcauucaggaccuugaggaguacguugaagauacgaaaaucgaccuguggagcuauaaugcugagcuccugguggcgcuggaaaaccaacacacaauugaucucaccgacucugagaugaacaagcuguucgaacggaccagaaaacagcuucgcgagaaugccgaggauaugggcaacgggugcuuuaagaucuaccauaaaugugacaaugcuugcauuggauccauccggaacggcacauacgaucacgacgucuauagagacgaagcccugaauaaccgcuuccagauuaaggggguggagcucaagagcggcuacaaagauuggauccuguggaucuccuuugccauuucuugcuuccuucuguguguugugcuccugggauuuaucaugugggcuugccagaagggcaauauucgguguaacaucugcauuuga

SEQ ID NO: 192547 - RNA, 1701 nt, Artificial Sequence
  derived and/or modified CDS sequence (opt5) from hemagglutinin__InfluenzaA__ABB82183
augaagaccaucauugcccugagcuacauccucugccugguguucgcucagaaacuucccggcaacgacaauuccacagccacgcugugucucgggcaccaugcggucccuaacggaacccugguuaagacaauuaccaaugaucaaaucgaggugacaaacgcuaccgaacuugugcagucuagcuccacaggcagaauuugcgacucuccgcaccagauccuggauggggagaauuguacccucaucgacgcccugcugggagauccccauugcgacggcuuucagaacaaagaaugggaucucuucgucgagcggagcaaggccuauuccaauuguuacccuuaugacgugcccgauuacgcuucucugcgcagccuuguugccuccagcgggacgcuggaauuuaacaaugagucuuucaacuggaccggaguggcucaaaauggcacauccagcgccugcaaaagacggucuaacaaguccuuuuucagccgccucaauuggcugcaccagcuuaaguauaaauacccugcgcugaacgucaccaugcccaauaacgagaaguuugacaaacucuauauuuggggcgugcaucacccuucuacagauuccgaccagaucagccuguacgcccaggcuuccgggagaguuaccgugucuacgaagcggagccaacagacagucauuccgaacaucggaucccgccccugggugagaggcgugagcucucggauuuccaucuacuggaccauugucaaaccuggggauauccugcucaucaauagcacaggaaaccugauugcuccccgcggcuauuucaagaucagaucugggaaaagcuccguuaugcggucugacgccagcauuggacgcuguaauuccgaaugcaucaccccuaacggcagcauucccaaugacaaaccguuucagaacgugaauagaaucaccuacggcgccuguccucgguaugugaagcagaacacacuuaaacuggcgacggggaugcgcaauguccccgagaagcaaaccagaggaaucuucggcgccauugcuggguuuaucgaaaacggaugggagggcaugguggaugggugguacggauuccggcaccaaaauucugagggcacaggccaggccgcugaccucaaauccacccaggccgccauuaaccagaucaaugggaagcugaacagacuuauugaaaagacaaaugagaaguuucaucagaucgaaaaggaguucagcgaaguugagggacgcauccaggaucuggagaaauauguggaagacaccaagauugaucucuggucuuacaacgcugagcugcuggucgcgcucgaaaaccaacacacgaucgaccugacagauuccgagaugaauaaacuuuucgaacggaccaagaaacagcugagagagaacgccgaggacaugggcaaugggugcuuuaagauuuaucauaagugugauaacgcuugcaucggaagcauucgcaauggcaccuacgaccacgauguguaccgggacgaagcccucaacaauagauuccagaucaaagggguugagcugaaguccggcuauaaagacuggauucuuuggaucucuuuugccaucagcugcuuccugcucugugugguccugcugggauuuauuaugugggcuugccagaagggcaacauccgcuguaauauuugcaucuga

SEQ ID NO: 192548 - RNA, 1698 nt, Artificial Sequence; identical to SEQ ID NO: 192368
  derived and/or modified CDS sequence (opt5) from hemagglutinin__InfluenzaA__ABB82194

SEQ ID NO: 192549 - RNA, 1698 nt, Artificial Sequence
  derived and/or modified CDS sequence (opt5) from hemagglutinin__InfluenzaA__ABB82205
augaaggugaaacugcucguccugcuuugcaccuucacagccacguacgcugacaccaucuguauuggcuaucacgccaacaauagcacagauaccguugacacagugcuggagaagaacgugaccgucacacauuccgugaaucuccuggaagauucucacaacgggaaacuuugccugcucaagggaaucgcgccccugcagcugggcaauuguagcguugcuggguggauucucggaaacccugagugcgaacugcuuaucuccaaagagucuuggagcuacauuguggaaaccccgaaucccgagaacggcacguguuauccuggguacuuugccgacuaugaggaacugagagagcaacucuccucugucagcuccuucgaacgguuugagaucuuccccaaggagagcucuuggccuaaucauaccgugacaggaguuuccgccagcugcucucacaacggcaaguccagcuuuuacaaaaaucugcuuuggcugaccggcaagaacgggcucuaucccaaucugucuaaauccuacgcuaacagcaaggaaaaagaggugcugguccucuggggagugcaucacccuccgaauaucggcgaucagcgcgcccuguaccacacagaaaacgcuuauguguccgucguuucuagccauuacuccagacgguucacccccgagauugccaagcgcccuaaggugagagaccaggaagggcggaucaacuauuacuggacgcuucuggagcccggagauacaauuaucuuugaggcgaauggcaaccucauugccccucgcuaugcuuucgcccugagcagaggguuuggaucuggcaucauuaccuccaaugcucccauggacgaaugugaugccaaaugccagacaccgcaaggcgcgaucaacagcucucuuccuuuccagaaugugcaccccgucaccaucggggaguguccuaaguacgugcggagcgccaaacugcgcaugguuaccggacucagaaacauucccuccauccagucucggggccuguuuggggcuauugccggauucaucgaaggcggguggacaggaaugguggacggcugguauggcuaccaucaccagaaugagcaagggagcggauacgcugccgaucagaaguccacgcagaacgccauuaauggcaucaccaacaaagucaauagcgugaucgaaaagaugaacacacaguuuaccgcuguugggaaagaguucaauaagcuggagcgcagaauggaaaaccucaauaagaaaguggacgauggauuccuggacauuuggacauauaacgcggagcuucugguccuccuggaaaacgagcggacccuugacuuucacgauucuaaugugaagaaccuguacgaaaaagucaagucccaacucaaaaauaacgccaaggagaucggcaaugggugcuucgaguuuuaucauaaguguaacgacgaaugcauggagagcgugaaaaauggcacguacgauuaucccaaguacucugaagaguccaaacugaaccgcgagaagauugacggaguuaaacuggaaagcaugggcguguaucagauccucgcuauuuacuccacagucgccucuagccuggugcuucugguuucccucggggccaucucuuucuggaugugcagcaauggaucccugcaguguagaaucugcauuuga

SEQ ID NO: 192550 - RNA, 1698 nt, Artificial Sequence
  derived and/or modified CDS sequence (opt5) from hemagglutinin__InfluenzaA__ABB82216
augaaggugaaacugcucguccugcuuugcaccuucacagccacguacgcugacaccaucuguauuggcuaucacgccaacaauagcacagauaccguugacacagugcuggagaagaacgugaccgucacacauuccgugaaucuccuggaagauucucacaacgggaaacuuugccugcucaagggaaucgcgccccugcagcugggcaauuguagcguugcuggguggauucucggaaacccugagugcgaacugcuuaucuccaaagagucuuggagcuacauuguggaaaccccgaaucccgagaacggcacguguuauccuggguacuuugccgacuaugaggaacugagagagcaacucuccucugucagcuccuucgaacgguuugagaucuuccccaaggagagcucuuggccuaaucauaccgugacaggaguuuccagcucuugcucccacaacggcaagagcucuuuuuaccgcaaucugcuuuggcugaccggcaaaaacgggcucuaucccaaucuguccaagagcuacgugaacaauaaagaaaaggagguccuggugcucuggggagugcaucacccuccgaacaucggcgaucagagagcccuguaccacacagaaaacgcuuaugucuccguugugucuagccauuacucccggcgcuucacccccgagauugccaaaagaccuaaggugcgggaccaggaagggcgcaucaauuauuacuggacgcuucuggagcccggagauacaauuaucuuugaggcuaacggcaaucucauugccccuagauaugcguucgcccugagccggggguuuggaucuggcaucauuaccuccaacgcucccauggacgaaugugaugccaagugccagacaccgcaaggcgcuaucaauagcucucuuccuuuccagaacguccaccccgugaccaucggggaguguccuaaauacguucgcagcgccaagcugagaauggugaccggacuccggaauauucccuccauccagucucgcggccuguuuggggcgauugccggauucaucgaaggcggguggacaggaauggucgacggcugguauggcuaccaucaccagaacgagcaagggagcggauacgcugccgaucagaaauccacgcagaaugcuauuaacggcaucaccaauaaggugaacagcguuaucgaaaagaugaauacacaguuuaccgccguggggaaagaguucaacaaacuggagagacggauggaaaaucucaacaagaaggucgacgauggauuccuggacauuuggacauauaacgccgagcuucuggugcuccuggaaaaugagcgcacccuugacuuucacgauucuaacgucaaaaaucuguacgaaaaggugaaaucccaacucaagaacaaugcuaaagagaucggcaacgggugcuucgaguuuuaucauaaguguaaugacgaaugcauggagagcguuaagaacggcacguacgauuaucccaaauacucugaagaguccaagcugaauagagagaaaauugacggagugaagcuggaaagcaugggcgucuaucagauccucgcgauuuacuccacaguggccucuagccugguucuucuggugucccucggggcuaucucuuucuggaugugcagcaacggaucccugcagugucggaucugcauuuga

SEQ ID NO: 192551 - RNA, 1701 nt, Artificial Sequence
  derived and/or modified CDS sequence (opt5) from hemagglutinin__InfluenzaA__ABB82227
augaagaccaucauugcccugagcuacaucuucugccucacacugggccaggaccuucccgggaacgauaauuccaaagcuacgcugugucucggacaccaugccgugccuaacggcacccuggucaagacaauuaccgacgaucaaacagagguuaccaaugcgacagaacuugugcagucuagcuccaccgggaaaaucugcaacaauccgcaccggauucuggacggaauggauuguacgcucaucgacgcucugcugggcgauccccauugcgacguguuucagaacgagaccugggaucucuucgucgaaagaucuaaggccuuuagcaauuguuauccuuacgacgugcccgauuaugccucccugcgcucucuugcugccagcuccgggacacuggaguucaucaccgaaggauuuacauggaccggcguuacgcagaacggcgggagcaaugcuugcaaaagaggaccuggcucuggguucuuuucccggcucaacuggcugacaaagagcggaaauaccuaccccgugcuuaacgucacaaugccuaauaacgacaauuucgauaagcuguauauuuggggcgugcaccauccgucuaccgaccaagagcagaccucccucuacguucaggccagcgggcgcgugacagucucuacgagacggucccagcaaaccaucauucccaacaucggaagccgcccuugggugagaggccuguccucucggauuagcaucuauuggacaauugugaaacccggcgacguccugguuaucaacuccaaugggaaccucaucgcgccucgcggauacuuuaagaugagaaccggcaaaagcucuauuaugcgguccgaugcccccaucgacacauguauuagcgagugcaucaccccgaaugggucuauuccuaacgauaagcccuuccagaauaucaacaaaaucacguacggagcuuguccuaaguaugugaagcagaauacacugaaacuugccaccggcaugcgcaacgugcccgaaaagcagaccagagggcuguuuggagcuauugccggcuucaucgagaauggcugggaagggaugauugacggaugguacggcuuucggcaccaaaacagcgaggggacaggacaggcggccgaucucaaauccacccaggcugccaucgaccaaauuaauggcaagcugaaccgcaucaucgagaaaacaaaugaaaaguuccaccagauugagaaagaguucucugaagucgaagggagaauccaggaucuugagaaguauguggaggacacgaagauugaucuguggagcuacaacgcugaacuccugguugccauggagaaucagcauaccaucgaccugacagauuccgaaaugaacaaacucuuugagaagacccggagacaacugcgcgaaaacgccgaggacaugggcaauggaugcuucaaaauuuaucacaagugugacaacgcuugcaucgagagcauucggaauggcacauacgaucaugacguguauagagaugaagcgcuuaacaaucgcuuucagaucaaaggggucgagcugaagucuggauacaaggacuggauccucuggauuuccuucgccaucagcugcuuucugcuuugugugguucugcucggcuucauuaugugggcuugccagcgggggaacaucagauguaauauuugcaucuga

SEQ ID NO: 192552 - RNA, 1698 nt, Artificial Sequence
  derived and/or modified CDS sequence (opt5) from hemagglutinin__InfluenzaA__ABB83026
augaaggugaaacugcucauccugcuuugcaccuucacagccacguacgcugacaccauuuguaucggcuaucacgccaacaauagcacagauaccgucgacacaguucuggagaagaacgugaccgugacacauuccgucaaucuccuggaagauucucacaacgggaaacuuugccugcucaagggaauugcgccccugcagcugggcaauuguagcguggcuggguggauccucggaaacccugagugcgaacugcuuauuuccaaagagucuuggagcuacaucguugaaaccccgaaucccgagaacggcacguguuauccuggguacuuugccgacuaugaggaacugagagagcaacucuccucugugagcuccuucgaacgguuugagaucuuccccaaggagagcucuuggccuaaucauaccgucacaggaguguccgccagcugcucucacaacggcaaguccagcuuuuaccgcaaucugcuuuggcugaccgagaaaaacggccucuaucccaaucugucuaaguccuacgcuaacaauaaagaaaaggaaguucugauucucuggggagugcaucacccuccgaacaucggggaucagagaacacuguaccacaccgagaacgccuaugucagcgugguguccucucauuacagccggcgcuucacgcccgaaauuacaaaaagaccuaagguccgggaccaggagggccgcaucaauuauuacuggacccuucuggagcccggggauacaauuaucuuugaagcuaacggaaaucucauugccccuugguaugcguucgcccuguccagaggcuuugggagcggaaucaucaccucuaacgcucccauggacgagugugaugccaagugccagaccccgcaaggcgcuauuaauuccagccuuccuuuccagaacguucaccccgugacaaucggcgaauguccuaaauacgugcggucugccaagcugcgcauggucacggggcucagaaauauucccagcauccagucccggggacuguuuggcgcgauugccggguucaucgagggaggcuggaccgggaugguggacggaugguauggcuaccaucaccagaacgaacaaggcucuggguacgcugccgaucagaaaagcacacagaaugcuaucaacggaauuaccaauaagguuaacuccgugaucgagaaaaugaauacacaguuuaccgccgucggcaaggaguucaacaaacuggaacgcagaauggagaaucucaacaagaagguggacgauggguuccuggacauuuggacguauaacgccgaacuucugguucuccuggagaaugaacggacacuugacuuucacgauagcaacgugaaaaaucuguacgagaaggucaaaucucaacucaagaacaaugcuaaagagaucggaaacggcugcuucgaauuuuaucauaaguguaauaacgagugcauggaauccgugaagaaugggaccuacgacuaucccaaauacagcgaggagucuaagcugaaccgcgagaaaauugauggcgucaagcuggaauccaugggaguguaucagauccucgcgaucuacagcaccguugccuccucucuggugcuucuggucagccucggcgcuauuuccuucuggaugugcucuaaugggagccugcaguguagaaucugcauuuga

SEQ ID NO: 192553 - RNA, 1698 nt, Artificial Sequence
  derived and/or modified CDS sequence (opt5) from hemagglutinin__InfluenzaA__ABB83127
augaaggugaaacugcucauccugcuuugcaccuucacagccacguacgcugacaccauuuguaucggcuaucacgccaacaauagcacagauaccgucgacacaguucuggagaagaacgugaccgugacacauuccgucaaucuccuggaagauucucacaacgggaaacuuugccugcucaagggaauugcgccccugcagcugggcaauuguagcguggcuggguggauccucggaaacccugagugcgaacugcuuauuuccaaagagucuuggagcuacaucguugaaaccccgaaucccgagaacggcgccuguuauccuggguacuuugccgacuaugaggaacugagagagcaacucuccucugugagcuccuucgaacgguuugagaucuuccccaaggagagcucuuggccuaaucauacggucaccggaguguccgcuagcugcucucacaacggcaaguccagcuuuuaccgcaaucugcuuuggcugacaggcaaaaacgggcucuaucccaaucugucuaaguccuacgccaacaauaaagaaaaggagguucugauucucuggggagugcaucacccuccgaacaucggcgaucagagaacccuguaccacacagaaaacgcuuaugucagcgugguguccucucauuacagccggcgcuucacccccgagauuacgaaaagaccuaagguccgggaccaggaagggcgcaucaauuauuacuggacacuucuggagcccggagauaccauuaucuuugaggccaacggcaaucucauugcgccuugguaugccuucgcucuguccagaggguuuggaagcggcaucaucauuucuaacgcccccauggacgaaugugaugcuaagugccagacaccgcaaggcgccaucaauuccagccuuccuuuccagaacguucaccccgugaccauuggggaguguccuaaauacgugcggucugcgaagcugcgcauggucaccggacucagaaauauccccagcauucagucccggggccuguuuggggccaucgcuggauucaucgaaggcggguggacaggaaugguggacggcugguauggcuaccaucaccagaacgagcaagggucuggauacgccgcugaucagaaaagcacgcagaaugccauuaacggcaucaccaauaagguuaacuccgugauugaaaagaugaauacacaguuuaccgccgucgggaaagaguucaacaaacuggagcgcagaauggaaaaucucaacaagaagguggacgauggauuccuggacaucuggacauauaacgcugagcuucugguucuccuggaaaaugagcggacccuugacuuucacgauagcaacgugaaaaaucuguacgaaaaggucaaaucucaacucaagaacaaugcgaaagagauuggcaacgggugcuucgaguuuuaucauaaguguaauaacgaaugcauggaguccgugaagaauggcacguacgacuaucccaaauacagcgaagagucuaagcugaaccgcgagaaaaucgauggagucaagcuggacuccaugggcguguaucagauccucgccauuuacagcacaguugcuuccucucuggugcuucuggucagccucggggccaucuccuucuggaugugcucuaauggaagccugcaguguagaauuugcaucuga

SEQ ID NO: 192554 - RNA, 1698 nt, Artificial Sequence
  derived and/or modified CDS sequence (opt5) from hemagglutinin__InfluenzaA__ABB83138
augaaggugaaacugcucauccugcuuugcaccuucacagccacguacgcugacaccauuuguaucggcuaucacgccaacaauagcacagauaccgucgacacaguucuggagaagaacgugaccgugacacauuccgucaaucuccuggaagauucucacaacgggaaacuuugccugcucaagggaauugcgccccugcagcugggcaauuguagcguggcuggguggauccucggaaacccugagugcgaacugcuuauuuccaaagagucuuggagcuacaucguugaaaccccgaaucccgagaacggcgccuguuauccuggguacuuugccgacuaugaggaacugagagagcaacucuccucuaucagcuccuucgaacgguuugagauuuuccccaaggagagcucuuggccuaaucauacggugaccggagucuccgcuagcugcucucacaacggcaaguccagcuuuuaccgcaaucugcuuuggcugacaggcaaaaacgggcucuaucccaaucugucuaaguccuacgccaacaauaaagaaaaggaggugcugauccucuggggaguucaucacccuccgaacauuggcgaucagagaacccuguaccacacagaaaacgcuuaugugagcgucguguccucucauuacagccggcgcuucacccccgagaucacgaaaagaccuaaggugcgggaccaggaagggcgcauuaauuauuacuggacacuucuggagcccggagauaccaucauuuuugaggccaacggcaaucucaucgcgccuugguaugccuucgcucuguccagaggguuuggaagcggcaucauuacaucuaacgcccccauggacgaaugugaugcuaagugccagaccccgcaaggcgccaucaauuccagccuuccuuuccagaacguccaccccguuaccauuggggaguguccuaaauacgugcggucugcgaagcugcgcauggugacaggacucagaaauauccccagcauucagucccggggccuguuuggggccaucgcuggauucaucgaaggcggguggacgggaauggucgacggcugguauggcuaccaucaccagaacgagcaagggucuggauacgccgcugaucagaaaagcacccagaaugccauuaacggcaucacaaauaaggugaacuccguuauugaaaagaugaauacccaguuuacagccguggggaaagaguucaacaaacuggagcgcagaauggaaaaucucaacaagaaggucgacgauggauuccuggacaucuggaccuauaacgcugagcuucuggugcuccuggaaaaugagcggacgcuugacuuucacgauagcaacguuaaaaaucuguacgaaaaggugaaaucucaacucaagaacaaugcgaaagagauuggcaacgggugcuucgaguuuuaucauaaguguaauaacgaaugcauggaguccgucaagaauggcacauacgacuaucccaaauacagcgaagagucuaagcugaaccgcgagaaaaucgauggagugaagcuggacuccaugggcgucuaucagauccucgccauuuacagcaccguggcuuccucucugguucuucuggugagccucggggccaucuccuucuggaugugcucuaauggaagccugcaguguagaauuugcaucuga

SEQ ID NO: 192555 - RNA, 1701 nt, Artificial Sequence
  derived and/or modified CDS sequence (opt5) from hemagglutinin__InfluenzaA__ABB86877
augaaggccauccugcucauucugcuuuacaccuucacagcuacgaacgccgacacccugugcaucggcuaucacgcgaauaacagcacagauaccguggacacaguccucgagaaaaauguuaccgugacacauuccgugaaccugcuugaagauagacacaaugggaagcuguguaaccucggaggcauugcuccccuguaccuggggaauugcaacaucgccggauggcuccugggcaauccugagugugaacuucuguuuaccgucucuagcugguccuauauuguggagacgucuaacagcgacaaugggaccugcuacccgggagauuucaucaacuaugaagaacuccgggagcagcuguccucuaugagcuccuacgaacgcuuugagaucuuccccaaagaaagcucuuggccuaaucaugagacaaacagaggcguuaccgccgcuugucccuaugccggcgcuaauuccuuuuaccggaaccuuauuuggcuggugaagaaagggaacagcuacccuaagaucaauaagucuuaugucaacaauaaagagaaggaagugcucguucuguggggcauucaccaucccccuacauccgccgaccaacagagccuguaccagaacgcggaugccuaugugucugucgaguccagcaaauacaauaagaaauucaagccggaaaucgcuacccgccccaaggugagaggacaggccgggcggaugaacuauuacuggacgcucguggagccuggagacacaauuaccuuugaagcuacaggcaaucuggucguuccccgcuaugccuucgcgaugaacagaggguccggaucuggcaucauuaucagcgauaccccugugcacgacugcaauaccacaugucaaacgcccaaaggcgccaucaacaccucccuuccguuucagaaugugcacccugucacaauuggggagugccccaaguacgugaaaagcaccaagcugcggauggcuacaggacuccgcaacaucccuucuauucaguccagaggccuguucgaggccaucgcuggguuuauugaaggaggcuggaccgggaugaucgauggaugguacggcuaucaucaccagaaugagcaaggcagcggguacgccgccgaccggaaaucuacgcagaacgcuaucgauggaauuacaaauaagguuaacagcgugaucgagaaaaugaacacccaguucaccgcggucggcaaggaguuuaaucaucuugaaaagcgcauugagaaccugaauaaaaagguggacgacggguuccucgauguuuggacauauaacgccgagcugcuggugcuccuggaaaaugagagaacccuugacuuccacgauuccaacgucaaaaaucuguacgaaaaggugcggucucagcuccgcaacaaugcuaaagagaucggaaacggcuguuuugaguucuaucacaagugcgacgauacauguauggaaagcgucagaaaugggacguacgacuaucugaaguacuccgaggaaagcaaacuuaaccgggagaagauugaaggcgugaaacuggauucugccagaaucuaccaaauccucgccauuuauuccaccguugcuagcucucuggugcugcucgucucccugggagccaucagcuuuuggaugugcuccaauggcucucuucagugccgcauuuguaucuga

SEQ ID NO: 192556 - RNA, 1701 nt, Artificial Sequence
  derived and/or modified CDS sequence (opt5) from hemagglutinin__InfluenzaA__ABB86887
augaaggccauccugcucauucugcuuuacaccuucacagcuacgaacgccgacacccugugcaucggcuaucacgcgaauaacagcacagauaccguggacacaguccucgagaaaaauguuaccgugacacauuccgugaaccugcuugaagauagacacaaugggaagcuguguaaccucggaggcauugcuccccuguaccuggggaauugcaacaucgccggauggcuccugggcaauccugagugugaacuucuguuuaccgucucuagcugguccuauauuguggagacgucuaacagcgacaaugggaccugcuacccgggagauuucaucaacuaugaggaacuccgggagcagcuguccucuaugagcuccuacgaacgcuuugagaucuuccccaaagaaagcucuuggccuaaucaugagacaaacagaggcguuaccgccgcuugucccuaugccggcgcuaauuccuuuuaccggaaccuuauuuggcuggugaagaaagggaacagcuacccuaagaucaauaagucuuaugucaacaauaaagagaaggaagugcucguucuguggggcauucaccaucccccuacauccgccgaccaacagagccuguaccagaacgcggaugccuaugugucugucgaguccagcaaauacaauaagaaauucaagccggaaaucgcuacccgccccaaggugagaggacaggccgggcggaugaacuauuacuggacgcucguggagccuggagacacaauuaccuuugaagcuacaggcaaucuggucguuccccgcuaugccuucgcgaugaaaagaggguccggaucuggcaucauuaucagcgauaccccugugcacgacugcaacaccacaugucaaacgcccaagggcgccaucaauaccucccuuccguuucagaacauucacccugugacaaucggggagugccccaaauacgucaagagcaccaaacugcggauggcuacaggacuccgcaauauuccuucuauccaguccagaggccuguucggggccauugcuggauuuaucgagggcggguggaccggaaugaucgauggcugguacggcuaucaucaccagaacgaacaagggagcggauacgccgccgaccggaagucuacgcagaaugcuauugauggcaucacaaacaaagugaauagcguuauugagaagaugaacacccaguucaccgcgguggggaaggaauuuaaccaucuugagaaacgcaucgaaaaucugaacaagaaagucgacgacggauuccucgauguguggacauauaaugccgagcugcugguucuccuggagaacgaaagaacccuugacuuccacgauuccaaugugaagaaccuguacgagaaaguccggucucagcuccgcaauaacgcuaaggaaauuggcaauggguguuuugaguucuaucacaagugcgacgauacauguauggaaagcgugagaaacggcacguacgacuaucugaaauacuccgaggagagcaaacuuaaucgggaaaagaucgagggagucaagcuggauucugccagaaucuaccaaauucucgccaucuauuccaccguggcuagcucucugguucugcucgugucccugggcgccauuagcuuuuggaugugcuccaacgggucucuucagugccgcaucuguauuuga

SEQ ID NO: 192557 - RNA, 1698 nt, Artificial Sequence
  derived and/or modified CDS sequence (opt5) from hemagglutinin__InfluenzaA__ABB86899
augaaggugaaacugcucauccugcuuugcaccuucacagccacguacgcugacaccauuuguaucggcuaucacgccaacaauagcacagauaccgucgacacaguucuggagaagaacgugaccgugacacauuccgucaaucuccuggaagauucucacaacgggaaacuuugccugcucaagggaauugcgccccugcagcugggcaauuguagcguggcuggguggauccucggaaacccugagugcgaacugcuuauuuccaaagagucuuggagcuacaucguugaaaccccgaaucccgagaacggcgccuguuauccugggcauuuugccgacuacgaggaacugagagagcaacucuccucugugagcuccuucgaacgguuugagaucuuccccaaggagagcucuuggccuaaucacacgauuaccggagucuccgcuagcugcucucauaacggcaagcgcuccuuuuauagaaaucugcuuuggcugacaggcaaaaacgggcucuaccccaaucugagcaagucuuaugccaacaauaaagaaaaggaggugcugauccucuggggaguucaccacccuccgaacauuggcgaucagcggacccuguaccauacagaaaacgcuuacguguccgucgugagcucccacuauucucgcagauucacccccgagaucacgaaacggccuaaggugcgcgaccaggaagggagaauuaauuacuauuggacacuucuggagcccggagauaccaucauuuuugaggccaacggcaaucucaucgcgccuugguacgccuucgcucugagccggggguuuggauccggcaucauuacaagcaacgcccccauggacgaaugugaugcuaagugccagaccccgcaaggcgccaucaauucuucccuuccuuuccagaacguccaucccguuaccauuggggaguguccuaaauaugugcgcagcgcgaagcugagaauggugacaggacuccggaauauccccucuauucagagccgcggccuguuuggggccaucgcuggauucaucgaaggcggguggacgggaauggucgacggcugguacggcuaucaccaccagaacgagcaaggguccggauacgccgcugaucagaaaucuacccagaaugccauuaacggcaucacaaauaaggugaacagcguuauugaaaagaugaauacccaguuuacagccguggggaaagaguucuccaaacuggagagacggauggaaaaccucaauaagaaggucgacgauggauuccuggacaucuggaccuacaacgcugagcuucuggugcuccuggaaaacgagcgcacgcuugacuuucaugauagcaauguuaaaaaccuguaugaaaaggugaaaggccaacucaagaauaacgcgaaagagauugggaauggcugcuucgaguuuuaccacaaguguaacaaugaaugcauggagucugucaagaacggaacauaugacuaccccaaauauuccgaagagagcaagcugaauagagagaaaaucgauggcgugaagcuggacucuaugggggucuaccagauccucgccauuuauuccaccguggcuagcucccugauccuucugguuucucucggagccauuagcuucuggaugugcuccaacggcucucugcagugucggaucugcauuuga

SEQ ID NO: 192558 - RNA, 1701 nt, Artificial Sequence
  derived and/or modified CDS sequence (opt5) from hemagglutinin__InfluenzaA__ABB86907
augaaggccauccugcucgugcugcuuuacaccuucacaagcacgaacgcugacacccugugcauuggcuaucacgccaauaacuccacagauaccgucgacacaguucucgagaaaaaugugaccgugacacauucugucaaccugcuugaagauaagcacaaugggaaacuguguagacucggaggcaucgcgccccugcaucuggggaagugcaacauugcuggauggcuccugggcaauccugagugugaccuucugcucaccgugagcuccuggucuuacaucguugaaacgagcaacuccuauaaugggaccugcuacccgggagauuuuacaaacuaugaggaacugcgggagcagcuuucuagcguguccagcuucgagcgcuuugaaauuuuccccaaagccucuuccuggccuaaucacgagaccaacagaggcgucacagccgcuuguccccaugccggcaccaauagcuuuuaccggaaccugaucuggcucgugaagaaggggaauacguauccuaaacugucuaaguccuacguuaacaacaaaggaaaggaagugcugguccucuggggcauccaccaccccagcacaucuaccgaccaacagucccuguaccagaaugcugauacauauguguucguggggaccagcaaauacaacaagaaguuuaaaccugagauugccguccgcccgaagguuaaagaccaggcgggaagaaugaauuauuacuggacccuuguggagcccggcgauacaaucacguucgaagccaccgggaaccugguggucccucgguaugcuuuugccaugaaucgcggacauggcuccggcauuaucauuucugacacacccgugcacgauugcaacaccacaugucaaaccccuaagggggcuaucaauacgagccuccccuuccagaacguucauccggugacaauuggaaaaugcccuaaguacgucaaauccaccagacugcggauggccaccggccuucgcaauauccccagcauccagucuagagggcuguuuggagcgauugccggcuucaucgaagggggauggacaggcaugauugacggcugguauggguaccaccaccagaacggacaaggcuccggguacgcugccgaucagaagucuacccagaaugcuaucgacggaauuacaaacaaggugaauagcguuaucgagaaaaugaacacgcaguuuaccgccgugggcaaggaguucaaucaucucgaaaaacggaucgagaaccugaacaagaaagucgacgauggguuccuggacguguggacauauaaugccgagcuccugguccuucuggaaaacgagcgcacccucgauuuucacgacagcaaugugaagaaccuguacgaaaagguuagacggcaacuuaaaaauaacgcuaaggagauuggcaauggauguuucgaauuuuaucauaacugcgaugacgcguguauggaguccgugaaaaauggcacauacgauuauccuaaguacucugaggaaagccgccugaacagagaggaaaucaaugggauuaaacucgacuccacccggaucuaucagauucuggccaucuacagcacggucgcuucuuccagcgugcugcucguuucucugggagccaucuccuucuggaugugcagcaacggcucccuucagugcagaauuuguaucuga

SEQ ID NO: 192559 - RNA, 1698 nt, Artificial Sequence
  derived and/or modified CDS sequence (opt5) from hemagglutinin__InfluenzaA__ABB86917
augaaggugaaacugcucauccugcuuugcaccuucacagccacguacgcugaccccauuuguaucggcuaucacgccaacaauagcaccgauacagucgacaccguucuggagaagaacguggcggugacacauuccgucaaucuccuggaagauucucacaacgggaaacuuugccugcucaagggaauugcuccucugcagcugggcaauuguagcguggccggguggauccucggaaacccggagugcgaacugcuuauuuccaaagagucuuggagcuacaucguugaaacccccaauccugagaacggcgccuguuaucccggguacuuugcugacuaugaggaacugagagagcaacucuccucugugagcuccuucgaacgguuugagaucuucccuaaggagagcucuuggcccaaucauacagucaccggaguguccgccagcugcucucacaacggcaaguccagcuuuuaccgcaaucugcuuuggcugacgggcaaaaacgggcucuauccuaaucugucuaaguccuacgcuaacaauaaagaaaaggagguucugauucucuggggagugcaucacccgcccaacaucggcgaucagagaacccuguaccacacagaaaacgccuaugucagcgugguguccucucauuacagccggcgcuucaccccugagauuacaaaaagacccaagguccgggaccaggaagggcgcaucaauuauuacuggacccuucuggagccuggagauacgauuaucuuugaggcgaacggcaaucucauugcccccugguaugcuuucgcccuguccagaggguuuggaagcggcaucaucacaucuaacgcuccgauggacgaaugugaugccaagugccagaccccucaaggcgcgauuaauuccagccuucccuuccagaacguucacccugugacaaucggggagugucccaaauacgugcggucugccaagcugcgcauggucaccggacucagaaauauucccagcauccagucccggggccuguuuggggcuauugccggauucaucgaaggcggguggaccggaaugguggacggcugguauggcuaccaucaccagaacgagcaagggucuggauacgcugccgaucagaaaagcacacagaaugccaucaacggcauuacgaauaagguuaacuccgugaucgaaaagaugaauacccaguuuacagcugucgggaaagaguucaacaaacuggagcgcagaauggaaaaucucaacaagaagguggacgauggauuccuggacauuuggaccuauaacgcggagcuucugguucuccuggaaaaugagcggacacuugacuuucacgauagcaacgugaaaaaucuguacgaaaaggucaaaucucaacucaagaacaaugccaaagagaucggcaacgggugcuucgaguuuuaucauaaguguaauaacgaaugcauggaguccgugaagaauggcaccuacgacuauccuaaauacagcgaagagucuaagcugaaccgcgagaaaauugauggagucaagcuggacuccaugggcguguaucagauccucgcuaucuacagcacgguugccuccucucuggugcuucuggucagccucggggccauuuccuucuggaugugcucuaauggaagccugcaguguagaaucugcauuuga

SEQ ID NO: 192560 - RNA, 1698 nt, Artificial Sequence
  derived and/or modified CDS sequence (opt5) from hemagglutinin__InfluenzaA__ABB86929
augaaggugaaacugcucauccugcuuuacaccuucacagccacguaugcugacaccauuugcaucggcuaccacgccaacaauagcacagauaccgucgacacaguucuggagaagaacgugaccgugacacauuccgucaaucuccuggaagauucucacaacgggaaacuuugucugcucaagggaauugcgccccugcagcugggcaauugcagcguggcuggguggauccucggaaacccugagugugaacugcuuauuuccaaagagucuuggagcuauaucguugaaaccccgaaucccgagaacggcgccugcuacccugggcauuuugccgacuaugaggaacugagagagcaacucuccucugugagcuccuucgaacgguuugagaucuuccccaaggagagcucuuggccuaaucacacgauuaccggagucuccgcuagcuguucucauaacggcaagcgcuccuuuuacagaaaucugcuuuggcugacaggcaaaaacgggcucuaucccaaucugagcaagucuuacgccaacaauaaagaaaaggaggugcugauccucuggggaguucaccacccuccgaacauuggcgaucagcggacccuguaccauacagaaaacgcuuauguguccgucgugagcucccacuacucucgcagauucacccccgagaucacgaaacggccuaaggugcgcgaccaggaagggagaauuaauuauuacuggacacuucuggagcccggagauaccaucauuuuugaggccaacggcaaucucaucgcgccuugguaugccuucgcucugagccggggguuuggauccggcaucauuacaagcaacgcccccauggacgaaugcgaugcuaagugucagaccccgcaaggcgccaucaauucuucccuuccuuuccagaacguccaucccguuaccauuggggagugcccuaaauacgugcgcagcgcgaagcugagaauggugacaggacuccggaauauccccucuauucagagccgcggccuguuuggggccaucgcuggauucaucgaaggcggguggacgggaauggucgacggcugguauggcuaccaccaccagaacgagcaaggguccggauacgccgcugaucagaaaucuacccagaaugccauuaacggcaucacaaauaaggugaacagcguuauugaaaagaugaauacccaguuuacagccguggggaaagaguucuccaaacuggagagacggauggaaaaccucaauaagaaggucgacgauggauuccuggacaucuggaccuauaacgcugagcuucuggugcuccuggaaaacgagcgcacgcuugacuuucaugauagcaauguuaaaaaccuguacgaaaaggugaaaggccaacucaagaauaacgcgaaagagauugggaauggcuguuucgaguuuuaucacaagugcaacaaugaauguauggagucugucaagaacggaacauacgacuaucccaaauacuccgaagagagcaagcugaauagagagaaaaucgauggcgugaagcuggacucuaugggggucuaucagauccucgccauuuacuccaccguggcuagcucccugauccuucugguuucucucggagccauuagcuucuggaugugcuccaacggcucucugcagugccggaucuguauuuga

SEQ ID NO: 192561 - RNA, 1701 nt, Artificial Sequence
  derived and/or modified CDS sequence (opt5) from hemagglutinin__InfluenzaA__ABB86937
augaaggccauccugcucgugcugcuuuacaccuucacaagcacgaacgcugacacccugugcauuggcuaucacgccaauaacuccacagauaccgucgacacaguucucgagaagaaugugaccgugacacauucugucaaccugcuugaagauaagcacaaugggagacuguguaaacucggaggcaucgcgccccugcaucuggggaagugcaacauugcuggauggcuccugggcaauccugagugugaacuucuguuuaccgugagcuccuggucuuacaucguugagacgagcaacuccuauaaugggaccugcuacccgggagacuucauuaacuaugaagaacuccgggagcagcugucuagcguguccagcuuugaacgcuucgagaucuuucccaaagccucuuccuggccuaaucacgaaacaaacagaggcgucaccgccgcuuguccccaugccggcacaaauagcuucuaccggaaccuuaucuggcuggugaagaaggggaauaccuauccuaaaauuucuaaguccuacguuaacaacaaaggaaaggaggugcucguccuguggggcauccaccaccccagcacgucuaaugaucaacagucccuguaccagaacgcugacacauauguguuuguggggccuagcaaauacaauaagaaguucaaaccggagauugccacccgccccaaggucagagaucaggcgggacggaugaacuauuacuggacacucguugaaccuggcgacaccaucaccuuugaggccacagggaaucugguggugccccgcuaugcuuucgccaugaacagaggauccgaaucuggcauuaucauuagcgauacgccuguccaugacugcaauaccacaugucaaacccccaaaggcgcuaucaacacaucccuuccguuucagaaugugcacccuguuaccaucggggagugccccaaguacgugaaaagcacgcggcugcgcauggccacaggacucagaaacauuccuucuauccagucccggggccuguucggggcgauugccggauuuaucgaagagggcuggaccgggaugauugauggaugguauggcuaccaucaccagaauggccaagggagcggauacgcugccgaccagaagucuacccagaacgcuaucgauggcaucacaaauaaagucaacagcgugauugagaagaugaauacccaguucacagccguugggaaggaguucaaccaccuugagaaacgcaucgaaaaccugaauaagaaaguggacgacggauuucucgaugucuggacguauaacgccgagcugcuggugcuccuggaaaaugagagaacccuugacuuccaugauuccaacgucaagaaucuguacgagaaagugcggcgccaacucaagaacaaugcuaaggaaauuggcaacggguguuuugaguucuaucacaaaugcgacgaugcguguauggaaucuguuaagaauggcacauacgacuaucccaaauacagcgaggaauccagacugaaccgggaggagaucaauggaauuaaacuugauagcaccagaaucuaucagauccuggccauuuacucuacaguggcuuccagcucuguccuccuggugucccugggcgccaucagcuuuuggaugugcuccaacgggucucuccagugccgcauuuguaucuga

SEQ ID NO: 192562 - RNA, 1701 nt, Artificial Sequence
  derived and/or modified CDS sequence (opt5) from hemagglutinin__InfluenzaA__ABB86946
augaaggccauccugcucgugcugcuuuacaccuucacagcugccaacgcggacacgcugugcauuggcuaucacgcuaauaacagcaccgauacagucgacaccguucucgagaaaaaugugacagugacccauuccgucaaccugcuugaagauagacacaaugggaagcuguguaaacuccggggaaucgcgccccugcaucugggcaagugcaacauugccggguggcuccugggaaauccugagugugaaucucuuagcacaguguccucuuggagcuacaucguugagaccuccaacucugacaauggcacgugcuauccgggggauuuuauuaacuacgaagaacugcgcgagcagcucagcuccgugagcucuuucgaaagauuugagaucuuccccaaggcuuccagcuggccuaaucacgaaaccaaccggggaacaaccgccgcuugucccuaugccggcgccaauucuuuuuaccgcaaccugaucuggcuugucaaaaagggcaauuccuauccuaaacugaacaagagcuacgugaacaauaaagggaaggagguucucgugcuguggggcauucaucaccccucuacauccaacgagcaacagagccuguaccagaaugccgacaccuaugucuucgugggauccucuaaauacaacaagaaguuuaaaccugaaaucgcuacgagaccgaaggugcgggaucaggccgggcgcaugaauuauuacuggacacucauugagcccggagacaccaucacauucgaagcuaccggcaaccuggucguuccuagauaugccuuugcgaugaaucgggggagcggauccggcauuaucauuagcgauacccccgugcacgacugcaacacaacgugucaaaccccuaaaggcgccaucaauacaucucuucccuuccagaacgugcauccggucaccaucggggagugcccuaaguacgugaaauccacaaagcugcgcauggcuaccggacucagaaauauucccagcauccagucucggggccuguuuggggccauugcuggauucaucgaaggcggguggacgggaaugauugauggcugguauggcuaccaccaucagaacgagcaagggagcggauacgccgccgaccagaaauccacacagaaugcuaucgauggcaucaccaacaagguuaauucugugauugagaagaugaacacccaguuuacagcggucgggaaagaguucaaccaccuugagaagcgcaucgaaaaucugaacaaaaagguggacgacggauuccucgauguuuggaccuauaaugccgagcugcuggugcuccuggaaaacgagagaacacuugacuuucacgauagcaaugucaaaaaccuguacgagaaggugcggucccaacucaagaauaacgcuaaagaaauuggcaauggguguuucgaguuuuaucauaagugcgacgaugccuguauggaaagcgucaaaaacggcacguacgacuauccuaaguacucugaggaaucccgccugaauagagaggagaucgauggaauuaaacuugacagcacccggaucuaucagauccuggccauuuacucuacaguggcuuccagcuccguucuccuggugucucugggcgccaucagcuucuggaugugcuccaacgggucucuccagugcagaauuuguaucuga

SEQ ID NO: 192563 - RNA, 1701 nt, Artificial Sequence
  derived and/or modified CDS sequence (opt5) from hemagglutinin__InfluenzaA__ABB96319
augaagaccaucauugcccugagcuacaucuucugccagguguuugcucaaaaccuccccggcaaugacaacuccacagccacgcugugucuugggcaccaugcggucccuaauggaacccugguuaaaacaauuaccaacgaucagaucgaggugacaaaugcuaccgaacucgugcagucuagcuccacaggcagaauuugcgacaacccgcaccggauccuggaugggaagaauuguacccuuaucgacgcccugcucggagauccccauugcgacggcuuccagaacgagaaaugggaucuguuugucgaacgcucuaaggccuucagcaauuguuauccuuacgacgugcccgauuaugcuucccugagaucucucguugccagcuccgggacgcuggaguuuuucaacgaaggauuuaauuggaccggcgugacacaaaacggcgggagcuacgcuugcaaacggggaccugacaauucuuucuuuucccgccuuaacuggcuguauaagagcgagucuaccuaccccguccucaaugugacaaugccuaacaacgauaauuucgacaagcuguauauuuggggcguucaccauccguccaccgauaaagagcagacgaaccuuuacgugcaggccagcgggagagucacagugucuaccaagcggucccagcaaacaaucauucccaaugugggaccucgccccugggucagaggccugagcucccggaucucuauuuacuggaccaucguuaaaccuggggacgugcuccugauuaacagcaauggaaaccugaucgcgccccgcggcuauuuuaagaucagaaccggcaaauccagcauuaugcggucugacgccccgaucgggacauguuccagcgaaugcauuacgccuaauggaucuauccccaacgauaagccuuuccagaaugugaacaagauuaccuacggcgcuugucccaaauaugucaagcagaauacacucaaacuggccaccgggaugcgcaacgugcccgagaagcagacaagaggaaucuuuggcgcuaucgccggguucauugaaaauggaugggagggcaugaucgacggcugguacggguuccggcaccaaaacagcgagggaaccggccaggcggccgaucuuaaauccacgcaggcugccauugaccaaaucaaugggaagcugaaccgcguuauugagaaaacaaacgaaaaguuucaccagaucgaaaaggaguucucugaaguggagggaagaauccaggaucucgagaaauaugucgaagacaccaagauugaucuguggagcuacaaugcugagcuucugguggcccucgaaaaccagcauaccaucgaccugacagauuccgagaugaauaaacuguuugaaaagacccggagacaacuccgcgagaacgccgaggacaugggcaaugggugcuucaaaauuuaucacaagugugauaacgcuugcaucggcagcauucggaauggaacauacgaccaugacguuuacagagaugaagcgcugaacaaucgcuuucagaucaagggcguggagcuuaaaucuggguauaaggacuggauucuguggaucuccuucgccaucagcugcuuucuccugugugucgugcuucugggauucauuaugugggcuugccagaaaggcaacauccgguguaauauuugcaucuga

SEQ ID NO: 192564 - RNA, 1701 nt, Artificial Sequence
  derived and/or modified CDS sequence (opt5) from hemagglutinin__InfluenzaA__ABB96330
augaagaccaucauugcccugagcuacaucuucugccagguguuugcucaaaaccuccccggcaaugacaacuccacagccacgcugugucuugggcaccaugcggucccuaauggaacccugguuaaaacaauuaccaacgaucagaucgaggugacaaaugcuaccgaacucgugcagucuagcuccacaggcagaauuugcgacaacccgcaccggauccuggaugggaagaauuguacccuuaucgacgcccugcucggagauccccauugcgacggcuuccagaacgagaaaugggaucuguuugucgaacgcucuaaggccuucagcaauuguuauccuuacgacgugcccgauuaugcuucccugagaucucucguugccagcuccgggacgcuggaguuuuucaacgaaggauuuaauuggaccggcgugacacaaaacggcgggagcuacgcuugcaaacggggaccugacaauucuuucuuuucccgccuuaacuggcuguauaagagcgagucuaccuaccccguccucaaugugacaaugccuaacaacgauaauuucgacaagcuguauauuuggggcguucaccauccguccaccgauaaagagcagacgaaccuuuacgugcaggccagcgggagagucacagugucuaccaagcggucccagcaaacaaucauucccaaugugggaagccgcccuugggucagaggccuguccucucggaucagcauuuacuggaccaucguuaaacccggggacgugcuccugauuaacuccaauggaaaccugaucgcgccucgcggcuauuuuaagaucagaaccggcaaaagcucuauuaugcgguccgacgcccccaucgggacauguagcucugaaugcauuacgccgaauggaagcaucccuaacgaucgccccuuccagaaugugaacaagauuaccuacggcgcuuguccuaaguaugucaaacagaauacacucaagcuggccaccgggaugagaaacgugcccgagaaacagacacggggaaucuuuggcgcuaucgccggguucauugaaaauggaugggagggcaugguugacggcugguacggguuccgccaccaaaacuccgagggaaccggccaggcggccgaucuuaagucuacgcaggcugccaucgaccaaauuaaugggaaacugaacagagugaucgaaaagacaaacgagaaauuucaccagauugaaaaggaguucagcgaagucgagggacggauccagaaucucgagaaguauguggaagauaccaaaaucgaccugugguccuacaacgcugagcuucugguugcccucgaaaaucagcauaccauugaucugacagacagcgagaugaacaagcuguuugagaaaaccagacgccaacuccgggaaaaugccgaggauaugggcaacgggugcuucaagaucuaucacaaaugugacaaugcuugcauuggcucuaucagaaacggaacauacgaucaugacguguaccgcgacgaagcgcugaauaaccgguuucagauuaagggcgucgagcuuaaguccggguauaaagauuggauccuguggauuagcuucgccaucucuugcuuucuccugugugugguccuucugggauucaucaugugggcuugccagaagggcaauauuagauguaacaucugcauuuga

SEQ ID NO: 192565 - RNA, 1701 nt, Artificial Sequence
  derived and/or modified CDS sequence (opt5) from hemagglutinin__InfluenzaA__ABB96341
augaagaccaucauugcccugagcuacaucuucugccagguguuugcucaaaaccuccccggcaaugacaacuccacagccacgcugugucuugggcaccaugcggucccuaauggaacccugguuaaaacaauuaccaacgaucagaucgaggugacaaaugcuaccgaacucgugcagucuagcuccacaggcagaauuugcgacaacccgcaccggauccuggaugggaagaauuguacccuuaucgacgcccugcucggagauccccauugcgacggcuuccagaacgagaaaugggaucuguuugucgaacgcucuaaggccuucagcaauuguuauccuuacgacgugcccgauuaugcuucccugagaucucucguugccagcuccgggacgcuggaguuuuucaacgaaggauuuaauuggaccggcgugacacaaaacggcgggagcuacgcuugcaaaaagggaccugacaauucuuucuuuucccggcuuaacuggcuguauaagagcgagucuaccuaccccguccucaaugugacaaugccuaacaacgauaauuucgacaaacuguauauuuggggcguucaccauccguccaccgauaaggagcagacgaaccuuuacgugcaggccagcgggcgcgucacagugucuaccaaaagaucccagcaaacaaucauucccaaugugggaagccggccuuggguccgcggccuguccucuagaaucagcauuuacuggaccaucguuaagcccggggacgugcuccugauuaacuccaauggaaaccugaucgcgccucggggcuauuuuaaaauccgcaccggcaagagcucuauuaugagauccgacgcccccaucgggacauguagcucugaaugcauuacgccgaauggaagcaucccuaacgauaagcccuuccagaaugugaacaaaauuaccuacggcgcuuguccuaaguaugucaaacagaauacacucaagcuggccaccgggaugcggaacgugcccgagaaacagacacgcggaaucuuuggcgcuaucgccggguucauugaaaauggaugggagggcaugaucgacggcugguacggguucagacaccaaaacuccgagggaaccggccaggcggccgaucuuaagucuacgcaggcugccauugaccaaaucaaugggaaacugaaccggguuauugaaaagacaaacgagaaguuucaccagaucgaaaaagaguucagcgaaguggagggacgcauccaggaucucgagaaguaugucgaagacaccaaaauugaucugugguccuacaaugcugagcuucugguggcccucgaaaaccagcauaccaucgaccugacagauagcgagaugaauaagcuguuugagaaaaccagacggcaacucagagaaaacgccgaggacaugggcaaugggugcuucaagauuuaucacaagugugauaacgcuugcaucggcucuauucgcaauggaacauacgaccaugacguuuaccgggaugaagcgcugaacaauagauuucagaucaaaggcguggagcuuaaguccggguauaaagacuggauucuguggaucagcuucgccaucucuugcuuucuccugugugucgugcuucugggauucauuaugugggcuugccagaagggcaacauccgcuguaauauuugcaucuga

SEQ ID NO: 192566 - RNA, 1701 nt, Artificial Sequence
  derived and/or modified CDS sequence (opt5) from hemagglutinin__InfluenzaA__ABB96395
augaagaccaucauugcccugagcuacaucuucugccagguguuugcucaaaaccuccccggcaaugacaacuccacagccacgcugugucuugggcaccaugcggucccuaauggaacccugguuaaaacaauuaccaacgaucagaucgaggugacaaaugcuaccgaacucgugcagucuagcuccacaggcagaauuugcgacucuccgcaccggauccuggaugggaagaacuguacccuuauggacgcccugcucggagauccccauugcgacggcuuccagaaugagaaaugggaucuguuugucgaacgcagcaaggccuucuccaacuguuauccuuacgacgugcccgauuaugcuucucugagaagccucguugccuccagcgggacgcuggaguuuaucaaugaaggauucaacuggaccggcgugacacaaaauggcgggucuuacgcuugcaaacggggaccugacaacuccuuuuucagccgccuuaauuggcuguauaagucugaguccaccuaccccguccucaacgugacaaugccuaauaacgauaacuuugacaagcuguauauuuggggcguucaccauccgagcaccgauaaagagcagacgaaucuuuacgugcaggccucugggagagucacaguguccaccaagcggagccagcaaacaaucauucccaacgugggaucccgcccuugggucagaggccugucuagccggaucuccauuuacuggaccaucguuaaacccggggacauucuccugaucaauagcaacggaaaucugaucgcgccucgcggcuauuucaagauuagaaccggcaaaucuuccaucaugcggagcgacgcccccauugggacauguucuagcgaaugcaucacgccgaacggauccauuccuaaugauaagcccuuucagaacgugaauaagaucaccuacggcgcuuguccuaaauaugugaagcagaacacacucaaacuggccaccgggaugcgcaauguccccgagaagcagacaagaggaaucuucggcgcuauugccggguuuaucgaaaacggaugggagggcaugauugacggcugguacggguuccggcaccaaaauucugagggaaccggccaggcggccgaucuuaaaagcacgcaggcugccaucgaccaaauuaacgggaagcugaaucgcgugaucgaaagaacaaacgagaaauuccaccagaucgaaaaggaguuuuccgaaguugagggacggauucaggaucucgagaaguauguggaagacaccaaaaucgaucuguggagcuacaacgcugagcuucuggucgcccucgaaaaucagcauaccauugaccugacagauucugagaugaacaagcuguucgagaaaaccagacgccaacuccgggaaaaugccgaggacaugggcaacgggugcuuuaagaucuaucacaaaugugauaaugcuugcauuggcuccaucagaaacggaacauacgaccaugacguguaccgcgaugaagcgcugaauaaccgguuccagauuaagggcguugagcuuaagagcggguauaaagacuggauccuguggaucucuuuugccauuuccugcuuccuccugugugugguccuucugggauuuaucaugugggcuugccagaagggcaauauuagauguaacaucugcauuuga

SEQ ID NO: 192567 - RNA, 1698 nt, Artificial Sequence
  derived and/or modified CDS sequence (opt5) from hemagglutinin__InfluenzaA__ABB96487
augaaggugaaacugcucauccugcuuugcaccuucacagccacguacgcugacaccauuuguaucggcuaucacgccaacaauagcacagauaccgucgacacaguucuggagaagaacgugaccgugacacauuccgucaaucuccuggaagauucucacaacgggaaacuuugccugcucaagggaauugcgccccugcagcugggcaauuguagcguggcuggguggauccucggaaacccugagugcgaacugcuuauuuccaaagagucuuggagcuacaucguugaaaccccgaaucccgagaacggcgccuguuauccuggguacuuugccgacuaugaggaacugagagagcaacucuccucugugagcuccuucgaacgguuugagaucuuccccaaaaagagcucuuggccuaaucauacggucaccggaguguccgcuagcugcucucacgauggcaaguccagcuuuuaccgcaaccugcuuuggcugacaggcaagaaugggcucuaucccaaccugucuaaauccuacgccaauaacaaggagaaagaaguucugauucucuggggagugcaucacccuccgaauaucggcgaccagagaacccuguaccacacagagaacgcuuaugucagcgugguguccucucauuacagccggcgcuucacccccgaaauuacgaagagaccuaagguccgggaucaggaggggcgcaucaacuauuacuggacacuucuggaacccggagacaccauuaucuuugaggccaauggcaaccucauugcgccuugguaugccuucgcucuguccagaggguuuggaagcggcaucaucacaucuaaugcccccauggaugagugugacgcuaaaugccagaccccgcaaggcgccauuaacuccagccuuccuuuccagaauguucaccccgugaccaucggggaauguccuaaguacgugcggucugcgaaacugcgcauggucacaggacucagaaacauucccagcauccagucccggggccuguuuggggccauugcuggauucaucgagggcggguggacgggaaugguggauggcugguauggcuaccaucaccagaaugaacaagggucuggauacgccgcugaccaaaagagcacccagaacgccaucaauggcauuacaaacaaaguuaauuccgugaucgagaagaugaacacccaguuuacagccgucgggaaagaguucaauaagcuggaacgcagaauggagaaccucaauaagaaaguggaugacggauuccuggacauuuggaccuauaacgcugaacuucugguucuccuggagaacgaacggacgcuugauuuucacgacagcaaugugaagaaccuguacgagaaagucaagucucagcucaaaaauaacgcgaaggaaaucggcaaugggugcuucgaguuuuaucauaaguguaacaaugagugcauggaauccgugaaaaacggcacauacgauuaucccaaguacagcgaggaaucuaaacugaaucgcgagaagauugacggagucaaacuggauuccaugggcguguaucagauccucgccaucuacagcaccguugcuuccucucuggugcuucuggucagccucggggccauuuccuucuggaugugcucuaacggaagccugcaguguagaaucugcauuuga

SEQ ID NO: 192568 - RNA, 1701 nt, Artificial Sequence
  derived and/or modified CDS sequence (opt5) from hemagglutinin__InfluenzaA__ABB96520
augaagaccaucauugcccugagcuacaucuucugccucgcucugggccaggaccuucccgggaacggaaauuccacagccacgcugugucucggccaccaugcggugccuaacgggacccuggucaaaacaauuaccgaugaccaaaucgagguuacaaaugcuaccgaacuugugcagucuagcuccacaggaaagauuugcaacaauccgcacagaauccuggauggcaucgacuguacccucauugaugcccugcugggggacccccauugcgauguguuucagaacgagacgugggaccucuucgucgaacggucuaaagccuuuagcaauuguuauccuuacgaugugcccgacuaugcuucccugcgcucucuuguugccagcuccggaacccuggaguucaucacagaaggcuuuaccuggacaggcgugacccagaacgggggaagcaaugcuugcaagagaggcccugggucuggauucuuuucccggcucaacuggcugacgaaaagcggcucuacauaccccguccuuaaugugaccaugccuaacaaugauaacuucgacaagcuguauauuuggggaguucaccauccguccacagaucaagagcagaccagccucuacgugcaggccucugggcgcgucaccguguccacaagacggagccagcaaacgaucauucccaauaucggcucccgcccuugggugagaggccugucuagccggauuuccaucuauuggaccaucgucaagcccggggacguucuggugauuaacagcaacggaaaucucaucgcgccucgcggcuacuuuaaaaugagaacagggaagucuuccauuaugcggagcgacgcccccaucgauaccuguauuucugagugcaucacaccgaacggaagcaucccuaaugacaaacccuuccagaacgugaauaagauuaccuacggcgcuuguccuaaauaugucaagcagaagacgcugaaacuugccacagggaugcgcaacauccccgaaaagaaaaccagaggaauuuuuggcgcuaucgccggcuucauugagaaugggugggaaggaaugaucgauggcugguacggguuucggcaccagaacuccgagggaaccggccaagcggccgaccugaagucuacacaggcugccaucgaucagauuaaugggaaacucaaccgcgugaucgagaagaccaaugaaaaauuccaccaaauugagaaggaguucagcgaaguugaaggcagaauccaggaccuggagaaguauguggaggauacaaaaauugaccuuugguccuacaacgcugaacugcucgucgcccuggagaaucagcauacgaucgaucugaccgacagcgaaaugaacaagcucuuugagaaaacacggagacagcugcgcgaaaaugccgaggauaugggaaacggcugcuucaagauuuaucacaaaugugacaacgcuugcaucgagucuauccggaaugggaccuacgaccaugauguguauagagacgaagcgcuuaacaaucgcuuucaaauuaagggaguugagcugaaguccggcuacaaagauuggauccucuggauuagcuucgccaucucuugcuuucugcuuugugugguccugcucggguucauuaugugggcuugccagcggggaaacaucagauguaauaucugcauuuga

SEQ ID NO: 192569 - RNA, 1701 nt, Artificial Sequence
  derived and/or modified CDS sequence (opt5) from hemagglutinin__InfluenzaA__ABB96531
augaagaccaucauugcccugagcuacauccucugccugguguccgcucagaaaauucccggcaacgacucuagcacagccacgcuuugucuggggcaccaugcggucccuaauggaacccucguuaagacaaucaccaacgaucaaauugaggugacaaaugcuaccgaacuggugcaguccucuagcacaggcagaaucugcgacuccccgcaccggauccuugauggggagaacuguacccugauugacgcccuccugggagauccccauugcgacggcuuccagaauaaagaaugggaucuguuugucgagcgcucuaaggccuauagcaacuguuacccuuaugacgugcccgauuacgcuucccucagaagccugguugccucuuccgggacgcuugaauuuaauaacgagagcuucaauuggaccggaguggcucagaacggcacaucuuaugccugcaaacggcgcuccaucaagagcuucuuuucuagacugaauuggcuccaccaacugaaguacaaauauccugcgcuuaacgucaccaugcccaauaacgacaaguucgauaaacuguacauuuggggcgugcaucacccuuccacagacagcgaucagaccucccucuacgcccaggcuucugggcggguuacggugagcacaaagcgcucccagcaaaccgucaucccgaauauuggaagcagacccugggugcggggcgugucuucccgcaucagcauuuauuggacaaucgucaaaccuggggacauccugcugauuaacucuaccggaaaccucaucgcccccagaggcuacuuuaagauucggagcgggaaguccucuaucaugcgcagcgacgcuccuauuggaaaauguaauuccgagugcaucacccccaacggcagcaucccgaaugauaagccuuuccagaacguuaauagaauuacauauggcgccuguccccgguacgugaaacagaacacgcugaaacuugcgaccgggaugcgcaaugugccugaaaagcagacaagaggaaucuuuggcgccauugcuggguucaucgagaacggaugggaaggcauggucgacgggugguauggauuucggcaccaaaauucugagggcaccggccaggccgcugaucugaaguccacacaggccgccauuaaccaaaucaaugggaaacucaacagacugaucgagaagaccaaugaaaaguuccaucagauugagaaagaauuuagcgagguggaaggacgcauccaggaccuugagaaguacguugaggauacgaaaauugaccuguggucuuauaacgcugaacuccugguggcgcuggagaaucagcacacaaucgaucucaccgacuccgaaaugaacaagcuguucgagcggaccagaaaacaacuucgcgaaaacgccgaggauaugggcaaugggugcuucaagauuuaccauaagugugacaacgcuugcaucggaagcauucggaauggcacauacgaucacgacgucuauagagacgaggcccugaacaaucgcuuucagaucaaagggguggaacucaaguccggcuacaaagauuggauccuguggauuucuuucgccaucagcugcuuucuucuguguguugugcuccugggauucauuaugugggcuugccagaagggcaacauccgguguaauauuugcaucuga

SEQ ID NO: 192570 - RNA, 1701 nt, Artificial Sequence
  derived and/or modified CDS sequence (opt5) from hemagglutinin__InfluenzaA__ABC02234
augaagaccaucauugcccugagcuacauccucugccugguguucgcucagaaacuucccggcaacgacaauuccacagccacgcugugucucgggcaccaugcggucccuaacggaacccugguuaagacaauuaccaaugaucaaaucgaggugacaaacgcuaccgaacuugugcagucuagcuccacaggcagaauuugcgacucuccgcaccggauccuggauggggagaauuguacccucaucgacgcccugcugggagauccccauugcgacggcuuucagaacaaagaaugggaucucuucgucgagcgcagcaaggccuauuccaauuguuacccuuaugacgugcccgauuacgcuucucugagaagccuuguugccuccagcgggacgcuggaauuuaacaaugagucuuucaacuggaccggaguggcucagaauggcacauccuaugccugcaaacggcgcagcauuaagucuuucuucuccagacucaacuggcugcaccaacuuaaguacaaauauccugcgcugaaugucaccaugcccaacaaugacaaguuugauaaacucuacaucuggggcgugcaucacccuagcacagacucugaucagaccucccuguacgcccaggcuagcgggcggguuacgguguccacaaagauuucucagcaaaccgucaucccgaacauuggaagccgccccugggugagaggcguguccagccggaucucuauuuauuggacaaucgucaaaccuggggacauccugcucauuaacuccaccggaaaucugaucgcuccccgcggcuacuucaagauuagaagcgggaagucuagcaucaugcgguccgacgccccuauuggaaaauguaacucugagugcaucacccccaauggcagcaucccgaacgauaagccuuuucagaauguuaaccgcauuacauauggcgccugucccagauacgugaaacagaauacgcuuaagcuggcgaccgggaugcggaacgugccugaaaaacagacacgcggaaucuucggcgccauugcuggguuuaucgagaauggaugggaaggcauggucgacgggugguauggauucagacaccaaaacuccgagggcaccggccaggccgcugaucucaagagcacacaggccgccauuaaucaaaucaacgggaaacugaaucggcuuaucgagaagaccaacgaaaaguuucaucagauugagaaagaauuuucugagguggaaggaagaauccaggaccuggagaaguacguugaggauacgaaaauugaccucugguccuauaaugcugaacugcugguggcgcucgagaaccagcacacaaucgaucugaccgacagcgaaaugaacaaacuuuucgagcgcacccggaagcaacugagagaaaaugccgaggauaugggcaacgggugcuuuaagauuuaccauaagugugacaaugcuugcaucggaucuauucgcaacggcacauacgaucacgacgucuaucgggacgaggcccucaauaacagauuccagaucaaagggguggaacugaaguccggcuacaaagauuggauccuuuggauuagcuuugccauguccugcuuccuguuuuguguugugcuccugggauucaucaugugggcuugccagaagggcaauauucgcuguaacaucugcauuuga

SEQ ID NO: 192571 - RNA, 1701 nt, Artificial Sequence
  derived and/or modified CDS sequence (opt5) from hemagglutinin__InfluenzaA__ABC02255
augaagaccaucauugcccugagcuacaucuucugccucgugcuggcucaggaccuucccggcaacgauaauuccacagccacgcugugucucgggcaccaugcggucccuaacggaacccugguuaaaacaauuaccaaugaccaaaucgaggugacaaacgcuaccgaacuugugcagucuagcuccacaggcaagauuugcaauaacccgcacagaauccuggaugggaucaauuguacccucauugacgcccugcugggagauccccauugcgacggcuuucagaacgagaaaugggaucucuucgucgaacggucuaaggccuuuagcaauuguuauccuuacgacgugcccgauuaugcuucccugcgcucucuuguugccagcuccgggacgcuggaguucaucaacgaaggauuuaauuggaccggcgugacacagaacggcgggagcaaugcuugcaaaagaggaccugacucuggcuucuuuucccggcucaacuggcuguacaagagcgggucuaccuaucccguccuuaaugugacaaugccuaacaacgauaauuucgacaagcuguacauuuggggaguucaccauccguccaccgaucaagagcagacgaaccucuaugugcaggccagcggccgcgucacagugucuaccaaaagaucccagcaaacaaucauucccaauguggggagccggccuuggguccgcggacuguccucuagaaucagcauuuacuggaccaucguuaagcccggcgacauccuggugauuaacuccaauggcaaccucaucgcgccucgggggcacuuuaaaaugcgcaccggaaagagcucuauuaugagauccgacgcccccaucggcacauguagcucugagugcauuacgccgaaugggagcaucccuaacgauaaacccuuccagaaugugaacaagaucaccuacggagcuuguccuaaguaugucaaacagaauacacugaaacuugccaccggcaugcggaacgugcccgaaaagcagacacgcgggauuuuuggagcuaucgccggcuucauugagaauggcugggaagggaugaucgacggaugguacggcuuuagacaccaaaacuccgaggggaccggacaggcggccgaucugaagucuacgcaggcugccauugaccaaaucaauggcaaacucaaccggguuaucgagaagacaaacgaaaaauuccaucagauugagaaggaguucagcgaaguggaagggcgcauccaggaucuggagaaguaugucgaggacaccaaaauugaucuuugguccuacaaugcugaacugcucguggcccuggagaaccagcacaccaucgaccugacagauagcgaaaugaauaagcucuuugagaaaaccagacggcaacugagagaaaacgccgaggacaugggcaauggaugcuucaagauuuaucauaaaugugauaacgcuugcaucggcucuauucgcaaugggacauacgaccacgacguuuaucgggaugaggcgcuuaacaauagauuucagaucaagggaguggaacugaaguccggcuacaaagacuggauccucuggauuagcuucgccaucucuugcuuucugcuuugugucgugcugcucggguucauuaugugggcuugccagaagggaaacauccgcuguaauauuugcaucuga

SEQ ID NO: 192572 - RNA, 1701 nt, Artificial Sequence
  derived and/or modified CDS sequence (opt5) from hemagglutinin__InfluenzaA__ABC02266
augaagaccaucauugcccugagcuacaucuucugccucguguuugcucaggaccugcccggcaacgauaauuccacagccacgcuuugucuggggcaccaugcggucccuaacggaacccucguuaaaacaauuaccaaugaccaaaucgaggugacaaacgcuaccgaacuggugcagucuagcuccacaggcaagauuugcgauaauccgcacagaauccuugacgggaucaacuguacccugauugaugcccuccugggagacccccauugcgauggcuuccagaaugagaaaugggaccuguuugucgaacggucuaaggccuucagcaacuguuauccuuacgaugugcccgacuaugcuucccuccgcucucugguugccagcuccgggacgcuugaguuuaucaaugaaggauucaacuggaccggcgugacacagaauggcgggagcagagcuugcaaacggggaccugauaacggcuuuuucucucgccugaauuggcucuacaaguccgggagcaccuaucccguccaaaacgugacaaugccuaauaacgacaacucugauaagcuguacauuuggggaguucaccauccguccaccgacaaagagcagacggaccuuuaugugcaggccagcggcaaggucacagugucuaccaaaagaucccagcaaacagugauccccaaugucgggagccggccuuggguucgcggacuguccucuagagugagcauuuacuggaccaucgugaagcccggcgauauucucgucaucaacuccaauggcaaccugaucgcgccucggggguacuuuaaaaugcgcaccggaaagagcucuauuaugagauccgacgcccccaucggcacauguagcucugagugcauuacgccgaaugggagcaucccuaacgauaagcccuuccagaaugugaacaaaauuaccuauggagcuuguccuaaguacguuaaacagaauacacugaagcucgccaccggcaugcggaacgugcccgaaaaacagacacgcgggaucuuuggagcuaucgccggcuucauugagaauggcugggaagggaugaucgacggaugguauggcuuuagacaccaaaacuccgaggggaccggacaggcggccgaucugaagucuacgcaggcugccauugaccaaaucaauggcaaacuuaaccgggucauugagaagacaaaugaaaaguuccaccagaucgagaaagaguucagcgaaguggaagggcgcauccaggaucuggagaaguacguugaggacaccaaaauugaucucugguccuauaacgcugaacugcuuguggcccuggagaaccagcauaccaucgaccucacagauagcgaaaugaauaagcuguuugagaaaaccagacggcaacugagagaaaacgccgaggacaugggcaauggaugcuucaagauuuaccacaagugugacaacgcuugcaucggcucuauucgcaaugggacauaugaucaugacgucuaccgggaugaggcgcucaacaauagauuucagaucaaaggaguggaacugaaguccggcuacaaagacuggauucuuuggaucagcuucgccaucucuugcuuucugcucugugucgugcugcuuggguucauuaugugggcuugccagaagggaaacauccgcuguaauauuugcaucuga

SEQ ID NO: 192573 - RNA, 1701 nt, Artificial Sequence
  derived and/or modified CDS sequence (opt5) from hemagglutinin__InfluenzaA__ABC02288
augaagaccaucauugcccugagcuacauccucugccugguguucgcucagaaaauucccggcaacgacaauuccacagccacgcuuugucuggggcaccaugcggucccuaacggaacccucguuaagacaaucaccaaugaucaaauugaggugacaaacgcuaccgaacuggugcagucuagcuccacaggcagaaucugcgacucuccgcaccggauccuugauggggagaauuguacccugauugacgcccuccugggagauccccauugcgacggcuuucagaacaaagaaugggaucuguucgucgagcgcagcaaggccuauuccaauuguuacccuuaugacgugcccgauuacgcuucucucagaagccugguugccuccagcgggacgcuugaauuuaacaaugagucuuucaacuggaccggaguggcucagaauggcacauccuaugccugcaaacggcgcagcaucaagucuuucuucuccagacugaacuggcuccaccaacugaaguacaaauauccugcgcuuaaugucaccaugcccaacaaugacaaguuugauaaacuguacauuuggggcgugcaucacccuagcacagacucugaucagaccucccucuacgcccaggcuagcgggcggguuacgguguccacaaagcgcucucagcaaaccgucaucccgaacauuggaagcagacccugggugcggggcguguccagccgcaucucuauuuauuggacaaucgucaaaccuggggacauccugcugauuaacuccaccggaaaucucaucgcccccagaggcuacuucaagauucggagcgggaagucuagcaucaugcgcuccgacgcuccuauuggaaaauguaacucugagugcaucacccccaauggcagcaucccgaacgauaagccuuuucagaauguuaacagaauuacauauggcgccuguccccgguacgugaaacagaauacgcugaagcuggcgaccgggaugcgcaacgugccugaaaaacagacaagaggaaucuucggcgccauugcuggguuuaucgagaauggaugggaaggcauggucgacgggugguauggauuccggcaccaaaacuccgagggcaccggccaggccgcugaucuuaagagcacacaggccgccauuaaucaaaucaacgggaaacucaauagacugaucgagaagaccaacgaaaaguuucaucagauugagaaagaauuuucugagguggaaggacgcauccaggaccuugagaaguacguugaggauacgaaaauugaccugugguccuauaaugcugaacuccugguggcgcuggagaaccagcacacaaucgaucucaccgacagcgaaaugaacaagcuguucgagcggaccagaaaacaacuucgcgaaaaugccgaggauaugggcaacgggugcuuuaagauuuaccauaagugugacaaugcuugcaucggaucuauucggaacggcacauacgaucacgacgucuauagagacgaggcccugaauaaccgcuuccagaucaaagggguggaacucaaguccggccacaaagauuggauccuguggauuagcuuugccaucuccugcuuccuucuguguguugugcuccugggauuuauuaugugggcuugccagaagggcaauauccgguguaacauuugcaucuga

SEQ ID NO: 192574 - RNA, 1701 nt, Artificial Sequence; identical to SEQ ID NO: 192542
  derived and/or modified CDS sequence (opt5) from hemagglutinin__InfluenzaA__ABC02299

SEQ ID NO: 192575 - RNA, 1701 nt, Artificial Sequence; identical to SEQ ID NO: 192566
  derived and/or modified CDS sequence (opt5) from hemagglutinin__InfluenzaA__ABC02310

SEQ ID NO: 192576 - RNA, 1701 nt, Artificial Sequence; identical to SEQ ID NO: 192571
  derived and/or modified CDS sequence (opt5) from hemagglutinin__InfluenzaA__ABC02321

SEQ ID NO: 192577 - RNA, 1701 nt, Artificial Sequence; identical to SEQ ID NO: 192377
  derived and/or modified CDS sequence (opt5) from hemagglutinin__InfluenzaA__ABC02332

SEQ ID NO: 192578 - RNA, 1701 nt, Artificial Sequence
  derived and/or modified CDS sequence (opt5) from hemagglutinin__InfluenzaA__ABC39805
augaagaccaucauugcccugagcuacauccucugccugguguucgcucagaaccuucccggcaaugacaacuccacagccacgcugugucucgggcaccaugcggucccuaauggaacccugguuaaaacaauuaccaacgaucaaaucgaggugacaaaugcuaccgaacuugugcagucuagcuccgccggcagaauuugcgacucuccgcaccggauccuggaugggaagaacuguacacucaucgacgcccugcugggagauccccauugcgacggcuuucagaaugagaaaugggaucucuucgucgaacgcagcaaggcuuuuuccaacuguuauccuuacgacgugcaggauuaugccucucugagaagccuuguugcuuccagcgggacccuggaguucauuaaugaaggauuuaacuggacgggcgugacccaaucuggcggguccuacgccugcaaacggggaagcggcaauucuuucuuuucccgccucaacuggcuguauaagagcgagucuaaguaccccgcgcuuaaugucacaaugccuaacaaugggaacuucgacaaacuguauaucuggggagugcaccaucccuccaccgauaaggagcagacaaaccucuacguuagagccagcggccgggugaccgucuccacgaaacgcucucagcagacagugauuccuaauaucgggccgagacccugggugcggggacugagcucccgcauuagcaucuacuggaccauugucaagccuggcgacauccugcucaucaacucuuccggcaaucugauugcucccagaggguauuuuaaaauccggacaggaaagagcucuauuaugcgcagcgaugccccuaucggcaccuguuccucugaaugcauuacccccaacgggagcaucccgaaugacaagccuuuccaaaacguuaauaaaaucacauacggagcuugucccaaguaugugaaacagaacacgcuuaagcuggccaccggcaugagaaauauuccugagaaacagacacgggggaucuuuggagcgauugccggcuucaucgaaaacggcugggaggggaugguggacggaugguacggcuuucgccaccaaaauuccgaggggaccggacaggcugccgaucucaagagcacacaggcugccauugaccagaucaacggcaaacugaauagagucaucgaaaagaccaacgagaaguuccaccaaauugaaaaagaguucucugaaguggaggggcggauccaggaucuugagaaguauguugaagacacgaaaauugaucugugguccuacaaugccgagcuccugguggcucuggaaaaccagcauacaaucgaccucaccgauagcgagaugaacaagcuguuugagaaaaccagacgccagcuucgggaaaaugcggaggacaugggcaacggaugcuucaagauuuaucacaagugugauaaugccugcaucggcucuauuagaaacgggacauacgaccaugaugucuaccgcgacgaagcucugaauaaccgguuucaaaucaaaggaguggagcucaaguccggcuauaaagacuggauccuguggauuagcuucgccaucuccugcuuucuucuguguguugugcuccugggguucauuaugugggccugccagaagggaaauaucagauguaacauuugcaucuga

SEQ ID NO: 192579 - RNA, 1698 nt, Artificial Sequence
  derived and/or modified CDS sequence (opt5) from hemagglutinin__InfluenzaA__ABC40522
augaaggugaaacugcucauccugcuuugcaccuucacagccacguacgcugacaccauuuguaucggcuaucacgccaacaauagcacagauaccgucgacacaguucuggagaagaacgugaccgugacacauuccgucaaucuccuggaagauucucacaacgggaaacuuugccugcucaagggaauugcgccccugcagcugggcaauuguagcguggcuggguggauccucggaaacccugagugcgaacugcuuauuuccaaagagucuuggagcuacaucguugaaaccccgaaucccgagaacggcgccuguuauccuggguacuuugccgacuaugaggaacugagagagcaacucuccucugugagcuccuucgaacgguuugagaucuuccccaaggagagcucuuggccuaaucauacggucaccggaguguccgcuagcugcucucacaacggcaaguccagcuuuuacaaaaaucugcuuuggcugacaggcaagaacgggcucuaucccaaucugucuaaauccuacgccaacaauaaggaaaaagagguucugauucucuggggagugcaucacccuccgaacaucggcgaucagcgcacccuguaccacacagaaaacgcuuaugucagcgugguguccucucauuacagcagacgguucacccccgagauuacgaagcgcccuaaggucagagaccaggaagggcggaucaauuauuacuggacacuucuggagcccggagauaccauuaucuuugaggccaacggcaaucucauugcgccuugguaugccuucgcucugucccgcggguuuggaagcggcaucaucacaucuaacgcccccauggacgaaugugaugcuaaaugccagaccccgcaaggcgccauuaauuccagccuuccuuuccagaacguucaccccgugaccaucggggaguguccuaaguacgugagaucugcgaaacugcggauggucacaggacuccgcaauauucccagcauccaguccagaggccuguuuggggccauugcuggauucaucgaaggcggguggacgggaaugguggacggcugguauggcuaccaucaccagaacgagcaagggucuggauacgccgcugaucaaaagagcacccagaaugccaucaacggcauuacaaauaaaguuaacuccgugaucgaaaagaugaauacccaguuuacagccgucgggaaagaguucaacaagcuggagcggcgcauggaaaaucucaacaagaaaguggacgauggauuccuggacauuuggaccuauaacgcugagcuucugguucuccuggaaaaugagagaacgcuugacuuucacgauagcaacgugaagaaucuguacgaaaaagucaagucucagcucaaaaacaaugcgaaggagaucggcaacgggugcuucgaguuuuaucauaaguguaauaacgaaugcauggaguccgugaaaaauggcacauacgacuaucccaaguacagcgaagagucuaaacugaaccgggagaagauugauggagucaaacuggacuccaugggcguguaucagauccucgccaucuacagcaccguugcuuccucucuggugcuucuggucagccucggggccauuuccuucuggaugugcucuaauggaagccugcagugucgcaucugcauuuga

SEQ ID NO: 192580 - RNA, 1698 nt, Artificial Sequence; identical to SEQ ID NO: 192368
  derived and/or modified CDS sequence (opt5) from hemagglutinin__InfluenzaA__ABC40533

SEQ ID NO: 192581 - RNA, 1701 nt, Artificial Sequence
  derived and/or modified CDS sequence (opt5) from hemagglutinin__InfluenzaA__ABC40555
augaagaccaucauugcccugagcuacaucuucugccucguguuugcucagaaccugcccagaaaugacaaauccacagccacgcuuugucugggccaccaugcggucccuaacgggacccucguuaagacaauuaccaaugaucaaaucgaggugacaaacgcuaccgaacuggugcagucuagcuccacaggacggauuugcgacucuccgcaccgcauccuugauggcaaaaauuguacccuggucgacgcccuccugggggauccccauugcgacggauuccagaacgagaagugggaucuguuuguggaaagaagcaaagccuucuccaauuguuauccuuacgacguucccgauuaugcuucucuccggagccugguggccuccagcggcacgcuugaguuuaucaacgaaucuuucaauuggaccggggucacacaguccggaggcagcuacgcuugcaagcgcggcucugacaacuccuuuuucagcagacugaauuggcucuaugagucugaguccaaguacccugugcugaacguuaccaugcccaauaacgggaauuuugauaaacuuuauauuuggggagugcaccauccuagcacagacaaggaacaaaccaaccuguacguccgggccuccggccgcgugacggugucuacaaaaagaagccagcagaccaucauuccgaacaucgggucccggcccuggguccgcggacucagcucuagaauuuccaucuacuggacaauuguuaagccuggcgauauccugcugaucaauagcaacgggaaucucauugcgccccggggauauuucaaaauccgcaccggcaagucuagcauuaugagauccgacgccccuaucggcaccuguucuagcgagugcauuacacccaacggguccaucccgaaugacaagccuuuucagaacgugaauaaaaucacguacggagcuugucccaaguaugugaaacaaaacacccugaagcuggccacaggcaugcggaaugucccugaaaaacagacccgcgggauuuucggagcuaucgccggcuuuauugagaacgggugggagggaaugguggauggcugguacggcuucagacaccagaauagcgaagggacaggacaggcggccgaccugaagucuacccaagcugccaucgaucagauuaacggcaaacucaaucggguuaucgagaagacgaacgaaaaguuccaccagaucgagaaagaauuuuccgagguggaggggcgcauucaagaccuggaaaaguaugucgaggauacaaaaaucgaccuuuggagcuacaaugcugaacugcucguggcccuggagaaccagcauaccauugaucugaccgacucugaaaugaacaaacucuucgagaagacaagacggcagcugagagagaaugccgaagauaugggaaacggcugcuuuaagaucuaucacaagugugacaaugcuugcauuggguccauccgcaacggcaccuacgaucaugacguuuaccgggacgaggcgcuuaauaacagauuccagauuaaaggaguggaacuuaagagcggcuauaaagauuggauccucuggaucuccuuugccauuucuugcuuccugcuuugugucgugcugcucggguuuaucaugugggcuugccaaaagggaaauauucgcuguaacaucugcauuuga

SEQ ID NO: 192582 - RNA, 1701 nt, Artificial Sequence
  derived and/or modified CDS sequence (opt5) from hemagglutinin__InfluenzaA__ABC40608
augaagaccaucauugcccugagcuacauccucugccugguguucgcucagaaacuucccggcaacgacaauuccacagccacgcugugucucgggcaccaugcggucccuaacggaacccugguuaagacaauuaccaaugaucaaaucgaggugacaaacgcuaccgaacuugugcagucuagcuccacaggcagaauuugcgacucuccgcaccggauccuggauggggagaauuguacccucaucgacgcccugcugggagauccccauugcgacggcuuucagaacaaagaaugggaucucuucgucgagcgcagcaaggccuauuccaauuguuacccuuaugacgugcccgauuacgcuucucugagaagccuuguugccuccagcgggacgcuggaauuuaacaaugagucuuucaacuggaccggaguggcucagaauggcacauccagcgccugcaaacggcgcucuauuaaguccuuuuucagcagacucaacuggcugcaccaacuuaaguauaaauacccugcgcugaaugucaccaugcccaacaaugacaaguuugauaaacucuauaucuggggcgugcaucacccuucuacagacuccgaucagaccagccuguacgcccaggcuuccgggcggguuacggugucuacacgcagaagccagcaaaccgucauuccgaacaucggaucccggcccugggugcgcggcgugagcucuagaauuuccaucuacuggacaauugucaagccuggggacauccugcucaucaacagcaccggaaaucugauugcuccccggggcuauuucaaaauccgcucuggaaagagcuccauuaugagaucugacgccccuaucgggaaguguaacagcgagugcauuacccccaauggcuccaucccgaacgauaaaccuuuucagagcguuaaucggaucacauacggcgccuguccccgcuaugugaagcagaacacgcuuaaacuggcgaccgggaugagaaaugugccugaaaagcagacacggggaauuuucggcgccaucgcuggguuuauugagaacggaugggaaggcauggucgacgggugguacggauucagacaccaaaauucugagggcaccggccaggccgcugaucucaaauccacacaggccgccaucaaccaaauuaaugggaagcugaaccgccuuaucgagaaaaccaaugaaaaguuucaucagaucgagaaggaguucagcgaaguggaaggacggauucaggaccuggagaaauauguugaggauacgaagaucgaccucuggucuuacaacgcugaacugcugguggcgcucgagaaucagcacacaauugaucugaccgacuccgaaaugaacaaacuuuucgagagaacccgcaagcaacugcgggaaaacgccgaggauaugggcaaugggugcuuuaaaaucuaucauaagugugacaacgcuugcauuggaagcaucagaaauggcacauacgaucacgacgucuaccgcgacgaggcccucaacaaucgguuccagauuaaggggguggaacugaaauccggcuauaaggauuggauccuuuggaucucuuuugccauuagcugcuuccugcucuguguugugcugcugggauuuaucaugugggcuugccagaaaggcaacauuagauguaauaucugcauuuga

SEQ ID NO: 192583 - RNA, 1701 nt, Artificial Sequence
  derived and/or modified CDS sequence (opt5) from hemagglutinin__InfluenzaA__ABC40619
augaagaccaucauugcccugagcuacaucuucugccucgugcugggccaggacuuuuccgggaacgauaauucuacagcuacgcuuugucugggacaccaugccguccccaacggcacccucguuaaaacaauuaccaaugaccaaaucgaggugacaaacgcgaccgaacuggugcagagcuccucuacagggaagauuugcaauaacccucacagaauccuugauggaaucgacuguacccugauugaugcucuccugggcgacccgcauugcgauggguuccagaaugagacgugggaccuguuugucgaacggagcaaagccuucuccaacuguuaucccuacgaugugccugacuaugccucucuccgcagccugguugcuuccagcggaacccuugaguuuaucaaugaaggcuucaacuggacaggcgugacccagaaugggggaucuaacgccugcaagagaggccccgauuccggguuuuucagccggcugaauuggcucuacaaaucuggauccacauauccuguccugaacgugagcaugcccaauaacgacaacuuugauaaacuuuacauuuggggcguucaccauccuucuaccgaccaagagcagacgaaucuguaugugcaggcuuccgggcgcgucacagugagcaccaagagaucccagcaaacaaucauuccgaacaucggaucucggcccugggugcgcggccucagcuccagaauuagcaucuacuggaccaucgucaagccuggcgacauucugguuaucaauucuaacgggaaucugauugcgccccggggauacuucaagaugcgcaccggcaaauccagcaucaugagaucugaugccccuauugggacauguaucagcgagugcaucacgcccaacggauccauuccgaaugacaagccuuuucagaacgugaauaaaaucaccuauggcgccugucccaaguacgugaagcagaacacacucaaacuggcuaccgggaugcggaaugucccugaaaagcagacacgcggaauuuucggcgccaucgcuggcuuuauugagaacgggugggaaggaaugaucgauggcugguauggguucagacaccaaaauucugagggaaccggccaggccgcggaccuuaaaagcacgcaggccgcuaucgaucaaauuaacgggaagcugaaucggaucauugagaaaacaaacgaaaaguuccaccagaucgagaaagaauuuuccgagguggaaggccgcauucaggaccucgagaaguacguugaggauaccaagaucgaccuguggagcuauaacgccgaacuucugguggcucucgagaaucagcauaccauugaucugacagacucugaaaugaacaaacuguucgagaagaccagacggcaacucagagaaaaugccgaggauaugggaaacggcugcuuuaaaaucuaccacaagugugacaaugccugcaucggguccauucgcaacggaacauaugaccaugaugucuaccgggacgaggcucugaauaacagauuccagaucaaaggcguggaacuuaagagcggguacaaggauuggauucuguggaucucuuuugcgauuuccugcuuccuccuguguguugugcuucugggauuuaucaugugggccugccagaaaggcaauauccgcuguaacauuugcaucuga

SEQ ID NO: 192584 - RNA, 1698 nt, Artificial Sequence
  derived and/or modified CDS sequence (opt5) from hemagglutinin__InfluenzaA__ABC40631
augaaggugaaacugcucauccugcuuugcaccuucacagccacguacgcugacaccauuuguaucggcuaucacgccaacaauagcacagauaccgucgacacaguucuggagaagaacgugaccgugacacauuccgucaaucuccuggaagauucucacaacgggaaacuuugccugcucaagggaauugcgccccugcagcugggcaauuguagcguggcuggguggauccucggaaacccugagugcgaacugcuuauuuccaaagagucuuggagcuacaucguugaaaccccgaaucccgagaacggcacguguuauccuggguacuuugccgacuaugaggaacugagagagcaacucuccucugugagcuccuucgaacgguuugagaucuuccccaaggagagcucuuggccuaaucauaccgucacaggaguguccgccagcugcucucacaacggcaaguccagcuuuuaccgcaaucugcuuuggcugaccggcaaaaacgggcucuaucccaaucugucuaaguccuacgcuaacaauaaagaaaaggagguucugauucucuggggagugcaucacccuccgaacaucggcgaucagagaacacuguaccacaccgaaaacgccuaugucagcgugguguccucucauuacagccggcgcuucacgcccgagauuacaaaaagaccuaagguccgggaccaggaagggcgcaucaauuauuacuggacccuucuggagcccggagauacaauuaucuuugaggcuaacggcaaucucauugccccuugguaugcguucgcccuguccagaggguuuggaagcggcaucaucaccucuaacgcucccauggacgaaugugaugccaagugccagaccccgcaaggcgcuauuaauuccagccuuccuuuccagaacguucaccccgugacaaucggggaguguccuaaauacgugcggucugccaagcugcgcauggucacgggacucagaaauauucccagcauccagucccggggccuguuuggggcgauugccggauucaucgaaggcggguggaccggaaugguggacggcugguauggcuaccaucaccagaacgagcaagggucuggauacgcugccgaucagaaaagcacacagaaugcuaucaacggcauuaccaauaagguuaacuccgugaucgaaaagaugaauacacaguuuaccgccgucgggaaagaguucaacaaacuggagcgcagaauggaaaaucucaacaagaagguggacgauggauuccuggacauuuggacguauaacgccgagcuucugguucuccuggaaaaugagcggacacuugacuuucacgauagcaacgugaaaaaucuguacgaaaaggucaaaucucaacucaagaacaaugcuaaagagaucggcaacgggugcuucgaguuuuaucauaaguguaauaacgaaugcauggaguccgugaagaauggcaccuacgacuaucccaaauacagcgaagagucuaagcugaaccgcgagaaaauugauggagucaagcuggaauccaugggcguguaucagauccucgcgaucuacagcaccguugccuccucucuggugcuucuggucagccucggggcuauuuccuucuggaugugcucuaauggaagccugcaguguagaaucugcauuuga

SEQ ID NO: 192585 - RNA, 1701 nt, Artificial Sequence
  derived and/or modified CDS sequence (opt5) from hemagglutinin__InfluenzaA__ABC41692
augaagaccaucauugcccugagcuacauccucugccugguguucgcucagaaacccccuggcaacgacaauuccacagccacgcuuugucuggggcaccaugcggucccgaacggaaccauuguuaagacaaucaccaaugaucaaauugaggugacaaacgcuaccgaacucgugcagucuagcuccacaggcgggaucugcgacucuccccaccagauccuggauggagagaauuguacccuuauugacgcccugcucggcgauccucagugcgacggguuucaaaacaaaaagugggaucuguucgucgaaagaagcaaagccuauuccaauuguuaccccuaugacgugccugaucaugcuucucugcggagccucguugccuccagcggaacgcuggaguuuaacaaugaaucuuucgacuggaccggcgugacacagaacggcaccuccagcgcuugcaagcgcagaucuaauaaguccuuuuucagccggcuuaacuggcugacacaccucaaauacaaguaucccgcccugaaugucaccaugccuaacaaugagaaauuugauaaacuuuacaucuggggagugcaucacccggggacggacucugaucagauuucccuguaugcgcaggccagcggccgcaucacaguuuccaccaagagaucucaacagacagugauucccaacaucgggagccggccucgcgucagagacguguccagccggauuucuaucuacuggaccaucgugaagcccggagacauucuccugaucaacuccaccggcaaucugauugcuccucgcggguacuucaagaucagaagcggaaaaucuagcauuaugcgguccgaugcccccaucggcaaguguaacucugagugcaucacaccgaauggcagcauuccuaacgacaaacccuuucagaaugucaaccgcaucacguauggggcuuguccuagauacguuaagcagaauacccucaaacuggccacaggaaugcggaacgugcccgaaaagcaaacccgcggcauuuucggggcgaucgccggauuuauugagaauggcugggaagggaugguggauggaugguauggcuucagacaccagaacuccgagggcacagggcaggcugccgaccuuaaaagcacccaagcugccaucaaucagaucaacggaaagcugaaucggcucauuggcaagacgaacgagaaauuucaucagaucgaaaaggaguucucugaagucgaggggcgcauucaggaucuggaaaaauacguggaggacacaaagaucgaucuuugguccuauaaugccgagcugcucguugcucuggaaaaccaacacaccauugaccugaccgauagcgagaugaacaaacucuucgaaagaacaaagaagcagcugcgggagaaugcggaagacaugggaaacggcugcuuuaaaaucuaccauaagugugauaaugccugcauugggucuaucagaaacggcaccuaugaccacgacguguaccgcgaugaggcucuuaauaaccgguuccagaucaaaggagucgagcugaaguccggcuacaaagacuggauucucuggaucagcuuugccauuuccugcuuccugcuuuguguggcccugcucggguuuaucaugugggcuugccagaagggaaauauuagauguaacaucugcaucuga

SEQ ID NO: 192586 - RNA, 1698 nt, Artificial Sequence; identical to SEQ ID NO: 192371
  derived and/or modified CDS sequence (opt5) from hemagglutinin__InfluenzaA__ABC41714

SEQ ID NO: 192587 - RNA, 1701 nt, Artificial Sequence
  derived and/or modified CDS sequence (opt5) from hemagglutinin__InfluenzaA__ABC41725
augaagaccacaaucgcccugagcuacauucucugccugguguucgcucagaaacuucccggcaacgacaauuccacggccacccugugucucgggcaccaugcggucccuaacggaacaaucguuaagaccauuacaaaugaucaaaucgaggugaccaacgcuacagaacuggugcagucuagcuccaccggcgggauuugcgacucuccgcaccagauccuugauggagagaauuguacgcugaucgacgcccuccugggcgauccccagugcgacggguuucaaaacaaaaagugggaucuguucgucgaaagaagcaaagccuauuccaauuguuacccuuaugacgugcccgaucaugcuucucuccggagccugguugccuccagcggaacccuugaguuuaacaaugaaucuuucgacuggacaggcgugacccagaacggcacauccagcgcuugcaagcgcagaucuaauaaguccuuuuucagccggcugaacuggcucacccaccugaaauacaaguauccugcccuuaaugucacgaugcccaacaaugagaaauuugauaagcuguacauuuggggagugcaucacccugggacagacucugaucagaucucccucuaugcgcaggccagcggccgcauuaccguuuccacaaaaagaucucaacagaccgugaucccgaacauugggagccggccccgcgucagagacguguccagccggaucucuauuuacuggaccaucgugaagccuggagacauccugcugauuaacuccacaggcaaucucaucgcuccccgcggguacuucaagauuagaagcggaaaaucuagcaucaugcgguccgaugccccuauuggcaaguguaacucugagugcaucacgcccaauggcagcaucccgaacgacaaaccuuuucagaaugucaaccgcauuaccuauggggcuugucccagauacguuaagcagaauacacugaaacuugccaccggaaugcggaacgugccugaaaagcaaacacgcggcaucuucggggcgauugccggauuuaucgagaauggcugggaagggaugguggauggaugguauggcuucagacaccagaacuccgagggcaccgggcaggcugccgaccugaaaagcacgcaagcugccauuaaucagaucaacggaaagcucaaucggcugaucggcaagacaaacgagaaauuucaucagauugaaaaggaguucucugaagucgaggggagaauccaggaucuugaaaaauacguggaggacaccaagauugaucugugguccuauaaugccgagcuccugguugcucuggaaaaccaacacaccaucgaccucacagauagcgagaugaacaaacuguucgaacgcaccaagaagcagcuucgggagaaugcggaagacaugggaaacggcugcuuuaaaauuuaccauaagugugauaaugccugcaucgggucuauuagaaacggcacauaugaccacgacguguaccgcgaugaggcucugaauaaccgguuccagaucaaaggagucgagcucaaguccggcuacaaagacuggauccuguggauuagcuuugccaucuccugcuuccuucuguguguggcccuccugggguuuauuaugugggcuugccagaagggaaauaucagauguaacauuugcaucuga

SEQ ID NO: 192588 - RNA, 1701 nt, Artificial Sequence
  derived and/or modified CDS sequence (opt5) from hemagglutinin__InfluenzaA__ABC41736
augaagaccaucauugcccugagcuacauccucugccugguguucgcucagaaacuucccggcaacgacaauuccacagccacgcugugucucgggcaccaugcggucccuaacggaaccauuguuaagacaaucaccaaugaucaaauugaggugacaaacgcuaccgaacuggugcagucuagcuccacaggcgggaucugcgacucuccgcaccagauccuugauggagagaauuguacccugauugacgcccuccugggcgauccccagugcgacggguuucaaaacaaaaagugggaucuguucgucgaaagaagcaaagccuauuccaauuguuacccuuaugacgugcccgaucaugcuucucuccggagccugguugccuccagcggaacgcuugaguuuaacaaugaaucuuucgacuggaccggcgugacacagaacggcaccuccagcgcuugcaagcgcagaucuaauaaguccuuuuucagccggcugaacuggcucacacaccugaaauacaaguauccugcccuuaaugucaccaugcccaacaaugagaaauuugauaagcuguacaucuggggagugcaucacccugggacggacucugaucagauuucccucuaugcgcaggccagcggccgcaucacaguuuccaccaaaagaucucaacagacagugauuccgaacaucgggagccggccccgcgucagagacguguccagccggauuucuaucuacuggaccaucgugaagccuggagacauucugcugaucaacuccaccggcaaucucauugcuccccgcggguacuucaagaucagaagcggaaaaucuagcauuaugcgguccgaugccccuaucggcaaguguaacucugagugcaucacacccaauggcagcauuccgaacgacaaaccuuuucagaaugucaaccgcaucacguauggggcuugucccagauacguuaagcagaauacccugaaacuugccacaggaaugcggaacgugccugaaaagcaaacccgcggcauuuucggggcgaucgccggauuuauugagaauggcugggaagggaugguggauggaugguauggcuucagacaccagaacuccgagggcacagggcaggcugccgaccugaaaagcacccaagcugccaucaaucagaucaacggaaagcucaaucggcugauuggcaagacgaacgagaaauuucaucagaucgaaaaggaguucucugaagucgaggggcgcauucaggaucuugaaaaauacguggaggacacaaagaucgaucugugguccuauaaugccgagcuccugguugcucuggaaaaccaacacaccauugaccucaccgauagcgagaugaacaaacuguucgaaagaacaaagaagcagcuucgggagaaugcggaagacaugggaaacggcugcuuuaaaaucuaccauaagugugauaaugccugcauugggucuaucagaaacggcaccuaugaccacgacguguaccgcgaugaggcucugaauaaccgguuccagaucaaaggagucgagcucaaguccggcuacaaagacuggauucuguggaucagcuuugccauuuccugcuuccuucuguguguggcccuccugggguuuaucaugugggcuugccagaagggaaauauuagauguaacaucugcaucuga

SEQ ID NO: 192589 - RNA, 1701 nt, Artificial Sequence; identical to SEQ ID NO: 192588
  derived and/or modified CDS sequence (opt5) from hemagglutinin__InfluenzaA__ABC41952

SEQ ID NO: 192590 - RNA, 1701 nt, Artificial Sequence; identical to SEQ ID NO: 192588
  derived and/or modified CDS sequence (opt5) from hemagglutinin__InfluenzaA__ABC41953

SEQ ID NO: 192591 - RNA, 1701 nt, Artificial Sequence; identical to SEQ ID NO: 192588
  derived and/or modified CDS sequence (opt5) from hemagglutinin__InfluenzaA__ABC41964

SEQ ID NO: 192592 - RNA, 1701 nt, Artificial Sequence; identical to SEQ ID NO: 192588
  derived and/or modified CDS sequence (opt5) from hemagglutinin__InfluenzaA__ABC42014

SEQ ID NO: 192593 - RNA, 1701 nt, Artificial Sequence; identical to SEQ ID NO: 192588
  derived and/or modified CDS sequence (opt5) from hemagglutinin__InfluenzaA__ABC42114

SEQ ID NO: 192594 - RNA, 1701 nt, Artificial Sequence; identical to SEQ ID NO: 192588
  derived and/or modified CDS sequence (opt5) from hemagglutinin__InfluenzaA__ABC42125

SEQ ID NO: 192595 - RNA, 1701 nt, Artificial Sequence; identical to SEQ ID NO: 192588
  derived and/or modified CDS sequence (opt5) from hemagglutinin__InfluenzaA__ABC42136

SEQ ID NO: 192596 - RNA, 1701 nt, Artificial Sequence
  derived and/or modified CDS sequence (opt5) from hemagglutinin__InfluenzaA__ABC42147
augaagaccaucauugcccugagcuacauccucugccugguguucgcucagaaacuucccggcaacgacaauuccacagccacgcugugucucgggcaccaugcggucccuaacggaaccauuguuaagacaaucaccaaugaucaaauugaggugacaaacgcuaccgaacuggugcagucuagcuccacaggcgggaucugcgacucuccgcaccagauccuugauggagagaauuguacccugauugacgcccuccugggcgauccccagugcgacggguuucaaaacaaaaagugggaucuguucgucgaaagaagcaaagccuauuccaauuguuacccuuaugacgugcccgaucaugcuucucuccggagccugguugccuccagcggaacgcuugaguuuaacaaugaaucuuucgacuggaccggcgugacacagaacggcaccuccagcgcuugcaagcgcagaucuaauaaguccuuuuucagccggcugaacuggcucacacaccugaaauacaaguauccugcccuuaaugucaccaugcccaacaaugagaaauuugauaagcuguacaucuggggagugcaucacccugggacggacucugaucagauuucccucuaugcgcaggccagcggccgcaucacaguuuccaccaaaagaucucaacagacagugauuccgaacaucgggagccggccccgcgucagagacguguccagccggauuucuaucuacuggaccaucgugaagccuggagacauucugcugaucaacuccaccggcaaucucauugcuccccgcggguacuucaagaucagaagcggaaaaucuagcauuaugcgguccgaugucccuaucggcaaguguaacucugagugcaucacacccaauggcagcauuccgaacgacaaaccuuuucagaauguuaaccgcaucacguauggggccugucccagauacgugaagcagaauacccugaaacuugcuacaggaaugcggaacgugccugaaaagcaaacccgcggcauuuucggggccaucgcgggauuuauugagaauggcugggaagggauggucgauggaugguauggcuucagacaccagaacuccgagggcacagggcaggccgcugaccugaaaagcacccaagccgcuaucaaucagaucaacggaaagcucaaucggcugauuggcaagacgaacgagaaauuucaucagaucgaaaaggaguucucugaaguggaggggcgcauucaggaucuugaaaaauacguugaggacacaaagaucgaucugugguccuauaaugccgagcuccugguggcccuggaaaaccaacacaccauugaccucaccgauagcgagaugaacaaacuguucgaaagaacaaagaagcagcuucgggagaaugcugaagacaugggaaacggcugcuuuaaaaucuaccauaagugugauaaugcgugcauugggucuaucagaaacggcaccuaugaccacgacgucuaccgcgaugaggcccugaauaaccgguuccagaucaaaggaguggagcucaaguccggcuacaaagacuggauucuguggaucagcuuugcuauuuccugcuuccuucuguguguugcccuccugggguuuaucaugugggccugccagaagggaaauauuagauguaacaucugcaucuga

SEQ ID NO: 192597 - RNA, 1701 nt, Artificial Sequence; identical to SEQ ID NO: 192588
  derived and/or modified CDS sequence (opt5) from hemagglutinin__InfluenzaA__ABC42158

SEQ ID NO: 192598 - RNA, 1701 nt, Artificial Sequence; identical to SEQ ID NO: 192588
  derived and/or modified CDS sequence (opt5) from hemagglutinin__InfluenzaA__ABC42169

SEQ ID NO: 192599 - RNA, 1701 nt, Artificial Sequence; identical to SEQ ID NO: 192588
  derived and/or modified CDS sequence (opt5) from hemagglutinin__InfluenzaA__ABC42180

SEQ ID NO: 192600 - RNA, 1701 nt, Artificial Sequence; identical to SEQ ID NO: 192588
  derived and/or modified CDS sequence (opt5) from hemagglutinin__InfluenzaA__ABC42192

SEQ ID NO: 192601 - RNA, 1701 nt, Artificial Sequence; identical to SEQ ID NO: 192588
  derived and/or modified CDS sequence (opt5) from hemagglutinin__InfluenzaA__ABC42307

SEQ ID NO: 192602 - RNA, 1701 nt, Artificial Sequence
  derived and/or modified CDS sequence (opt5) from hemagglutinin__InfluenzaA__ABC42318
augaagaccaucauugcccugagcuacauccucugccugguguucgcucagaaacuucccggcaacgacaauuccacagccacgcugugucucgggcaccaugcggucccuaacggaaccauuguuaagacaaucaccaaugaucaaauugaggugacaaacgcuaccgaacuggugcagucuagcuccacaggcgggaucugcgacucuccgcaccagauccuugauggagagaauuguacccugauugacgcccuccugggcgauccccagugcgacggguuucaaaacaaaaagugggaucuguucgucgaaagaagcaaagccuauuccaauuguuacccuuaugacgugcccgaucaugcuucucuccggagccugguugccuccagcggaacgcuugaguuuaacaaugaaucuuucgacuggaccggcgugacacagaacggcaccuccagcgcuugcaagcgcagaucuaauaaguccuuuuucagccggcugaacuggcucacacaccugaaauacaaguauccugcccuuaaugucaccaugcccaacaaugagaaauuugauaagcuguacaucuggggagugcaucacccugggacggacucugaucagauuucccucuaugcgcaggccagcggccgcaucacaguuuccaccaaaagaucucaacagacagugauuccgaacaucgggagccggccccgcgucagagacguguccagccggauuucuaucuacuggaccaucgugaagccuggagacauucugcugaucaacuccaccggcaaucucauugcuccccgcggguacuucaagaucagaagcggaaaaucuagcauuaugcgguccgaugccccuaucggcaaguguaacucugagugcaucacacccaauggcagcauuccgaacgacaaaccuuuucagaaugucaaccgcaucacguauggggcuugucccagauacguuaagcagaauacccugaaacuugccacaggaaugcggaacgugccugaaaagcaaacccgcggcauuuucggggcgaucgccggauuuauugagaauggcugggaagggaugguggauggaugguauggcuucagacaccagaacuccgagggcacagggcaggcugccgaccugaaaagcacccaagcugccaucaaucagaucaacggaaagcucaaucggcugauuggcaagacgaacgagaaauuucaucagaucgaaaaggaguucucugaagucgaggggcgcauucaggaucuugaaaaauacguggaggacacaaagaucgaucugugguccuauaaugccgaguuccucguugcucuggaaaaccaacacaccauugaccugaccgauagcgagaugaacaaacucuuugaaagaacaaagaagcagcugcgggagaaugcggaagacaugggaaacggcugcuucaaaaucuaccauaagugugauaaugccugcauugggucuaucagaaacggcaccuaugaccacgacguguaccgcgaugaggcucuuaauaaccgguuucagaucaaaggagucgagcugaaguccggcuacaaagacuggauucucuggaucagcuucgccauuuccugcuuucugcuuuguguggcccugcucggguucaucaugugggcuugccagaagggaaauauuagauguaacaucugcaucuga

SEQ ID NO: 192603 - RNA, 1701 nt, Artificial Sequence; identical to SEQ ID NO: 192588
  derived and/or modified CDS sequence (opt5) from hemagglutinin__InfluenzaA__ABC42346

SEQ ID NO: 192604 - RNA, 1701 nt, Artificial Sequence; identical to SEQ ID NO: 192588
  derived and/or modified CDS sequence (opt5) from hemagglutinin__InfluenzaA__ABC42461

SEQ ID NO: 192605 - RNA, 1701 nt, Artificial Sequence; identical to SEQ ID NO: 192588
  derived and/or modified CDS sequence (opt5) from hemagglutinin__InfluenzaA__ABC42494

SEQ ID NO: 192606 - RNA, 1701 nt, Artificial Sequence; identical to SEQ ID NO: 192588
  derived and/or modified CDS sequence (opt5) from hemagglutinin__InfluenzaA__ABC42505

SEQ ID NO: 192607 - RNA, 1701 nt, Artificial Sequence
  derived and/or modified CDS sequence (opt5) from hemagglutinin__InfluenzaA__ABC42516
augaagaccaucauugcccugagcuacauccucugccugguguucgcucagaaacuucccggcaacgacaauuccacagccacgcugugucucgggcaccaugcggucccuaacggaaccauuguuaagacaaucaccaaugaucaaauugaggugacaaacgcuaccgaacuggugcagucuagcuccacaggcgggaucugcgacucuccgcaccagauccuugauggagagaauuguacccugauugacgcccuccugggcgauccccagugcgacggguuucaaaacaaaaagugggaucuguucgucgaaagaagcaaagccuauuccaauuguuacccuuaugacgugcccgaucaugcuucucuccggagccugguugccuccagcggaacgcuugaguuuaacaaugaaucuuucgacuggaccggcgugacacagaacggcaccuccagcgcuugcaagcgcagaucuaauaaguccuuuuucagccggcugaacuggcucacacaccugaaauacaaguauccugcccuuaaugucaccaugcccaacaaugagaaauuugauaagcuguacaucuggggagugcaucacccugggacggacucugaucagauuucccucuaugcgcaggccagcggccgcaucacaguuuccaccaaaagaucucaacagacagugauuccgaacaucgggagccggccccgcgucagagacguguccagccggauuucuaucuacuggaccaucgugaagccuggagacauucugcugaucaacuccaccggcaaucucauugcuccccgcggguacuucaagaucagaagcggaaaaucuagcauuaugcgguccgaugccccuaucggcaaguguaacucugagugcaucacacccaauggcagcauuccgaacgacaaaccuuuucagaaugucaaccgcaucacguauggggcuugucccagauacguuaagcagaauacccugaaacuugccacaggaaugcggaacgugccugaaaagcaaacccgcggcauuuucggggcgaucgccggauuuauugagaauggcugggaagggaugguggauggaugguauggcuucagacaccagaacuccgagggcacagggcaggcugccgaccugaaaagcacccaagcugccaucaaucagaucaacggaaagcucaauaagcugauuggcaaaacgaacgagaaguuucaucagaucgaaaaagaguucucugaagucgaggggcggauucaggaucuugaaaaguacguggaggacacaaaaaucgaucugugguccuauaaugccgagcuccugguugcucuggaaaaccaacacaccauugaccucaccgauagcgagaugaacaagcuguucgaaagaacaaagaaacagcuucgcgagaaugcggaagacaugggaaacggcugcuuuaagaucuaccauaaaugugauaaugccugcauugggucuauccggaacggcaccuaugaccacgacguguacagagaugaggcucugaauaaccgcuuccagaucaagggagucgagcucaaauccggcuacaaggacuggauucuguggaucagcuuugccauuuccugcuuccuucuguguguggcccuccugggguuuaucaugugggcuugccagaagggaaauauucgguguaacaucugcaucuga

SEQ ID NO: 192608 - RNA, 1701 nt, Artificial Sequence; identical to SEQ ID NO: 192588
  derived and/or modified CDS sequence (opt5) from hemagglutinin__InfluenzaA__ABC42527

SEQ ID NO: 192609 - RNA, 1701 nt, Artificial Sequence; identical to SEQ ID NO: 192588
  derived and/or modified CDS sequence (opt5) from hemagglutinin__InfluenzaA__ABC42574

SEQ ID NO: 192610 - RNA, 1701 nt, Artificial Sequence; identical to SEQ ID NO: 192588
  derived and/or modified CDS sequence (opt5) from hemagglutinin__InfluenzaA__ABC42585

SEQ ID NO: 192611 - RNA, 1701 nt, Artificial Sequence; identical to SEQ ID NO: 192315
  derived and/or modified CDS sequence (opt5) from hemagglutinin__InfluenzaA__ABC42596

SEQ ID NO: 192612 - RNA, 1701 nt, Artificial Sequence; identical to SEQ ID NO: 192354
  derived and/or modified CDS sequence (opt5) from hemagglutinin__InfluenzaA__ABC42607

SEQ ID NO: 192613 - RNA, 1701 nt, Artificial Sequence; identical to SEQ ID NO: 192354
  derived and/or modified CDS sequence (opt5) from hemagglutinin__InfluenzaA__ABC42618

SEQ ID NO: 192614 - RNA, 1701 nt, Artificial Sequence
  derived and/or modified CDS sequence (opt5) from hemagglutinin__InfluenzaA__ABC42629
augaagaccaucauugcccugagcuacauccucugccugguguucgcucagaaacuucccggcaacgacaauuccacagccacgcugugucucgggcaccaugcggucccuaacggaaccauuguuaagacaaucaccaaugaucaaauugaggugacaaacgcuaccgaacuggugcagucuagcuccacaggcgggaucugcgacucuccgcaccagauccuugauggagagaauuguacccugauugacgcccuccugggcgauccccagugcgacggguuucaaaacaaaaagugggaucuguucgucgaaagaagcaaagccuauuccaauuguuacccuuaugacgugcccgaucaugcuucucuccggagccugguugccuccagcggaacgcuugaguuuaacaaugaaucuuucaacuggaccggcgugacacagaauggcaccuccagcgcuugcaagcgcagaucuaacaauuccuuuuucagccggcugaacuggcucacacaccugaaguuuaaauacccugcccuuaaugucaccaugcccaacaacgagaaguucgacaaacuguauaucuggggagugcaucacccugggacggauaaugaccagauuucucucuacgcgcaggccuccggccgcaucacaguuagcaccaagagaucccaacagacagugauuccgaacaucgggucucggccccgcgucagagauauuccuagccggaucuccaucuauuggaccauugugaaacccggagacauccugcugauuaauagcaccggcaaccucaucgcuccucgcggguacuuuaagauuagaucuggaaaguccagcaucaugcggucugacgcccccaucggcaaauguaauagcgagugcauuacaccgaacggcuccaucccuaaugauaagcccuuccagaacgugaaucgcauuacguacggggcuuguccuagauaugucaaacagaacacccugaaacuugccacaggaaugcggaauguucccgaaaaacaaacccgcggcaucuuuggggcgauugccggauucaucgagaacggcugggaagggaugguggacggaugguacggcuuuagacaccagaauagcgagggcacagggcaggcugccgaucugaagucuacccaagcugccaucaaccagauuaauggaaaacucaaccggcugaucggcaagacgaacgagaaguuccaucagauugaaaaagaguucuccgaaguggaggggagaauccaggaccuugaaaaguaugucgaggauacaaaaauugaccuguggagcuacaaugccgagcuccugguggcucuggaaaaccaacacaccaucgaucucaccgacucugagaugaauaagcuguuugaacgcacaaagaagcagcuucgggagaacgcggaagauaugggaaauggcugcuucaagauuuaucauaaaugugacaacgccugcaucggguccaucagaaauggcaccuacgaucacgacguuuaucgcgacgaggcucugaacaaucgguuucagauuaagggaguggagcucaaaagcggcuacaaggauuggauccuguggauuucuuucgccaucuccugcuuucuucugugugucgcccuccugggguucauuaugugggcuugccagaaaggaaacaucagauguaauaucugcauuuga

SEQ ID NO: 192615 - RNA, 1701 nt, Artificial Sequence
  derived and/or modified CDS sequence (opt5) from hemagglutinin__InfluenzaA__ABC42640
augaagaccaucauugcccugagcuacauccucugccugguguucgcucagaaaauucccggcaacgacaauuccacagccacgcuuugucuggggcaccaugcggucccuaacggaaccaucguuaagacaauuaccaaugaucaaaucgaggugacaaacgcuaccgaacucgugcagucuagcuccacaggcgggaucugcgacucuccgcaccagauucuggauggagagaauuguacccuuaucgacgcccugcucggcgauccccagugcgacggguuucaaaacaaaaagugggaucuguucgucgaaagaagcaaagccuauuccaauuguuacccuuaugacgugcccgauuacgcuucucugcggagccucguugccuccagcggaacgcuggaguuuaacaaugaaucuuucaacuggaccggcgugacacagaauggcaccuccagcgcuugcaagcgcagaucuaacaauuccuuuuucagccggcuuaacuggcugacacaucucaaguuuaaauauccugcccugaaugucaccaugcccaacaacgagaaguucgacaaacuuuacauuuggggagugcaccauccugggacggauaaugaccagaucucucuguaugcgcaggccuccggccgcauuacaguuagcaccaagagaucccaacagacagugaucccgaacauugggucucggccccgcgucagagauaucccuagccggaucuccauuuacuggaccaucgugaaacccggagacauucuccugaucaauagcaccggcaaccugauugcuccucgcggguacuuuaagaucagaucuggaaaguccagcaucaugcggucugacgcccccauuggcaaauguaauagcgagugcaucacaccgaacggcuccauuccuaaugauaagcccuuccagaacgugaaucgcaucacguauggggcuuguccuagauacgucaaacagaacacccucaagcuggccacaggaaugcggaauguucccgaaaaacaaacccgcggcauuuuuggggcgaucgccggauucaucgagaacggcugggaagggaugguggacggaugguauggcuuuagacaccaaaauucugagggcauugggcaggcugccgaucuuaagagcacacaggcugccaucaaccagauuaauggaaaacugaaccggcucaucggcaagaccaacgagaaguuccaccagauugaaaaagaguucuccgaaguggaggggagaauccaggaccuggaaaaguacgucgaggauacgaaaauugaccuuuggagcuauaaugccgagcugcucguggcucuggaaaaccaacauacaaucgaucugaccgacucugagaugaauaagcucuuugaacgcaccaaaaagcagcugcgggagaacgcggaagauaugggaaauggcugcuucaagaucuaccacaaaugugacaacgccugcauuggguccaucagaaauggcacauaugaucaugacguuuaccgcgacgaggcucuuaacaaucgguuucagauuaagggaguggagcugaaaagcggcuacaaggauuggauccucuggauuucuuucgccaucuccugcuuucugcuuugugucgcccugcucggguucaucaugugggcuugccagaaaggaaacauuagauguaauaucugcauuuga

SEQ ID NO: 192616 - RNA, 1701 nt, Artificial Sequence; identical to SEQ ID NO: 192315
  derived and/or modified CDS sequence (opt5) from hemagglutinin__InfluenzaA__ABC42651

SEQ ID NO: 192617 - RNA, 1701 nt, Artificial Sequence
  derived and/or modified CDS sequence (opt5) from hemagglutinin__InfluenzaA__ABC42662
augaagaccaucauugcccugagcuacauccucugccugguguucgcucagaaacuucccggcaacgacaauuccacagccacgcugugucucgggcaccaugcggucccuaacggaaccauuguuaagacaaucaccaaugaucaaauugaggugacaaacgcuaccgaacuggugcagucuagcuccacaggcgggaucugcgacucuccgcaccagauccuugauggagagaauuguacccugauugacgcccuccugggcgauccccagugcgacggguuucaaaacaaaaagugggaucuguucgucgaaagaagcaaagccuauuccaauuguuacccuuaugacgugcccgauuacgcuucucuccggagccugguugccuccagcggaacgcuugaguuuaacaaugaaucuuucaacuggaccggcgugacacagaauggcaccuccagcgcuugcaagcgcagaucuaacaauuccuuuuucagccggcugaacuggcucacacaucugaaguuuaaauauccugcccuuaaugucaccaugcccaacaacgagaaguucgacaaacuguacaucuggggagugcaccauccugggacggauaaugaccagauuucucucuaugcgcaggccuccggccgcaucacaguuagcaccaagagaucccaacagacagugauuccgaacaucgggucucggccccgcgucagagauauuccuagccggaucuccaucuacuggaccauugugaaacccggagacauccugcugauuaauagcaccggcaaccucaucgcuccucgcggguacuuuaagauuagaucuggaaaguccagcaucaugcggucugacgcccccaucggcaaauguaauagcgagugcauuacaccgaacggcuccaucccuaaugauaagcccuuccagaacgugaaucgcauuacguauggggcuuguccuagauacgucaaacagaacacccugaagcuggccacaggaaugcggaauguucccgaaaaacaaacccgcggcaucuuuggggcgauugccggauucaucgagaacggcugggaagggaugguggacggaugguauggcuuuagacaccaaaauucugagggcaucgggcaggcugccgaucuuaagagcacacaggcugccauuaaccagaucaauggaaaacucaaccggcugauuggcaagaccaacgagaaguuccaccagaucgaaaaagaguucuccgaaguggaggggcgcauucaggaccuugaaaaguacgucgaggauacgaaaaucgaccuguggagcuauaaugccgaguuucucguggcucuggaaaaccaacauacaauugaucugaccgacucugagaugaauaaacucuucgaaagaaccaagaagcagcugcgggagaacgcggaagauaugggaaauggcugcuuuaagaucuaccacaaaugugacaacgccugcaucggguccauuagaaauggcacauaugaucaugacguuuaccgcgacgaggcucuuaacaaucgguuccagaucaagggaguggagcugaaaagcggcuacaaggauuggauucucuggaucucuuuugccauuuccugcuuccugcuuugugucgcccugcucggguuuaucaugugggcuugccagaaaggaaacaucagauguaauauuugcaucuga

SEQ ID NO: 192618 - RNA, 1701 nt, Artificial Sequence
  derived and/or modified CDS sequence (opt5) from hemagglutinin__InfluenzaA__ABC42673
augaagaccaucauugcccugagcuacauccucugccugauuuucgcucagaaacuucccggcaacgacaauuccacagccacgcugugucucgggcaccaugcggugccuaacggaaccaucgucaagacaauuaccaaugaucaaaucgagguuacaaacgcuaccgaacuggugcagucuagcuccacaggcgggaucugcgacucuccgcaccagauucuugauggagagaauuguacccugaucgacgcccuccugggcgauccccagugcgacggguuucaaaacaaaaagugggaucuguucguggaaagaagcaaagccuauuccaauuguuacccuuaugacguccccgauuacgcuucucuccggagccugguggccuccagcggaacgcuugaguuuaacaaugaaucuuucaacuggaccggcguuacacagaauggcaccuccagcgcuugcaagcgcagaucuaacaauuccuuuuucagccggcugaacuggcucacacaucugaaguuuaaauauccugcccuuaaugugaccaugcccaacaacgagaaguucgacaaacuguacauuuggggaguccaccauccugggacggauaaugaccagaucucucucuaugcgcaggccuccggccgcauuacagugagcaccaagagaucccaacagacaguuaucccgaacauugggucucggccccgcgugagagauaucccuagccggaucuccauuuacuggaccaucgucaaacccggagacauucugcugaucaauagcaccggcaaccucauugcuccucgcggguacuuuaagaucagaucuggaaaguccagcaucaugcggucugacgcccccauuggcaaauguaauagcgagugcaucacaccgaacggcuccauuccuaaugauaagcccuuccagaacgugaaucgcaucacguauggggcuuguccuagauacgugaaacagaacacccugaagcuggccacaggaaugcggaauguccccgaaaaacaaacccgcggcauuuuuggggcgaucgccggauucaucgagaacggcugggaagggaugguugacggaugguauggcuuuagacaccaaaauucugagggcauugggcaggcugccgaucuuaagagcacacaggcugccaucaaccagauuaauggaaaacucaaccggcugaucggcaagaccaacgagaaguuccaccagauugaaaaagaguucuccgaaguggaggggagaauccaggaccuugaaaaguacguggaggauacgaaaauugaccuguggagcuauaaugccgagcuccuggucgcucuggaaaaccaacauacaaucgaucucaccgacucugagaugaauaagcuguuugaacgcaccaaaaagcagcuucgggagaacgcggaagauaugggaaauggcugcuucaagaucuaccacaaaugugacaacgccugcauuggguccaucagaaauggcacauaugaucaugacguguaccgcgacgaggcucugaacaaucgguuucagauuaagggaguugagcucaaaagcggcuacaaggauuggauccuguggauuucuuucgccaucuccugcuuucuucuguguguggcccuccugggguucaucaugugggcuugccagaaaggaaacauuagauguaauaucugcauuuga

SEQ ID NO: 192619 - RNA, 1701 nt, Artificial Sequence; identical to SEQ ID NO: 192315
  derived and/or modified CDS sequence (opt5) from hemagglutinin__InfluenzaA__ABC42684

SEQ ID NO: 192620 - RNA, 1701 nt, Artificial Sequence; identical to SEQ ID NO: 192315
  derived and/or modified CDS sequence (opt5) from hemagglutinin__InfluenzaA__ABC42695

SEQ ID NO: 192621 - RNA, 1701 nt, Artificial Sequence
  derived and/or modified CDS sequence (opt5) from hemagglutinin__InfluenzaA__ABC42706
augaagaccaucauugcccugagcuacauccucugccugguguucgcucagaaacuucccggcaacgacaauuccacagccacgcugugucucgggcaccaugcggucccuaacggaaccacaguuaagaccauuacaaaugaucaaaucgaggugaccaacgcuacagaacuggugcagucuagcuccaccggcgggauuugcgacucuccgcaccagauccuugauggagagaauuguacgcugaucgacgcccuccugggcgauccccagugcgacggguuucaaaacaaaaagugggaucuguucgucgaaagaagcaaagccuauuccaauuguuacccuuaugacgugcccgauuacgcuucucuccggagccugguugccuccagcggaacccuugaguuuaacaaugaaucuuucaacuggacaggcgugacccagaauggcacauccagcgcuugcaagcgcagaucuaacaauuccuuuuucagccggcugaacuggcucacccaucugaaguuuaaauauccugcccuuaaugucacgaugcccaacaacgagaaguucgacaaacuguacauuuggggagugcaccauccugggacagauaaugaccagaucucucucuaugcgcaggccuccggccgcauuaccguuagcacaaagagaucccaacagaccgugaucccgaacauugggucucggccccgcgucagagauaucccuagccggauuuccaucuacuggaccaucgugaaacccggagacauucugcugaucaauagcacaggcaaccucauugcuccucgcggguacuuuaagaucagaucuggaaaguccagcauuaugcggucugacgcccccaucggcaaauguaauagcgagugcaucacgccgaacggcuccauuccuaaugauaagcccuuccagaacgugaaucgcaucaccuauggggcuuguccuagauacgucaaacagaacacacugaaacuugccaccggaaugcggaauguucccgaaaaacaaacacgcggcauuuuuggggcgaucgccggauucauugagaacggcugggaagggaugguggacggaugguauggcuuuagacaccagaauagcgagggcaucgggcaggcugccgaucugaagucuacccaagcugccaucaaccagauuaauggaaaacucaaccggcugaucggcaagacgaacgagaaguuccaccagauugaaaaagaguucuccgaaguggaggggagaauccaggaccuugaaaaguacgucgaggauacaaaaauugaccuguggagcuauaaugccgagcuccugguggcucuggaaaaccaacauaccaucgaucucaccgacucugagaugaauaagcuguuugaacgcacaaagaagcagcuucgggagaacgcggaagauaugggaaauggcugcuucaagauuuaccacaaaugugacaacgccugcaucggguccaucagaaauggcaccuaugaucaugacguuuaccgcgacgaggcucugaacaaucgguuucagauuaagggaguggagcucaaaagcggcuacaaggauuggauccuguggauuucuuucgccaucuccugcuuucuucugugugucgugcuccugggguucauuaugugggccugccagaaaggaaacaucagauguaauaucugcauuuga

SEQ ID NO: 192622 - RNA, 1701 nt, Artificial Sequence; identical to SEQ ID NO: 192315
  derived and/or modified CDS sequence (opt5) from hemagglutinin__InfluenzaA__ABC42717

SEQ ID NO: 192623 - RNA, 1701 nt, Artificial Sequence
  derived and/or modified CDS sequence (opt5) from hemagglutinin__InfluenzaA__ABC42728
augaagaccaucauugcccugagcuacauccucugccugguguucgcucagaaacuucccggcaacgacaauuccacagccacgcugugucucgggcaccaugcggucccuaacggaaccguugugaagacaauuaccaaugaucaaaucgaggugacaaacgcuaccgaacugguccagucuagcuccacaggcgggauuugcgacucuccgcaccagauccuugauggagagaauuguacccugauggacgcccuccugggcgauccccagugcgacggguuucaaaacaaaaagugggaucuguucguggaaagaagccgggccuauuccaauuguuacccuuaugacguucccgauuacgcuucucuccgcagccugguggccuccagcggaacgcuugaguuuaacaaugaaucuuucaacuggaccggcgucacacagaauggcaccuccagcgcuugcaaaagacggucuaacaauuccuuuuucagccgccugaacuggcucacacaucugaaguuuaaguauccugcccuuaaugugaccaugcccaacaacgagaaauucgacaagcuguacaucuggggaguucaccauccugggacggauaaugaccagauuucucucuaugcgcaggccuccggcagaaucacagugagcaccaaacggucccaacagacagucauuccgaacaucgggucucgccccagagugcgggauauuccuagccgcaucuccauuuacuggaccaucgugaagcccggagacauccugcugauuaauagcaccggcaaccucaucgcuccuagaggguacuuuaaaauucggucuggaaaguccagcaucaugcgcucugacgcccccauuggcaaguguaauagcgagugcaucacaccgaacggcuccaucccuaaugauaaacccuuccagaacgucaauagaauuacguauggggcuuguccucgguacguuaagcagaacacccugaaacuugccacaggaaugcgcaaugugcccgaaaagcaaaccagaggcaucuuuggggcgauugccggauucaucgagaacggcugggaagggaugguggacggaugguauggcuuucggcaccaaaauucugagggcacagggcaggcugccgaucugaaaagcacccaggcugccauuaaccagaucaauggaaagcucaacagacugaucggcaaaacgaacgagaaguuccaccagauugaaaaggaguucuccgaagucgaggggcgcauccaggaccuugaaaaauacguggaggauacaaagauugaccuguggagcuauaaugccgagcuccugguugcucuggaaaaccaacauaccaucgaucucaccgacucugagaugaauaaacuguuugaacggacaaagaaacagcuuagagagaacgcggaagauaugggaaauggcugcuucaagauuuaccacaagugugacaacgccugcaucggguccauucgcaauggcaccuaugaucaugacguguaccgggacgaggcucugaacaauagauuucagaucaaaggagucgagcucaagagcggcuacaaagauuggauccuguggauuucuuucgccaucuccugcuuucuucugugugugguucuccugggguucauuaugugggccugccagaagggaaacauccgcuguaauauuugcaucuga

SEQ ID NO: 192624 - RNA, 1701 nt, Artificial Sequence; identical to SEQ ID NO: 192315
  derived and/or modified CDS sequence (opt5) from hemagglutinin__InfluenzaA__ABC42739

SEQ ID NO: 192625 - RNA, 1698 nt, Artificial Sequence
  derived and/or modified CDS sequence (opt5) from hemagglutinin__InfluenzaA__ABC42750
augaaggugaaacugcucguccugcuuugcaccuucacagccacguacgcugacaccaucuguauuggcuaucacgccaacaauagcacagauaccguugacacagugcuggagaagaacgugaccgucacacauuccgugaaucuccuggaagauucucacaacgggaaacuuugccugcucaagggaaucgcgccccugcagcugggcaauuguagcguugcuggguggauucucggaaacccugagugcgaacugcuuaucuccaaagagucuuggagcuacauuguggaaaagccgaaucccgagaacggcaccuguuauccugggcauuuugccgacuacgaggaacugagagagcaacucuccucugucagcuccuucgaacgguuugagaucuuccccaaggagagcucuuggccuaaucacacggugaccggaguuuccgccagcugcucucauaacggcaaauccagcuuuuauaagaaucugcuuuggcugacaggcaaaaacgggcucuaccccaaucugucuaaguccuaugcuaacaauaaagaaaaggaggugcugguccucuggggagugcaccacccuccgaacaucggcgaucagaaggcccuguaccauaccgaaaacgcuuacgugagcgucguuuccucucacuauagccgcaaauucacacccgagauugccaagagaccuaaagugcgggaccaggaagggcgcaucaauuacuauuggacccuucuggagcccggagauacgauuaucuuugaggcgaacggcaaucucauugccccuagauacgcuuucgcccugucccggggguuuggaagcggcaucauuaacucuaaugcucccauggacgaaugugaugccaagugccagacaccgcaaggcgcgaucaacuccagccuuccuuuccagaaugugcaucccgucaccaucggggaguguccuaaauaugugcgcucugccaagcugagaaugguuacaggacuccggaacauucccagcauccagucccgcggccuguuuggggcuauugccggauucaucgaaggcggguggaccggaaugguggacggcugguacggcuaucaccaccagaaugagcaagggucuggauacgcugccgaucagaaaagcacccagaacgccauuaauggcaucacaaacaaggucaauuccgugaucgaaaagaugaacacgcaguuuaccgcuguugggaaagaguucaauaagcuggagagacggauggaaaaccucaacaaaaagguggacgauggauucauugacaucuggacauacaaugcggagcugcuuguccugcucgaaaacgagcgcacccuggacuuucaugauagcaaugugaaaaaccuuuaugaaaaggucaagucucaacugaaaaauaacgccaaggagauuggcaaugggugcuucgaguuuuaccacaaauguaacgacgaaugcauggaguccgugaagaauggcacauaugauuaccccaaauauagcgaagagucuaagcucaacagagagaagaucgacggaguuaaacuggaauccaugggcguguaccagauucuggcuaucuauagcaccgucgccuccucucucgugcugcuuguuagccugggggccaucuccuucuggaugugcucuaauggaagccuccagugucggauuugcaucuga

SEQ ID NO: 192626 - RNA, 1701 nt, Artificial Sequence; identical to SEQ ID NO: 192315
  derived and/or modified CDS sequence (opt5) from hemagglutinin__InfluenzaA__ABC42761

SEQ ID NO: 192627 - RNA, 1701 nt, Artificial Sequence
  derived and/or modified CDS sequence (opt5) from hemagglutinin__InfluenzaA__ABC42772
augaagaccaucauugcccugagcuacauccucugccugguguucgcucagaaacuucccggcaacgacaauuccacagccacgcugugucucgggcaccaugcggucccuaacggaaccauuguuaagacaaucaccaaugaucaaauugaggugacaaacgcuaccgaacuggugcagucuagcuccacaggcgggaucugcgacucuccgcaccagauccuugauggagagaauuguacccugauugacgcccuccugggcgauccccagugcgacggguuucaaaacaaaaagugggaucuguucgucgaaagaagcaaagccuauuccaauuguuacccuuaugacgugcccgauuacgcuucucuccggagccugguugccuccagcggaacgcuugaguuuaacaaugaaucuuucaacuggaccggcgugacacagaauggcaccuccagcgcuugcaagcgcagaucuaacaauuccuuuuucagccggcugaacuggcucacacaucugaaguuuaaauauccugcccuuaaugucaccaugcccaacaacgagaaguucgacaaacuguacaucuggggagugcaccauccugggacggauaaugaccagauuucucucuaugcgcaggccuccggccgcaucacaguuagcaccaagagaucccaacagacagugauuccgaacaucgggucucggccccgcgucagagauauuccuagccggaucuccaucuacuggaccauugugaaacccggagacauccugcugauuaauagcaccggcaaccucaucgcuccucgcggguacuuuaagauuagaucuggaaaguccagcaucaugcggucugacgcccccaucggcaaauguaauagcgagugcauuacaccgaacggcuccaucccuaaugauaagcccuuccagaacgugaaucgcauuacguauggggcuuguccuagauacgucaaacagaacacccugaagcuggccacaggaaugcggaauguucccgaaaaacaaacccgcggcaucuuuggggcgauugccggauucaucgagaacggcugggaagggaugguggacggaugguauggcuuuagacaccaaaauucugagggcaucgggcaggcugccgaucuuaagagcacacaggcugccauuaaccagaucaauggaaaacucaaccggcugauuggcaagaccaacgagaaguuccaccagaucgaaaaagaguucuccgaaguggaggggcgcauucaggaccuugaaaaguacgucgaggauacgaaaaucgaccuguggagcuauaaugccgagcuccugguggcucuggaaaaccaacauacaauugaucucaccgacucugagaugaauaagcuguuugaaagaaccaaaaagcagcuucgggagaacgcggaagauaugggaaauggcugcuucaagaucuaccacaaaugugacaacgccugcaucggguccauuagaaauggcacauaugaucaugacguuuaccgcgacgaggcucugaacaaucgguuucagaucaagagcguggagcucaaaucuggauacaaggauuggauucuguggaucuccuucgccauuagcugcuuucuucugugugucgcccuccugggcuucaucaugugggcuugccagaaagggaacaucagauguaauauuugcaucuga

SEQ ID NO: 192628 - RNA, 1701 nt, Artificial Sequence; identical to SEQ ID NO: 192315
  derived and/or modified CDS sequence (opt5) from hemagglutinin__InfluenzaA__ABC42783

SEQ ID NO: 192629 - RNA, 1701 nt, Artificial Sequence; identical to SEQ ID NO: 192315
  derived and/or modified CDS sequence (opt5) from hemagglutinin__InfluenzaA__ABC42794

SEQ ID NO: 192630 - RNA, 1701 nt, Artificial Sequence; identical to SEQ ID NO: 192315
  derived and/or modified CDS sequence (opt5) from hemagglutinin__InfluenzaA__ABC42805

SEQ ID NO: 192631 - RNA, 1701 nt, Artificial Sequence; identical to SEQ ID NO: 192354
  derived and/or modified CDS sequence (opt5) from hemagglutinin__InfluenzaA__ABC42816

SEQ ID NO: 192632 - RNA, 1701 nt, Artificial Sequence
  derived and/or modified CDS sequence (opt5) from hemagglutinin__InfluenzaA__ABC42827
augaagaccaucauugcccugagcuacauccucugccugguguucgcucagaaacuucccggcaacgacaauuccacagccacgcugugucucgggcaccaugcggucccuaacggaaccauuguuaagacaaucaccaaugaucaaauugaggugacaaacgcuaccgaacuggugcagucuagcuccacaggcgggaucugcgacucuccgcaccagauccuugauggagagaauuguacccugauugacgcccuccugggcgauccccagugcgacggguuucaaaacaaaaagugggaucuguucgucgaaagaagcaaagccuauuccaauuguuacccuuaugacgugcccgauuacgcuucucuccggagccugguugccuccagcggaacgcuugaguuuaacaaugaaucuuucaacuggaccggcgugacacagaauggcaccuccagcgcuugcaagcgcagaucuaacaauuccuuuuucagccggcugaacuggcucacacaucugaaguuuaaauauccugcccuuaaugucaccaugcccaacaacgagaaguucgacaaacuguacaucuggggagugcaccauccugggacggauaaugaccagauuucucucuaugcgcaggccuccggccgcaucacaguuagcaccaagagaucccaacagacagugauuccgaacaucgggucucggccccgcgucagagauauuccuagccggauguccaucuacuggaccaucgugaaacccggagacauucugcugaucaauagcaccggcaaccucauugcuccucgcggguacuuuaagaucagaucuggaaaguccagcauuaugcggucugacgcccccaucggcaaauguaauagcgagugcaucacaccgaacggcuccauuccuaaugauaagcccuuccagaacgugaaucgcaucacguauggggcuuguccuagauacgucaaacagaacacccugaagcuggccacaggaaugcggaauguucccgaaaaacaaacccgcggcauuuuuggggcgaucgccggauucauugagaacggcugggaagggaugguggacggaugguauggcuuuagacaccaaaauucugagggcaucgggcaggcugccgaucuuaagagcacacaggcugccaucaaccagauuaauggaaaacucaaccggcugaucggcaagaccaacgagaaguuccaccagauugaaaaagaguucuccgaaguggaggggagaauccaggaccuugaaaaguacgucgaggauacgaaaauugaccuguggagcuauaaugccgagcuccugguggcucuggaaaaccaacauacaaucgaucucaccgacucugagaugaauaagcuguuugaacgcaccaaaaagcagcuucgggagaacgcggaagauaugggaaauggcugcuucaagauuuaccacaaaugugacaacgccugcaucggguccaucagaaauggcacauaugaucaugacguuuaccgcgacgaggcucugaacaaucgguuucagauuaagggaguggagcucaaaagcggcuacaaggauuggauccuguggauuucuuucgccaucuccugcuuucuucugugugucgcccuccugggguucauuaugugggcuugccagaaaggaaacaucagauguaauaucugcauuuga

SEQ ID NO: 192633 - RNA, 1701 nt, Artificial Sequence; identical to SEQ ID NO: 192315
  derived and/or modified CDS sequence (opt5) from hemagglutinin__InfluenzaA__ABC42849

SEQ ID NO: 192634 - RNA, 1701 nt, Artificial Sequence
  derived and/or modified CDS sequence (opt5) from hemagglutinin__InfluenzaA__ABC42882
augaagaccaucauugcccugagcuacauccucugccugguguucgcucagaaacuucccggcaacgacaauuccacagccacgcugugucucgggcaccaugcggucccuaacggaacccugguuaagacaauuaccaaugaucaaaucgaggugacaaacgcuaccgaacuugugcagucuagcuccacaggcagaauuugcgacucuccgcaccagauccuggauggggagaauuguacccucaucgacgcccugcugggagauccccauugcgacggcuuucagaacaaagaaugggaucucuucgucgagcggagcaaggccuauuccaauuguuacccuuaugacgugcccgauuacguuucucugcgcagccuuguggcuuccagcgggacgcuggaauuuaacaaugagucuuucaacuggaccggagucgcccaaaauggcacauccagcgcuugcaaaagacggucugacaaguccuuuuucagccgccucaacuggcugcaccagcuuaaguauaaauacccugcccugaaugugaccaugcccaacaaugagaaguuugauaaacucuauauuuggggcguucaucacccugggacagacucugaucagaucucccuguacgcgcaggccagcggaagagugaccgucuccacgaagcggucucaacagacagugauuccgaacaucggcagccgccccugggugagaggggucuccagccggauuucuaucuacuggaccauuguuaaaccuggagacauccugcucaucaacuccacaggcaaucugauugcuccccgcggguauuucaagaucagaagcggaaagucuagcauuaugcgguccgacgccccuaucggcaaauguaacucugaaugcauuacccccaauggcagcaucccgaacgauaagccuuuucagaaugugaaccgcaucaccuacggggcuugucccagauaugugaaacagaauacacuuaagcuggccacgggaaugcggaacgucccugagaaacaaacccgcggcauuuucggggcgaucgccggauuuauugaaaauggcugggaggggaugauggacggaugguacggcuucagacaccagaacuccgagggcacagggcaggcugccgaucucaagagcacccaagcugccaucaaucagauuaacggaaaacugaaucggcuuaucgaaaagacaaacgagaaguuucaucagaucgaaaaagaguucucugaaguggagggccgcauucaggaccuggagaaguauguugaagauaccaaaaucgaccucugguccuacaaugccgagcugcugguggcucucgaaaaccaacacacgauugaucugacagacagcgagaugaacaaacuuuucgaaagaaccaagaagcagcugcgggagaaugcggaggauauggggaacggaugcuuuaagaucuaucauaaaugugacaaugccugcauuggcucuaucagaaacgggaccuacgaucacgacgucuaccgcgacgaagcucucaauaaccgguuccagauuaagggcguggagcugaaauccggauauaaggauuggguucuuuggaucagcuuugccaucuccugcuuccugcucuguauugugcugcugggcuuuaucaugugggccugccagaaagggaauauuagauguaacaucugcauuuga

SEQ ID NO: 192635 - RNA, 1701 nt, Artificial Sequence; identical to SEQ ID NO: 192634
  derived and/or modified CDS sequence (opt5) from hemagglutinin__InfluenzaA__ABC42893

SEQ ID NO: 192636 - RNA, 1701 nt, Artificial Sequence; identical to SEQ ID NO: 192588
  derived and/or modified CDS sequence (opt5) from hemagglutinin__InfluenzaA__ABC42929

SEQ ID NO: 192637 - RNA, 1701 nt, Artificial Sequence; identical to SEQ ID NO: 192588
  derived and/or modified CDS sequence (opt5) from hemagglutinin__InfluenzaA__ABC42940

SEQ ID NO: 192638 - RNA, 1701 nt, Artificial Sequence; identical to SEQ ID NO: 192588
  derived and/or modified CDS sequence (opt5) from hemagglutinin__InfluenzaA__ABC42951

SEQ ID NO: 192639 - RNA, 1701 nt, Artificial Sequence; identical to SEQ ID NO: 192588
  derived and/or modified CDS sequence (opt5) from hemagglutinin__InfluenzaA__ABC42962

SEQ ID NO: 192640 - RNA, 1701 nt, Artificial Sequence; identical to SEQ ID NO: 192588
  derived and/or modified CDS sequence (opt5) from hemagglutinin__InfluenzaA__ABC42973

SEQ ID NO: 192641 - RNA, 1701 nt, Artificial Sequence; identical to SEQ ID NO: 192588
  derived and/or modified CDS sequence (opt5) from hemagglutinin__InfluenzaA__ABC42995

SEQ ID NO: 192642 - RNA, 1701 nt, Artificial Sequence; identical to SEQ ID NO: 192588
  derived and/or modified CDS sequence (opt5) from hemagglutinin__InfluenzaA__ABC43006

SEQ ID NO: 192643 - RNA, 1701 nt, Artificial Sequence; identical to SEQ ID NO: 192588
  derived and/or modified CDS sequence (opt5) from hemagglutinin__InfluenzaA__ABC43028

SEQ ID NO: 192644 - RNA, 1701 nt, Artificial Sequence; identical to SEQ ID NO: 192588
  derived and/or modified CDS sequence (opt5) from hemagglutinin__InfluenzaA__ABC43039

SEQ ID NO: 192645 - RNA, 1701 nt, Artificial Sequence; identical to SEQ ID NO: 192588
  derived and/or modified CDS sequence (opt5) from hemagglutinin__InfluenzaA__ABC43050

SEQ ID NO: 192646 - RNA, 1701 nt, Artificial Sequence; identical to SEQ ID NO: 192588
  derived and/or modified CDS sequence (opt5) from hemagglutinin__InfluenzaA__ABC43061

SEQ ID NO: 192647 - RNA, 1701 nt, Artificial Sequence
  derived and/or modified CDS sequence (opt5) from hemagglutinin__InfluenzaA__ABC43072
augaagaccaucauugcccugagcuacauccucugccugguguucgcucagaaacuucccggcaacgacaauuccacagccacgcugugucucgggcaccaugcggucccuaacggaaccauuguuaagacaaucaccaaugaucaaauugaggugacaaacgcuaccgaacuggugcagucuagcuccacaggcgggaucugcgacucuccgcaccagauccuugauggagagaauuguacccugauugacgcccuccugggcgauccccagugcgacggguuucaaaacaaaaagugggaucuguucgucgaaagaagcaaagccuauuccaauuguuacccuuaugacgugcccgaucaugcuucucuccggagccugguugccuccagcggaacgcuugaguuuaacaaugaaucuuucgacuggaccggcgugacacagaacggcaccuccagcgcuugcaagcgcagaucuaauaaguccuuuuucagccggcugaacuggcucacacaccugaaauacaaguauccugcccuuaaugucaccaugcccaacaaugagaaauuugauaagcuguacaucuggggagugcaucacccugggacggacucugaucagauuucccucuaugcgcaggccagcggccgcaucacaguuuccaccaaaagaucucaacagacagugauuccgaacaucgggagccggccccgcgucagagacguguccagccggauuucuaucuacuggaccaucgugaagccuggagacauucugcugaucaacuccaccggcaaucucauugcuccccgcggguacuucaagaucagaagcggaaaaucuagcauuaugcgguccgaugccccuaucggcaaguguaacucugagugcaucacacccaauggcagcauuccgaacgacaaaccuuuucagaaugucaaccgcaucacguauggggcuugucccagauacguuaagcagaauacccugaaacuugccacaggaaugcggaacgugccugaaaagcaaacccgcggcauuuucggggcgaucgccggauuuauugagaauggcugggaagggaugguggauggaugguauggcuucagacaccagaacuccgagggcacagggcaggcugccgaccugaaaagcacccaagcugccaucaaucagaucaacggaaagcucaaucggcugauuggcaagacgaacgagaaauuucaucagaucgaaaaggaguucucugaagucgaggggcgcauucaggaucuugaaaaauacguggaggacacaaagaucgaucugugguccuauaaugccgagcuccugguugcucuggaaaaccaacacaccauugaccucaccgauagcgagaugaacaaacuguucgaaaagacaaagaaacagcuuagagagaaugcggaagacaugggaaacggcugcuuuaagaucuaccauaaaugugauaaugccugcauugggucuauccggaacggcaccuaugaccacgacguguacagagaugaggcucugaauaaccgcuuccagaucaagggagucgagcucaaauccggcuacaaggacuggauucuguggaucagcuuuacaauuuccugcuuccuucuguguguggcccuccugggguuuaucaugugggccugccagaagggaaauauucgguguaacaucugcaucuga

SEQ ID NO: 192648 - RNA, 1701 nt, Artificial Sequence; identical to SEQ ID NO: 192588
  derived and/or modified CDS sequence (opt5) from hemagglutinin__InfluenzaA__ABC43083

SEQ ID NO: 192649 - RNA, 1701 nt, Artificial Sequence; identical to SEQ ID NO: 192588
  derived and/or modified CDS sequence (opt5) from hemagglutinin__InfluenzaA__ABC43094

SEQ ID NO: 192650 - RNA, 1701 nt, Artificial Sequence; identical to SEQ ID NO: 192588
  derived and/or modified CDS sequence (opt5) from hemagglutinin__InfluenzaA__ABC43116

SEQ ID NO: 192651 - RNA, 1701 nt, Artificial Sequence; identical to SEQ ID NO: 192315
  derived and/or modified CDS sequence (opt5) from hemagglutinin__InfluenzaA__ABC43127

SEQ ID NO: 192652 - RNA, 1701 nt, Artificial Sequence; identical to SEQ ID NO: 192354
  derived and/or modified CDS sequence (opt5) from hemagglutinin__InfluenzaA__ABC43138

SEQ ID NO: 192653 - RNA, 1701 nt, Artificial Sequence; identical to SEQ ID NO: 192315
  derived and/or modified CDS sequence (opt5) from hemagglutinin__InfluenzaA__ABC43149

SEQ ID NO: 192654 - RNA, 1701 nt, Artificial Sequence; identical to SEQ ID NO: 192315
  derived and/or modified CDS sequence (opt5) from hemagglutinin__InfluenzaA__ABC43160

SEQ ID NO: 192655 - RNA, 1701 nt, Artificial Sequence; identical to SEQ ID NO: 192315
  derived and/or modified CDS sequence (opt5) from hemagglutinin__InfluenzaA__ABC43171

SEQ ID NO: 192656 - RNA, 1701 nt, Artificial Sequence; identical to SEQ ID NO: 192315
  derived and/or modified CDS sequence (opt5) from hemagglutinin__InfluenzaA__ABC43182

SEQ ID NO: 192657 - RNA, 1701 nt, Artificial Sequence
  derived and/or modified CDS sequence (opt5) from hemagglutinin__InfluenzaA__ABC43475
augaagaccaucauugcccugagcuacauccucugccugguguucgcucagaaacuucccggcaacgacaauuccacagccacgcugugucucgggcaccaugcggucccuaacggaaccacaguuaagaccauuacaaaugaucaaaucgaggugaccaacgcuacagaacuggugcagucuagcuccaccggcgggauuugcgacucuccgcaccagauccuugauggagagaauuguacgcugaucgacgcccuccugggcgauccccagugcgacggguuucaaaacaaaaagugggaucuguucgucgaaagaagcaaagccuauuccaauuguuacccuuaugacgugcccgauuacgcuucucuccggagccugguugccuccagcggaacccuugaguuuaacaaugaaucuuucaacuggacaggcgugacccagaauggcacauccagcgcuugcaagcgcagaucuaacaauuccuuuuucagccggcugaacuggcucacccaucugaaguuuaaauauccugcccuuaaugucacgaugcccaacaacgagaaguucgacaaacuguacauuuggggagugcaccauccugggacagauaaugaccagaucucucucuaugcgcaggccuccggccgcauuaccguuagcacaaagagaucccaacagaccgugaucccgaacauugggucucggccccgcgucagagauaucccuagccggauuuccaucuacuggaccaucgugaaacccggagacauucugcugaucaauagcacaggcaaccucauugcuccucgcggguacuuuaagaucagaucuggaaaguccagcauuaugcggucugacgcccccaucggcaaauguaauagcgagugcaucacgccgaacggcuccauuccuaaugauaagcccuuccagaacgugaaucgcaucaccuauggggcuuguccuagauacgucaaacagaacacacugaaacuugccaccggaaugcggaauguucccgaaaaacaaacacgcggcauuuuuggggcgaucgccggauucauugagaacggcugggaagggaugguggacggaugguauggcuuuagacaccagaauagcgagggcaucgggcaggcugccgaucugaagucuacccaagcugccaucaaccagauuaauggaaaacucaaccggcugaucggcaagacgaacgagaaguuccaccagauugaaaaagaguucuccgaaguggaggggagaauccaggaccuugaaaaguacgucgaggauacaaaaauugaccuguggagcuauaaugccgagcuccugguggcucuggaaaaccaacauaccaucgaucucaccgacucugagaugaauaagcuguuugaacgcacaaagaagcagcuucgggagaacgcggaagauaugggaaauggcugcuucaagauuuaccacaaaugugacaacgccugcaucggguccaucagaaauggcaccuaugaucaugacguuuaccgcgacgaggcucugaacaaucgguuucagauuaagggaguggagcucaaaagcggcuacaaggauuggauccuguggauuucuuucgccaucuccugcuuucuucugugugucgcccuccugggguucauuaugugggcuugccagaaaggaaacaucagauguaauaucugcauuuga

SEQ ID NO: 192658 - RNA, 1701 nt, Artificial Sequence; identical to SEQ ID NO: 192315
  derived and/or modified CDS sequence (opt5) from hemagglutinin__InfluenzaA__ABC43486

SEQ ID NO: 192659 - RNA, 1701 nt, Artificial Sequence; identical to SEQ ID NO: 192315
  derived and/or modified CDS sequence (opt5) from hemagglutinin__InfluenzaA__ABC43497

SEQ ID NO: 192660 - RNA, 1701 nt, Artificial Sequence; identical to SEQ ID NO: 192354
  derived and/or modified CDS sequence (opt5) from hemagglutinin__InfluenzaA__ABC43508

SEQ ID NO: 192661 - RNA, 1701 nt, Artificial Sequence; identical to SEQ ID NO: 192354
  derived and/or modified CDS sequence (opt5) from hemagglutinin__InfluenzaA__ABC43519

SEQ ID NO: 192662 - RNA, 1701 nt, Artificial Sequence; identical to SEQ ID NO: 192354
  derived and/or modified CDS sequence (opt5) from hemagglutinin__InfluenzaA__ABC43530

SEQ ID NO: 192663 - RNA, 1701 nt, Artificial Sequence
  derived and/or modified CDS sequence (opt5) from hemagglutinin__InfluenzaA__ABC43552
augaagaccaucauugcccugagcuacauccucugccugguguucgcucagaaacuucccggcaacgacaauuccacagccacgcugugucucgggcaccaugcggucccuaacggaaccauuguuaagacaaucaccaaugaucaaauugaggugacaaacgcuaccgaacuggugcagucuagcuccacaggcgggaucugcgacucuccgcaccagauccuugauggagagaauuguacccugauugacgcccuccugggcgauccccagugcgacggguuucaaaacaaaaagugggaucuguucgucgaaagaagcaaagccuauuccaauuguuacccuuaugacgugcccgauuacgcuucucuccggagccugguugccuccagcggaacgcuugaguuuaacaaugaaucuuucaacuggaccggcgugacacagaauggcaccuccagcgcuugcaagcgcagaucuaacaauuccuuuuucagccggcugaacuggcucacacaucugaaguuuaaauauccugcccuuaaugucaccaugcccaacaacgagaaguucgacaaacuguacaucuggggagugcaccauccugggacggauaaugaccagauuucucucuaugcgcaggccccgggccgcaucacaguuuccaccaagagaagccaacagacagugauucccaacaucgggucccggccucgcgucagagauauucccucucggaucagcaucuacuggaccauugugaaaccuggagacauccugcugauuaauuccaccggcaaccucaucgcuccccgcggguacuuuaagauuagaagcggaaagucuuccaucaugcggagcgacgccccgaucggcaaauguaauucugagugcauuacaccuaacggcagcauccccaaugauaagccuuuccagaacgugaaucgcauuacguauggggcuugucccagauacgucaaacagaacacccugaaacuugccacaggaaugcggaauguucccgaaaagcaaacccgcggcaucuuuggggcgauugccggauucaucgagaacggcugggaagggaugguggacggaugguauggcuuuagacaccaaaauuccgagggcaucgggcaggcugccgaucugaagucuacacaggcugccauuaaccagaucaauggaaaacucaaccggcugauuggcaagaccaacgagaaguuccaccagaucgaaaaagaguucagcgaaguggaggggcgcauucaggaccuugaaaaguacgucgaggauacgaaaaucgaccugugguccuauaaugccgagcuccugguggcucuggaaaaccaacauacaauugaucucaccgacagcgagaugaauaagcuguuugaaagaaccaaaaagcagcuucgggagaacgcggaagauaugggaaauggcugcuucaagaucuaccacaaaugugacaacgccugcaucgggucuauuagaaauggcacauaugaucaugacguuuaccgcgacgaggcucugaacaaucgguuucagaucaagggaguggagcucaaauccggcuacaaggauuggauucuguggaucagcuucgccauuucuugcuuucuucugugugucgcccuccugggguucaucaugugggcuugccagaaaggaaacaucagauguaauauuugcaucuga

SEQ ID NO: 192664 - RNA, 1701 nt, Artificial Sequence
  derived and/or modified CDS sequence (opt5) from hemagglutinin__InfluenzaA__ABC46554
augaagaccaucauugcccugagcuacaucuucugccagguguuugcucaaaaccuccccggcaaugacaacuccacagccacgcugugucuugggcaccaugcggucccuaauggaacccugguuaaaacaauuaccaacgaucagaucgaggugacaaaugcuaccgaacucgugcagucuagcuccacaggcagaauuugcgacucuccgcaccggauccuggaugggaagaacuguacccuuaucgacgcccugcucggagauccccauugcgacggcuuccagaaugagaaaugggaucuguuugucgaacgcagcaaggccuucuccaacuguuauccuuacgacgugcccgauuaugcuucucugagaagccucguugccuccagcgggacgcuggaguuuauuaaugaaggauucaacuggaccggcgugacacaagacggcgggucuuacgcuugcaaacggggaccugauaauuccuuuuucagccgccuuaacuggcuguauaagucugaguccaccuaccccguccucaaugugacaaugccuaacaaugacaacuuugauaagcuguauaucuggggcguucaccauccgagcaccgacaaagagcagacgaaccuuuacgugcaggccucugggagagucacaguguccaccaagcggagccagcaaacaauuauccccaaugugggaucccgcccuugggucagaggccugucuagccggauuuccaucuacuggaccauuguuaaacccggggacauccuccugaucaacagcaauggaaaccugauugcgccucgcggcuauuucaagaucagaaccggcaaaucuuccauuaugcggagcgaugcccccaucgggacauguucuagcgaaugcauuacgccgaauggauccaucccuaacgacaagcccuuucagaaugugaacaagaucaccuacggcgcuuguccuaaauaugugaagcagaauacacucaaacuggccaccgggaugcgcaacguccccgagaagcagacaagaggaauuuucggcgcuaucgccggguuuauugaaaauggaugggagggcaugaucgauggcugguacggguuccggcaccaaaacucugagggaaccggccaggcggccgaccuuaaaagcacgcaggcugccauugaucaaaucaaugggaagcugaaccgcgugaucgagaaaacaaaugaaaaguuccaccagauugaaaaggaguuuuccgaaguugagggaagaauccaggaccucgagaaauauguggaagauaccaagauugaccuguggagcuacaacgcugagcuucuggucgcccucgaaaaccagcauaccaucgaucugacagacucugagaugaauaaacuguucgaaaagacccggagacaacuccgcgagaacgccgaggauaugggcaaugggugcuuuaaaauuuaucacaagugugacaacgcuugcaucggcuccauucggaauggaacauacgaccaugauguguacagagacgaagcgcugaacaaucgcuuccagaucaagggcguugagcuuaaaagcggguauaaggauuggauccuguggauuucuuuugccaucuccugcuuccuccugugugugguccuucugggauuuauuaugugggcuugccagaaaggcaacauccgguguaauauuugcaucuga

SEQ ID NO: 192665 - RNA, 1701 nt, Artificial Sequence
  derived and/or modified CDS sequence (opt5) from hemagglutinin__InfluenzaA__ABC46576
augaagaccaucauugcccugagcuacaucuucugccucguguuugcucagaaccugcccggcaaugacaaauccacagccacgcuuugucuggggcaccaugcggucccuaacggaacccucguuaagacaauuaccaaugaucaaaucgaggugacaaacgcuaccgaacuggugcagucuagcuccacaggcagaauuugcgacucuccgcaccggauccuugaugggaaaaauuguacccuggucgacgcccuccugggagauccccauugcgacggcuuccagaacgagaagugggaucuguuuguggaacgcagcaaagccuucuccaauuguuauccuuacgacguucccgauuaugcuucucucagaagccugguggccuccagcgggacgcuugaguuuaucaacgaaucuuucaauuggaccggagucacacaguccggcggcagcuacgcuugcaagcgggggucugacaacuccuuuuucagccgccugaauuggcucuaugagucugaguccaaguacccugugcugaacguuaccaugcccaauaacggaaauuuugauaaacuuuauauuuggggcgugcaccauccuagcacagacaaggaacaaaccaaccuguacgucagagccuccgggcgggugacggugucuacaaaacgcagccagcagaccaucauuccgaacaucggauccagacccuggguccggggccucagcucucgcauuuccaucuacuggacaauuguuaagccuggggauauccugcugaucaauagcaacggaaaucucauugcgcccagaggcuauuucaaaauccggaccggcaagucuagcauuaugcgcuccgacgccccuaucgggaccuguucuagcgagugcauuacacccaacggauccaucccgaaugacaagccuuuucagaacgugaauaaaaucacguacggcgcuugucccaaguaugugaaacaaaacacccugaagcuggccacagggaugagaaaugucccugaaaaacagacccggggaauuuucggcgcuaucgccggguuuauugagaacggaugggagggcaugguggauggcugguacggguuccgccaccagaauagcgaaggaacaggccaggcggccgaccugaagucuacccaagcugccaucgaucagauuaacgggaaacucaauagaguuaucgagaagacgaacgaaaaguuccaccagaucgagaaagaauuuuccgagguggagggacggauucaagaccuggaaaaguaugucgaggauacaaaaaucgaccuuuggagcuacaaugcugaacugcucguggcccuggagaaccagcauaccauugaucugaccgacucugaaaugaacaaacucuucgagaagacaagacgccagcugcgggagaaugccgaagauaugggcaacgggugcuuuaagaucuaucacaagugugacaaugcuugcauuggcuccaucagaaacggaaccuacgaucaugacguuuaccgcgacgaggcgcuuaauaaccgguuccagauuaaaggcguggaacuuaagagcggguauaaagauuggauccucuggaucuccuuugccauuucuugcuuccugcuuugugucgugcugcucggauuuaucaugugggcuugccaaaagggcaauauuagauguaacaucugcauuuga

SEQ ID NO: 192666 - RNA, 1701 nt, Artificial Sequence; identical to SEQ ID NO: 192524
  derived and/or modified CDS sequence (opt5) from hemagglutinin__InfluenzaA__ABC50167

SEQ ID NO: 192667 - RNA, 1701 nt, Artificial Sequence; identical to SEQ ID NO: 192524
  derived and/or modified CDS sequence (opt5) from hemagglutinin__InfluenzaA__ABC50178

SEQ ID NO: 192668 - RNA, 1701 nt, Artificial Sequence; identical to SEQ ID NO: 192524
  derived and/or modified CDS sequence (opt5) from hemagglutinin__InfluenzaA__ABC50189

SEQ ID NO: 192669 - RNA, 1701 nt, Artificial Sequence; identical to SEQ ID NO: 192634
  derived and/or modified CDS sequence (opt5) from hemagglutinin__InfluenzaA__ABC50200

SEQ ID NO: 192670 - RNA, 1701 nt, Artificial Sequence; identical to SEQ ID NO: 192634
  derived and/or modified CDS sequence (opt5) from hemagglutinin__InfluenzaA__ABC50211

SEQ ID NO: 192671 - RNA, 1701 nt, Artificial Sequence; identical to SEQ ID NO: 192634
  derived and/or modified CDS sequence (opt5) from hemagglutinin__InfluenzaA__ABC50222

SEQ ID NO: 192672 - RNA, 1701 nt, Artificial Sequence; identical to SEQ ID NO: 192634
  derived and/or modified CDS sequence (opt5) from hemagglutinin__InfluenzaA__ABC50233

SEQ ID NO: 192673 - RNA, 1701 nt, Artificial Sequence; identical to SEQ ID NO: 192634
  derived and/or modified CDS sequence (opt5) from hemagglutinin__InfluenzaA__ABC50244

SEQ ID NO: 192674 - RNA, 1701 nt, Artificial Sequence; identical to SEQ ID NO: 192634
  derived and/or modified CDS sequence (opt5) from hemagglutinin__InfluenzaA__ABC50266

SEQ ID NO: 192675 - RNA, 1701 nt, Artificial Sequence; identical to SEQ ID NO: 192634
  derived and/or modified CDS sequence (opt5) from hemagglutinin__InfluenzaA__ABC50277

SEQ ID NO: 192676 - RNA, 1701 nt, Artificial Sequence
  derived and/or modified CDS sequence (opt5) from hemagglutinin__InfluenzaA__ABC50299
augaagaccaucauugcccugagcuacauccucugccugguguucgcucagaaacuucccggcaacgacaauuccacagccacgcugugucucgggcaccaugcggucccuaacggaacccugguuaagacaauuaccaaugaucaaaucgaggugacaaacgcuaccgaacuugugcagucuagcuccacaggcagaauuugcgacucuccgcaccagauccuggauggggagaauuguacccucaucgacgcccugcugggagauccccauugcgacggcuuucagaacaaagaaugggaucucuucgucgagcggagcaaggccuauuccaauuguuacccuuaugacgugcccgauuacguuucucugcgcagccuuguggcuuccagcgggacgcuggaauuuaacaaugagucuuucaacuggaccggagucgcccaaaauggcacauccagcgcuugcaaaagacggucugacaaguccuuuuucagccgccucaacuggcugcaccagcuuaaguauaaauacccugcccugaaugugaccaugcccaacaaugagaaguuugauaaacucuauauuuggggcguucaucacccugggacagacucugaucagaucucccuguacgcgcaggccagcggaagagugaccgucuccacgaagcggucucaacagacagugauuccgaacaucggcagccgccccugggugagaggggucuccagccggauuucuaucuacuggaccauuguuaaaccuggagacauccugcucaucaacuccacaggcaaucugauugcuccccgcggguauuucaagaucagaagcggaaagucuagcauuaugcgguccgacgccccuaucggcaaauguaacucugaaugcauuacccccaauggcagcaucccgaacgauaagccuuuucagaaugugaaccgcaucaccuacggggcuugucccagauaugugaaacagaauacacuuaagcuggccacgggaaugcggaacgucccugagaaacaaacccgcggcauuuucggggcgaucgccggauuuauugaaaauggcugggaggggaugauggacggaugguacggcuucagacaccagaacuccgagggcacagggcaggcugccgaucucaagagcacccaagcugccaucaaucagauuaacggaaaacugaaucggcuuaucgaaaagacaaacgagaaguuucaucagaucgaaaaagaguucucugaaguggagggccgcauucaggaccuggagaaguauguugaagauaccaaaaucgaccucugguccuacaaugccgagcugcugguggcucucgaaaaccaacacacgauugaucugacagacagcgagaugaacaaacuuuucgaaagaaccaagaagcagcugcgggagaaugcggaggauauggggaacggaugcuuuaagaucuaucauaaaugugacaaugccugcauuggcucuaucagaaacgggaccuacgaucacgacgucuaccgcgacgaagcucucaauaaccgguuccagauuaagggcguggagcugaaauccggauauaaggauuggguucuuuggaucagcuuugccacauccugcuuccugcucuguaucgugcugcugggcuuuauuaugugggccugccagaaagggaauaucagauguaacauuugcaucuga

SEQ ID NO: 192677 - RNA, 1701 nt, Artificial Sequence; identical to SEQ ID NO: 192634
  derived and/or modified CDS sequence (opt5) from hemagglutinin__InfluenzaA__ABC50310

SEQ ID NO: 192678 - RNA, 1701 nt, Artificial Sequence
  derived and/or modified CDS sequence (opt5) from hemagglutinin__InfluenzaA__ABC50321
augaagaccaucauugcccugagcuacauccucugccugguguucgcucagaaacuucccggcaacgacaauuccacagccacgcugugucucgggcaccaugcggucccuaacggaacccugguuaagacaauuaccaaugaucaaaucgaggugacaaacgcuaccgaacuugugcagucuagcuccacaggcagaauuugcgacucuccgcaccagauccuggauggggagaauuguacccucaucgacgcccugcugggagauccccauugcgacggcuuucagaacaaagaaugggaucucuucgucgagcggagcaaggccuauuccaauuguuacccuuaugacgugcccgauuacguuucucugcgcagccuuguggcuuccagcgggacgcuggaauuuaacaaugagucuuucaacuggaccggagucgcccaaaauggcacauccagcgcuugcaaaagacggucugacaaguccuuuuucagccgccucaacuggcugcaccagcuuaaguauaaauacccugcccugaaugugaccaugcccaacaaugagaaguuugauaaacucuauauuuggggcguucaucacccugggacagacucugaucagaucucccuguacgcgcaggccagcggaagagugaccgucuccacgaagcggucucaacagacagugauuccgaacaucggcagccgccccugggugagaggggucuccagccggauuucuaucuacuggaccauuguuaaaccuggagacauccugcucaucaacuccacaggcaaucugauugcuccccgcggguauuucaagaucagaagcggaaagucuagcauuaugcgguccgacgccccuaucggcaaauguaacucugaaugcauuacccccaauggcagcaucccgaacgauaagccuuuucagaaugugaaccgcaucaccuacggggcuugucccagauaugugaaacagaauacacuuaagcuggccacgggaaugcggaacgucccuggcaaacaaacccgcgggauuuucggagcgaucgccggcuuuauugagaaugggugggaaggaaugauggacggcugguacggcuucagacaccagaacuccgaggggacaggacaggcugccgaucucaagagcacccaagcugccaucaaucagauuaacggcaaacugaaucggcuuaucgagaagacaaacgaaaaguuucaucagaucgagaaagaguucucugaaguggaagggcgcauucaggaccuggagaaguauguugaggauaccaaaaucgaccucugguccuacaaugccgaacugcugguggcucucgagaaccaacacacgauugaucugacagacagcgaaaugaacaaacuuuucgagagaaccaagaagcagcugcgggaaaaugcggaggauaugggaaacggcugcuuuaagaucuaucauaaaugugacaaugccugcauugggucuaucagaaacggcaccuacgaucacgacgucuaccgcgacgaggcucucaauaaccgguuccagauuaagggaguggaacugaaauccggcuauaaggauuggguucuuuggaucagcuuugccaucuccugcuuccugcucuguauugugcugcugggguuuaucaugugggccugccagaaaggaaauauuagauguaacaucugcauuuga

SEQ ID NO: 192679 - RNA, 1701 nt, Artificial Sequence
  derived and/or modified CDS sequence (opt5) from hemagglutinin__InfluenzaA__ABC50332
augaagaccaucauugcccugagcuacauccucugccugguguucgcucagaaacuucccggcaacgacaauuccacagccacgcugugucucgggcaccaugcggucccuaacggaacccugguuaagacaauuaccaaugaucaaaucgaggugacaaacgcuaccgaacuugugcagucuagcuccacaggcagaauuugcgacucuccgcaccagauccuggauggggagaauuguacccucaucgacgcccugcugggagauccccauugcgacggcuuucagaacaaagaaugggaucucuucgucgagcggagcaaggccuauuccaauuguuacccuuaugacgugcccgauuacguuucucugcgcagccuuguggcuuccagcgggacgcuggaauuuaacaaugagucuuucaacuggaccggagucgcccaaaauggcacauccagcgcuugcaaaagacggucugacaaguccuuuuucagccgccucaacuggcugcaccagcuuaaguauaaauacccugcccugaaugugaccaugcccaacaaugagaaguuugauaaacucuauauuuggggcguucaucacccugggacagacucugaucagaucucccuguacgcgcaggccagcggaagagugaccgucuccacgaagcggucucaacagacagugauuccgaacaucggcagccgccccugggugagaggggucuccagccggauuucuaucuacuggaccauuguuaaaccuggagacauccugcucaucaacuccacaggcaaucugauugcuccccgcggguauuucaagaucagaagcggaaagucuagcauuaugcgguccgacgccccuaucggcaaauguaacucugaaugcauuacccccaauggcagcaucccgaacgggaagccuuuucagaaugugaaccgcaucaccuacggagcuugucccagauaugugaaacagaauacacuuaagcuggccacgggcaugcggaacgucccugagaaacaaacccgcgggauuuucggagcgaucgccggcuuuauugaaaaugggugggagggaaugauggauggcugguacggcuucagacaccagaacuccgaggggacaggacaggcugccgaccucaagagcacccaagcugccaucaaucagauuaacggcaaacugaaucggcuuaucgaaaagacaaacgagaaguuucaucagaucgaaaaagaguucucugaaguggaggggcgcauucaggaucuggagaaguauguugaagacaccaaaaucgaucucugguccuacaaugccgagcugcugguggcucucgaaaaccaacacacgauugaccugacagauagcgagaugaacaaacuuuucgaaagaaccaagaagcagcugcgggagaaugcggaggacaugggaaacggcugcuuuaagaucuaucauaaaugugauaaugccugcauugggucuaucagaaacggcaccuacgaccacgaugucuaccgcgacgaagcucucaauaaccgguuccagauuaagggaguggagcugaaauccggcuauaaggacuggauccuuuggaucagcuuugccauuuccugcuuccugcucuguaucguucugcugggguuuauuaugugggccugccagaaaggaaauaucagauguaacauuugcaucuga

SEQ ID NO: 192680 - RNA, 1701 nt, Artificial Sequence; identical to SEQ ID NO: 192634
  derived and/or modified CDS sequence (opt5) from hemagglutinin__InfluenzaA__ABC50343

SEQ ID NO: 192681 - RNA, 1701 nt, Artificial Sequence
  derived and/or modified CDS sequence (opt5) from hemagglutinin__InfluenzaA__ABC50354
augaagaccaucauugcccugagcuacauccucugccugguguucgcucagaaacuucccggcaacgacaauuccacagccacgcugugucucgggcaccaugcggucccuaacggaacccugguuaagacaauuaccaaugaucaaaucgaggugacaaacgcuaccgaacuugugcagucuagcuccacaggcagaauuugcgacucuccgcaccagauccuggauggggagaauuguacccucaucgacgcccugcugggagauccccauugcgacggcuuucagaacaaagaaugggaucucuucgucgagcggagcaaggccuauuccaauuguuacccuuaugacgugcccgauuacguuucucugcgcagccuuguggcuuccagcgggacgcuggaauuuaacaaugagucuuucaacuggaccggagucgcccaaaauggcacauccagcucuugcaaaagacgguccgacaagagcuuuuucucucgccucaacuggcugcaccagcuuaaguauaaauacccugcucugaaugugaccaugcccaacaaugagaaguuugauaaacucuauauuuggggcguucaucacccugggacagacuccgaucagaucagccuguacgcccaggcguccggaagagugaccgucucuacgaagcggagccaacagacagugauuccgaacaucggcucccgccccugggugagaggggucagcucucggauuuccaucuacuggaccauuguuaaaccuggagacauccugcucaucaacagcacaggcaaucugauugcccccagaggguauuucaagaucagaucuggaaagagcuccauuaugcggucugacgcuccuaucggcaaauguaacagcgaaugcauuacccccaauggcuccaucccgaacgauaagccuuuucagaaugugaaccgcaucaccuacggggccugucccagauaugugaaacagaauacacuuaagcuggcuacgggaaugcggaacgucccugagaaacaaacccgcggcauuuucggggccaucgcgggauuuauugaaaauggcugggaggggaugauggacggaugguacggcuucagacaccagaacagcgagggcacagggcaggccgcugaucucaagucuacccaagccgcuaucaaucagauuaacggaaaacugaaucggcuuaucgaaaagacaaacgagaaguuucaucagaucgaaaaagaguucuccgaaguggagggccgcauucaggaccuggagaaguauguugaagauaccaaaaucgaccucuggagcuacaaugccgagcugcugguggcccucgaaaaccaacacacgauugaucugacagacucugagaugaacaaacuuuucgaacgcaccaagaagcagcugcgggagaaugcugaggauauggggaacggaugcuuuaagaucuaucauaaaugugacaaugcgugcauuggcuccaucagaaacgggaccuacgaucacgacgucuaccgcgacgaagcccucaauaaccgguuccagauuaagggcguggagcugaaaagcggauauaaggauuggguucuuuggaucuccuuugcuaucucuugcuuccugcucuguauugugcugcugggcuuuaucaugugggccugccagaaagggaauauuagauguaacaucugcauuuga

SEQ ID NO: 192682 - RNA, 1701 nt, Artificial Sequence
  derived and/or modified CDS sequence (opt5) from hemagglutinin__InfluenzaA__ABC50376
augaagaccaucauugcccugagcuacauccucugccugguguucgcucagaaacuucccggcaacgacaauuccacagccacgcugugucucgggcaccaugcggucccuaacggaacccugguuaagacaauuaccaaugaucaaaucgaggugacaaacgcuaccgaacuugugcagucuagcuccacaggcagaauuugcgacucuccgcaccagauccuggauggggagaauuguacccucaucgacgcccugcugggagauccccauugcgacggcuuucagaacaaagaaugggaucucuucgucgagcggagcaaggccuauuccaauuguuacccuuaugacgugcccgauuacguuucucugcgcagccuuguggcuuccagcgggacgcuggaauuuaacaaugagucuuucaacuggaccggagucgcccaaaauggcacauccagcgcuugcaaaagacggucugacaaguccuuuuucagccgccucaacuggcugcaccagcuuaaguauaaauacccugcccugaaugugaccaugcccaacaaugagaaguuugauaaacucuauauuuggggcguucaucacccugggacagacucugaucagaucucccuguacgcgcaggccagcggaagagugaccgucuccacgaagcggucucaacagacagugauuccgaacaccggcagccgccccugggugagaggggucuccagccggaucucuauuuacuggacaaucguuaaaccuggagacauucugcucaucaacuccaccggcaaucugaucgcuccccgcggguauuucaagauuagaagcggaaagucuagcaucaugcgguccgacgccccuauuggcaaauguaacucugaaugcaucacccccaauggcagcauuccgaacgauaagccuuuucagaaugugaaccgcaucacauacggggcuugucccagauaugugaaacagaauacgcuuaagcuggccaccggaaugcggaacgucccugagaaacaaacacgcggcaucuucggggcgauugccggauuuaucgaaaauggcugggaggggaugauggacggaugguacggcuucagacaccagaacuccgagggcaccgggcaggcugccgaucucaagagcacacaagcugccauuaaucagaucaacggaaaacugaaucggcuuauugaaaagaccaacgagaaguuucaucagaucgaaaaagaguucucugaaguggagggcagaauccaggaccuggagaaguauguugaagauacgaaaauugaccucugguccuacaaugccgagcugcugguggcucucgaaaaccaacacacaaucgaucugaccgacagcgagaugaacaaacuuuucgaacgcaccaagaagcagcugcgggagaaugcggaggauauggggaacggaugcuuuaagauuuaucauaaaugugacaaugccugcaucggcucuauuagaaacgggacauacgaucacgacgucuaccgcgacgaagcucucaauaaccgguuccagaucaagggcguggagcugaaauccggauauaaggauuggguucuuuggauuagcuuugccaucuccugcuuccugcucuguaucgugcugcugggcuuuauuaugugggccugccagaaagggaauaucagauguaacauuugcaucuga

SEQ ID NO: 192683 - RNA, 1701 nt, Artificial Sequence
  derived and/or modified CDS sequence (opt5) from hemagglutinin__InfluenzaA__ABC50387
augaagaccaucauugcccugagcuacauccucugccugguguucgcucagaaacuucccggcaacgacaauuccacagccacgcugugucucgggcaccaugcggucccuaacggaacccugguuaagacaauuaccaaugaucaaaucgaggugacaaacgcuaccgaacuugugcagucuagcuccacaggcagaauuugcgacucuccgcaccagauccuggauggggagaauuguacccucaucgacgcccugcugggagauccccauugcgacggcuuucagaacaaagaaugggaucucuucgucgagcggagcaaggccuauuccaauuguuacccuuaugacgugcccgauuacguuucucugcgcagccuuguggcuuccagcgggacgcuggaauuuaacaaugagucuuucaacuggaccggagucgcccaaaauggcacauccagcgcuugcaaaagacggucugacaaguccuuuuucagccgccucaacuggcugcaccagcuuaaguauaaauacccugcccugaaugugaccaugcccaacaaugagaaguuugauaaacucuauguuuggggcgugcaucacccugggacagacucugaucagauuucccuguacgcgcaggccagcggaagagucaccguguccacgaagcggucucaacagacagugaucccgaacauuggcagccgccccugggucagagggguuuccagccggaucucuauuuacuggaccaucgugaaaccuggagacauucugcucaucaacuccacaggcaaucugaucgcuccccgcggguauuucaagauuagaagcggaaagucuagcaucaugcgguccgacgccccuauuggcaaauguaacucugaaugcaucacccccaauggcagcauuccgaacgauaagccuuuucagaaugugaaccgcaucaccuacggggcuugucccagauaugucaaacagaauacacuuaagcuggccacgggaaugcggaacgugccugagaaacaaacccgcggcaucuucggggcgauugccggauuuaucgaaaauggcugggaggggaugauggacggaugguacggcuucagacaccagaacuccgagggcacagggcaggcugccgaucucaagagcacccaagcugccauuaaucagaucaacggaaaacugaaucggcuuauugaaaagacaaacgagaaguuucaucagaucgaaaaagaguucucugaaguugagggcagaauccaggaccuggagaaguauguggaagauaccaaaauugaccucugguccuacaaugccgagcugcuggucgcucucgaaaaccaacacacgaucgaucugacagacagcgagaugaacaaacuuuucgaacgcaccaagaagcagcugcgggagaaugcggaggauauggggaacggaugcuuuaagauuuaucauaaaugugacaaugccugcaucggcucuauuagaaacgggaccuacgaucacgacguguaccgcgacgaagcucucaauaaccgguuccagaucaagggcguugagcugaaauccggauauaaggauugggugcuuuggauuagcuuugccaucuccugcuuccugcucuguaucguccugcugggcuuuauuaugugggccugccagaaagggaauaucagauguaacauuugcaucuga

SEQ ID NO: 192684 - RNA, 1701 nt, Artificial Sequence
  derived and/or modified CDS sequence (opt5) from hemagglutinin__InfluenzaA__ABC50409
augaagaccaucauugcccugagcuacauccucugccugguguucgcucagaaacuucccggcaacgacaauuccacagccacgcugugucucgggcaccaugcggucccuaacggaaccauuguuaagacaaucaccaaugaucaaauugaggugacaaacgcuaccgaacuggugcagucuagcuccacaggcgggaucugcgacucuccgcaccagauccuugauggagagaauuguacccugauugacgcccuccugggcgauccccagugcgacggguuucaaaacaaaaagugggaucuguucgucgaaagaagcaaagccuauuccaauuguuacccuuaugacgugcccgauuacguuucucuccggagccugguggcuuccagcggaacgcuugaguuuaacaaugaaucuuucaacuggaccggcgucacacagaauggcaccuccagcgccugcaagcgcagaucuaacaauuccuuuuucagccggcugaacuggcucacacaucugaaguuuaaauauccugcucuuaaugugaccaugcccaacaacgagaaguucgacaaacuguacaucuggggaguucaccauccugggacggauaaugaccagauuucucucuaugcccaggcguccggccgcaucacagugagcaccaagagaucccaacagacagucauuccgaacaucgggucucggccccgcgugagagauauuccuagccggaucuccaucuacuggaccauugugaaacccggagacauccugcugauuaauagcaccggcaaccucaucgccccucgcggguacuuuaagauuagaucuggaaaguccagcaucaugcggucugacgcucccaucggcaaauguaauagcgagugcauuacaccgaacggcuccaucccuaaugauaagcccuuccagaacgucaaucgcauuacguauggggccuguccuagauacguuaaacagaacacccugaagcuggcuacaggaaugcggaaugugcccgaaaaacaaacccgcggcaucuuuggggccauugcgggauucaucgagaacggcugggaagggaugguggacggaugguauggcuuuagacaccaaaauucugagggcaucgggcaggccgcugaucuuaagagcacacaggccgcuauuaaccagaucaauggaaaacucaaccggcugauuggcaagaccaacgagaaguuccaccagaucgaaaaagaguucuccgaagucgaggggcgcauucaggaccuugaaaaguacguggaggauacgaaaaucgaccuguggagcuauaaugccgagcuccugguugcccuggaaaaccaacauacaauugaucucaccgacucugagaugaauaagcuguuugaaagaaccaaaaagcagcuucgggagaacgcugaagauaugggaaauggcugcuucaagaucuaccacaaaugugacaacgcgugcaucggguccauuagaaauggcacauaugaucaugacguguaccgcgacgaggcccugaacaaucgguuucagaucaagggagucgagcucaaaagcggcuacaaggauuggauucuguggaucucuuucgcuauuuccugcuuucuucuguguguggcccuccugggguucaucaugugggccugccagaaaggaaacaucagauguaauauuugcaucuga

SEQ ID NO: 192685 - RNA, 1701 nt, Artificial Sequence; identical to SEQ ID NO: 192684
  derived and/or modified CDS sequence (opt5) from hemagglutinin__InfluenzaA__ABC50420

SEQ ID NO: 192686 - RNA, 1701 nt, Artificial Sequence
  derived and/or modified CDS sequence (opt5) from hemagglutinin__InfluenzaA__ABC54668
augaagaccaucauugcccugagcuacauccucugccugguguucgcucagaaacuucccggcaacgacaauuccacagccacgcugugucucgggcaccaugcggucccuaacggaacccugguuaagacaauuaccaaugaucaaaucgaggugacaaacgcuaccgaacuugugcagucuagcuccacaggcagaauuugcgacucuccgcaccagauccuggauggggagaauuguacccucaucgacgcccugcugggagauccccauugcgacggcuuucagaacaaagaaugggaucucuucgucgagcggagcaaggccuauuccaauuguuacccuuaugacgugcccgauuacgcuucucugcgcagccuuguugccuccagcgggacgcuggaauuuaacaaugagucuuucaacuggaccggaguggcucaaaauggcacauccagcgccugcaaaagacggucuaacaaguccuuuuucagccgccucaauuggcugcaccagcuuaaguauaaauacccugcgcugaacgucaccaugcccaauaacgagaaguuugacaaacucuauauuuggggcgugcaucacccuucuacagauuccgaccagaucagccuguacgcccaggcuuccgggagaguuaccgugucuacgaagcggagccaacagacagucauuccgaacaucggauccggccccugggugcgcggggugagcucuagaauuuccaucuacuggaccauugucaaaccuggagauauccugcucaucaauagcacaggcaaccugauugcuccccggggguauuucaagauccgcucuggaaagagcuccauuaugagaucugacgccccuaucggcaaauguaauagcgaaugcauuacccccaacggcucccuuccgaaugacaagccuuuucagaacguuaaucggaucaccuacggggccuguccccgcuaugugaaacagaacacacugaagcucgcgacgggaaugagaaaugugccugagaaacaaacccggggcaucuucggggccauugcuggauuuaucgaaaacggcugggaggggauggucgauggaugguacggcuuccgccaccagaauagcgagggcacagggcaggccgcugaccugaagucuacccaagccgccauuaaccagaucaauggaaaacuuaacagacugauugaaaagacaaaugagaaguuucaucagaucgaaaaagaguucuccgaaguggagggccggauccaggaucucgagaaguauguugaagacaccaaaauugaucuguggagcuacaacgcugagcugcucguggcgcuggaaaaccaacacacgaucgaccuuacagauucugagaugaauaagcuguucgaaagaaccaaaaagcagcuccgcgagaacgccgaggacauggggaauggaugcuuuaagauuuaucauaaaugugauaacgcuugcaucggcuccauucggaaugggaccuacgaccacgaugucuacagagacgaagcccugaacaaucgcuuccagaucaagggcguggagcuuaaaagcggauauaaggacuggauucuguggaucuccuuugccaucucuugcuuccuccuguguguugugcugcucggcuuuauuaugugggcuugccagaaagggaacauccgguguaauauuugcaucuga

SEQ ID NO: 192687 - RNA, 1701 nt, Artificial Sequence
  derived and/or modified CDS sequence (opt5) from hemagglutinin__InfluenzaA__ABC54679
augaagaccaucauugcccugagcuacauccucugccugguguucgcucagaaacuucccggcaacgacaauuccacagccacgcugugucucgggcaccaugcggucccuaacggaaccauuguuaagacaaucaccaaugaucaaauugaggugacaaacgcuaccgaacuggugcagucuagcccgacaggcgggaucugcgacucuccccaccagauccuugauggagagaauuguacccugauugacgcccuccugggcgauccucagugcgacggguuucaaaacaaaaagugggaucuguucaucgaaagaucuaaagccuauagcaauuguuaccccuaugacgucccugauuacgcuucccuccggucucugguggccagcuccggaacgcuugaguuuaacaaugagagcuucaacuggaccggcguuacacagaauggcaccucuuccgcuugcaagcgcagaagcaacaauuccuuuuucucccggcugaacuggcucacacaucugaaguuuaaauaucccgcccuuaaugugaccaugccuaacaacgaaaaguucgacaaacuguacauuuggggaguccaccauccggggacggauaaugaccagaucagccucuaugcgcaggccucuggccgcauuacaguguccaccaagagaagccaacagacaguuauccccaacguggggucccggccucgcgucagagauauucccucucggaucagcaucuacuggaccauugugaaaccuggagacauccugcugauuaauuccaccggcaaccucaucgcuccccgcggguacuuuaagauuagaagcggaaagucuuccaucaugcggagcgacgccccgaucggcaaauguaauucugagugcauuacaccuaacggcagcauccccaaugauaagccuuuccagaacgugaaucgcauuacguauggggcuugucccagauacgucaaacagaacacccugaaacuugccacaggaaugcggaauguucccgaaaagcaaacccgcggcaucuuuggggcgauugccggauucaucgagaacggcugggaagggaugguggacggaugguauggcuuuagacaccaaaauuccgagggcaucgggcaggcugccgaucugaagucuacacaggcugccauuaaccagaucaauggaaaacucaaccggcugauuggcaagaccaacgagaaguuccaccagaucgaaaaagaguucagcgaaguggaggggcgcauucaggaccuugaaaaguacgucgaggauacgaaaaucgaccugugguccuauaaugccgagcuccugguggcucuggaaaaccaacauacaauugaucucaccgacagcgagaugaauaagcuguuugaaagaaccaaaaagcagcuucgggagaacgcggaagauaugggaaauggcugcuucaagaucuaccacaaaugugacaacgccugcaucgggucuauuagaaauggcacauaugaucaugacguuuaccgcgacgaggcucugaacaaucgguuucagaucaagggaguggagcucaaauccggcuacaaggauuggauucuguggaucagcuucgccauuucuugcuuucuucugugugucgcccuccugggguucaucaugugggcuugccagaaaggaaacaucagauguaauauuugcaucuga

SEQ ID NO: 192688 - RNA, 1701 nt, Artificial Sequence; identical to SEQ ID NO: 192588
  derived and/or modified CDS sequence (opt5) from hemagglutinin__InfluenzaA__ABC67319

SEQ ID NO: 192689 - RNA, 1701 nt, Artificial Sequence
  derived and/or modified CDS sequence (opt5) from hemagglutinin__InfluenzaA__ABC67454
augaagaccaucauugcccugagcuacauccucugccugguguucgcucaggagcuucccggcaacgacaauuccacagccacgcugugucucgggcaccaugcggucccuaacggaacccugguuaaaacaauuaccaaugaucaaaucgaagugacaaacgcuaccgagcuugugcagucuagcuccacaggcagaauuugcgacucuccgcaccagauccuggauggggaaaauuguacccucaucgacgcccugcugggagauccccauugcgacggcuuucagaacaaggagugggaucucuucgucgaacggagcaaagccuauuccaauuguuacccuuaugacgugcccgauuacguuucucugcgcagccuuguggcuuccagcgggacgcuggaguuuaacaaugagucuuucaacuggaccggagucgcccaaaauggcacauccagcgcuugcaagagacggucugacaaauccuuuuucagccgccucaacuggcugcaccagcuuaaguauaaguacccugcccugaaugugaccaugcccaacaaugaaaaauuugauaagcucuauauuuggggcguucaucacccugggacagacucugaucagaucucccuguacgcgcaggccagcggaagagugaccgucuccacgaaacggucucaacagacagugauuccgaacaucggcagccgccccugggugagaggggucuccagccggauuucuaucuacuggaccauuguuaagccuggagacauccugcucaucaacuccacaggcaaucugauugcuccccgcggguauuucaaaaucagaagcggaaagucuagcauuaugcgguccgacgccccuaucggcaaguguaacucugagugcauuacccccaauggcagcaucccgaacgauaaaccuuuucagaaugugaaccgcaucaccuacggggcuugucccagauaugugaagcagaauacacuuaaacuggccacgggaaugcggaacgucccugaaaagcaaacccgcggcauuuucggggcgaucgccggauuuauugagaauggcugggaggggaugauggacggaugguacggcuucagacaccagaacuccgaaggcacagggcaggcugccgaucucaaaagcacccaagcugccaucaaucagauuaacggaaagcugaaucggcuuaucgagaaaacaaacgaaaaguuucaucagaucgagaaggaguucucugaaguggagggccgcauucaggaccuggaaaaauauguugaggauaccaagaucgaccucugguccuacaaugccgaacugcugguggcucucgagaaccaacacacgauugaucugacagacagcgaaaugaacaaacuuuucgagagaaccaagaaacagcugcgggagaaugcggaagauauggggaacggaugcuuuaagaucuaucauaagugugacaaugccugcauuggcucuaucagaaacgggaccuacgaucacgacgucuaccgcgacgaggcucucaauaaccgguuccagauuaaaggcguggaacugaaguccggauauaaagauuggguucuuuggaucagcuuugccaucuccugcuuccugcucuguauugugcugcugggcuuuaucaugugggccugccagaaggggaauauuagauguaacaucugcauuuga

SEQ ID NO: 192690 - RNA, 1701 nt, Artificial Sequence; identical to SEQ ID NO: 192634
  derived and/or modified CDS sequence (opt5) from hemagglutinin__InfluenzaA__ABC67471

SEQ ID NO: 192691 - RNA, 1701 nt, Artificial Sequence
  derived and/or modified CDS sequence (opt5) from hemagglutinin__InfluenzaA__ABC67554
augaagaccaucauugcccugagcuacauccucugccugguguucgcucagaaacuucccggcaacgacaauuccacagccacgcugugucucgggcaccaugcggucccuaacggaaccauuguuaagacaaucaccaaugaucaaauugaggugacaaacgcuaccgaacuggugcagucuagcuccacaggcgggaucugcgacucuccgcaccagauccuugauggagagaauuguacccugauugacgcccuccugggcgauccccagugcgacggguuucaaaacaaaaagugggaucuguucgucgaaagaagcaaagccuauuccaauuguuacccuuaugacgugcccgauuacgcuucucuccggagccugaucgccuccagcggaacgcuugaguuuaacaaugaaucuuucaacuggaccggcguuacacagaauggcaccuccagcgcuugcaagcgcagaucuaacuccagcuuuuucucucggcugaauuggcucacacaucugaaguuuaaauauccugcccuuaacgugaccaugcccaauaacgaggaguucgacaagcuguacauuuggggaguccaccauccugggacggauaacgaccagaucucccucuaugcgcaggccagcggccgcauuacaguguccaccaaaagaucucaacagacaguuaucccgaauauugggagccggccccgcgugagagauaucccuucccggaucagcauuuacuggaccaucgucaagcccggagacauucugcugaucaacucuaccggcaaucucauugcuccucgcggguacuuuaaaaucagauccggaaagagcucuaucaugcggagcgacgcccccauugugaaguguaacuccgaaugcaucacaccgaauggcucuauuccuaacgauaaacccuuccagaaugugaaccgcaucacguauggcgcuuguccuagauacgucaagcagaauacccugaaacuugccacagggaugcggaacguucccgagaagcaaacccgcggaauuuuuggcgcgaucgccggguucaucgaaaauggaugggagggcaugguggacgggugguauggauuuagacaccagaacagcgagggcauuggccaggcugccgaucugaaauccacacaagcugccaucgaccagauuaaugggaagcucaaccggcugaucggaaaaaccaaugaaaaguuccaccagauugagaaggaguucagcgaaguggaaggcagaauccaggaucuugagaaauacgucgaggacacgaagauugaucuguggucuuauaacgccgaacuccugguggcucuggagaaccaacauacaaucgaccucaccgauuccgaaaugaauaaacuguuugagcgcaccaagaaacagcuucgggaaaacgcggaggacauggggaauggaugcuucaagaucuaccacaagugugauaacgccugcauuggcagcaucagaaaugggacauaugaccaugacguuuaccgcgaugaggcucugaacaaucgguuucagauuaaaggcguggaacucaagucuggauacaaagacuggauccuguggauuuccuucgccaucagcugcuuucuucugugugucgcccuccugggcuucaucaugugggcuugccagaaggggaacauuagauguaauaucugcauuuga

SEQ ID NO: 192692 - RNA, 1701 nt, Artificial Sequence
  derived and/or modified CDS sequence (opt5) from hemagglutinin__InfluenzaA__ABC67565
augaagaccaucauugcccugagcuacaucuucugccucgugcugggccaggacuuucccgggaacgauaauuccacagcuacgcuuugucugggacaccaugccgucccuaacggcacccucguuaaaacaauuaccaaugaccaaaucgaggugacaaacgcgaccgaacuggugcagucuagcuccacagggaagauuugcaauaacccgcacagaauccuugauggaaucgacuguacccugauugaugcucuccugggcgacccccauugcgauggguuccagaaugagacgugggaccuguuugucgaacggucuaaagccuucagcaacuguuauccuuacgaugugcccgacuaugccucccuccgcucucugguugcuagcuccggaacccuugaguuuaucaaugaaggcuucacauggaccggcgugacacagaacgggggaagcaaugccugcaagagaggcccugauauuggguuuuucucucggcugaacuggcucuacaaauccggaagcaccuaucccguccugaaugugacgaugccuaacaaugacaacuuugauaaacuuuacaucuggggcguucaccauccgucuacagaccaagagcagaccucccuguaugugcaggcuagcgggcgcgucacagugucuaccaagagaucccagcaaaccauuauccccaacauuggaagccggccuugggugcgcggccucuccucuagaaucagcaucuacuggacaauugucaagcccggcgacauccugguuauuaauuccaacgggaaucugaucgccccucggggauacuucaagaugcgcacgggcaaaagcucuauuaugagauccgaugcgcccaucgggaccuguaucagcgagugcauuacaccgaacggaucuaucccuaaugacaagcccuuucagaacgugaauaaaauuaccuauggcgccuguccuaaguacgugaagcagaacacacucaaacuggcuaccgggaugcggaauguccccgaaaagcagacgcgcggacuuuucggcgccaucgcuggcuuuauugagaacgggugggaaggaaugaucgauggcugguauggguucagacaccaaaauagcgagggaacaggccaggccgcggaccugaaauccacccaggccgcuaucgaucaaauuaacgggaagcucaaucgggugaucgagaaaaccaacgaaaaguuccaccagauugagaaagaauuuucugagguugaaggccgcauccaggaccuggagaaguacguggaggauacaaagauugaccuuuggagcuauaaugccgaacugcucgucgcucuggagaaccagcauaccaucgaucugacagacuccgaaaugaacaaacucuucgagaagacgagacggcaacugagagaaaaugccgaggauaugggaaacggcugcuuuaaaauuuaccacaagugugacaaugccugcaucgggagcauccgcaacggaaccuaugaccaugauguguaccgggacgaggcucuuaauaacagauuccagauuaaaggcguugaacugaagucuggguacaaggauuggauccucuggauuuccuuugcgaucagcugcuuccugcuuugugugguccugcucggauuuauuaugugggccugccagaaaggcaauauccgcuguaacaucugcauuuga

SEQ ID NO: 192693 - RNA, 1701 nt, Artificial Sequence
  derived and/or modified CDS sequence (opt5) from hemagglutinin__InfluenzaA__ABC67576
augaagaccaucauugcccugagcuacauccucugccugguguucgcucagaaacuucccggcaacgacaauuccauggccacacugugucucgggcaccaugcggucccuaacggaacgcugguuaagaccauuacaaaugaucaaaucgaggugaccaacgcuacagaacuugugcagucuagcuccaccggcagaauuugcgacucuccgcaccggauccuggauggggagaauuguacacucaucgacgcccugcugggagauccccauugcgacggcuuucagaacaaagaaugggaucucuucgucgagcgcagcaaggccuauuccaauuguuacccuuaugacgugcccgauuacgcuucucugagaagccuuguugccuccagcgggacccuggaauuuaacaaugagucuuucaacuggacgggaguggcucagaauggcaccuccuaugccugcaaacggcgcagcauuaaguccuuuuucucuagacucaacuggcugcaccaacuuaaguacaaauauccugcgcugaaugucacaaugcccaacaaugacgaguuugauaagcucuacaucuggggcgugcaucacccuagcaccgacucugaucagacaucccuguacgcccaggcuagcgggcggguuaccguguccacgaaacgcucucagcaaacagucauuccgaacaucggaagcagacccugggugcggggcguguccagccgcauuucuaucuauuggaccauugucaagccuggggacauccugcucaucaacuccacaggaaaucugauugcccccagaggcuacuucaaaauccggagcgggaagucuagcauuaugcgcuccgacgcuccuaucggaaaguguaacucugaaugcauuacccccaauggcagcaucccgaacgauaaaccuuuucagaauguuaacagaaucaccuauggcgccuguccccgguacgugaagcagaauacacuuaaacuggcgacggggaugcgcaacgugccugagaagcagaccagaggaauuuucggcgccaucgcuggguuuauugaaaauggaugggagggcauggucgacgggugguauggauuccggcaccaaaacuccgagggcacaggccaggccgcugaucucaaaagcacccaggccgccaucaaucaaauuaacgggaagcugaauagacuuaucgagaaaacaaacgaaaaguuucaucagaucgaaaaggaguucucugaaguggagggacgcauucaggaccuggagaaauacguugaagauaccaagaucgaccucugguccuauaaugcugagcugcugguggcgcucgaaaaccagcacacgauugaucugacagacagcgagaugaacaaacuuuucgaacggaccagaaagcaacugcgcgagaaugccgaggauaugggcaacgggugcuuuaaaaucuaccauaagugugacaaugcuugcauuggaucuauccggaacggcaccuacgaucacgacgucuauagagacgaagcccucaauaaccgcuuccagauuaaggggguggagcugaaauccggcuacaaggauuggauccuuuggaucagcuuugccauuuccugcuuccugcucuguguugugcugcugggauuuaucaugugggcuugccagaaaggcaauauucgguguaacaucugcauuuga

SEQ ID NO: 192694 - RNA, 1701 nt, Artificial Sequence
  derived and/or modified CDS sequence (opt5) from hemagglutinin__InfluenzaA__ABC67587
augaagaccaucauugcccugagcuacauccucugccugguguucgcucagaaacuucccggcaacgacaauuccacagccacgcugugucucgggcaccaugcggucccuaacggaaccauuguuaagacaaucaccaaugaucaaauugaggugacaaacgcuaccgaacuggugcagucuagcuccacaggcgggaucugcgacucuccgcaccagauccuugauggagagaauuguacccugauugacgcccuccugggcgauccccagugcgacggguuucaaaacaaaaagugggaucuguucgucgaaagaagcaaagccuauuccaauuguuacccuuaugacgugcccgauuacgcuucucuccggagccugguugccuccagcggaacgcuugaguuuaacaaugaaucuuucaacuggaccggcgugacacagaauggcaccuccagcgcuugcaagcgcagaucuaacaauuccuuuuucagccggcugaacuggcucacacaucugaaguuuaaauauccugcccuuaaugucaccaugcccaacaacgagaaguucgacaaacuguacaucuggggagugcaccauccugggacggauaaugaccagauuucucucuaugcgcaggccuccggccgcaucacaguuagcaccaagagaucccaacagacagugauuccgaacaucgggucucggccccgcgucagagauauuccuagccggaucuccaucuacuggaccauugugaaacccggagacauccugcugauuaauagcaccggcaaccucaucgcuccucgcggguacuuuaagauuagaucuggaaaguccagcaucaugcggucugacgcccccaucggcaaauguaauagcgagugcauuacaccgaacggcuccaucccuaaugauaagcccuuccagaacgugaaucgcauuacguaugggccuugucccagauacgucaaacagaacacccugaagcuggcuacaggaaugcggaauguucccgaaaaacaaacccgcggcaucuuuggggccauugcgggauucaucgagaacggcugggaagggaugguggacggaugguauggcuuuagacaccaaaauucugagggcaucgggcaggccgcugaucuuaagagcacacaggccgcuauuaaccagaucaauggaaaacucaaccggcugauuggcaagaccaacgagaaguuccaccagaucgaaaaagaguucuccgaaguggaggggcgcauucaggaccuugaaaaguacgucgaggauacgaaaaucgaccuguggagcuauaaugccgagcuccugguggcccuggaaaaccaacauacaauugaucucaccgacucugagaugaauaagcuguuugaaagaaccaaaaagcagcuucgggagaacgcugaagauaugggaaauggcugcuucaagaucuaccacaaaugugacaacgcgugcaucggguccauuagaaauggcacauaugaucaugacguuuaccgcgacgaggcccugaacaaucgguuucagaucaagggaguggagcucaaaagcggcuacaaggauuggauucuguggaucucuuucgcuauuuccugcuuucuucugugugucgcccuccugggguucaucaugugggccugccagaaaggaaacaucagauguaauauuugcaucuga

SEQ ID NO: 192695 - RNA, 1701 nt, Artificial Sequence; identical to SEQ ID NO: 192315
  derived and/or modified CDS sequence (opt5) from hemagglutinin__InfluenzaA__ABC67598

SEQ ID NO: 192696 - RNA, 1701 nt, Artificial Sequence; identical to SEQ ID NO: 192634
  derived and/or modified CDS sequence (opt5) from hemagglutinin__InfluenzaA__ABC67609

SEQ ID NO: 192697 - RNA, 1701 nt, Artificial Sequence; identical to SEQ ID NO: 192634
  derived and/or modified CDS sequence (opt5) from hemagglutinin__InfluenzaA__ABC67620

SEQ ID NO: 192698 - RNA, 1701 nt, Artificial Sequence; identical to SEQ ID NO: 192634
  derived and/or modified CDS sequence (opt5) from hemagglutinin__InfluenzaA__ABC67631

SEQ ID NO: 192699 - RNA, 1701 nt, Artificial Sequence; identical to SEQ ID NO: 192634
  derived and/or modified CDS sequence (opt5) from hemagglutinin__InfluenzaA__ABC67642

SEQ ID NO: 192700 - RNA, 1701 nt, Artificial Sequence
  derived and/or modified CDS sequence (opt5) from hemagglutinin__InfluenzaA__ABC67653
augaagaccaucauugcccugagcuacauccucugccugguguucgcucagaaacuucccggcaacgacaauuccacagccacgcugugucucgggcaccaugcggucccuaacggaacccugguuaagacaauuaccaaugaucaaaucgaggugacaaacgcuaccgaacuugugcagucuagcuccacaggcagaauuugcgacucuccgcaccagauccuggauggggagaauuguacccucaucgacgcccugcugggagauccccauugcgacggcuuucagaacaaagaaugggaucucuucgucgagcggagcaaggccuauuccaauuguuacccuuaugacgugcccgauuacguuucucugcgcagccuuguggcuuccagcgggacgcuggaauuuaacaaugagucuuucaacuggaccggagucgcccaaaauggcacauccagcgcuugcaaaagacggucugacaaguccuuuuucagccgccucaacuggcugcaccagcuuaaguauaaauacccugcccugaaugugaccaugcccaacaaugagaaguuugauaaacucuauauuuggggcguucaucacccugggacagacucugaucagaucucccuguacgcgcaggccagcggaagagugaccgucuccacgaagcggucucaacagacagugauuccgaacaucggcagccgccccugggugagaggggucuccagccggauuucuaucuacuggaccauuguuaaaccuggagacauccugcucaucaacuccacaggcaaucugauugcuccccgcggguauuucaagaucagaagcggaaagucuagcauuaugcgguccgacgccccuaucggcaaauguaacucugaaugcauuacccccaauggcagcaucccgaacgauaagccuuuucagaaugugaaccgcaucaccuacggggcuugucccagauaugugaaacagaauacacuuaagcuggccacgggaaugcggaacgucccugagaaacaaacccgcggcauuuucggggcgaucgccggauuuauugaaaauggcugggaggggaugauggacggaugguacggcuucagacaccagaacuccgagggcacagggcaggcugccgaucucaagagcacccaagcugccaucaaucagauuaacggaaaacugaaucggcuuaucgaaaagacaaacgagaaguuucaucagaucgaaaaagaguucucugaaguggagggccgcauucaggaccuggagaaguauguugaagauaccaaaaucgaccucugguccuacaaugccgagcugcugguggcucucgaaaaccaacacacgauugaucugacagacagcgagaugaacaaacuuuucgaaagaaccaagaagcagcugcgggagaaugcggaggauauggggaacggaugcuuuaagaucuaucauaaaugugacaaugccugcauuggcucuaucagaaacgggaccuacgaucacgacgucuaccgcgacgaagcucucaauaaccgguuccagauuaagggcguggagcugaaauccggauauaaggauuggguucuuuggaucagcuuugccaucuccugcuuccugcucugugugguccugcugggcuuuauuaugugggccugccagaaagggaauaucagauguaacauuugcaucuga

SEQ ID NO: 192701 - RNA, 1701 nt, Artificial Sequence
  derived and/or modified CDS sequence (opt5) from hemagglutinin__InfluenzaA__ABC67697
augaagaccaucauugcccugagcuacauccucugccugguguucgcucagaaacuucccggcaacgacaauuccacagccacgcugugucucgggcaccaugcggucccuaacggaaccauuguuaagacaaucaccaaugaucaaauugaggugacaaacgcuaccgaacuggugcagucuagcuccacaggcgagaucugcgacucuccgcaccagauccuugauggggaaaauuguacccugauugacgcccuccugggagauccccagugcgacggcuuucaaaacaaagagugggaucuguucgucgaaagaagcaaggccuauuccaauuguuacccuuaugacgugcccgauuacgcuucucuccggagccugguugccuccagcgggacgcuugaguuuaacaaugagucuuucaacuggaccggagugacacagaauggcaccuccagcgcuugcaaacgcagaucuaacaauuccuuuuucagccggcugaacuggcucacacaucugaaguuuaaguauccugcccuuaaugucaccaugcccaacaacgaaaaauucgacaagcuguacaucuggggcgugcaccauccugggacggauaaugaccagauuuuucucuaugcgcaggccucuggacgcaucacaguuuccaccaaaagaagccaacagacagugauuccgaacaucggcucccggccccgcgucagaaauauuccuucucggaucagcaucuacuggaccauugugaagcccggggauauccugcugauuaacuccaccggaaaucucaucgcuccucgcggcuacuucaaaauuagaagcgggaagucuuccaucaugcggagcgacgcccccaucggaaaguguaacucugagugcauuacaccgaauggcagcaucccuaacgacaaacccuuucagaaugugaaccgcauuacguauggcgcuuguccuagauacgucaagcagaauacccugaaacuugccacagggaugcggaacguucccgaaaagcaaacccgcggaaucuucggcgcgauugccggguuuaucgagaauggaugggagggcaugguggaugggugguauggauucagacaccagaacuccgaaggcaucggccaggcugccgaccugaaaucuacacaagcugccauuaaucagaucaacgggaagcucaaccggcugauuggaaaaaccaaugagaaguuccaccagaucgaaaaggaguuuagcgaaguggagggccgcauucaggaucuugagaaauacgucgaagacacgaagaucgaucugugguccuauaacgccgagcuccugguggcucuggaaaaucaacauacaauugaccucaccgauagcgagaugaacaaacuguucgaaagaaccaagaaacagcuucgggagaaugcggaggacauggggaacggaugcuuuaagaucuaccacaagugugauaaugccugcaucggcucuauuagaaacgggacauaugaccaugauguuuaccgcgacgaagcucugaauaaccgguuccagaucaaaggcguggagcucaaguccggauacaaagacuggauucuguggaucagcuuugccauuucuugcuuccuucugugugucgcccuccugggcuuuaucaugugggcuugccagaaggggaauaucagauguaacauuugcaucuga

SEQ ID NO: 192702 - RNA, 1701 nt, Artificial Sequence
  derived and/or modified CDS sequence (opt5) from hemagglutinin__InfluenzaA__ABC67708
augaagaccaucauugcccugagcuacauccucugccugguguucgcucagaaacuucccggcaacgacaauuccacagccacgcugugucucgggcaccaugcggucccuaacggaaccauuguuaagacaaucaccaaugaucaaauugaggugacaaacgcuaccgaacuggugcagucuagcuccacaggcgggaucugcgacucuccgcaccagauccuugauggagagaauuguacccugauugacgcccuccugggcgauccccagugcgacggguuucaaaacaaaaagugggaucuguucgucgaaagaagcaaagccuauuccaauuguuacccuuaugacgugcccgauuacgcuucucuccggagccugguugccuccagcggaacgcuugaguuuaacaaugaaucuuucaacuggaccggcgugacacagaauggcaccuccagcgcuugcaagcgcagaucuaacaauuccuuuuucagccggcugaacuggcucacacaucugaaguuuaaauauccugcccuuaaugucaccaugcccaacaacgagaaguucgacaaacuguacaucuggggagugcaccauccugggacggauaaugaccagauuuuucucuaugcgcaggccucuggccgcaucacaguuuccaccaagagaagccaacagacagugauuccgaacaucgggucccggccccgcgucagaaauauuccuucucggaucagcaucuacuggaccauugugaaacccggagauauccugcugauuaacuccaccggcaaucucaucgcuccucgcggguacuucaagauuagaagcggaaagucuuccaucaugcggagcgacgcccccaucggcaaauguaacucugagugcauuacaccgaauggcagcaucccuaacgacaagcccuuucagaaugugaaccgcauuacguauggggcuuguccuagauacgucaaacagaauacccugaaacuugccacaggaaugcggaacguucccgaaaagcaaacccgcggcaucuucggggcgauugccggauuuaucgagaauggcugggaagggaugguggauggaugguauggcuucagacaccagaacuccgagggcaucgggcaggcugccgaccugaagucuacacaagcugccauuaaucagaucaacggaaaacucaaccggcugauuggcaagaccaaugagaaguuccaccagaucgaaaaagaguuuagcgaaguggaggggcgcauucaggaucuugaaaaguacgucgaggacacgaaaaucgaucugugguccuauaacgccgagcuccugguggcucuggaaaaucaacauacaauugaccucaccgauagcgagaugaacaagcuguucgaaagaaccaaaaagcagcuucgggagaaugcggaagacaugggaaacggcugcuuuaagaucuaccacaaaugugauaaugccugcaucgggucuauuagaaacggcacauaugaccaugauguuuaccgcgacgaggcucugaauaaccgguuccagaucaagggaguggagcucaaauccggcuacaaggacuggauucuguggaucagcuuugccauuucuugcuuccuucugugugucgcccuccugggguuuaucaugugggcuugccagaaaggaaauaucagauguaacauuugcaucuga

SEQ ID NO: 192703 - RNA, 1701 nt, Artificial Sequence; identical to SEQ ID NO: 192702
  derived and/or modified CDS sequence (opt5) from hemagglutinin__InfluenzaA__ABC67719

SEQ ID NO: 192704 - RNA, 1701 nt, Artificial Sequence; identical to SEQ ID NO: 192702
  derived and/or modified CDS sequence (opt5) from hemagglutinin__InfluenzaA__ABC67733

SEQ ID NO: 192705 - RNA, 1701 nt, Artificial Sequence
  derived and/or modified CDS sequence (opt5) from hemagglutinin__InfluenzaA__ABC67806
augaagaccaucauugcccugagcuacauccucugccugguguucgcucagaaacuucccggcaacgacaauuccacagccacgcugugucucgggcaccaugcggucccuaacggaaccauuguuaagacaaucaccaaugaucaaauugaggugacaaacgcuaccgaacuggugcagucuagcuccacaggcgggaucugcgacucuccgcaccagauccuugauggagagaauuguacccugauugacgcccuccugggcgauccccagugcgacggguuucaaaacaaaaagugggaucuguucgucgaaagaagcaaagccuauuccaauuguuacccuuaugacgugcccgauuacgcuucucuccggagccugaucgccuccagcggaacgcuugaguuuaacaaugaaucuuucaacuggaccggcguuacacagaauggcaccuccagcgcuugcaagcgcagaucuaacuccagcuuuuucucucggcugaauuggcucacacaucugaaguuuaaauauccugcccuuaacgugaccaugcccaauaacgaggaguucgacaagcuguacauuuggggaguccaccauccugggacguauaacgaucagaucucccucuacgcgcaggccagcggccgcauuacaguguccaccaaaagaucucaacagacaguuaucccgaauauugggagccggccccgcgugagagacaucccuucccggaucagcauuuacuggaccaucgucaagcccggagauauucugcugaucaacucuaccggcaaucucauugcuccucgcggguauuuuaaaaucagauccggaaagagcucuaucaugcggagcgacgcccccauuggcaaguguaacuccgaaugcaucacaccgaauggcucuauuccuaacgacaaacccuuccagaaugugaaccgcaucacguacggggcuuguccuagauaugugaagcagaauacccugaaacuugccacaggaaugcggaacguccccgagaagcaaacccgcggcauuuuuggggcgaucgccggauucaucgaaaauggcugggaggggaugguugauggaugguacggcuuuagacaccagaacagcgagggcauugggcaggcugccgaccugaaauccacacaagcugccaucgaucagauuaauggaaagcucaaccggcugaucggcaaaaccaaugaaaaguuccaccagauugagaaggaguucagcgaaguggaagggagaauccaggaccuugagaaauauguggaggauacgaagauugaccuguggucuuacaacgccgaacuccuggucgcucuggagaaccaacauacaaucgaucucaccgacuccgaaaugaauaaacuguuugagcgcaccaagaaacagcuucgggaaaacgcggaggauaugggaaauggcugcuucaagaucuaucacaagugugacaacgccugcauugggagcaucagaaauggcacauacgaucaugacguguaccgcgacgaggcucugaacaaucgguuucagauuaaaggaguugaacucaagucuggcuauaaagauuggauccuguggauuuccuucgccaucagcugcuuucuucuguguguggcccuccugggguucaucaugugggcuugccagaagggaaacauuagauguaauaucugcauuuga

SEQ ID NO: 192706 - RNA, 1701 nt, Artificial Sequence; identical to SEQ ID NO: 192588
  derived and/or modified CDS sequence (opt5) from hemagglutinin__InfluenzaA__ABC67817

SEQ ID NO: 192707 - RNA, 1701 nt, Artificial Sequence; identical to SEQ ID NO: 192702
  derived and/or modified CDS sequence (opt5) from hemagglutinin__InfluenzaA__ABC67828

SEQ ID NO: 192708 - RNA, 1701 nt, Artificial Sequence; identical to SEQ ID NO: 192566
  derived and/or modified CDS sequence (opt5) from hemagglutinin__InfluenzaA__ABC67839

SEQ ID NO: 192709 - RNA, 1701 nt, Artificial Sequence
  derived and/or modified CDS sequence (opt5) from hemagglutinin__InfluenzaA__ABC67850
augaagaccaucauugcccugagcuacauccucugccugguguucgcucagaaacuucccggcaacgacaauuccacagccacgcugugucucgggcaccaugcggucccuaacggaacccugguuaagacaauuaccaaugaucaaaucgaggugacaaacgcuaccgaacuugugcagucuagcuccacaggcagaauuugcgacucuccgcaccagauccuggauggggagaauuguacccucaucgacgcccugcugggagauccccauugcgacggcuuucagaacaaagaaugggaucucuucgucgagcggagcaaggccuauuccaauuguuacccuuaugacgugcccgauuacguuucucugcgcagccuuguggcuuccagcgggacgcuggaauuuaacaaugagucuuucaacuggaccggagucgcccaaaauggcacauccagcgcuugcaaaagacggucugacaaguccuuuuucagccgccucaacuggcugcaccagcuuaaguauaaauacccugcccugaaugugaccaugcccaacaaugagaaguuugauaaacucuauauuuggggcguucaucacccugggacagacucugaucagaucucccuguacgcgcaggccagcggaagagugaccgucuccacgaagcggucucaacagacagugauuccgaacaucggcagccgccccugggcuagagggguguccagccggauuucuauccacuggaccauugucaaaccuggagacauccugcucaucaacuccacaggcaaucugauugcccccagaggguacuucaagaucagaagcggaaagucuagcauuaugcgguccgacgcuccuaucggcaaauguaacucugaaugcauuacccccaauggcagcaucccgaacgauaagccuuuucagaauguuaaccgcaucaccuauggggccugucccagauacgugaaacagaauacacuuaagcuggcgacgggaaugcggaacgugccugagaaacaaacccgcggcauuuucggggccaucgcuggauuuauugaaaauggcugggaggggaugauggacggaugguauggcuucagacaucagaacuccgagggcacagggcaggccgcugaucucaagagcacccaagccgccaucaaucagauuaacggaaaacugaaucggcuuaucgaaaagacaaacgagaaguuucaccagaucgaaaaagaguucucugaagucgagggccgcauucaggaccuggagaaguacguggaagauaccaaaaucgaccucugguccuauaaugcugagcugcugguugcgcucgaaaaccaacauacgauugaucugacagacagcgagaugaacaaacuuuucgaacgcaccaagaagcagcugcgggagaaugccgaggauauggggaacggaugcuuuaagaucuaccacaaaugugacaaugcuugcauuggcucuaucagaaacgggaccuaugaucacgacguguaccgcgacgaagcccucaauaaccgguuccagauuaagggcgucgagcugaaauccggauacaaggauugggugcuuuggaucagcuuugccaucuccugcuuccugcucuguauuguucugcugggcuuuaucaugugggcuugccagaaagggaauauuagauguaacaucugcauuuga

SEQ ID NO: 192710 - RNA, 1701 nt, Artificial Sequence; identical to SEQ ID NO: 192566
  derived and/or modified CDS sequence (opt5) from hemagglutinin__InfluenzaA__ABC67861

SEQ ID NO: 192711 - RNA, 1701 nt, Artificial Sequence; identical to SEQ ID NO: 192634
  derived and/or modified CDS sequence (opt5) from hemagglutinin__InfluenzaA__ABC67883

SEQ ID NO: 192712 - RNA, 1701 nt, Artificial Sequence
  derived and/or modified CDS sequence (opt5) from hemagglutinin__InfluenzaA__ABC67894
augaagaccaucauugcccugagcuacauccucugccugguguucgcucagaaacuucccggcaacgacaauuccacagccacgcugugucucgggcaccaugcggucccuaacggaacccugguuaagacaauuaccaaugaucaaaucgaggugacaaacgcuaccgaacuugugcagucuagcuccacaggcagaauuugcgacucuccgcaccagauccuggauggggagaauuguacccucaucgacgcccugcugggagauccccauugcgacggcuuucagaacaaagaaugggaucucuucgucgagcggagcaaggccuauuccaauuguuacccuuaugacgugcccgauuacguuucucugcgcagccuuguggcuuccagcgggacgcuggaauuuaacaaugagucuuucaacuggaccggagucgcccaaaauggcacauccagcgcuugcaaaagacggucugacaaguccuuuuucagcaagcucaacuggcugcaccagcuuaaauauaaguacccugcccugaaugugaccaugcccaacaaugagaaauuugauaagcucuauauuuggggcguucaucacccugggacagacucugaucagaucucccuguacgcgcaggccagcggacgcgugaccgucuccacgaaaagaucucaacagacagugauuccgaacaucggcagccggcccugggugcgcggggucuccagcagaauuucuaucuacuggaccauuguuaagccuggagacauccugcucaucaacuccacaggcaaucugauugcuccccggggguauuucaagauccgcagcggaaaaucuagcauuaugagauccgacgccccuaucggcaaguguaacucugaaugcauuacccccaauggcagcaucccgaacgauaaaccuuuucagaaugugaaccggaucaccuacggggcuuguccccgcuaugugaagcagaauacacuuaaacuggccacgggaaugagaaacgucccugagaagcaaacccggggcauuuucggggcgaucgccggauuuauugaaaauggcugggaggggaugauggacggaugguacggcuuccgccaccagaacuccgagggcacagggcaggcugccgaucucaaaagcacccaagcugccaucaaucagauuaacggaaagcugaauagacuuaucgaaaagacaaacgagaaauuucaucagaucgaaaaggaguucucugaaguggagggccggauucaggaccuggagaaauauguugaagauaccaagaucgaccucugguccuacaaugccgagcugcugguggcucucgaaaaccaacacacgauugaucugacagacagcgagaugaacaaacuuuucgaaagaaccaagaagcagcugcgcgagaaugcggaggauauggggaacggaugcuuuaaaaucuaucauaagugugacaaugccugcauuggcucuauccggaacgggaccuacgaucacgacgucuacagagacgaagcucucaauaaccgcuuccagauuaaaggcguggagcugaaguccggauauaaagauuggguucuuuggaucagcuuugccaucuccugcuuccugcucuguauugugcugcugggcuuuaucaugugggccugccagaaggggaauauucgguguaacaucugcauuuga

SEQ ID NO: 192713 - RNA, 1701 nt, Artificial Sequence; identical to SEQ ID NO: 192634
  derived and/or modified CDS sequence (opt5) from hemagglutinin__InfluenzaA__ABC67967

SEQ ID NO: 192714 - RNA, 1701 nt, Artificial Sequence; identical to SEQ ID NO: 192634
  derived and/or modified CDS sequence (opt5) from hemagglutinin__InfluenzaA__ABC67978

SEQ ID NO: 192715 - RNA, 1701 nt, Artificial Sequence
  derived and/or modified CDS sequence (opt5) from hemagglutinin__InfluenzaA__ABC67989
augaagaccaucauugcccugagcuacauccucugccugguguucgcucagaaacuucccggcaacgacaauuccacagccacgcugugucucgggcaccaugcggucccuaacggaacccugguuaagacaauuaccaaugaucaaaucgaggugacaaacgcuaccgaacuugugcagucuagcuccacaggcagaauuugcgacucuccgcaccagauccuggauggggagaauuguacccucaucgacgcccugcugggagauccccauugcgacggcuuucagaacaaagaaugggaucucuucgucgagcggagcaaggccuauuccaauuguuacccuuaugacgugcccgauuacguuucucugcgcagccuuguggcuuccagcgggacgcuggaauuuaacaaugagucuuucaacuggaccggagucgcccaaaauggcacauccagcgcuugcaaaagacggucugacaaguccuuuuucagccgccucaacuggcugcaccagcuuaaguauaaauacccugcccugaaggugaccaugcccaauaacgagaaauuugauaagcucuauauuuggggcguucaucacccugggacagacucugaucagaucucccuguacgcgcaggccagcggaagagugaccgucuccacgaaacggucucaacagacagugauuccgaauaucggcagccgccccugggugagaggggucuccagccggauuucuaucuacuggaccauuguuaagccuggagacauccugcucaucaacuccacaggcaaccugauugcuccccgcggguauuucaagaucagaagcggaaaaucuagcauuaugcgguccgacgccccuaucggcaaguguaauucugaaugcauuacccccaacggcagcaucccgaaugauaaaccuuuucagaacgugaaucgcaucaccuacggggcuugucccagauaugugaagcagaacacacuuaaacuggccacgggaaugcggaaugucccugagaagcaaacccgcggcauuuucggggcgaucgccggauuuauugaaaacggcugggaggggaugauggacggaugguacggcuucagacaccaaaauuccgagggcacagggcaggcugccgaucucaaaagcacccaggcugccaucaaccagauuaauggaaagcugaaccggcuuaucgaaaagacaaaugagaaauuucaucagaucgaaaaggaguucucugaaguggagggccgcauucaggaccuggagaaauauguugaagauaccaagaucgaccucugguccuacaacgccgagcugcugguggcucucgaaaaucaacacacgauugaucugacagacagcgagaugaacaaacuuuucgaaagaaccaagaagcagcugcgggagaacgcggaggauauggggaauggaugcuuuaaaaucuaucauaagugugacaacgucugcauuggcucuaucagaaaugggaccuacgaucacgacguguaccgcgacgaagcccucaacaaucgguuccagauuaaaggcguugagcugaaguccggauauaaagauugggugcuuuggaucagcuuugcuaucuccugcuuccugcucuguauuguccugcugggcuuuaucaugugggccugccagaaggggaacauuagauguaauaucugcauuuga

SEQ ID NO: 192716 - RNA, 1701 nt, Artificial Sequence; identical to SEQ ID NO: 192689
  derived and/or modified CDS sequence (opt5) from hemagglutinin__InfluenzaA__ABC68000

SEQ ID NO: 192717 - RNA, 1701 nt, Artificial Sequence
  derived and/or modified CDS sequence (opt5) from hemagglutinin__InfluenzaA__ABC68049
augaagaccaucauugcccugagcuacauccucugccugguguucgcucagaaacuucccggcaacgacaauuccacagccacgcugugucucgggcaccaugcggucccuaacggaacccugguuaagacaauuaccgaugaccaaaucgaggugacaaaugcuaccgaacuugugcagucuagcuccacaggcagaauuugcgauucuccgcaccagauccuggacggggagaacuguacccucaucgaugcccugcugggagacccccauugcgauggcuuucagaauaaagaaugggaccucuucgucgagcggagcaaggccuauuccaacuguuacccuuaugaugugcccgacuacguuucucugcgcagccuuguggcuuccagcgggacgcuggaauuuaauaacgagucuuucaauuggaccggagucgcccaaaacggcacauccagcgcuugcaaaagacggucugauaaguccuuuuucagccgccucaauuggcugcaccagcuuaaguauaaauacccugcccugaacgugaccaugcccaauaacgagaaguuugacaaacucuauguuuggggcgugcaucacccugggacagauucugaccagauuucccuguacgcgcaggccagcggaagagucaccguguccacgaagcggucucaacagacagugaucccgaauauuggcagccgccccugggucagagggguuuccagcaaaaucucuauuuacuggaccaucgugaagccuggagacauucugcucaucaacuccacaggcaaccugaucgcuccccggggguauuucaagauucgcagcggaaaaucuagcaucaugagauccgaugccccuauuggcaaguguaauucugaaugcaucacccccaacggcagcauuccgaaugacaaaccuuuucagaacgugaaucggaucaccuacggggcuuguccccgcuaugucaagcagaacacacuuaaacuggccacgggaaugagaaaugugccugagaagcaaacccggggcaucuucggggcgauugccggauuuaucgaaaacggcugggaggggaugauggauggaugguacggcuuccgccaccaaaauuccgagggcacagggcaggcugccgaccucaaaagcacccaggcugccauuaaccagaucaauggaaagcugaacagacuuauugaaaagacaaaugagaaauuucaucagaucgaaaaggaguucucugaaguugagggccggauccaggaucuggagaaauauguggaagacaccaagauugaucucugguccuacaacgccgagcugcuggucgcucucgaaaaucaacacacgaucgaccugacagauagcgagaugaacaaacuuuucgaaagaaccaagaagcagcugcgcgagaacgcggaggacauggggaauggaugcuuuaaaauuuaucauaagugugauaacgccugcaucggcucuauucggaaugggaccuacgaccacgacguguacagagaugaagcucucaacaaucgcuuccagaucaaaggcguugagcugaaguccggauauaaagacugggugcuuuggauuagcuuugccaucuccugcuuccugcucuguaucguccugcugggcuuuauuaugugggccugccagaaggggaacauccgguguaauauuugcaucuga

SEQ ID NO: 192718 - RNA, 1701 nt, Artificial Sequence; identical to SEQ ID NO: 192634
  derived and/or modified CDS sequence (opt5) from hemagglutinin__InfluenzaA__ABC68060

SEQ ID NO: 192719 - RNA, 1701 nt, Artificial Sequence
  derived and/or modified CDS sequence (opt5) from hemagglutinin__InfluenzaA__ABC68071
augaagaccaucauugcccugagcuacauccucugccugguguucgcucagaaacuucccggcaacgacaauuccacagccacgcugugucucgggcaccaugcggucccuaacggaacccugguuaagacaauuaccaaugaucaaaucgaggugacaaacgcuaccgaacuugugcagucuagcuccacaggcagaauuugcgacucuccgcaccagauccuggauggggagaauuguacccucaucgacgcccugcugggagauccccauugcgacggcuuucagaacaaagaaugggaucucuucgucgagcggagcaaggccuauuccaauuguuacccuuaugacgugcccgauuacguuucucugcgcagccuuguggcuuccagcgggacgcuggaauuuaacaaugagucuuucaacuggaccggagucgcccaaaauggcacauccagcgcuugcaaaagacggucugacaaguccuuuuucagccgccucaacuggcugcaccagcuuaaguauaaauacccugcccugaaugugaccaugcccaacaaugagaaguuugauaaacucuauauuuggggcguucaucacccugggacagacucugaucagaucucccuguacgcgcaggccagcggaagagugaccgucuccacgaagcggucucaacagacagugauuccgaacaucggcagccgccccugggugagaggggucuccagccggauuucuaucuacuggaccauuguuaaaccuggagacauccugcucaucaacuccacaggcaaucugauugcuccccgcggguauuucaagaucagaagcggaaagucuagcauuaugcgguccgacgccccuaucggcaaauguaacucugaaugcauuacccccaauggcagcaucccgaacgauaagccuuuucagaaugugaaccgcaucaccuacggggcuugucccagauaugugaaacagaauacacuuaagcuggccacgggaaugcggaacgucccugagaaacaaacccgcggcauuuucggggcgaucgccggauuuauugaaaauggcugggaggggaugauggacggaugguacggcuucagacaccagaacuccgagggcacagggcaggcugccgaucucaagagcacccaagcugccaucaaucagauuaacggaaaacugaaucggcuuaucgaaaagacaaacgagaaguuucaucagaucgaaaaagaguucucugaaguggagggccgcauucaggaccuggagaaguauguugaagauaccaaaaucgaccucugguccuacaaugccgagcugcugguggcucucgaaaaccaacacacgauugaucugacagacagcgagaugaacaaacuuuucgaaagaaccaagaagcagcugcgggagaaugcggaggauauggggaacggaugcuuuaagaucuaucauaaaugugacaaugccugcauuggcucuaucagaaacgggaccuacgaucacaaugucuaccgcgacgaagcucucaacaaucgguuccagauuaagggcguggagcugaaauccggauauaaggacuggguucuuuggaucagcuuugccaucuccugcuuccugcucuguauugugcugcugggcuuuaucaugugggccugccagaaagggaacauuagauguaauaucugcauuuga

SEQ ID NO: 192720 - RNA, 1701 nt, Artificial Sequence; identical to SEQ ID NO: 192702
  derived and/or modified CDS sequence (opt5) from hemagglutinin__InfluenzaA__ABC68082

SEQ ID NO: 192721 - RNA, 1701 nt, Artificial Sequence
  derived and/or modified CDS sequence (opt5) from hemagglutinin__InfluenzaA__ABC68093
augaagaccaucauugcccugagcuacauccucugccugguguucgcucagaaacuucccggcaacgacaauuccacagccacgcugugucucgggcaccaugcggucccuaacggaacccugguuaagacaauuaccaaugaucaaaucgaggugacaaacgcuaccgaacuugugcagucuagcuccacaucuagaauuugcgacagcccgcaccagauccuggauggcgagaauuguacccucaucgacgcccugcugggggauccccauugcgacggauuucagaacaaagaaugggaucucuucgucgagcgguccaaggccuauucuaauuguuacccuuaugacgugcccgauuacguuagccugcgcucccuuguggcuagcucuggcacgcuggaauuuaacaaugaguccuucaacuggaccggggucgcccaaaauggaacaagcucugcuugcaaaagacgguccgacaagagcuuuuucucucgccucaacuggcugcaccagcuuaaguauaaauacccugcccugaaugugaccaugcccaacaaugagaaguuugauaaacucuauauuuggggcguucaucacccuggcacagacuccgaucagaucagccuguacgcgcaggccuccgggagagugaccgucucuacgaagcggagccaacagacagugauuccgaacaucggaucccgccccugggugagaggcgucagcucuauuaucuccauuuacuggaccaucguuaaaccuggggacauccugcucauuaacagcacaggaaaucugaucgcuccccggggcuauuucaagauucgcucuggaaagagcuccaucaugagaucugacgccccuauugggaaauguaacagcgaaugcaucacccccaauggcuccaucccgaacggcaagccuuuucagaaugugaaccggauuaccuacggggcuuguccccgcuaugugaaacagaauacacuuaagcuggccacgggaaugagaaacgucccugagaaacaaacccggggcaucuucggggcgauugccggauuuaucgaaaauggcugggaggggaugauggauggaugguacggcuuccgccaccagaacagcgagggcacagggcaggcugccgaccucaagucuacccaagcugccauuaaucagaucaacggaaaacugaauagacuuaucgaaaagacaaacgagaaguuucaucagauugaaaaagaguucuccgaaguggagggccggauccaggaucuggagaaguauguugaagacaccaaaauugaucucuggagcuacaaugccgagcugcugguggcucucgaaaaccaacacacgaucgaccugacagauucugagaugaacaaacuuuucgaaagaaccaagaagcagcugcgcgagaaugcggaggacauggggaacggaugcuuuaagauuuaucauaaaugugauaaugccugcaucggcuccauucggaacgggaccuacgaccacgaugucuacagagacgaagcucucaauaaccgcuuccagaucaagggcguggagcugaaaagcggauauaaggacuggauccuuuggauuuccuuugccacaucuugcuuccugcucuguaucguucugcugggcuuuauuaugugggccugccagaaagggaauauccgguguaacauuugcaucuga

SEQ ID NO: 192722 - RNA, 1701 nt, Artificial Sequence
  derived and/or modified CDS sequence (opt5) from hemagglutinin__InfluenzaA__ABC68222
augaagaccaucauugcccugagcuacauccucugccugguguucgcucagaaacuucccggcaacgacaauuccacagccacgcugugucucgggcaccaugcggucccuaacggaacccugguuaagacaauuaccaaugaucaaaucgaggugacaaacgcuaccgaacuugugcagucuagcuccacaggcgggauuugcgacucuccgcaccagauccuggauggagagaauuguacccucaucgacgcccugcugggcgauccccauugcgacggguuucagaacaaagaaugggaucucuucgucgagagaagcaaggccuauuccaauuguuacccuuaugacgugcccgauuacgcuucucugcggagccuuguugccuccagcggaacgcuggaauuuaacaaugagucuuucaacuggaccggcguggcucaaaauggcacauccagcgccugcaaacgcagaucuaacaaguccuuuuucagccggcucaauuggcugcaccagcuuaaguauaaauacccugcgcugaacgucaccaugcccaauaacgagaaguuugacaaacucuauauuuggggagugcaucacccuucuacagauuccgaccagaucagccuguacgcccaggcuccggggcgcguuaccguguccacgaagagaucucaacagacagucauucccaacaucggcagccggccuugggugcgcgggguguccagcagaauuucuaucuacuggaccauugucaaacccggagauauccugcucaucaauuguacaggcaaccugauugccccucggggguauuucaagauccgcuccggaaagagcucuauuaugagaagcgacgcuuccaucggcaaaugcaauucugaauguauuacccccaacggcagcaucccgaaugacaagccuuuucagaacguuaaucggaucaccuacggggccugcccccgcuaugugaaacagaacacacuuaagcuggcgacgggaaugagaaaugugccugagaaacaaacccggggcauuuucggggccaucgcuggauuuauugaaaacggcugggaggggauggucgauggaugguacggcuuccgccaccaaaauuccgagggcacagggcaggccgcugaccucaagagcacccaggccgccaucaaccagauuaauggaaaacugaacagacuuaucgaaaagacaaaugagaaguuucaucagaucgaaaaagaguucucugaaguggagggccggauucaggaucuggagaaguauguugaagacaccaaaaucgaucucugguccuacaacgcugagcugcugguggcgcucgaaaaccaacacacgauugaccugacagauagcgagaugaauaaacuuuucgaaagaaccaagaagcagcugcgcgagaacgccgaggacauggggaauggauguuuuaagaucuaucauaaaugcgauaacgcuugcauuggcucuauccggaaugggaccuacgaccacgaugucuacagagacgaagcccucaacaaucgcuuccagauuaagggcguggagcugaaauccggauauaaggacuggauccuuuggaucagcuuugccauuuccuguuuccugcucugcguugugcugcugggcuuuaucaugugggcuugucagaaagggaacauucggugcaauaucuguauuuga

SEQ ID NO: 192723 - RNA, 1701 nt, Artificial Sequence; identical to SEQ ID NO: 192514
  derived and/or modified CDS sequence (opt5) from hemagglutinin__InfluenzaA__ABC68233

SEQ ID NO: 192724 - RNA, 1707 nt, Artificial Sequence
  derived and/or modified CDS sequence (opt5) from hemagglutinin__InfluenzaA__ABC72655
auggagaagaucgugcuucucuucgccauugucagccugguuaaauccgaccagaucugcauuggcuaccacgcuaacaauucuaccgaacaaguggauacaaucauggagaagaacgugacggucacccaugcccaggacauucuugaaaagacacacaaugggaagcugugugaucucgacggagugaaaccccugauccuuagagauugcagcguugcgggcuggcugcucgggaacccuaugugugacgaguuuaucaaugugccggaaugguccuauauugucgagaagcccaacccugcuaaugaucugugcuaccccggagacuucaacgauuaugaggaacugaagcaucuccugucucggaucaaucacuuugagaaaauucagaucauuccuaagagcuccuggucuagccaugaagccuccgugggcguuagcucugugugucccuaccaggggaaauccagcuucuuucgcaacgucguguggcuuaucaagaaaaauucuaccuauccuacaauuaagagauccuacaacaauaccaaccaagaggaccugcucgugcuguggggaauccaccacccgaaugaugccgcugagcagacaaagcuguaucagaaccccaccacguacaucagcgucggcaccucuacacugaaccagcggcucguuccucgcauugccaccagauccaaagugaauggccaaagcgggcggauggaguucuuuuggacaauccugaagcccaacgacgcuauuaauuucgaauccaacggaaauuuuaucgccccugaauacgcguauaaaauugugaagaaaggcgauucuaccaucaugaaaagcgagcuggaauacgggaacugcaauacgaaaugucagacacccaugggagccaucaacuccagcaugccguuccauaauauucacccucucaccaucggcgagugccccaaguaugucaagucuaaccgccuggugcuugcuacagggcugagaaauuccccucagcgggagaaacgcagaaagaaacggggacucuuuggcgccauugcuggcuucaucgaagggggauggcagggcaugguugacgggugguacggauaucaucacagcaacgagcaaggcucuggguacgccgcggacaaggaaagcacccagaaagccauugauggagugaccaauaaggucaacuccaucaucgacaagaugaauacacaguuugaggcugugggccgcgaguucaacaaccuggaaagacggauugagaaucuuaacaaaaagauggaagauggcuuccuggacguuuggacguauaaugccgagcuccuggugcugauggaaaacgagcgcacccucgauuuucacgacucuaaugucaaaaaccuguacgauaaggugagacuucaacugcgggacaaugcuaaagaacucgggaacggauguuucgaguuuuaccauaagugcgauaaugaguguauggaaagcgucagaaacggcacauaugacuacccccaguauuccgaggaagcccgccugaagcgggaggagaucagcggggugaaacuugaaucuauuggaaucuaccagauucuguccaucuauagcaccguugccucuucccucgcucuggcgauuaugguggccggccugagccucuggaugugcuccaaugggucucugcagugcagaaucuguaucuga

SEQ ID NO: 192725 - RNA, 1701 nt, Artificial Sequence; identical to SEQ ID NO: 192315
  derived and/or modified CDS sequence (opt5) from hemagglutinin__InfluenzaA__ABC84400

SEQ ID NO: 192726 - RNA, 1701 nt, Artificial Sequence; identical to SEQ ID NO: 192524
  derived and/or modified CDS sequence (opt5) from hemagglutinin__InfluenzaA__ABC84411

SEQ ID NO: 192727 - RNA, 1701 nt, Artificial Sequence
  derived and/or modified CDS sequence (opt5) from hemagglutinin__InfluenzaA__ABC84433
augaagaccaucauugcccugagcuacauccucugccugguguucgcucagaaacuucccggcaacgacaauagaacagccacgcugugucucgggcaccaugcggucccuaacggaaccauuguuaagacaaucaccaaugaucaaauugaggugacaaacgcuaccgaacuggugcaguccucuagcacaggcgggaucugcgacuccccgcaccagauccuugauggagagaauuguacccugauugacgcccuccugggcgauccccagugcgacggguuucaaaacaaaaagugggaucuguucgucgaacggucuaaagccuauagcaauuguuacccuuaugacgugcccgauuacgcuucccuccgcucucugguugccagcuccggaacgcuugaguuuaacaaugaaucuuucaacuggaccggcgugacacagaauggcaccucuuccgcuugcaagagacggagcaacaauagcuuuuucucccgccugaacuggcucacacaucugaaguuuaaauauccugcccuuaaugucaccaugcccaacaacgagaaguucgacaaacuguacaucuggggagugcaccauccugggacgaauaacgaucagauuagccucuaugcgcaggccucuggcagaaucacaguuuccaccaagcggagccaacagacagugauuccgaauaucgggucccgccccagaguccgggacauuccuucucgcaucagcaucuacuggaccauugugaaacccggagauauccugcugauuaacuccaccggcaaucucaucgcuccuagaggguacuuuaagauucggagcggaaagucuuccaucaugcgcagcgacgcccccaucggcaaauguaacucugagugcauuacaccgaauggcagcaucccuaacgacaagcccuuccagaaugugaacagaauuacguauggggcuuguccucgguacgucaaacagaauacccugaaacuugccacaggaaugcgcaacguucccgaaaagcaaaccagaggcaucuuuggggcgauugccggauucaucgagaauggcugggaagggaugguggauggaugguauggcuuucggcaccagaacuccgagggcaucgggcaggcugccgaccugaagucuacacaagcugccauuaaucagaucaacggaaaacucaacagacugauuggcaagaccaaugagaaguuccaccagaucgaaaaagaguucagcgaaguggaggggcgcauucaggaucuugaaaaguacgucgaggacacgaaaaucgaucugugguccuauaacgccgagcuccugguggcucuggaaaaucaacauacaauugaccucaccgauagcgagaugaacaagcuguuugaacggaccaaaaagcagcuuagagagaaugcggaagacaugggaaacggcugcuucaagaucuaccacaaaugugauaaugccugcaucgggucuauucgcaacggcacauaugaccaugauguuuaccgggacgaggcucugaauaacagauuucagaucaagggaguggagcucaaauccggcuacaaggacuggauucuguggaucagcuucgccauuucuugcuuucuucugugugucgcccuccugggguucaucaugugggcuugccagaaaggaaauauccgcuguaacauuugcaucuga

SEQ ID NO: 192728 - RNA, 1701 nt, Artificial Sequence; identical to SEQ ID NO: 192634
  derived and/or modified CDS sequence (opt5) from hemagglutinin__InfluenzaA__ABC84444

SEQ ID NO: 192729 - RNA, 1701 nt, Artificial Sequence; identical to SEQ ID NO: 192705
  derived and/or modified CDS sequence (opt5) from hemagglutinin__InfluenzaA__ABC84498

SEQ ID NO: 192730 - RNA, 1701 nt, Artificial Sequence; identical to SEQ ID NO: 192705
  derived and/or modified CDS sequence (opt5) from hemagglutinin__InfluenzaA__ABC84509

SEQ ID NO: 192731 - RNA, 1701 nt, Artificial Sequence
  derived and/or modified CDS sequence (opt5) from hemagglutinin__InfluenzaA__ABC84520
augaagaccaucauugcccugagcuacauccucugccugguguucgcucagaaacuucccggcaacgacaauuccacagccacgcugugucucgggcaccaugcggucccuaacggaaccauuguuaagacaaucaccaaugaucaaauugaggugacaaacgcuaccgaacuggugcagucuagcuccacaggcgggaucugcgacucuccgcaccagauccuugauggagagaauuguacccugauugacgcccuccugggcgauccccagugcgacggguuucaaaacaaaaagugggaucuguucgucgaaagaagcaaagccuauuccaauuguuacccuuaugacgugcccgauuacgcuucucuccggagccugguugccuccagcggaacgcuugaguuuaacaaugaaucuuucaacuggaccggcgugacacagaauggcaccuccagcgcuugcaagcgcagaucuaacaauuccuuuuucagccggcugaacuggcucacacaucugaaguuuaaauauccugcccuuaaugucaccaugcccaacaacgagaaguucgacaaacuguacaucuggggagugcaccauccugggacggauaaugaccagauuuuucucuaugcgcaggccucuggccgcaucacaguuuccaccaagagaagccaacagacagugauuccgaacaucgggucccggccccgcgucagagauauuccuucucggaucagcaucuacuggaccauugugaaacccggagacauccugcugauuaauuccaccggcaaccucaucgcuccucgcggguacuucaagauuagaagcggaaagucuuccaucaugcggagcgacgcccccaucggcaaauguaauucugagugcauuacaccgaacggcagcaucccuaaugauaagcccuuucagaacgugaaucgcauuacguauggggcuuguccuagauacgucaaacagaacacccugaaacuugccacaggaaugcggaauguucccgaaaagcaaacccgcggcaucuucggggcgauugccggauuuaucgagaacggcugggaagggaugguggacggaugguauggcuucagacaccaaaauuccgagggcaucgggcaggcugccgaucugaagucuacacaggcugccauuaaccagaucaauggaaaacucaaccggcugauuggcaagaccaacgagaaguuccaccagaucgaaaaagaguuuagcgaaguggaggggcgcauucaggaccuugaaaaguacgucgaggauacgaaaaucgaccugugguccuauaaugccgagcuccugguggcucuggaaaaccaacauacaauugaucucaccgacagcgagaugaauaagcuguucgaaagaaccaaaaagcagcuucgggagaacgcggaagauaugggaaauggcugcuuuaagaucuaccacaaaugugacaacgccugcaucgggucuauuagaaauggcacauaugaucaugacguuuaccgcgacgaggcucugaacaaucgguuccagaucaagggaguggagcucaaauccggcuacaaggauuggauucuguggaucagcuuugccauuucuugcuuccuucugugugucgcccuccugggguuuaucaugugggcuugccagaaaggaaacaucagauguaauauuugcaucuga

SEQ ID NO: 192732 - RNA, 1701 nt, Artificial Sequence
  derived and/or modified CDS sequence (opt5) from hemagglutinin__InfluenzaA__ABC84531
augaagaccaucauugcccugagcuacaucuucugccucguguuugcucagaaacugcccggcaacgacaauuccacagccacgcuuugucuggggcaccaugcggucccuaacggaacccucguuaagacaauuaccaaugaucaaaucgaggugacaaacgcuaccgaacuggugcagucuagcuccacaggcagaauuugcgacucuccgcaccggauccuugaugggaaaaauuguacccugaucgacgcccuccugggagauccccauugcgacggcuuccagaacgagaagugggaucuguuugucgaacgcagcaaagccuucuccaauuguuauccuuacgacgugcccgauuaugcuucucucagaagccugguugccuccagcgggacgcuugaguuuauuaacgaaggauucaauuggaccggcgugacacagucuggcggguccuacgcuugcaagcggggaagcgucaacuccuuuuucucucgccugaauuggcucuaugagagcgagucuaaguacccugcccugaacgugaccaugcccaauaacggcagauuugacaaacuuuauaucuggggaguucaccauccuuccacagauaaggaacaaaccaaucuguacgugcgggcggccgggcgcgucacggugagcacaaaaagaucccagcagaccgugauuccgaacaucggcucucggcccuggguccgcgggcucagcuccagaauuagcaucuacuggacaauuguuaagccuggagacauccugcugaucaacucuaccggcaaucucauugcuccccggggcuauuucaaaauccgcaccgggaaguccagcauuaugagaucugaugccccuaucggaacauguagcuccgagugcauuacgcccaacggcucuaucccgaaugacaagccuuuucagaacgugaauaaaaucaccuacggggcuuguccccgguaugugaagcaaaacacacugaaacuugccaccggaaugcgcaaugucccugaaaagcagacaagaggcauuuucggggcgaucgccggauuuauugagaacggcugggagggcaugguggacgggugguacggauuccggcaccagaauagcgaaggcaccgggcaggcugccgaucugaaauccacgcaagcugccaucgaccagauuaacggaaagcucaauagacugaucgagaaaacaaacgaaaaguuccaccagaucgagaaggaauuuagcgagguugagggccgcauucaagaucuugaaaaauauguggaggacaccaagaucgaucuguggucuuacaaugccgaacuccuggucgcucuggagaaccagcauaccauugaccucacagauuccgaaaugaauaaacuguucgagaagacccggaaacagcuuagagagaacgcggaagacauggggaacggcugcuuuaagaucuaucacaagugugauaaugccugcauuggaagcauccgcaacggcacauacgaccaugauguguaccgggacgaggcucugaauaacagauuccagauuaaagggguugaacucaagucuggauauaaagacuggauccuguggaucuccuuugccauuagcugcuuccuucugugugugguccuccugggcuuuaucaugugggccugccaaaaggggaauauucgcuguaacaucugcauuuga

SEQ ID NO: 192733 - RNA, 1701 nt, Artificial Sequence; identical to SEQ ID NO: 192722
  derived and/or modified CDS sequence (opt5) from hemagglutinin__InfluenzaA__ABC84560

SEQ ID NO: 192734 - RNA, 1701 nt, Artificial Sequence
  derived and/or modified CDS sequence (opt5) from hemagglutinin__InfluenzaA__ABC84571
augaagaccaucauugcccugagcuacauccucugccugguguucgcucagaaacuucccggcaacgacaauuccacagccacgcugugucucgggcaccaugcggucccuaacggaacccugguuaagacaauuaccaaugaucaaaucgaggugacaaacgcuaccgaacuugugcagucuagcuccacaggcgggauuugcgacucuccgcaccagaucaucgauggagagaauuguacccugauugacgcccuccugggcgauccccauugcgacggguuucagaacaaagaaugggaucuguucgucgagagaagcaaggccuauuccaauuguuacccuuaugacgugcccgauuacgcuucucuccggagccugguugccuccagcggaacgcuugaauuuaacaaugagucuuucaacuggaccggcguggcucaaaauggcacauccagcgccugcaaacgcagaucuaacaaguccuuuuucagccggcugaauuggcuccaccagcugaaguauaaauacccugcgcuuaacgucaccaugcccaauaacgagaaguuugacaaacuguauaucuggggagugcaucacccuucuacagauuccgaccagauuagccucuacgcccaggcuccggggcgcguuaccguguccacgaagagaucucaacagacagucauccccaacauuggcagccggccuugggugcgcgggguguccagcagaaucucuauuuacuggaccaucgucaaacccggagauauccugcugauuaauuguacaggcaaccucaucgccccucggggguauuucaagauucgcuccggaaagagcucuaucaugagaagcgacgcuuccauuggcaaaugcaauucugaauguaucacccccaacggcagcaucccgaaugacaagccuuuucagaacguuaaucggauuaccuacggggccugcccccgcuaugugaaacagaacacacugaagcuggcgacgggaaugagaaaugugccugagaaacaaacccggggcaucuucggggccauugcuggauuuaucgaaaacggcugggaggggauggucgauggaugguacggcuuccgccaccaaaauuccgagggcacagggcaggccgcugaccuuaagagcacccaggccgccauuaaccagaucaauggaaaacucaacagacugaucgaaaagacaaaugagaaguuucaucagauugaaaaagaguucucugaaguggagggccggauccaggaucuugagaaguauguugaagacaccaaaauugaucugugguccuacaacgcugagcuccugguggcgcuggaaaaccaacacacgaucgaccucacagauagcgagaugaauaagcuguucgaaagaaccaaaaagcagcuucgcgagaacgccgaggacauggggaauggauguuuuaagauuuaucauaaaugcgauaacgcuugcaucggcucuauucggaaugggaccuacgaccacgaugucuacagagacgaagcccugaacaaucgcuuccagaucaagggcguggagcucaaauccggauauaaggacuggauccuguggauuagcuuugccaucuccuguuuccuucugugcguugugcuccugggcuuuauuaugugggcuugucagaaagggaacauccggugcaauauuuguaucuga

SEQ ID NO: 192735 - RNA, 1701 nt, Artificial Sequence; identical to SEQ ID NO: 192722
  derived and/or modified CDS sequence (opt5) from hemagglutinin__InfluenzaA__ABC85754

SEQ ID NO: 192736 - RNA, 1701 nt, Artificial Sequence; identical to SEQ ID NO: 192702
  derived and/or modified CDS sequence (opt5) from hemagglutinin__InfluenzaA__ABC85765

SEQ ID NO: 192737 - RNA, 1701 nt, Artificial Sequence
  derived and/or modified CDS sequence (opt5) from hemagglutinin__InfluenzaA__ABC85776
augaagaccaucauugcccugagcuacauccucugccugguguucgcucagaaacuucccggcaacgacaauuccacagccacgcugugucucgggcaccaugcggucccuaacggaacccugguuaagacaauuaccaaugaucaaaucgaggugacaaacgcuaccgaacuugugcagucuagcuccacaggcgggauuugcgacucuccgcaccagauccuggauggagagaauuguacccucaucgacgcccugcugggcgauccccauugcgacggguuucagaacaaagaaugggaucucuucgucgagagaagcaaggccuauuccaauuguuacccuuaugacgugcccgauuacgcuucucugcggagccuuguugccuccagcggaacgcuggaauuuaacaaugagucuuucaacuggaccggcguggcucaaaauggcacauccagcgccugcaaacgcagaucuaacaaguccuuuuucagccggcucaauuggcugcaccagcuuaaguauaaauacccugcgcugaacgucaccaugcccaauaacgagaaguuugacaaacucuauauuuggggagugcaucacccuucuacagauuccgaccagaucagccuguacgcccaggcuccggggcgcguuaccguguccacgaagagaucucaacagacagucauucccaacaucggcagccggccuugggugcgcgggguguccagcagaauuucuaucuacuggaccauugucaaacccggagauauccugcucaucaauuucacaggcaaccugauugccccucggggguauuuuaagauccgcuccggaaagagcucuauuaugagaagcgacgcuuccaucggcaaauguaauucugaaugcauuacccccaacggcagcaucccgaaugacaagccuuuccagaacguuaaucggaucaccuacggggccuguccccgcuaugugaaacagaacacacuuaagcuggcgacgggaaugagaaaugugccugagaaacaaacccggggcauuuuuggggccaucgcuggauucauugaaaacggcugggaggggauggucgauggaugguacggcuuucgccaccaaaauuccgagggcacagggcaggccgcugaccucaagagcacccaggccgccaucaaccagauuaauggaaaacugaacagacuuaucgaaaagacaaaugagaaguuccaucagaucgaaaaagaguucucugaaguggagggccggauucaggaucuggagaaguauguugaagacaccaaaaucgaucucugguccuacaacgcugagcugcugguggcgcucgaaaaccaacacacgauugaccugacagauagcgagaugaauaaacuuuuugaaagaaccaagaagcagcugcgcgagaacgccgaggacauggggaauggaugcuucaagaucuaucauaaaugugauaacgcuugcauuggcucuauccggaaugggaccuacgaccacgaugucuacagagacgaagcccucaacaaucgcuuucagauuaagggcguggagcugaaauccggauauaaggacuggauccuuuggaucagcuucgccauuuccugcuuucugcucuguguugugcugcugggcuucaucaugugggcuugccagaaagggaacauucgguguaauaucugcauuuga

SEQ ID NO: 192738 - RNA, 1701 nt, Artificial Sequence; identical to SEQ ID NO: 192722
  derived and/or modified CDS sequence (opt5) from hemagglutinin__InfluenzaA__ABC85787

SEQ ID NO: 192739 - RNA, 1701 nt, Artificial Sequence; identical to SEQ ID NO: 192705
  derived and/or modified CDS sequence (opt5) from hemagglutinin__InfluenzaA__ABC85798

SEQ ID NO: 192740 - RNA, 1701 nt, Artificial Sequence; identical to SEQ ID NO: 192702
  derived and/or modified CDS sequence (opt5) from hemagglutinin__InfluenzaA__ABC85820

SEQ ID NO: 192741 - RNA, 1701 nt, Artificial Sequence; identical to SEQ ID NO: 192702
  derived and/or modified CDS sequence (opt5) from hemagglutinin__InfluenzaA__ABC85831

SEQ ID NO: 192742 - RNA, 1701 nt, Artificial Sequence; identical to SEQ ID NO: 192705
  derived and/or modified CDS sequence (opt5) from hemagglutinin__InfluenzaA__ABC85842

SEQ ID NO: 192743 - RNA, 1701 nt, Artificial Sequence; identical to SEQ ID NO: 192702
  derived and/or modified CDS sequence (opt5) from hemagglutinin__InfluenzaA__ABC85853

SEQ ID NO: 192744 - RNA, 1701 nt, Artificial Sequence; identical to SEQ ID NO: 192702
  derived and/or modified CDS sequence (opt5) from hemagglutinin__InfluenzaA__ABC85864

SEQ ID NO: 192745 - RNA, 1701 nt, Artificial Sequence; identical to SEQ ID NO: 192705
  derived and/or modified CDS sequence (opt5) from hemagglutinin__InfluenzaA__ABC85886

SEQ ID NO: 192746 - RNA, 1701 nt, Artificial Sequence; identical to SEQ ID NO: 192634
  derived and/or modified CDS sequence (opt5) from hemagglutinin__InfluenzaA__ABC85908

SEQ ID NO: 192747 - RNA, 1701 nt, Artificial Sequence
  derived and/or modified CDS sequence (opt5) from hemagglutinin__InfluenzaA__ABC85919
augaagaccaucauugcccugagcuacauccucugccugguguucgcucagaaacuucccggcaacgacaauuccacagccacgcugugucucgggcaccaugcggucccuaacggaacccugguuaagacaauuaccaaugaucaaaucgaggugacaaacgcuaccgaacuugugcagucuagcuccacaggcagaauuugcgacucuccgcaccagauccuggauggggagaauuguacccucaucgacgcccugcugggagauccccauugcgacggcuuucagaacaaagaaugggaucucuucgucgagcggagcaaggccuauuccaauuguuacccuuaugacgugcccgauuacguuucucugcgcagccuuguggcuuccagcgggacgcuggaauuuaacaaugagucuuucaacuggaccggagucgcccaaaauggcacauccagcgcuugcaaaagacggucugacaaguccuuuuucagccgccucaacuggcugcaccagcuuaaguauaaauacccugcccugaaugugaccaugcccaacaaugagaaguuugauaaacucuauauuuggggcguucaucacccugggacagacucugaucagaucucccuguacgcgcaggccagcggaagagugaccgucuccacgaagcggucucaacagacagugauuccgaacaucggcagccgccccugggugagaggggucuccagccggauuucuaucuacuggaccauuguuaaaccuggagacauccugcucaucaacuccacaggcaaucugauugcuccccgcggguauuucaagaucagaagcggaaagucuagcauuaugcgguccgacgccccuaucggcaaauguaacucugaaugcauuacccccaauggcagcaucccgaacgauaagccuuuucagaaugugaaccgcaucaccuacggggcuugucccagauaugugaaacagaauacacuuaagcuggccacgggaaugcggaacgucccugagaaacaaacccgcggcauuuucggggcgaucgccggauuuauugaaaauggcugggaggggaugauggacggaugguacggcuucagacaccagaacuccgagggcacagggcaggcugccgaucucaagagcacccaagcugccaucaaucagauuaacggaaaacugaaucggcuuaucgaaaagacaaacgagaaguuucaucagaucgaaaaagaguucucugaaguggagggccgcauucaggaccuggagaaguauguugaagauaccaaaaucgaccucugguccuacaaugccgagcugcugguggcucucgaaaaccaacacacgauugaucugacagacagcgagaugaacaaacuuuucgaaagaaccaagaagcagcugcgggagaaugcggaggauauggggaacggaugcuuuaagaucuaucauaaaugugacaaugccugcauuggcucuaucagaaacgggaccuacgaucacgacgucuaccgcgacgaagcucucaauaaccgguuccagauuaagggcguggagcugaaauccggauauaaggauuggguucuuuggaucagcuuugccaucuccugcuuccugcucuguauugugcugaugggcuuuaucaugugggccugccagaaagggaauauuagauguaacaucugcauuuga

SEQ ID NO: 192748 - RNA, 1701 nt, Artificial Sequence; identical to SEQ ID NO: 192634
  derived and/or modified CDS sequence (opt5) from hemagglutinin__InfluenzaA__ABC85930

SEQ ID NO: 192749 - RNA, 1701 nt, Artificial Sequence; identical to SEQ ID NO: 192683
  derived and/or modified CDS sequence (opt5) from hemagglutinin__InfluenzaA__ABC85941

SEQ ID NO: 192750 - RNA, 1701 nt, Artificial Sequence
  derived and/or modified CDS sequence (opt5) from hemagglutinin__InfluenzaA__ABC85952
augaagaccaucauugcccugagcuacauccucugccugguguucgcucagaaacuucccggcaacgacaauuccacagccacgcugugucucgggcaccaugcggucccuaacggaacccugguuaagacaauuaccaaugaucaaaucgaggugacaaacgcuaccgaacuugugcagucuagcuccacaggcagaauuugcgacucuccgcaccagauccuggauggggagaauuguacccucaucgacgcccugcugggagauccccauugcgacggcuuucagaacaaaaagugggaucucuucgucgaacggagcaaagccuauuccaauuguuacccuuaugacgugcccgauuacguuucucugcgcagccuuguggcuuccagcgggacgcuggaguuuaacaaugaaucuuucaacuggaccggagucgcccaaaauggcacauccagcgcuugcaagagacggucugacaaguccuuuuucagccgccucaacuggcugcaccagcuuaaauauaaguacccugcccugaaugugaccaugcccaacaaugagaaauuugauaagcucuauauuuggggcguucaucacccugggacagacucugaucagaucucccuguacgcgcaggccagcggaagagugaccgucuccacgaaacggucucaacagacagugauuccgaacaucggcagccgccccugggugagaggggucuccagccggauuucuaucuacuggaccauuguuaagccuggagacauccugcucaucaacuccacaggcaaucugauugcuccccgcggguauuucaagaucagaagcggaaaaucuagcauuaugcgguccgacgccccuaucggcaaguguaacucugagugcauuacccccaauggcagcaucccgaacgauaaaccuuuucagaaugugaaccgcaucaccuacggggcuugucccagauaugugaagcagaauacacuuaaacuggccacgggaaugcggaacgucccugaaaagcaaacccgcggcauuuucggggcgaucgccggauuuauugagaauggcugggaagggaugauggacggaugguacggcuucagacaccauaacuccgagggcacagggcaggcugccgaucucaaaagcacccaggcugccaucaaucaaauuaacggaaagcugaaucggcuuaucgagaagacaaacgaaaaauuucaccagaucgagaaggaguucucugaaguggaaggccgcauucaggaccuggagaaauauguugaggauaccaagaucgaccucugguccuacaaugccgaacugcugguggcucucgagaaccagcauacgauugaucugacagacagcgaaaugaacaaacuuuucgagagaaccaagaagcaacugcgggaaaaugcggaggauauggggaacggaugcuuuaaaaucuaucacaagugugacaaugccugcauuggcucuaucagaaacgggaccuacgaucacgacgucuaccgcgacgaggcucucaauaaccgguuccagauuaaaggcguggaacugaaguccggauauaaagauuggguucuuuggaucagcuuugccaucuccugcuuccugcucuguauugugcugcugggcuuuaucaugugggccugccagaaggggaauauuagauguaacaucugcauuuga

SEQ ID NO: 192751 - RNA, 1701 nt, Artificial Sequence; identical to SEQ ID NO: 192634
  derived and/or modified CDS sequence (opt5) from hemagglutinin__InfluenzaA__ABC85974

SEQ ID NO: 192752 - RNA, 1701 nt, Artificial Sequence; identical to SEQ ID NO: 192634
  derived and/or modified CDS sequence (opt5) from hemagglutinin__InfluenzaA__ABC85985

SEQ ID NO: 192753 - RNA, 1701 nt, Artificial Sequence
  derived and/or modified CDS sequence (opt5) from hemagglutinin__InfluenzaA__ABC85996
augaagaccaucauugcccugagcuacauccucugccugguguucgcucagaaacuucccggcaacgacaauuccacagccacgcugugucucgggcaccaugcggucccuaacggaaccauuguuaagacaaucaccaaugaucaaauugaggugacaaacgcuaccgaacuggugcagucuagcuccacaggcgggaucugcgacucuccgcaccagauccuugauggagagaauuguacccugauugacgcccuccugggcgauccccagugcgacggguuucaaaacaaaaagugggaucuguucgucgaaagaagcaaagccuauuccaauuguuacccuuaugacgugcccgauuacgcuucucuccggagccugguugccuccagcggaacgcuugaguuuaacaaugaaucuuucaacuggaccggcgugacacagaauggcaccuccagcgcuugcaagcgcagaucuaacaauuccuuuuucagccggcugaacuggcucacacaucugaaguuuaaauauccugcccuuaaugucaccaugcccaacaacgagaaguucgacaaacuguacaucuggggagugcaccauccugggacggauaaugaccagauuucucucuaugcgcaggccuccggccgcaucacaguuagcaccaagagaucccaacagacagugauuccgaacaucgggucucggccccgcgucagagauauuccuagccggaucuccaucuacuggaccauugugaaacccggagacauccugcugauuaauagcaccggcaaccucaucgcuccucgcggguacuuuaagauuagaucuggaaaguccagcaucaugcggucugacgcccccaucggcaaauguaauagcgagugcauuacaccgaacggcuccaucccuaaugauaagcccuuccagaacgugaaucgcauuacguauggggcuuguccuagauacgucaaacagaacacccugaagcuggccacaggaaugcggaauguucccgaaaaacaaacccgcggcaucuuuggggcgauugccggauucaucgagaacggcugggaagggaugauggacggaugguauggcuuuagacaccaaaauucugagggcaucgggcaggcugccgaucuuaagagcacacaggcugccauuaaccagaucaauggaaaacucaaccggcugauuggcaagaccaacgagaaguuccaccagaucgaaaaagaguucuccgaaguggaggggcgcauucaggaccuugaaaaguacguggaggauacgaaaaucgaccuguggagcuauaaugccgagcuccuggucgcucuggaaaaccaacauacaauugaucucaccgacucugagaugaauaagcuguuugaaagaaccaaaaagcagcuucgggagaacgcggaagauaugggaaauggcugcuucaagaucuaccacaaaugugacaacgccugcaucggguccauuagaaauggcacauaugaucaugacguguaccgcgacgaggcucugaacaaucgguuucagaucaagggaguugagcucaaaagcggcuacaaggauuggauucuguggaucucuuucgccauuuccugcuuucuucuguguguggcccuccugggguucaucaugugggcuugccagaaaggaaacaucagauguaauauuugcaucuga

SEQ ID NO: 192754 - RNA, 1701 nt, Artificial Sequence; identical to SEQ ID NO: 192315
  derived and/or modified CDS sequence (opt5) from hemagglutinin__InfluenzaA__ABC86007

SEQ ID NO: 192755 - RNA, 1701 nt, Artificial Sequence
  derived and/or modified CDS sequence (opt5) from hemagglutinin__InfluenzaA__ABC86018
augaagaccaucauugcccugagcuacauccucugccugguguucgcucagaaacuucccggcaacgacaauuccacagccacgcugugucucgggcaccaugcggucccuaacggaaccauuguuaagacaaucaccaaugaucaaauugaggugacaaacgcuaccgaacuggugcagucuagcuccacaggcgggaucugcgacucuccgcaccagauccuugauggagagaauuguaccauuaucgacgcccugcucggcgauccccagugcgacggguuucaaaacaaaaagugggaucuguucgucgaaagaagcaaagccuauuccaauuguuacccuuaugacgugcccgauuacgcuucucugcggagccucguugccuccagcggaacgcuggaguuuaacaaugaaucuuucaacuggaccggcgugacacagaauggcaccuccagcgcuugcaagcgcagaucuaacaauuccuuuuucagccggcuuaacuggcugacacaucucaaguuuaaauauccugcccugaaugucaccaugcccaacaacgagaaguucgacaaacuuuacauuuggggagugcaccauccugggacggauaaugaccagaucucucuguaugcgcaggccuccggccgcauuacaguuagcaccaagagaucccaacagacagugaucccgaacauugggucucggccccgcgucagagauaucccuagccggaucuccauuuacuggaccaucgugaaacccggagacauucuccugaucaauagcaccggcaaccugauugcuccucgcggguacuuuaagaucagaucuggaaaguccagcaucaugcggucugacgcccccauuggcaaauguaauagcgagugcaucacaccgaacggcuccauuccuaaugauaagcccuuccagaacgugaaucgcaucacguauggggcuuguccuagauacgucaaacagaacacccucaagcuggccacaggaaugcggaauguucccgaaaaacaaacccgcggcauuuuuggggcgaucgccggauucaucgagaacggcugggaagggaugguggacggaugguauggcuuuagacaccaaaauucugagggcauugggcaggcugccgaucuuaagagcacacaggcugccaucaaccagauuaauggaaaacugaaccggcucaucggcaagaccaacgagaaguuccaccagauugaaaaagaguucuccgaaguggaggggagaauccaggaccuggaaaaguacgucgaggauacgaaaauugaccuuuggagcuauaaugccgagcugcucguggcucuggaaaaccaacauacaaucgaucugaccgacucugagaugaauaagcucuuugaacgcaccaaaaagcagcugcgggagaacgcggaagauaugggaaauggcugcuucaagaucuaccacaaaugugacaacgccugcauuggguccaucagaaauggcacauaugaucaugacguuuaccgcgacgaggcucuuaacaaucgguuucagauuaagggaguggagcugaaaagcggcuacaaggauuggauccucuggauuucuuucgccaucuccugcuuucugcuuugugucgcccugcucggguucaucaugugggcuugccagaaaggaaacauuagauguaauaucugcauuuga

SEQ ID NO: 192756 - RNA, 1701 nt, Artificial Sequence; identical to SEQ ID NO: 192315
  derived and/or modified CDS sequence (opt5) from hemagglutinin__InfluenzaA__ABC86029

SEQ ID NO: 192757 - RNA, 1701 nt, Artificial Sequence; identical to SEQ ID NO: 192354
  derived and/or modified CDS sequence (opt5) from hemagglutinin__InfluenzaA__ABC86040

SEQ ID NO: 192758 - RNA, 1701 nt, Artificial Sequence; identical to SEQ ID NO: 192588
  derived and/or modified CDS sequence (opt5) from hemagglutinin__InfluenzaA__ABC86124

SEQ ID NO: 192759 - RNA, 1701 nt, Artificial Sequence; identical to SEQ ID NO: 192665
  derived and/or modified CDS sequence (opt5) from hemagglutinin__InfluenzaA__ABC86137

SEQ ID NO: 192760 - RNA, 1701 nt, Artificial Sequence
  derived and/or modified CDS sequence (opt5) from hemagglutinin__InfluenzaA__ABC97374
augaagaccaucauugcccugagcuacaucuucugccucgugcugggccaggacuuucccgggaacgauaauuccacagcuacgcuuugucugggacaccaugccgucccuaacggcacccucguuaaaacaauuaccaaugaccaaaucgaggugacaaacgcgaccgaacuggugcagucuagcuccacagggaagauuugcaauaacccgcacagaauccuugauggaaucgacuguacccugauugaugcucuccugggcgacccccauugcgauggguuccagaaugagacgugggaccuguuugucgaacggucuaaagccuucagcaacuguuauccuuacgaugugcccgacuaugccucccuccgcucucugguugcuagcuccggaacccuugaguuuaucaaugaaggcuucacauggaccggcgugacacagaacgggggaagcaaugccugcaagagaggcccugauucuggguuuuucucccggcugaacuggcucuacaaaagcggaucuaccuaucccguccugaaugugacgaugccuaacaaugacaacuuugauaaacuuuacauuuggggcguucaccauccguccacagaccaagagcagaccagccuguaugugcaggcuucugggcgcgucacaguguccaccaagagaagccagcaaaccaucauucccaacaucggaucccggccuugggugcgcggccucucuagcagaauuuccaucuacuggacaaucgucaagcccggcgacauucugguuaucaauagcaacgggaaucugauugccccucggggauacuucaagaugcgcacgggcaaaucuuccaucaugagaagcgaugcgcccauugggaccuguaucucugagugcaucacaccgaacggaagcauuccuaaugacaagcccuuucagaacgugaauaaaaucaccuauggcgccuguccuaaguacgugaagcagaacacacucaaacuggcuaccgggaugcggaauguccccgaaaagcagacgcgcggacuuuucggcgccauugcuggcuuuaucgagaacgggugggaaggaaugguggauggcugguauggguucagacaccaaaauuccgagggaacaggccaggccgcggaccugaaaucuacccaggccgcuauugaucaaaucaacgggaagcucaaucggguuaucgagaaaaccaacgaaaaguuccaccagauugagaaagaauuuagcgagguggaaggccgcauccaggaccuggagaaguacgucgaggauacaaagauugaccuuugguccuauaaugccgaacugcucguggcucuggagaaccagcauaccaucgaucugacagacagcgaaaugaacaaacucuucgagaagacgagacggcaacugagagaaaaugccgaggauaugggaaacggcugcuuucgcauuuaccacaaaugugacaaugccugcaucgggucuauucggaacggaaccuaugaccaugauguuuacagagacgaggcucuuaauaaccgcuuccagaucaagggcguggaacugaaauccggguacaaggauuggauccucuggauuagcuuugcgaucucuugcuuccugcuuugugucgugcugcucggauuuauuaugugggccugccagaagggcaauauccgguguaacauuugcaucuga

SEQ ID NO: 192761 - RNA, 1701 nt, Artificial Sequence; identical to SEQ ID NO: 192104
  derived and/or modified CDS sequence (opt5) from hemagglutinin__InfluenzaA__ABD15449

SEQ ID NO: 192762 - RNA, 1701 nt, Artificial Sequence
  derived and/or modified CDS sequence (opt5) from hemagglutinin__InfluenzaA__ABD15460
augaagaccaucauugcccugagcuacauccucugccugguguucgcucagaaacuucccggcaacgacaauuccacagccacgcugugucucgggcaccaugcggucccuaacggaaccauuguuaagacaaucaccaaugaucaaauugaggugacaaacgcuaccgaacuggugcagaucucuagcacaggcgggaucugcgacuccccguaucagauucuugauggagagaauuguacccugaucgacgcccuccugggcgauccccagugcgacggguuucaaaacaaaaagugggaucuguucgucgaaagaucuaaagccuacagcaauuguuauccuuacgacgugcccgauuaugcuucccuccggucucugguugccagcuccggaacgcuugaguuuaacaaugaaucuuucgacuggaccggcgugacacagaacggcaccucuuccgcuugcaagcgcagaagcaauaagagcuuuuucucccggcugaacuggcucacacaccugaaauacaaguauccugcccuuaaugucaccaugcccaacaaugagaaauuugauaagcuguacauuuggggagugcaucacccugggacggacagcgaucagaucucucucuacgcgcaggccuccggccgcauuacaguuagcaccaaaagaucccaacagacagugaucccgaacauugggucucggccccgcgucagagacgugagcucccggaucagcaucuauuggaccauugugaagccuggagacauccugcugauuaacucuaccggcaaucucaucgcuccccgcggguacuucaagauuagauccggaaaaagcucuaucaugcggagcgaugccccuaucggcaaguguaacuccgagugcauuacacccaauggcucuaucccgaacgacaaaccuuuucagaaugucaaccgcauuacguauggggcuugucccagauacguuaagcagaauacccugaaacuugccacaggaaugcggaacgugccugaaaagcaaacccgcggcaucuucggggcgauugccggauuuaucgagaauggcugggaagggaugguggauggaugguauggcuucagacaucagaacagcgagggcacagggcaggcugccgaccugaaauccacccaagcugccaucaaucagauuaacggaaagcucaaucggcugaucggcaagacgaacgagaaauuucaccagauugaaaaggaguucagcgaagucgaggggagaauccaggaucuugaaaaauacguggaggacacaaagauugaucuguggucuuauaaugccgagcuccugguugcucuggaaaaccaacacaccaucgaccucaccgauuccgagaugaacaaacuguucgaacgcacaaagaagcagcuucgggagaaugcggaagacaugggaaacggcugcuuuaaaauuuaccauaagugugauaaugccugcaucgggagcaucagaaacggcaccuacgaccacgacguguaucgcgaugaggcucugaauaaccgguuccagauuaaaggagucgagcucaagucuggcuacaaagacuggauccuguggauuuccuuugccaucagcugcuuccuucuguguguggcccuccugggguuuauuaugugggcuugccagaagggaaauaucagauguaacaucugcauuuga

SEQ ID NO: 192763 - RNA, 1701 nt, Artificial Sequence; identical to SEQ ID NO: 192104
  derived and/or modified CDS sequence (opt5) from hemagglutinin__InfluenzaA__ABD15471

SEQ ID NO: 192764 - RNA, 1701 nt, Artificial Sequence; identical to SEQ ID NO: 192104
  derived and/or modified CDS sequence (opt5) from hemagglutinin__InfluenzaA__ABD15482

SEQ ID NO: 192765 - RNA, 1701 nt, Artificial Sequence; identical to SEQ ID NO: 192762
  derived and/or modified CDS sequence (opt5) from hemagglutinin__InfluenzaA__ABD15493

SEQ ID NO: 192766 - RNA, 1701 nt, Artificial Sequence; identical to SEQ ID NO: 192315
  derived and/or modified CDS sequence (opt5) from hemagglutinin__InfluenzaA__ABD15526

SEQ ID NO: 192767 - RNA, 1701 nt, Artificial Sequence; identical to SEQ ID NO: 192524
  derived and/or modified CDS sequence (opt5) from hemagglutinin__InfluenzaA__ABD15537

SEQ ID NO: 192768 - RNA, 1701 nt, Artificial Sequence; identical to SEQ ID NO: 192524
  derived and/or modified CDS sequence (opt5) from hemagglutinin__InfluenzaA__ABD15548

SEQ ID NO: 192769 - RNA, 1701 nt, Artificial Sequence; identical to SEQ ID NO: 192542
  derived and/or modified CDS sequence (opt5) from hemagglutinin__InfluenzaA__ABD15559

SEQ ID NO: 192770 - RNA, 1701 nt, Artificial Sequence; identical to SEQ ID NO: 192524
  derived and/or modified CDS sequence (opt5) from hemagglutinin__InfluenzaA__ABD15570

SEQ ID NO: 192771 - RNA, 1701 nt, Artificial Sequence; identical to SEQ ID NO: 192542
  derived and/or modified CDS sequence (opt5) from hemagglutinin__InfluenzaA__ABD15581

SEQ ID NO: 192772 - RNA, 1701 nt, Artificial Sequence; identical to SEQ ID NO: 192524
  derived and/or modified CDS sequence (opt5) from hemagglutinin__InfluenzaA__ABD15592

SEQ ID NO: 192773 - RNA, 1701 nt, Artificial Sequence; identical to SEQ ID NO: 192524
  derived and/or modified CDS sequence (opt5) from hemagglutinin__InfluenzaA__ABD15603

SEQ ID NO: 192774 - RNA, 1701 nt, Artificial Sequence; identical to SEQ ID NO: 192524
  derived and/or modified CDS sequence (opt5) from hemagglutinin__InfluenzaA__ABD15614

SEQ ID NO: 192775 - RNA, 1701 nt, Artificial Sequence
  derived and/or modified CDS sequence (opt5) from hemagglutinin__InfluenzaA__ABD15625
augaagaccaucauugcccugagcuacauccucugccugguguucgcucagaaacuucccggcaacgacaauuccacagccacgcugugucucgggcaccaugcggucccuaacggaaccauuguuaagacaaucaccaaugaucaaauugaggugacaaacgcuaccgaacuggugcagucuagcuccacaggcgggaucugcgacucuccgcaccagauccuugauggagagaauuguacccugauugacgcccuccugggcgauccccagugcgacggguuucaaaacaaaaagugggaucuguucgucgaaagaagcaaagccuauuccaauuguuacccuuaugacgugcccgauuacgcuucucuccggagccugguugccuccagcggaacgcuugaguuuaacaaugaaucuuucgacuggaccggcgugacacagaacggcaccuccagcgcuugcaagcgcagaucuaauaaguccuuuuucagccggcugaacuggcucacacaucugaaauauaaguacccugcccuuaaugucaccaugcccaacaaugagaaauuugauaagcuguauaucuggggagugcaccauccugggacggacucugaucagauuucccucuacgcgcaggccagcggccgcaucacaguuuccaccaaaagaucucaacagacagugauuccgaacaucgggagccggccccgcgucagagacguguccagccagauuucuaucuacuggaccaucgugaagccuggagacauucugcugaucaacuccaccggcaaucucauugcuccccggggguauuucaagauccgcagcggaaaaucuagcauuaugagauccgaugccccuaucggcaaguguaacucugagugcaucacacccaauggcagcauuccgaacgacaaaccuuuucagaaugucaaccggaucacguacggggcuuguccccgcuauguuaagcaaaauacccugaaacuugccacaggaaugagaaacgugccugaaaagcagacccggggcauuuucggggcgaucgccggauuuauugagaauggcugggaagggaugguggauggaugguacggcuuccgccaccagaacuccgagggcacagggcaagcugccgaccugaaaagcacccaggcugccaucaaucagaucaacggaaagcucaauagacugauuggcaagacgaacgagaaauuucaccagaucgaaaaggaguucucugaagucgaggggcggauucaagaucuugugaaauauguugaagacacaaagaucgaucugugguccuacaaugccgagcuccugguggcucuggagaaccagcauaccauugaccucaccgauagcgaaaugaacaaacuguucgagagaacaaagaagcagcuucgcgaaaaugcggaggacaugggaaacggcugcuuuaaaaucuaucacaagugugauaaugccugcauugggucuauccggaacggcaccuacgaccaugacgucuacagagaugaagcucugaauaaccgcuuccagaucaaaggaguggagcucaaguccggcuauaaagacuggauucuguggaucagcuuugccauuuccugcuuccuucuguguguugcccuccugggguuuaucaugugggcuugccaaaagggaaauauucgguguaacaucugcaucuga

SEQ ID NO: 192776 - RNA, 1701 nt, Artificial Sequence; identical to SEQ ID NO: 192542
  derived and/or modified CDS sequence (opt5) from hemagglutinin__InfluenzaA__ABD15636

SEQ ID NO: 192777 - RNA, 1701 nt, Artificial Sequence; identical to SEQ ID NO: 192722
  derived and/or modified CDS sequence (opt5) from hemagglutinin__InfluenzaA__ABD15680

SEQ ID NO: 192778 - RNA, 1701 nt, Artificial Sequence
  derived and/or modified CDS sequence (opt5) from hemagglutinin__InfluenzaA__ABD15691
augaagaccaucauugcccugagcuacauccucugccugguguucgcucagaaacuucccgucaacgacaaguccacagccacgcugugucucggccaccaugcgguuccuaaugggacccuggugaaaacaauuaccaacgaucacaucgaggugacaaaugcuaccgaacuuguccaaucuagcccgacaggaagaauuugcgacucuccccaucagauccuggauggcgagaacuguacccucaucgacgcccugcugggggauccucacugcgacggauuucagaauaaggaaugggaucucuucguggagcggucuacggccuauagcaacuguuaccccuaugacguuccugauuacgcuucccugcgcucucuuguggccagcuccggcacccuggaauuuaauaacgagagcuucaauuggacaggggucgcucagaacggaaccucuuccgccugcaaaagacggagcauuaaguccuuuuucucccgccucaauuggcugcaucaacuuaaguauaaauaccccgcgcugaacgugacaaugccuaauaacgagaaguuugacaaacucuauaucuggggcguucaccacccgagcaccgauucugaccagauuucccuguacgcccaggcuagcggcagagugacggucuccacaaagcggucucagcaaaccgugauccccaauauugggagccgcccuugggugagaggagucuccagccggaucucuauuuacuggacaaucguuaaacccggcgauauccugcucauuaacuccaccgggaaccugaucgccccucgcggauauuucaagauuagaagcggcaagucuagcaucaugcgguccaaugcucccauugggaaauguaacucugaaugcaucaccccgaauggaagcaucccuaacgacaagcccuuucagaaugugaaccgcauuacauacggcgccuguccuagauaugugaaacagaauacgcuuaagcuggcgaccggcaugcggaacguccccgagaaacagacacgcgggaucuucggagccauugcuggcuuuaucgaaaaugggugggagggaaugguggacggcugguacggguucagacaucaaaacuccgagggaaccggccaggccgcugaucucaagagcacacaggccgccauuaaucaaaucaacggcaaacugaaucggcuuaucgaaaagaccaacgagaaguuucaccagauugaaaaagaguucucugaaguugaggggagaauccaggaccuggagaaguauguggaagauacgaaaauugaccucugguccuacaaugcugagcugcuggucgcgcucgaaaaccagcauacaaucgaucugaccgacagcgagaugaacaaacuuuucgaacgcacccggaagcaacugagagagaaugccgaggauaugggaaacggcugcuuuaagauuuaucacaagugugacaaugcuugcaucgggucuauucgcaacggaacauacgaucacgacguguaccgggaugaagcccucaauaacagauuccagaucaaaggcguugagcugaaguccggguauaaagacuggauccuuuggauuagcuuugccaucuccugcuuccugcucugugugguccugcugggcuuuauuaugugggcuugccagaagggaaauauccgcuguaacauuugcaucuga

SEQ ID NO: 192779 - RNA, 1701 nt, Artificial Sequence
  derived and/or modified CDS sequence (opt5) from hemagglutinin__InfluenzaA__ABD15702
augaagaccaucauugcccugagcuacauccucugccugguguucgcucagaaacuucccggcaacgacaauuccacagccacgcugugucucgggcaccaugcggucccuaacggaacccugguuaagacaauuaccaaugaucaaaucgaggugacaaacgcuaccgaacuugugcagucuagcuccacaggcgggauuugcgacucuccgcaccagauccuggauggagagaauuguacccucaucgacgcccugcugggcgauccccauugcgacggguuucagaacaaagaaugggaucucuucgucgagagaagcaaggccuauuccaauuguuacccuuaugacgugcccgauuacgcuucucugcggagccuuguugccuccagcggaacgcuggaauuuaacaaugagucuuucaacuggaccggcguggcucaaaauggcacauccagcgccugcaaacgcagaucuaacaaguccuuuuucagccggcucaauuggcugcaccagcuuaaguauaaauacccugcgcugaacgucaccaugcccaauaacgagaaguuugacaaacucuauauuuggggagugcaucacccuucuacagauuccgaccagaccagccuguacgcccaggcuccggggcgcguuacgguguccacaaagagaucucaacagaccgucauccccaacauuggcagccggccuugggugcgcgggguguccagcagaaucucuauuuacuggacaaucgucaaacccggagauauucugcucaucaauuguaccggcaaccugaucgccccucggggguauuucaagauucgcuccggaaagagcucuaucaugagaagcgacgcuuccauuggcaaaugcaauucugaauguaucacccccaacggcagcauuccgaaugacaagccuuuucagaacguuaaucggaucacauacggggccugcccccgcuaugugaaacagaacacgcuuaagcuggcgaccggaaugagaaaugugccugagaaacaaacacggggcaucuucggggccauugcuggauuuaucgaaaacggcugggaggggauggucgauggaugguacggcuuccgccaccaaaauuccgagggcaccgggcaggccgcugaccucaagagcacacaggccgccauuaaccagaucaauggaaaacugaacagacuuauugaaaagaccaaugagaaguuucaucagaucgaaaaagaguucucugaaguggagggccggauccaggaucuggagaaguauguugaagacacgaaaauugaucucugguccuacaacgcugagcugcugguggcgcucgaaaaccaacacacaaucgaccugaccgauagcgagaugaauaaacuuuucgaaagaaccaagaagcagcugcgcgagaacgccgaggacauggggaauggauguuuuaagauuuaucauaaaugcgauaacgcuugcaucggcucuauucggaaugggacauacgaccacgaugucuacagagacgaagcccucaacaaucgcuuccagaucaagggcguggagcugaaauccggauauaaggacuggauucuuuggaucagcuuugccaucuccuguuuccugcucugcguugugcugcugggcuuuauuaugugggcuugucagaaagggaacauccggugcaauauuuguaucuga

SEQ ID NO: 192780 - RNA, 1701 nt, Artificial Sequence
  derived and/or modified CDS sequence (opt5) from hemagglutinin__InfluenzaA__ABD15724
augaagaccaucauugcccugagcuacauccucugccugguguucgcucagaaacuucccggcaacgacaauuccacagccacgcugugucucgggcaccaugcggucccuaacggaacccugguuaagacaauuaccaaugaucaaaucgaggugacaaacgcuaccgaacuugugcagucuagcuccacaggcgggauuugcgacucuccgcaccagauccuggauggagagaauuguacccucaucgacgcccugcugggcgauccccauugcgacggguuucagaacaaagaaugggaucucuucgucgagagaagcaaggccuauuccaauuguuacccuuaugacgugcccgauuacgcuucucugcggagccuuguugccuccagcggaacgcuggaauuuaacaaugagucuuucaacuggaccggcguggcucaaaauggcacauccagcgccugcaaacgcagaucuaacaaguccuuuuucagccggcucaauuggcugcaccagcuuaaguauaaauacccugcgcugaacgucgccaugcccaauaacgagaaguuugacaaacucuauauuuggggagugcaucacccuucuaccgauuccgaccagaucagccuguacgcucaggccccggggcgcguuacaguguccaccaagagaucucaacagacggucauucccaacaucggcagccggccuugggugcgcgggguguccagcagaauuucuaucuacuggacaauugucaaacccggagauauccugcucaucaauuguaccggcaaccugauugcuccucggggguauuucaagauccgcuccggaaagagcucuauuaugagaagcgacgccuccaucggcaaaugcaauucugaauguauuacacccaacggcagcaucccgaaugacaagccuuuucagaacguuaaucggaucaccuacggggcgugcccccgcuaugugaaacagaacacccuuaagcuggccacaggaaugagaaaugugccugagaaacaaacgcggggcauuuucggggcuaucgccggauuuauugaaaacggcugggaggggauggucgauggaugguacggcuuccgccaccaaaauuccgagggcaccgggcaggcugccgaccucaagagcacacaggccgcuaucaaccagauuaauggaaaacugaacagacuuaucgaaaagaccaaugagaaguuucaucagaucgaaaaagaguucucugaaguggagggccggauucaggaucuggagaaguauguugaagacacaaaaaucgaucucugguccuacaacgcggagcugcugguggcccucgaaaaccaacacaccauugaccugacggauagcgagaugaauaaacuuuucgaaagaacaaagaagcagcugcgcgagaacgcugaggacauggggaauggauguuuuaagaucuaucauaaaugcgauaacgccugcauuggcucuauccggaaugggaccuacgaccacgaugucuacagagacgaagcccucaacaaucgcuuccagauuaagggcguggagcugaaauccggauauaaggacuggauccuuuggaucagcuuugcuauuuccuguuuccugcucugcguugugcugcugggcuuuaucaugugggccugucagaaagggaacauucggugcaauaucuguauuuga

SEQ ID NO: 192781 - RNA, 1701 nt, Artificial Sequence
  derived and/or modified CDS sequence (opt5) from hemagglutinin__InfluenzaA__ABD15746
augaagaccaucauugcccugagcuacauccucugccugguguucgcucagaaacuucccgucaacgacaauuccacagccacgcugugucucggccaccaugcgguuccuaacgggacccuggugaagacaauuaccaaugaucacaucgaggugacaaacgcuaccgaacuuguccaaucuagcuccacaggaagaauuugcgacucuccgcaucagauccuggauggcgagaauuguacccucaucgacgcccugcugggggauccccacugcgacggauuucagaacaaagaaugggaucucuucguggagcggagcacggccuauuccaauuguuacccuuaugacguucccgauuacgcuucucugcgcagccuuguggccuccagcggcacccuggaauuuaacaaugagucuuucaacuggacaggggucgcucagaauggaaccuccagcgccugcaagagacggucuauuaaauccuuuuucagccgccucaacuggcugcaucaacuuaaguauaaguacccugcgcugaaugugacaaugcccaacaaugagaaauuugacaagcucuauaucuggggcguucaccacccuucuaccgauuccgaccagauuagccuguacgcccaggcuuccggcagagugacggucucuacaaaacggagccagcaaaccgugaucccgaacauugggucccgccccugggugagaggaaucagcucucggauuuccaucuacuggacaaucgucaagccuggcgauauucugcucaucaacagcaccgggaaucugauugcccccagaggauauuucaaaaucagaucuggcaagagcuccauuaugcggucuaacgcuccuaucgggaaguguaauagcgaaugcaucacccccaacggauccauuccgaaugacaaaccuuuucagaacguuaaucgcaucacauacggcgccugucccagauaugugaagcagaacacgcuuaaacuggcgaccggcaugcggaaugugccugagaagcagacacgcgggauuuucggagccaucgcuggcuuuauugaaaacgggugggagggaauggucgacggcugguacggguucagacaucaaaauagcgagggaaccggccaggccgcugaucucaaaucuacacaggccgccaucaaccaaaucaauggcaagcugaaccggcuuauugagaaaaccaaugaaaaguuucaccagaucgaaaaggaguucuccgaaguggaggggcgcauucaggaccuggagaaauauguugaagauacgaagaucgaccucuggagcuacaacgcugagcugcugguggcgcucgaaaaccagcauacaauugaucugaccgacucugagaugaauaaacuuuucgaacgcacccggaagcaacugagagagaacgccgaggaaaugggaaauggcugcuuuaaaaucuaucacaagugugauaacgcuugcauuggguccauccgcaauggaacauacgaccacgaugucuaccgggacgaggcccucaacaauagauuccagaucaagggcguggaacugaaaagcggguauaaggauuggauucuuuggaucuccuuugccauuucuugcuuccugcucuguguugugcugcugggcuuuaucaugugggcuugccagaaaggaaacauucgcuguaauaucugcaucuga

SEQ ID NO: 192782 - RNA, 1701 nt, Artificial Sequence
  derived and/or modified CDS sequence (opt5) from hemagglutinin__InfluenzaA__ABD15757
augaagaccaucauugcccugagcuacauccucugccugguguucgcucagaaacuucccgucaacgacaauuccacagccacgcugugucucggccaccaugcgguuccuaacgggacccuggugaagacaauuaccaaugaucacaucgaggugacaaacgcuaccgaacuuguccaaucuagcuccacaggaagaauuugcgacucuccgcaucagauccuggauggcgagaauuguacccucaucgacgcccugcugggggauccccacugcgacggauuucagaacaaagaaugggaucucuucguggagcggagcacggccuauuccaauuguuacccuuaugacguucccgauuacgcuucucugcgcagccuuguggccuccagcggcacccuggaauuuaacaaugagucuuucaacuggacaggggucgcucagaauggaaccuccagcgccugcaagagacggucuauuaaauccuuuuucagccgccucaacuggcugcaucaacuuaaguauaaguacccugcgcugaaugugacaaugcccaacaaugagaaauuugacaagcucuauaucuggggcguucaccacccuucuaccgauuccgaccagauuagccuguacgcccaggcuuccggcagagugacggucucuacaaaacggagccagcaaaccgugaucccgaacauugggucccgccccugggugagaggagucagcucucggaucuccauuuacuggacaaucguuaagccuggcgauauccugcucauuaacagcaccgggaaucugaucgcuccccgcggauauuucaaaauuagaucuggcaagagcuccaucaugcggucuaacgccccuauugggaaguguaauagcgaaugcaucacccccaacggauccaucccgaaugacaaaccuuuucagaacgugaaucgcauuacauacggcgccugucccagauaugugaagcagaacacgcuuaaacuggcgaccggcaugcggaaugucccugagaagcagacacgcgggaucuucggagccauugcuggcuuuaucgaaaacgggugggagggaaugguggacggcugguacggguucagacaucaaaauagcgagggaaccggccaggccgcugaucucaaaucuacacaggccgccauuaaccaaaucaauggcaagcugaaccggcuuaucgagaaaaccaaugaaaaguuucaccagauugaaaaggaguucuccgaaguugaggggagaauccaggaccuggagaaauauguggaagauacgaagauugaccucuggagcuacaacgcugagcugcuggucgcgcucgaaaaccagcauacaaucgaucugaccgacucugagaugaauaaacuuuucgaacgcacccggaagcaacugagagagaacgccgaggaaaugggaaauggcugcuuuaaaauuuaucacaagugugauaacgcuugcaucggguccauucgcaauggaacauacgaccacgauguguaccgggacgaggcccucaacaauagauuccagaucaagggcguugaacugaaaagcggguauaaggauuggauccuuuggauuuccuuugccaucucuugcuuccugcucugugugguccugcugggcuuuauuaugugggcuugccagaaaggaaacauccgcuguaauauuugcaucuga

SEQ ID NO: 192783 - RNA, 1701 nt, Artificial Sequence; identical to SEQ ID NO: 192722
  derived and/or modified CDS sequence (opt5) from hemagglutinin__InfluenzaA__ABD15779

SEQ ID NO: 192784 - RNA, 1701 nt, Artificial Sequence; identical to SEQ ID NO: 192722
  derived and/or modified CDS sequence (opt5) from hemagglutinin__InfluenzaA__ABD15790

SEQ ID NO: 192785 - RNA, 1701 nt, Artificial Sequence; identical to SEQ ID NO: 192722
  derived and/or modified CDS sequence (opt5) from hemagglutinin__InfluenzaA__ABD16292

SEQ ID NO: 192786 - RNA, 1701 nt, Artificial Sequence; identical to SEQ ID NO: 192705
  derived and/or modified CDS sequence (opt5) from hemagglutinin__InfluenzaA__ABD16303

SEQ ID NO: 192787 - RNA, 1701 nt, Artificial Sequence; identical to SEQ ID NO: 192705
  derived and/or modified CDS sequence (opt5) from hemagglutinin__InfluenzaA__ABD16325

SEQ ID NO: 192788 - RNA, 1701 nt, Artificial Sequence
  derived and/or modified CDS sequence (opt5) from hemagglutinin__InfluenzaA__ABD16336
augaagaccaucauugcccugagcuacacacucugccugguguucgcucagaaacuucccggcaacgacaauuccacggccacccugugucucgggcaccaugcggucccuaacggaacaaucguuaagaccauuacaaaugaucaaaucgaggugaccaacgcuacagaacuggugcagucuagcuccaccggcgggauuugcgacucuccgcaccagauccuugauggagagaauuguacgcugaucgacgcccuccugggcgauccccagugcgacggguuucaaaacaaaaagugggaucuguucgucgaaagaagcaaagccuauuccaauuguuacccuuaugacgugcccgauuacgcuucucuccggagccugauugccuccagcggaacccuugaguuuaacaaugaaucuuucaacuggacaggcguuacccagaauggcacauccagcgcuugcaagcgcagaucuaacuccagcuuuuucucucggcugaauuggcucacccaucugaaguuuaaauauccugcccuuaacgugacgaugcccaauaacgaggaguucgacaagcuguacaucuggggaguccaccauccugggacauauaacgaucagauuucccucuacgcgcaggccagcggccgcaucaccguguccacaaaaagaucucaacagaccguuauuccgaauaucgggagccggccccgcgugagagacauuccuucccggaucagcaucuacuggaccauugucaagcccggagauauccugcugauuaacucuacaggcaaucucaucgcuccucgcggguauuuuaaaauuagauccggaaagagcucuaucaugcggagcgacgcccccaucggcaaguguaacuccgaaugcauuacgccgaauggcucuaucccuaacgacaaacccuuccagaaugugaaccgcauuaccuacggggcuuguccuagauaugugaagcagaauacacugaaacuugccaccggaaugcggaacguccccgagaagcaaacacgcggcaucuuuggggcgauugccggauucaucgaaaauggcugggaggggaugguugauggaugguacggcuuuagacaccagaacagcgagggcaucgggcaggcugccgaccugaaauccacccaagcugccauugaucagaucaauggaaagcucaaccggcugauuggcaaaacgaaugaaaaguuccaccagaucgagaaggaguucagcgaaguggaagggcgcauucaggaccuugagaaauauguggaggauacaaagaucgaccuguggucuuacaacgccgaacuccuggucgcucuggagaaccaacauaccauugaucucaccgacuccgaaaugaauaaacuguuugagagaacaaagaaacagcuucgggaaaacgcggaggauaugggaaauggcugcuucaagaucuaucacaagugugacaacgccugcaucgggagcauuagaaauggcaccuacgaucaugacguguaccgcgacgaggcucugaacaaucgguuucagaucaaaggaguugaacucaagucuggcuauaaagauuggauucuguggaucuccuucgccauuagcugcuuucuucuguguguggcccuccugggguucaucaugugggcuugccagaagggaaacaucagauguaauauuugcaucuga

SEQ ID NO: 192789 - RNA, 1701 nt, Artificial Sequence; identical to SEQ ID NO: 192705
  derived and/or modified CDS sequence (opt5) from hemagglutinin__InfluenzaA__ABD16347

SEQ ID NO: 192790 - RNA, 1701 nt, Artificial Sequence
  derived and/or modified CDS sequence (opt5) from hemagglutinin__InfluenzaA__ABD16358
augaagaccaucauugcccugagcuacauccucugccugguguucgcucagaaacuucccggcaacgacaauuccacagccacgcugugucucgggcaccaugcggucccuaacggaaccauuguuaagacaaucaccaaugaucaaauugaggugacaaacgcuaccgaacuggugcagucuagcuccacaggcgggaucugcgacucuccgcaccagauccuugauggagagaauuguacccugauugacgcccuccugggcgauccccagugcgacggguuucaaaacaaaaagugggaucuguucgucgaaagaagcaaagccuauuccaauuguuacccuuaugacgugcccgauuacgcuucucuccggagccugaucgccuccagcggaacgcuugaguuuaacaaugaaucuuucaacuggaccggcguuacacagaauggcaccuccagcgcuugcaagcgcagaucuaacuccagcuuuuucucucggcugaauuggcucacacaucugaaguuuaaauauccugcccuuaacgugaccaugcccaauaacgaggaguucgacaagcuguacauuuggggaguccaccauccugggacguauaacgaucagaucucccucuacgcgcaggccagcggccgcauuacaguguccaccaaaagaucucaacagacaguuaucccgaauauugggagccggccccgcgugagagacaucccuucccggaucagcauuuacuggaccaucgucaagcccggagauauucugcugaucaacucuaccggcaaucucauugcuccucgcggguauuuuaaaaucagauccggaaagagcucuaucaugcggagcgacgcccccauuggcaaguguaacuccgaaugcaucacaccgaauggcucuauuccuaacgacaaacccuuccagaaugugaaccgcaucacguacggggcuuguccuagauaugugaagcagaauacccugaaacuugccacaggaaugcggaacguccccgagaagcaaacccgcggcauuuuuggggcgaucgccggauucaucgaaaauggcugggaggggaugguugauggaugguacggcuuuagacaccagaacagcgagggcauugggcaggcugccgaccugaaauccacacaagcugccaucgaucagauuaauggaaagcucaaccggcugaucggcaaaaccaaugaaaaguuccaccagauugagaaggaguucagcgaaguggaagggagaauccaggaccuugagaaauauguggaggauacgaagauugaccuguggucuuacaacgccgaacuccuggucgcucuggagaaccaacauacaaucgaucucaccgaccuggaaaugaauaaacuuuuugagcgcaccaagaaacagcugcgggaaaacgcggaggauaugggaaauggcugcuucaagaucuaucacaagugugacaacgccugcauuggguccaucagaaauggcacauacgaucaugacguguaccgcgacgaggcucucaacaaucgguuucagauuaaaggaguugaacuuaagagcggcuauaaagauuggauccuguggauuucuuucgccaucuccugcuuucugcucuguguggcccugcugggguucaucaugugggcuugccagaagggaaacauuagauguaauaucugcauuuga

SEQ ID NO: 192791 - RNA, 1701 nt, Artificial Sequence; identical to SEQ ID NO: 192705
  derived and/or modified CDS sequence (opt5) from hemagglutinin__InfluenzaA__ABD16472

SEQ ID NO: 192792 - RNA, 1701 nt, Artificial Sequence; identical to SEQ ID NO: 192705
  derived and/or modified CDS sequence (opt5) from hemagglutinin__InfluenzaA__ABD16483

SEQ ID NO: 192793 - RNA, 1701 nt, Artificial Sequence; identical to SEQ ID NO: 192702
  derived and/or modified CDS sequence (opt5) from hemagglutinin__InfluenzaA__ABD16494

SEQ ID NO: 192794 - RNA, 1701 nt, Artificial Sequence; identical to SEQ ID NO: 192705
  derived and/or modified CDS sequence (opt5) from hemagglutinin__InfluenzaA__ABD16505

SEQ ID NO: 192795 - RNA, 1701 nt, Artificial Sequence
  derived and/or modified CDS sequence (opt5) from hemagglutinin__InfluenzaA__ABD16516
augaagaccaucauugcccugagcuacauccucugcaugguguucgcucagaaacugcccggcaacgacaauuccacagccacgcuuugucuggggcaccaugcggucccuaacggaaccauuguuaagacaaucaccaaugaucaaauugaggugacaaacgcuaccgaacucgugcagucuagcuccacaggcgggaucugcgacucuccgcaccagauccuggauggagagaauuguacccuuauugacgcccugcucggcgauccccagugcgacggguuucaaaacaaaaagugggaucuguucaucgaaagaagcaaagccuauuccaauuguuacccuuaugacguccccgauuacgcuucucugcggagccucguggccuccagcggaacgcuggaguuuaacaaugaaucuuucaacuggaccggcguuacacagaauggcaccuccagcgcuugcaagcgcagaucuaacaauuccuuuuucagccggcuuaacuggcugacacaucucaaguuuaaauauccugcccugaaugugaccaugcccaacaacgagaaguucgacaaacuuuacauuuggggaguccaccauccugggacggauaaugaccagaucucucuguaugcgcaggccuccggccgcauuacagugagcaccaagagaucccaacagacaguuaucccgaacauugggucucggccccgcgugagagauaucccuagccggaucuccauuuacuggaccaucgucaaacccggagacauucuccugaucaauagcaccggcaaccugauugcuccucgcggguacuuuaagaucagaucuggaaaguccagcaucaugcggucugacgcccccauugauaaauguaauagcgagugcaucacaccgaacggcuccauuccuaaugacaagcccuuccagaacgugaaucgcaucacguauggcgcuuguccuagauacgugaaacagaacacccucaagcuggccacagggaugcggaauguccccgaaaaacaaacccgcggaauuuuuggcgcgaucgccggguucaucgagaacggaugggaaggcaugguugaugggugguauggauuuagacaccaaaauucugagggcauuggccaggcugccgaccuuaagagcacacaggcugccaucaaccagauuaaugggaaacugaaccggcucaucggaaagaccaacgagaaguuccaccagauugaaaaagaguucuccgaaguggagggcagaauccaggaucuggaaaaguacguggaggacacgaaagucgaucuuuggagcuauaaugccgagcugcucguggcucuggaaaaccaacauacaauugaccugaccgauucugagaugaauaagcucuuugaacgcaccaaaaagcagcugcgggagaacgcggaagacauggggaauggaugcuucaagaucuaccacaaaugugauaacgccugcaucggcuccauuagaaaugggacauaugaccaugacguuuaccgcgaugaggcucuuaacaaucgguuucagaucaagggcguggagcugaaaagcggauacaaggacuggauucucuggaucucuuucgccauuuccugcuuucugcuuugugucgcccugcucggcuucaucaugugggcuugccagaaagggaacaucagauguaauauuugcaucuga

SEQ ID NO: 192796 - RNA, 1701 nt, Artificial Sequence
  derived and/or modified CDS sequence (opt5) from hemagglutinin__InfluenzaA__ABD16527
augaagaccaucauugcccugagcuacauccucugccugguguucgcucagaaacuucccgagaacgacaauuccacagccacgcugugucucggccaccaugcggucccuaacgggaccauuguuaagacaaucaccaaugaucaaauugaagugacaaacgcuaccgagcuggugcagucuagcuccacaggaggcaucugcgacucuccgcaccagauccuugauggggaaaauuguacccugauugacgcccuccugggagauccccagugcgacggcuuucaaaacaaaaagugggaucuguucgucgagagaagcaaagccuauuccaauuguuacccuuaugacgugcccgaucaugcuucucuccggagccugguugccuccagcgggacgcuugaauuuaacaaugagucuuucgacuggaccggagugacacagaacggcaccuccagcgcuugcaagcgcagaucuaauaaguccuuuuucagccggcugaacuggcucacacaccugaaauacaaguauccugcccuuaaugucaccaugcccaacaaugagaaauuugauaagcuguacaucuggggcgugcaucacccugggacggacucugaucagauuucccucuaugcgcaggccagcggacgcaucacaguuuccaccaaaagaucucaacagacagugauuccgaacaucggcagccggccccgcgucagagacguguccagccggauuucuaucuacuggaccaucgugaagccuggggacauucugcugaucaacuccaccggaaaucucauugcuccccgcggcuacuucaagaucagaagcgggaaaucuagcauuaugcgguccgaugccccuaucggaaaguguaacucugaaugcaucacacccaauggcagcauuccgaacgacaaaccuuuucagaaugucaaccgcaucacguauggcgcuugucccagauacguuaagcagaauacccugaaacuugccacagggaugcggaacgugccugagaagcaaacccgcggaauuuucggcgcgaucgccggguuuauugaaaauggaugggagggcaugguggaugggugguauggauucagacaccagaacuccgagggcacaggccaggcugccgaccugaaaagcacccaagcugccaucaaucagaucaacgggaagcucaaucggcugauuggaaagacgaacgaaaaauuucaucagaucgagaaggaguucucugaagucgaaggccgcauucaggaucuugagaaauacguggaggacacaaagaucgaucugugguccuauaaugccgaacuccugguugcucuggagaaccaacacaccauugaccucaccgauagcgaaaugaacaaacuguucgagagaacaaagaagcagcuucgggaaaaugcggaggacauggggaacggaugcuuuaaaaucuaccauaagugugauaaugccugcauuggcucuaucagaaacgggaccuaugaccacgacguguaccgcgaugaggcucugaauaaccgguuccagaucaaaggcgucgaacucaaguccggauacaaagacuggauucuguggaucagcuuugccauuuccugcuuccuucuguguguggcccuccugggcuuuaucaugugggcuugccagaaggggaauauuagaugugauaucugcaucuga

SEQ ID NO: 192797 - RNA, 1701 nt, Artificial Sequence; identical to SEQ ID NO: 192588
  derived and/or modified CDS sequence (opt5) from hemagglutinin__InfluenzaA__ABD16538

SEQ ID NO: 192798 - RNA, 1701 nt, Artificial Sequence
  derived and/or modified CDS sequence (opt5) from hemagglutinin__InfluenzaA__ABD16549
augaagaccaucauugcccugagcuacauccucugccugguguucgcucagaaacuucccggcaacgacaauuccacagccacgcugugucucgggcaccaugcggucccuaacggaaccauuguuaagacaaucaccaaugaucaaauugaggugacaaacgcuaccgaacuggugcagucuagcuccacaggcgggaucugcgacucuccgcaccagauccuugauggagagaauuguacccugauugacgcccuccugggcgauccccagugcgacggguuucaaaacaaaaagugggaucuguucgucgaaagaagcaaagccuauuccaauuguuacccuuaugacgugcccgauuacgcuucucuccggagccugaucgccuccagcggaacgcuugaguuuaacaaugaaucuuucaacuggaccggcguuacacagaauggcaccuccagcgcuugcaagcgcagaucuaacuccagcuuuuucucucggcugaauuggcucacacaucugaaguuuaaauauccugcccuuaacgugaccaugcccaauaacgaggaguucgacaagcuguacauuuggggaguccaccauccugggacguauaacgaucagaucucccucuacgcgcaggccagcggccgcauuacaguguccaccaaaagaucucaacagacaguuaucccgaauauugggagccggccccgcgugagagacaucccuucccggaucagcauuuacuggaccaucgucaagcccggagauauucugcugaucaacucuaccggcaaucucauugcuccucgcggguauuuuaaaaucagauccggaaagagcucuaucaugcggagcgacgcccccauuggcaaguguaacuccgaaugcaucacaccgaauggcucuauuccuaacgacaaacccuuccagaaugugaaccgcaucacguacggggcuuguccuagauaugugaagcagaauacccugaaacuugccacaggaaugcggaacguccccgagaagcaaacccgcggcauuuuuggggcgaucgccggauucaucgaaaauggcugggaggggaugguugauggaugguacggcuuuagacaccagaacagcgagggcauugggcaggcugccgaccugaaauccacacaagcugccaucgaucagauuaauggaaagcucaaccggcugaucggcaaaaccaaugaaaaguuccaccagauugagaaggaguucagcgaaguggaagggagaauccaggaccuugagaaauauguggaggauacgaagauugaccuguggucuuacaacgccgaacuccuggucgcucuggagaaccaacauacaaucgaucucaccgacuccgaaaugaauaaacuguuugagcgcaccaagaaacagcuucgggaaaacgcggaggauaugggaaauggcugcuucaagaucuaucacaagugugacaacgccugcauugggagcaucagaaauggcacauacgaucaugacguguaccgcgacgaggcucugaacaaucgguuucagauuaaaggaguugaacucaagucuggcuauaaagauuggauccuguggauuuccuucgccaucagcugcuuucuucuguguguggcccuccugggguucaucgucugggcuugccagaagggaaacauuagauguaauaucugcauuuga

SEQ ID NO: 192799 - RNA, 1701 nt, Artificial Sequence; identical to SEQ ID NO: 192702
  derived and/or modified CDS sequence (opt5) from hemagglutinin__InfluenzaA__ABD16560

SEQ ID NO: 192800 - RNA, 1701 nt, Artificial Sequence
  derived and/or modified CDS sequence (opt5) from hemagglutinin__InfluenzaA__ABD16571
augaagaccaucauugcccugagcuacaucuucugccucguggucgcucagaaacugcccggcaacgacaauuccacagccacgcuuugucuggggcaccaugcgguuccuaacggaaccauugugaagacaaucaccaaugaucaaauugaggugacaaacgcuaccgaacucguccagucuagcuccacaggcagaaucugcaauucuccgcaccggauccuggacgggaaaaacuguacccuuauugaugcccugcucggagacccccauugcgauagcuuucagaauaaggagugggaccuguucguggaacgcuccaaagccuauucuaacuguuacccuuaugauguucccgacuacgcuagccugagaucccucguggccagcucuggcacgcuggaguuuaucaaugaagauuucaacuggaccggggucgcucaguccggaggcagcuaugccugcaagcggggcucuguuaauuccuuuuucagccgccuuaacuggcugcacgagucugaguacaaguauccugcgcucaaugugacaaugcccaacaaugggaaauuugacaagcuguacauuuggggagugcaucacccuuccaccgauagagaacaaacaaaccuuuacguccgggccagcggccgcgugaccguguccacgaaaagaucucagcagacagucaucccgaacauugggagccggcccuggguucgcggacuguccagcagaaucucuauuuauuggaccaucgugaagccuggcgacauccuccugauuaauuccacagggaaccugaucgcuccccggggauacuucaaaauucgcaccggcaagagcucuaucaugagaagcgaugccccuauuggcaccuguuccucugagugcaucacacccaaugggagcaucccgaacgacaagccuuuucagaaugugaaccggauuacguauggagcuuguccccgcuacgucaaacaaaauacccucaagcuggccacaggcaugagaaacgugccugaaaaacagacccgggggaucuucggagcgauugccggcuuuaucgagaaugggugggagggaaugguugacggcugguauggcuucagacaccagaacuccgaagggacaggacaggcugccgaucuuaagagcacccaagcugccauugaccagaucaauggcaaacugaaccgccucaucgagaagacgaaugaaaaauuucaucagauugagaaggaguucucugaaguggaggggcggauccaagaucuggaaaaguacgucgaggacacaaaaauugaucuuugguccuauaacgccgaacugcucguggcucuggagaaucagcacaccaucgaccugaccgauagcgaaaugaacaaacucuucgagaagacaagaaagcagcugcgcgagaacgcggaagacaugggaaauggcugcuuuaaaauuuaccauaagugugauaacgccugcaucgggucuauucggaauggcaccuacgaccacgauguuuauagagacgaggcucuuaacaaucgcuuccagaucaagggaguggaacugaaauccggcuacaaggacuggauccucuggauuagcuuugccaucuccugcuuccugcuuugugucgugcugcucggguuuauuaugugggccugccaaaaaggaaacauccgguguaauauuugcaucuga

SEQ ID NO: 192801 - RNA, 1701 nt, Artificial Sequence
  derived and/or modified CDS sequence (opt5) from hemagglutinin__InfluenzaA__ABD16718
augaagaccaucauugcccugagcuacaucuucugccucguguuugcucagaaacugcccggcaacgacaauuccacagccacgcuuugucuggggcaccaugcggucccuaacggaacccucguuaagacaauuaccaaugaucaaaucgaggugacaaacgcuaccgaacuggugcagucuagcuccacaggcagaauuugcgacucuccgcaccggauccuugaugggaaaaauuguacccugaucgacgcccuccugggagauccccauugcgacggcuuccagaacgagaagugggaucuguuuauugaacgcagcaaagccuucuccaauuguuauccuuacgacguccccgauuaugcuucucucagaagccugguggccuccagcgggacgcuugaguuuaucaacgaaggauucaauuggaccggcguuacacagucuggcggguccuacgcuugcaagcggggaagcgugaacuccuuuuucucucgccugaauuggcucuaugagagcgaguacaaguauccugcccugaacgucaccaugcccaauaacggcaaauuugacaagcuguacauuuggggagugcaccauccuaucacagaaaaagagcaaaccaaucuguacguuagagcgucugggcgggugacggucuccacaaagcgcagccagcagaccgugauuccgaacaucggcuccagacccugggugcgggggcucucuagccgcauuuccaucuauuggacaaucgucaaaccuggagauauucugcugaucaacagcaccggcaaucucauugcccccagaggcuacuucaagauccggaccgggaagucuuccauuaugcgcagcgacgcuccuaucggaacauguucuagcgaaugcaucacgcccaacggcuccauuccgaaugauaaaccuuuucagaacguuaauaagaucaccuauggggccugucccagauacgugaaacaaaacacacugaaacuugcuaccggaaugcggaaugugccugagaagcagacacgcggcauuuucggggccaucgcgggauuuauugagaacggcugggaaggcauggucgacgggugguauggauucagacaccaaaauucugagggcaccgggcaggccgcugaccuuaagagcacgcaggccgcuaucgaucagaucaacggaaaacucaaucggcugauugaaaagacaaacgagaaguuccaccagaucgaaaaagaguuuuccgagguggaaggccgcauucaagaccuugagaaguacguugaagauaccaaaaucgaccuguggagcuauaaugccgagcuccugguggcccuggaaaaccagcauaccauugaucucacagacucugagaugaauaagcuguucgagaaaaccagaaagcagcuucgggaaaacgcugaggauauggggaacggcugcuuuaagaucuaccacaaaugugacaaugcgugcauuggauccaucagaaacggcacauacgaucaugacgucuaucgcgaugaagcccugaauaaccgguuccagaucaaggggguggagcucaaaagcggauacaaggacuggauucuguggaucucuuuugcuauuuccugcuuccuucuguguguugugcuccugggcuuuaucaugugggccugccaaaaagggaauauuagauguaacaucugcaucuga

SEQ ID NO: 192802 - RNA, 1701 nt, Artificial Sequence
  derived and/or modified CDS sequence (opt5) from hemagglutinin__InfluenzaA__ABD16729
augaagaccaucauugcccugagcuacaucuucugccucguguuugcucagaaacugcccggcaacgacaauuccacagccacgcuuugucuggggcaccaugcggucccuaacggaacccucguuaagacaauuaccaaugaucaaaucgaggugacaaacgcuaccgaacuggugcagucuagcuccacaggcagaauuugcgacucuccgcaccggauccuugaugggaaaaauuguacccugaucgacgcccuccugggagauccccauugcgacggcuuccagaacgagaagugggaucuguuugucgaacgcagcaaagccuucuccaauuguuauccuuacgacgugcccgauuaugcuucucucagaagccugguugccuccagcgggacgcuugaguuuauuaacgaaggauucaauuggaccggcgugacacagaacggcgggucuuauaccugcaagcggggauccgucaauagcuuuuucucucgccugaacuggcucuacgaguccgagagcaaguacccugugcugaauguuacaaugcccaacaauggcaaauuugacaaacuuuauaucuggggagugcaccauccuucuaccgauaaggaacaaacgaaccuguacgucagagcuuccgggaaggugacagugagcaccaaacggucccagcagacagucauuccgaacaucggcucucgccccuggguuagagggcucagcucccggauuagcaucuacuggaccauugugaagccuggagacauccugcugaucaauucuaccggcaaccucauugcgccccgcggcuauuucaagaucagaacagggaaauccagcauuaugcggucugaugccccuaucggaacguguagcuccgagugcauuacccccaauggcucuaucccgaacgacaagccuuuucagaaugugaacaaaaucacauacggggccuguccccgcuaugucaagcaaaauacccugaaacuugcuacaggaaugagaaacgugccugaaaagcagacccggggcauuuucggggccaucgcuggauuuauugagaauggcugggagggcaugguugacgggugguacggauuccgccaccagaacagcgaaggcacggggcaggccgcggaucugaaauccacacaagccgcuaucgaccagauuaauggaaagcucaacagacugaucgagaagaccaaugaaaaauuccaccagaucgagaaggaauuuagcgagguggagggccggauucaagaucuugaaaaauaugucgaggacaccaagaucgaucuguggucuuacaacgccgaacuccugguggcucuggagaaucagcauacaauugaccucaccgauuccgaaaugaacaaacuguucgagaagacaagaaagcagcuucgcgagaacgccgaagacauggggaauggcugcuuuaaaaucuaucacaagugugauaacgccugcauuggaagcauccggaauggcacguacgaccaugauguuuacagagacgaggcucugaacaaucgcuuccagauuaaagggguggaacucaagucuggauauaaagacuggauccuguggaucuccuuugcgauuagcugcuuccuucugugugucgugcuccugggcuuuaucaugugggccugccaaaaggggaacauucgguguaauaucugcauuuga

SEQ ID NO: 192803 - RNA, 1701 nt, Artificial Sequence
  derived and/or modified CDS sequence (opt5) from hemagglutinin__InfluenzaA__ABD16751
augaagaccaucauugcccugagcuacaucuucugccucguguuugcucaggaccugcccggcaacgauaauuccacagccacgcuuugucuggggcaccaugcggucccuaacggaacccucguuaaaacaauuaccaaugaccaaaucgaggugacaaacgcuaccgaacuggugcacucuagcuccacaggcaagauuugcgauaauccgcauagaauccuugacgggaucaacuguacccugauugaugcccuccugggagacccccacugcgauggcuuccagaaugagaaaugggaccuguuugucgaacggucuaaggccuucagcaacuguuauccuuacgaugugcccgacuaugcuucccuccgcucucugguugccagcuccgggacgcuugaguuuaucaaugaaggauucaacuggaccggcgugacacagaauggcgggagcucugcuugcaaaagaggaccugauaacggcuuuuucucccggcugaauuggcucuacaagagcgggucuaccuaucccguccagaacgugacaaugccuaauaacgacaacuccgauaagcuguacauuuggggaguucaucacccgagcaccgacaaagagcaaacggaccuuuaugugcaggccucuggcaaggucacaguguccaccaaacgcagccagcagacagugauccccaaugucggguccagaccuuggguucggggacugucuagccgcguguccauuuacuggaccaucgugaagcccggcgauauucucgucaucaacagcaauggcaaccugaucgcgccuagaggguacuuuaaaaugcggaccggaaagucuuccauuaugcgcagcgacgcccccaucggcacauguucuagcgagugcauuacgccgaauggguccaucccuaacgauaagcccuuccaaaaugugaacaaaauuaccuauggagcuuguccuaaguacguuaaacagaauacacugaagcucgccaccggcaugagaaacgugcccgaaaaacagacacgggggaucuuuggagcuaucgccggcuucauugagaauggcugggaagggaugaucgacggaugguauggcuuucgccaccagaacucugaggggaccggacaagcggccgaucuuaagagcacgcaggcugccauugaccagaucaauggcaaacugaacagagucauugagaagacaaaugaaaaguuccaucaaaucgagaaagaguucuccgaaguggaagggcggauccaggaucuggagaaguacguugaggacaccaaaauugaucucuggagcuauaacgcugaacugcuuguggcccuggagaaccagcacaccaucgaccucacagauucugaaaugaauaagcuguuugagaaaacccgcagacagcugcgggaaaacgccgaggacaugggcaauggaugcuucaagauuuaccauaagugugacaacgcuugcaucggcuccauuagaaaugggacauaugaucacgacgucuaccgcgaugaggcgcucaacaaucgguuucaaaucaaaggaguggaacuuaagagcggcuacaaagacuggauucuguggaucucuuucgccaucuccugcuuucugcucugugucgugcugcuuggguucauuaugugggcuugccagaagggaaacaucagauguaauauuugcaucuga

SEQ ID NO: 192804 - RNA, 1701 nt, Artificial Sequence; identical to SEQ ID NO: 192665
  derived and/or modified CDS sequence (opt5) from hemagglutinin__InfluenzaA__ABD16762

SEQ ID NO: 192805 - RNA, 1701 nt, Artificial Sequence; identical to SEQ ID NO: 192377
  derived and/or modified CDS sequence (opt5) from hemagglutinin__InfluenzaA__ABD17323

SEQ ID NO: 192806 - RNA, 1701 nt, Artificial Sequence; identical to SEQ ID NO: 192634
  derived and/or modified CDS sequence (opt5) from hemagglutinin__InfluenzaA__ABD38134

SEQ ID NO: 192807 - RNA, 1698 nt, Artificial Sequence; identical to SEQ ID NO: 192373
  derived and/or modified CDS sequence (opt5) from hemagglutinin__InfluenzaA__ABD60779

SEQ ID NO: 192808 - RNA, 1701 nt, Artificial Sequence
  derived and/or modified CDS sequence (opt5) from hemagglutinin__InfluenzaA__ABD60790
augaagaccaucauugcccugagcuacaucuucugccucgugcugggccaggacuuucccgggaacgauaauuccacagcuacgcuuugucugggacaccaugccgucccuaacggcacccucguuaaaacaauuaccaaugaccaaaucgaggugacaaacgcgaccgaacuggugcagucuagcuccacagggaagauuugcaauaacccgcacagaauccuugauggaaucgacuguacccugauugaugcucuccugggcgacccccauugcgauggguuccagaaugagacgugggaccuguuugucgaacggucuaaagccuucagcaacuguuauccuuacgaugugcccgacuaugccucccuccgcucucugguugcuagcuccggaacccuugaguuuaucaaugaaggcuucacauggaccggcgugacacagaacgggggaagcaaugccugcaagagaggcccugauucuggguuuuucucccggcugaacuggcucuacaaaagcggaucuaccuaucccguccugaaugugacgaugccuaacaaugacaacuuugauaaacuuuacauuuggggcguucaccauccguccacagaccaagagcagaccagccuguaugugcaggcuucugggcgcgucacaguguccaccaagagaagccagcaaaccaucauucccaacaucggaucccggccuugggugcgcggccucucuagcagaauuuccaucuacuggacaaucgucaagcccggcgacauucugaucauuaauagcaacgggaaucugaucgccccucggggauacuucaagaugcgcacgggcaaaucuuccauuaugagaagcgaugcgcccaucgggaccuguaucucugagugcauuacaccgaacggaagcaucccuaaugacaagcccuuucagaacguuaauaaaauuaccuauggcgccuguccuaaguacgugaagcagaacacacucaaacuggcuaccgggaugcggaaugugcccgaaaagcagacgcgcggaaucuucggcgccauugcuggcuuuaucgagaacgggugggaaggaaugaucgauggcugguauggguucagacaccaaaauuccgagggaacaggccaggccgcggaccuuaaaucuacccaggccgcuauugaucaaaucaacgggaagcugaaucggauuaucgagaaaaccaacgaaaaguuccaccagauugagaaagaauuuagcgaggucgaaggccgcauccaggaccucgagaaguacguggaggauacaaagauugaccugugguccuauaaugccgaacuucugguugcucucgagaaccagcauaccaucgaucugacagacagcgaaaugaacaaacuguucgagaagacgagacggcaacucagagaaaaugccgaggauaugggaaacggcugcuuuaaaaucuaccacaagugugacaaugccugcauugggucuauccgcaacggaaccuaugaccaugauguguaccgggacgaggcucugaauaacagauuccagauuaaaggcgucgaacuuaaguccggguacaaggauuggauccuguggauuagcuuugcgaucucuugcuuccuccugugugugguucuucugggauuuaucaugugggccugccagaaaggcaauauucgcuguaacaucugcauuuga

SEQ ID NO: 192809 - RNA, 1701 nt, Artificial Sequence
  derived and/or modified CDS sequence (opt5) from hemagglutinin__InfluenzaA__ABD60801
augaagaccaucauugcccugagcuacauccucugccugguguucgcucagaaacuucccggcaacgacaauuccacagccacgcugugucucgggcaccaugcggucccuaacggaacccugguuaagacaauuaccaaugaucaaaucgaggugacaaacgcuaccgaacuugugcagucuagcuccacaggcagacugugcgacucuccgcaccggauucucgaugggaaaaauuguacccugaucgacgcccugcucggagauccccauugcgacggcuuucagaacaaggagugggaucuguucgucgaacgcagcaaagccuauuccaauuguuacccuuaugacgugcccgauuacgcuucucuuagaagccugguugccuccagcgggacgcucgaguuuaucaacgaagacuucaauuggaccggaguggcucaggauggcggcucuuaugccugccggcgcggguccgucaacagcuuuuucucuagacugaauuggcuucacaagcuggaguacaaguauccugcgcucaacgugacaaugcccaauaacggaaaauuugacaagcuguacauuuggggcguucaucacccuuccaccgauagcgaccaaacaucucuguacgugcgggccuccgggcgcgucaccgugagcacgaaaagaucccagcagacagugaucccgaauauuggaucucggcccuggguccgcggccagagcuccagaaugagcaucuauuggaccauuguuaagccuggggacauccuccugauuaacucuacaggaaaccuuaucgcuccccggggcuacuucaaaauccgcaauggcaaguccagcauuaugagaucugaugccccuaucgggaacuguagcuccgagugcauuacccccaauggaucuaucccgaacgacaagccuuuucaaaaugugaaccggauuaccuauggcgcuuguccccgcuacgugaaacagcacacacugaagcucgccacggggaugagaaaugucccugaaaaacagacccggggaaucuucggcgcgaucgccggguuuauugagaacggaugggaaggcaugguggauggcugguauggguucagacaucagaauagcgagggaacaggccaagcugccgaccugaaguccacccaggcugccaucgaucagauuaacgggaaacuuaaucgccugaucgagaagacaaacgaaaaauuucaccaaauugagaaggaguucagcgaaguugaaggacggauccaggaccucgagaaguacguggaggauaccaaaaucgaccuguggucuuauaaugccgaacugcucgucgcucuggagaaccagcauacgauugaucuuacagacuccgaaaugaauaagcuguucgagagaacccgcaaacagcuccgggaaaacgcggaggauaugggcaacgggugcuuuaagaucuaccacaaaugugacaaugccugcauuggcagcaucagaaacggaaccuacgaccacgauguguaucgcgacgaggcucugaauaaccgguuccaaauuaagggcguugaacuuaagucuggguacaaagauuggauccuguggauuuccuuugccaucagcugcuuccuccugugugugguccugcucggauuuaucaugugggccugccagaagggcaauauuagauguaacaucugcauuuga

SEQ ID NO: 192810 - RNA, 1701 nt, Artificial Sequence
  derived and/or modified CDS sequence (opt5) from hemagglutinin__InfluenzaA__ABD60812
augaagaccaucauugcccugagcuacauccucugccugauuuucgcucagaaacuucccggcaacgacaauuccacagccacgcugugucucgggcaccaugcggugccuaacggaaccaucgucaagacaauuaccaaugaucaaaucgagguuacaaacgcuaccgaacuggugcagucuagcuccacaggcgggaucugcgacucuccgcaccagauucuugauggagagaauuguacccugaucgacgcccuccugggcgauccccagugcgacggguuucaaaacaaaaagugggaucuguucguggaaagaagcaaagccuauuccaauuguuacccuuaugacguccccgauuacgcuucucuccggagccugguggccuccagcggaacgcuugaguuuaacaaugaaucuuucaacuggaccggcguuacacagaauggcaccuccagcgcuugcaagcgcagaucuaacaauuccuuuuucagccggcugaacuggcucacacaucugaaguuuaaauauccugcccuuaaugugaccaugcccaacaacgagaaguucgacaaacuguacauuuggggaguccaccauccugggacggauaaugaccagaucuuucucuaugcgcaggccucuggccgcauuacaguguccaccaagagaagccaacagacaguuaucccguccauugggucucggccccgcgugagaaacaucccuagccggaucuccauuuacuggaccaucgucaaacccggagauauucugcugaucaauagcaccggcaaccucauugcuccucgcggguacuucaagaucagaucuggaaaguccagcaucaugcggucugacgcccccauuggcaaauguaauagcgagugcaucacaccgaacggcuccauuccuaaugacaagcccuuucagaacgugaaucgcaucacguauggggcuuguccuagauacgugaaacagaacacccugaagcuggccacaggaaugcggaauguccccgaaaaacaaacccgcggcauuuucggggcgaucgccggauuuaucgagaacggcugggaagggaugguugauggaugguauggcuucagacaccaaaauucugagggcauugggcaggcugccgaccuuaagagcacacaggcugccaucaaccagauuaauggaaaacucaaccggcugaucggcaagaccaacgagaaguuccaccagauugaaaaagaguuuuccgaaguggaggggagaauccaggaucuugaaaaguacguggaggacacgaaaauugaucuguggagcuauaaugccgagcuccuggucgcucuggaaaaccaacauacaaucgaccucaccgauucugagaugaauaagcuguucgaacgcaccaaaaagcagcuucgggagaacgcggaagacaugggaaauggcugcuuuaagaucuaccacaaaugugauaacgccugcauuggguccaucagaaauggcacauaugaccaugauguguaccgcgacgaggcucugaacaaucgguuccagauuaagggaguugagcucaaaagcggcuacaaggacuggauccuguggauuucuuuugccaucuccugcuuccuucuguguguggcccuccugggguuuaucaugugggcuugccagaaaggaaacauuagauguaauaucugcauuuga

SEQ ID NO: 192811 - RNA, 1701 nt, Artificial Sequence; identical to SEQ ID NO: 192705
  derived and/or modified CDS sequence (opt5) from hemagglutinin__InfluenzaA__ABD60823

SEQ ID NO: 192812 - RNA, 1701 nt, Artificial Sequence
  derived and/or modified CDS sequence (opt5) from hemagglutinin__InfluenzaA__ABD60845
augaagaccaucauugcccugagcuacauccucugccugguguucgcucagaaacuucccgucaacgacaauuccacagccacgcugugucucggccaccaugcgguuccuaacgggacccuggugaagacaauuaccaaugaucacaucgaggugacaaacgcuaccgaacuuguccaaucuagcuccacaggaagaauuugcgacucuccgcaucagauccuggauggcgagaauuguacccucaucgacgcccugcugggggauccccacugcgacggauuucagaacaaagaaugggaucucuucguggagcggagcacggccuauuccaauuguuacccuuaugacguucccgauuacgcuucucugcgcagccuuguggccuccagcggcacccuggaauuuaacaaugagucuuucaacuggacaggggucgaccagaauggaaccuccagcgcuugcaagagacggucuacaaaauccuuuuucagccgccucaacuggcugcaucaacuuaaguauaaguacccugcccugaaugugaccaugcccaacaaugagaaauuugauaagcucuauauuuggggcguucaccacccuucuacggacuccgaucagaucagccuguacgcgcaggccuccggcagagugacagucucuaccaaacggagccagcaaacagugaccccgaacauugggucccgccccugggugagaggagucagcucucggaucuccauuuacuggaccaucguuaagccuggcgacauucugcucaucaacagcacagggaaucugaucgcuccccgcggauauuucaaaauuagaucuggcaagagcuccaucaugcggucuaacgcccuuauugggaaguguaauagcgaaugcaucacgccuaacggauccauucccaaugacaaaccguuucagaacgugaaucgcaucaccuacggcgcuuguccuagauaugugaagcagaacacacugaaacucgccaccggcaugcggaauguccccgagaagcagacacgcgggaucuucggagcgauugccggcuuuaucgaaaacgggugggagggaaugguggauggcugguacggguucagacaucaaaauagcgagggaaccggccaggcugccgaccugaaaucuacgcaggcugccauuaaccaaaucaauggcaaacuuaaccggcugauugaaaagacaaaugagaaguuucaccagaucgaaaaggaguucuccgaaguugaggggagaauccaggaucucgagaaauauguggaagacaccaagauugaucuguggagcuacaacgccgagcugcucgucgcucuggaaaaccagcauaccaucgaccuuacagauucugagaugaauaaacuguucgaacgcacccggaagcaacucagagagaacgcggaggacaugggaaauggcugcuuuaaaauuuaucacaagugugauaacgccugcaucggguccauucgcaauggaacauacgaccacgauguguaccgggacgaagcucugaacaauagauuccagaucaagggcguugagcuuaaaagcggguauaaggacuggauucuguggaucuccuuugccaucucuugcuuccuccugugugugguccugcucggcuuuauuaugugggccugccagaaaggaaacauccgcuguaauauuugcaucuga

SEQ ID NO: 192813 - RNA, 1698 nt, Artificial Sequence
  derived and/or modified CDS sequence (opt5) from hemagglutinin__InfluenzaA__ABD60878
augaaggugaaacugcucguccugcuuugcaccuucacagccacguacgcugacaccaucuguauuggcuaucacgccaacaauagcacagauaccguugacacagugcuggagaagaacgugaccgucacacauuccgugaaucuccuggaagauucucacaacgggaaacuuugccugcucaagggaaucgcgccccugcagcugggcaauuguagcguugcuggguggauucucggaaacccugagugcgaacugcuuaucuccaaagagucuuggagcuacauuguggaaaccccgaaucccgagaacggcacguguuauccuggguacuuugccgacuaugaggaacugagagagcaacucuccucugucagcuccuucgaacgguuugagaucuuccccaaggagagcucuuggccuaaucauaccgugacaggaguuuccgccagcugcucucacaacggcaaguccagcuuuuaccgcaaucugcuuuggcugaccggcaaaaacgggcucuaucccaaucugucuaaguccuacgcuaacaauaaagaaaaggaggugcugguccucuggggagugcaucacccuccgaacaucggcgaucagaaagcccuguaccacacagaaaacgcuuaugugagcgucguuuccucucauuacagcagacgguucacccccgagauugccaagcgcccuaaggugagagaccaggaagggcggaucaauuauuacuggacgcuucuggagcccggagauacaauuaucuuugaggcgaacggcaaucucauugccccucgcuaugcuuucgcccuguccagaggguuuggaagcggcaucauuaccucuaacgcucccauggacgaaugugaugccaaaugccagacaccgcaaggcgcgaucaauuccagccuuccuuuccagaacgugcaccccgucaccaucggggaguguccuaaguacgugcggucugccaaacugcgcaugguuaccggacucagaaauauucccagcauccagucccggggccuguuuggggcuauugccggauucaucgaaggcggguggacaggaaugguggacggcugguauggcuaccaucaccagaacgagcaagggucuggauacgcugccgaucaaaagagcacgcagaaugccauuaacggcaucaccaauaaagucaacuccgugaucgaaaagaugaauacacaguuuaccgcuguugggaaagaguucaacaagcuggagcgcagaauggaaaaucucaacaagaaaguggacgauggauuccuggacauuuggacauauaacgcggagcuucugguccuccuggaaaaugagcggacccuugacuuucacgauagcaacgugaagaaucuguacgaaaaagucaagucucagcucaaaaacaaugccaaggagaucggcaacgggugcuucgaguuuuaucauaaguguaauaacgaaugcauggaguccgugaaaaauggcacguacgacuaucccaaguacagcgaagagucuaaacugaaccgcgagaagauugauggaguuaaacuggaauccaugggcguguaucagauccucgcuauuuacagcacagucgccuccucucuggugcuucugguuagccucggggccaucuccuucuggaugugcucuaauggaagccugcaguguagaaucugcauuuga

SEQ ID NO: 192814 - RNA, 1698 nt, Artificial Sequence
  derived and/or modified CDS sequence (opt5) from hemagglutinin__InfluenzaA__ABD60889
augaaggugaaacugcucguccugcuuugcaccuucacagccacguacgcugacaccaucuguauuggcuaucacgccaacaauagcacagauaccguugacacagugcuggagaagaacgugaccgucacacauuccgugaaucuccuggaagauucucacaacgggaaacuuugccugcucaagggaaucgcgccccugcagcugggcaauuguagcguugcuggguggauucucggaaacccugagugcgaacugcuuaucuccaaagagucuuggagcuacauuguggaaaccccgaaucccgagaacggcacguguuauccuggguacuuugccgacuaugaggaacugagagagcaacucuccucugucagcuccuucgaacgguuugagaucuuccccaaggagagcucuuggccuaaucauaccgugacaggaguuuccgccagcugcucucacaacggcaaguccagcuuuuaccgcaaucugcuuuggcugaccggcaaaaacgggcucuaucccaaucugucuaaguccuacgcuaacaauaaagaaaaggaggugcugguccucuggggagugcaucacccuccgaacaucggcgaucagagagcccuguaccacacagaaaacgcuuaugugagcgucguuuccucucauuacagccggcgcuucacccccgagauugccaaaagaccuaaggugcgggaccaggaagggcgcaucaauuauuacuggacgcuucuggagcccggagauacaauuaucuuugaggcgaacggcaaucucauugccccuagauaugcuuucgcccugucccggggguuuggaagcggcaucauuaccucuaacgcucccauggacgaaugugaugccaagugccagacaccgcaaggcgcgaucaauuccagccuuccuuuccagaacgugcaccccgucaccaucggggaguguccuaaauacgugcgcucugccaagcugagaaugguuaccggacuccggaauauucccagcauccagucccgcggccuguuuggggcuauugccggauucaucgaaggcggguggacaggaaugguggacggcugguauggcuaccaucaccagaacgagcaagggucuggauacgcugccgaucagaaaagcacgcagaaugccauuaacggcaucaccaauaaggucaacuccgugaucgaaaagaugaauacacaguuuaccgcuguugggaaagaguucaacaaacuggagagacggauggaaaaucucaacaagaagguggacgauggauuccuggacauuuggacauauaacgcggagcuucugguccuccuggaaaaugagcgcacccuugacuuucacgauagcaacgugaaaaaucuguacgaaaaggucaaaucucaacucaagaacaaugccaaagagaucggcaacgggugcuucgaguuuuaucauaaguguaauaacgaaugcauggaguccgugaagaauggcacguacgacuaucccaaauacagcgaagagucuaagcugaacagagagaaaauugauggaguuaagcuggaauccaugggcguguaucagauccucgcuauuuacagcacagucgccuccucucuggugcuucugguuagccucggggccaucuccuucuggaugugcucuaauggaagccugcagugucggaucugcauuuga

SEQ ID NO: 192815 - RNA, 1698 nt, Artificial Sequence
  derived and/or modified CDS sequence (opt5) from hemagglutinin__InfluenzaA__ABD60900
augaaggugaaaagacugguccuccugugcaccuucacagccacguacgcugacaccaucuguauuggcuaucacgccaacaauagcacagauaccguugacacagugcuugagaagaacgugaccgucacacauuccgugaaucugcucgaagauucucacaacgggaaacugugccuucugaagggaaucgcgccccuccagcugggcaauuguagcguugcuggguggauucugggaaacccugagugcgaacuccugaucuccaaagagucuuggagcuacauuguggaaaccccgaaucccgagaacggcacguguuauccuggguacuuugccgacuaugaggaacuucgggagcaacuguccucugucagcuccuucgaacgcuuugagaucuuccccaaggagagcucuuggccuaaucauaccgugacaggaguuuccgccagcugcucucacaacggcaaguccagcuuuuacagaaaucuccuguggcuuaccggcaaaaacgggcuguaucccaaucucucuaaguccuacgcuaacaauaaagaaaaggaggugcugguccuguggggagugcaucacccuccgaacaucggcgaucagaaagcccucuaccacacagaaaacgcuuaugugagcgucguuuccucucauuacagccggcgcuucacccccgagauugccaagagaccuaaggugcgggaccaggaagggcgcaucaauuauuacuggacgcugcuugagcccggagauacaauuaucuuugaggcgaacggcaaucugauugccccuagauaugcuuucgcccucucccggggguuuggaagcggcaucauuaccucuaacgcucccauggacgaaugugaugccaaaugccagacaccgcaaggcgcgaucaauuccagccugccuuuccagaacgugcaccccgucaccaucggggaguguccuaaguacgugcgcucugccaaacuuagaaugguuaccggacugcggaauauucccagcauccagucccgcggccucuuuggggcuauugccggauucaucgaaggcggguggacaggaaugguggacggcugguauggcuaccaucaccagaacgagcaagggucuggauacgcugccgaucaaaagagcacgcagaaugccauuaacggcaucaccaauaaagucaacuccgugaucgaaaagaugaauacacaguuuaccgcuguugggaaagaguucaacaagcuggagagacggauggaaaaucugaacaagaaaguggacgauggauuccucgacauuuggacauauaacgcggagcugcuuguccugcucgaaaaugagcgcacccuggacuuucacgauagcaacgugaagaaucuuuacgaaaaagucaagucucagcugaaaaacaaugccaaggagaucggcaacgggugcuucgaguuuuaucauaaguguaauaacgaaugcauggaguccgugaaaaauggcacguacgacuaucccaaguacagcgaagagucuaaacucaacagagagaagauugauggaguuaaacuggaauccaugggcguguaucagauccuggcuauuuacagcacagucgccuccucucucgugcugcuuguuagccugggggccaucuccuucuggaugugcucuaauggaagccuccagugucggaucugcauuuga

SEQ ID NO: 192816 - RNA, 1698 nt, Artificial Sequence
  derived and/or modified CDS sequence (opt5) from hemagglutinin__InfluenzaA__ABD60911
augaaggccaaacugauggugcuccugugcaccuucacagcuacguacgccgacaccaucuguauuggcuaucacgcgaacaauagcacagauaccgucgacacaguucuugagaagaacgugaccgugacacauuccgucaaucugcucgaagauucucacaacgggaaacugugccuucugaagggaaucgcuccccuccagcugggcaauuguagcguggccggguggauucugggaaacccugagugcgaacuccugaucuccaaagagucuuggagcuacauuguugaaaccccgaaucccgagaacggcacguguuauccuggguacuuugccgacuaugaggaacuuagagagcaacuguccucugugagcuccuucgaacgguuugagaucuuccccaaggagagcucuuggccuaaucauaccgucacaggaguguccgcuagcugcucucacaacggcaaguccagcuuuuaccgcaaucuccuguggcuuaccggcaaaaacgggcuguaucccaaucucucuaaguccuacgccaacaauaaagaaaaggagguucuggugcuguggggaguccaucacccuccgaacaucggcgaucagagagcucucuaccacacagaaaacgccuaugugagcguggucuccucucauuacagccggcgcuucacccccgagauugcgaaaagaccuaagguucgggaccaggaagggcgcaucaauuauuacuggacgcugcuugagcccggagauacaauuaucuuugaggccaacggcaaucugauugcuccuugguaugccuucgcucucuccagaggguuuggaagcggcaucauuaccucuaacgcccccaugggcgaaugugacgcgaagugccagacaccgcaaggggccaucaauuccagccugccuuuccagaacgugcaccccgugaccaucggagaguguccuaaauacguccggucugcuaaacuucgcauggugaccggccugagaaauauucccagcauccagucccgggggcucuuuggagccauugcuggcuucaucgaagggggauggacaggcaugguugauggcugguauggguaccaucaccagaacgagcaaggaucuggcuacgccgccgaccagaaaagcacgcagaaugcuauugaugggaucaccaacaaggucaauuccaucauugaaaagaugaacacacaguuuaccgcggugggaaaggaguucaauaaacuggagcgcagaauggaaaaccugaauaagaagguggacgauggcuuccucgacaucuggacauauaacgccgagcugcuuguucugcucgaaaacgagcggacccuggacuuucacgauagcaaugugaaaaaccuuuacgaaaaggucaaaucucaacugaagaauaacgcuaaagagauugggaauggcugcuucgaguuuuaucauaaguguaacaaugaaugcauggaguccgugaagaacggaacguacgacuaucccaaauacagcgaagagucuaagcucaaucgcgagaaaaucgauggcgucaagcuggaauccauggggguguaucagauucuggccaucuacagcacaguugccuccucucucgugcugcuugucagccugggagcuaucuccuucuggaugugcucuaacggcagccuccaguguagaauuugcaucuga

SEQ ID NO: 192817 - RNA, 1701 nt, Artificial Sequence; identical to SEQ ID NO: 192104
  derived and/or modified CDS sequence (opt5) from hemagglutinin__InfluenzaA__ABD60922

SEQ ID NO: 192818 - RNA, 1701 nt, Artificial Sequence
  derived and/or modified CDS sequence (opt5) from hemagglutinin__InfluenzaA__ABD60933
augaaggccaaacugcucgugcugcuuugcgcucugagcgccaccgacgcggauacaaucuguauuggcuaccacgcuaacaauuccacggacaccgucgauacaguucucgagaagaacgugaccgugacacauucugucaaucugcuugaagacagccacaacgggaaacugugcagacucaagggaaucgcuccccugcagcugggcaaauguuccauugccggguggauccucggaaauccugagugcgaaucucuggugagcaagaaguccuggucuuauauugccgagaccccgaacagcgaaaauggcacauguuaccccggguauuucgccgauuacgaggagcuucgggaacaacuguccagcguuucuuccuuugagcgcuucgaaaucuuuccuaaagagagaagcuggcccaagcauaacgugacccggggagucacggcuucuugcucccacaaaggcaagagcucuuucuaucgcaaucuccuguggcuuaccgagaaaaacggcuccuacccuaaucugagcaaguccuaugugaacaauaaggaaaaagagguucucgugcuguggggaguccaucaccccucuaacaucgaagaccagaagacaauuuacagaaaagagaaugccuacgugagcguggucuccagcaacuauaaccggcgcuuuaccccugaaaucgcggagagaccgaagguucgggggcaggccggccgcauuaauuacuauuggacacugcucgagcccggggauaccaucauuuucgaagcuaacggaaaucugaucgccccuuggcacgcuuuugcccuuaacagaggcuucgggucuggaauuaucacguccaaugcgagcauggacgagugugauacaaaaugccagacaccccaaggcgccaucaacucuagccugccuuuucagaauauucaucccgugaccaucggcgaauguccgaaguacgugcgguccaccaaacuccgcauggucaccgggcugagaaacauuccuucuauccagagccggggacuuuucggcgcuauugccggguuuaucgagggaggcuggacagggaugaucgacggaugguauggcuaccaccaucagaaugaacaaggcuccggguaugcugccgaucagaagucuacgcagaacgccauuaauggaaucaccaacaaggugaauagcguuauugagaaaaugaacacacaguucaccgcugugggcaaggaguuuaauaaacuggaaaagcgcauggagaaccucaacaaaaaggucgacgauggguuccuggacaucuggacauacaaugcggaacugcucgugcugcuugagaacgaaagaacccuggacuuccacgauuccaauguuaagaaccucuacgagaaagucaagagccaacugaaaaauaacgccaaggagauuggaaauggcugcuuugaguucuaucacaaauguaacaaugaaugcauggaaucugugaagaacgggacguacgacuaucccaaguacuccgaggagagcaaacuuaaucgggaaaagaucgauggcgugaaacuggaguccaugggagucuaucagauccucgcuauuuacucuacaguggccagcucccugguucugcucgugucucugggcgccaucagcuuuuggaugugcuccaacgggagccuucaguguagaauuugcaucuga

SEQ ID NO: 192819 - RNA, 1701 nt, Artificial Sequence
  derived and/or modified CDS sequence (opt5) from hemagglutinin__InfluenzaA__ABD60944
augaaggccaaacugcucgugcugcuuugcgcucugagcgccaccgacgcggauacaaucuguauuggcuaccacgcuaacaauuccacggacaccgucgauacaguucucgagaagaacgugaccgugacacauucugucaaucugcuugaagacagccacaacgggaaacugugcagacucaagggaaucgcuccccugcagcugggcaaauguuccauugccggguggauccucggaaauccugagugcgaaucucuguucagcaagaaguccuggucuuauauugccgagaccccgaacagcgaaaauggcacauguuaccccggguauuuugccgauuacgaggagcuucgggaacaacuguccagcgugucuuccuucgagcgcuuugaaaucuucccuaaagagagaagcuggcccaagcauaacguuacccggggagugacggcuucuugcucccacaaaggcaagagcucuuuuuaucgcaaucuccuguggcuuaccgagaaaaacggcuccuacccuaaucugagcaaguccuaugucaacaauaaggaaaaagaggugcucguucuguggggagugcaucaccccucuaacaucgaagaccagaagacaauuuacagaaaagagaaugccuacgucagcgugguguccagcaacuauaaccggcgcuucaccccugaaaucgcggagagaccgaagguccgggggcaggccggccgcauuaauuacuauuggacacugcucgagcccggggauaccaucauuuuugaagcuaacggaaaucugaucgccccuugguacgcuuucgcccuuucuagaggcuuuggguccggaauuaucacgagcaacgcgucuauggacgagugugauacaaaaugccagacaccccaaggcgccaucaauagcucccugccuuuccagaacguucaccccgugaccauuggcgaauguccgaaguaugugcggucuaccaaacuccgcauggucaccgggcugagaaauaucccuagcauucagucccggggacuuuuuggcgcuaucgccggguucauugagggaggcuggacagggaugaucgacggaugguacggcuaucaucaccagaacgaacaaggcagcggguacgcugccgaucagaagucuacgcagaaugccaucaacggaauuaccaauaaggugaacuccguuaucgagaaaaugaauacacaguuuaccgcugugggcaaggaguucaacaaacuggaaaagcgcauggagaaucucaacaaaaaggucgacgauggguuccuggacauuuggacauacaacgcggaacugcucgugcugcuugagaaugaaagaacccuggacuuucaugauagcaacguuaagaaucucuaugagaaagugaagucucaacugaaaaacaaugccaaggagaucggaaacggcugcuucgaauuuuaccacaaauguaauaacgagugcauggaauccgucaagaaugggacguaugacuaccccaaguauagcgaggaguccaaacuuaaccgggaaaagauugauggcgugaaacuggagucuaugggagucuaccagauccucgcuaucuauagcacaguggccuccucucugguucugcucgugagccugggcgccauuuccuucuggaugugcagcaaugggucucuucaguguagaaucugcauuuga

SEQ ID NO: 192820 - RNA, 1701 nt, Artificial Sequence
  derived and/or modified CDS sequence (opt5) from hemagglutinin__InfluenzaA__ABD60955
augaaggccaaacugcucgugcugcuuugcgcuuucaccgccacauacgcggacacgaucuguauuggcuaucacgcuaacaauagcaccgauacagucgacaccguucuggagaagaacgugacagugacccauuccgucaaucuccuggaagauucucacaacgggaaacuuugcagacugaagggaaucgcuccccuccagcugggcaauuguagcguggccggguggauucugggaaacccuaaaugcgagucccucuuuucuaaggaaagcugguccuacaucgccgagacaccgaaucccgaaaacggcaccuguuauccuggguacuucgccgacuaugaggagcugcgggaacaacuuucuagcguuuccagcuuugagcgcuucgaaauuuuucccaaggagucuuccuggccuaaucauacggugaccaaaggagucacaaccagcugcucucacaacggcaaguccagcuucuacagaaaucugcucuggcugacagagaaaaacggccuuuaucccaaucugucuaaguccuacgugaacaauaaagaaaaggagguucucgugcuguggggaguccaucacccuagcaacauccgggaucagcgcgcuaucuaccacaccgaaaacgccuauguguccguggucucuagccauuacuccagacgguuuacgccggagauugcgaagcgccccaaaguuagagaccaggaagggcggaucaauuauuacuggacacugcucgagccuggcgauaccauuaucuucgaggccaacgggaaucugauugcucccugguaugccuuugcucuuagccgcggauucggcucugggaucauuacauccaacgccagcauggacgaaugugaugcgaagugccagaccccucaaggagccaucaauucuagccugcccuuucagaacgugcacccggugaccaucggcgaguguccuaaauacgucagauccacaaagcuccggauggugacgggccugcgcaauauucccucuauccagagcagagggcuuuucggagcuauugccggcuuuaucgaagggggauggaccggcaugauugacgggugguauggauaccaucaccagaacgagcaaggcuccggcuacgcugccgaucagaaaagcacacagaaugccaucaacgggaucaccaauaagguuaacucugugauugaaaagaugaauacacaguucaccgcugucggaaaggaguucaacaagcuggagcggcgcauggaaaaucucaacaaaaagguggacgauggcuuucuggacaucuggacguauaacgcggagcugcucguucugcuugaaaaugggagaacacuggacuuccacgauuccaacgugaaaaaucucuacgagaaggucaaaagccaacugaagaacaaugccaaggaaauuggaaacggcugcuuugaguucuaucauaaauguaauaacgagugcauggaaucugugaagaaugggaccuacgacuauccuaaauacuccgaggaaagcaaacuuaaccggggcaaaaucgauggagucaagcuggaguccaugggcguguaucagauucucgcuaucuacucuaccguugccagcucccuggugcugcucgucucucugggggccaucagcuuuuggaugugcuccaauggaagccuucaguguagaauuugcaucuga

SEQ ID NO: 192821 - RNA, 1701 nt, Artificial Sequence; identical to SEQ ID NO: 192104
  derived and/or modified CDS sequence (opt5) from hemagglutinin__InfluenzaA__ABD61260

SEQ ID NO: 192822 - RNA, 1701 nt, Artificial Sequence; identical to SEQ ID NO: 192104
  derived and/or modified CDS sequence (opt5) from hemagglutinin__InfluenzaA__ABD61271

SEQ ID NO: 192823 - RNA, 1701 nt, Artificial Sequence; identical to SEQ ID NO: 192358
  derived and/or modified CDS sequence (opt5) from hemagglutinin__InfluenzaA__ABD61282

SEQ ID NO: 192824 - RNA, 1701 nt, Artificial Sequence; identical to SEQ ID NO: 192588
  derived and/or modified CDS sequence (opt5) from hemagglutinin__InfluenzaA__ABD61293

SEQ ID NO: 192825 - RNA, 1701 nt, Artificial Sequence; identical to SEQ ID NO: 192810
  derived and/or modified CDS sequence (opt5) from hemagglutinin__InfluenzaA__ABD61304

SEQ ID NO: 192826 - RNA, 1701 nt, Artificial Sequence; identical to SEQ ID NO: 192722
  derived and/or modified CDS sequence (opt5) from hemagglutinin__InfluenzaA__ABD61315

SEQ ID NO: 192827 - RNA, 1701 nt, Artificial Sequence; identical to SEQ ID NO: 192144
  derived and/or modified CDS sequence (opt5) from hemagglutinin__InfluenzaA__ABD61337

SEQ ID NO: 192828 - RNA, 1701 nt, Artificial Sequence
  derived and/or modified CDS sequence (opt5) from hemagglutinin__InfluenzaA__ABD61348
augaagaccaucauugcccugagcuacauccucugccugguguucgcucagaaacuucccgucaacgacaauuccacagccacgcugugucucggccaccaugcgguuccuaacgggacccuggugaagacaauuaccaaugaucacaucgaggugacaaacgcuaccgaacuuguccaaucuagcuccacaggaagaauuugcgacucuccgcaucagauccuggauggcgagaauuguacccucaucgacgcccugcugggggauccccacugcgacggauuucagaacaaagaaugggaucucuucguggagcggagcacggccuauuccaauuguuacccuuaugacguucccgauuacgcuucucugcgcagccuuguggccuccagcggcacccuggaauuuaacaaugagucuuucaacuggacaggggucgcucagaauggaaccuccagcgccugcaagagacggucuauuaaauccuuuuucagccgccucaacuggcugcaucaacuuaaguauaaguacccugcgcugaaugugacaaugcccaacaaugagaaauuugacaagcucuauaucuggggcguucaccacccuucuaccgauuccgaccagauuagccuguacgcccaggcuuccggcagagugacggucucuacaaaacggagccagcaaaccgugaucccgaacauugggucccgccccugggugagaggagucagcucucggaucuccauuuacuggacaaucguuaagccuggcgauauccugcucauuaacagcaccgggaaucugaucgcuccccgcggauauuucaaaauuagaucuggcaagagcuccaucaugcggucuaacgccccuauugggaaguguaauagcgaaugcaucacccccaacggauccaucccgaauaacaaaccuuuucagaaugugaaccgcauuacauacggcgccugucccagauaugugaagcagaauacgcuuaaacuggcgaccggcaugcggaacgucccugagaagcagacacgcgggaucuucggagccauugcuggcuuuaucgaaaaugggugggagggaaugguggacggcugguacggguucagacaucaaaacagcgagggaaccggccaggccgcugaccucaaaucuacacaggccgccauuaaucaaaucaacggcaagcugaaucggcuuaucgagaaaaccaacgaaaaguuucaccagauugaaaaggaguucuccgaaguugaggggagaauccaggaucuggagaaauauguggaagacacgaagauugaucucuggagcuacaacgcugagcugcuggucgcgcucgaaaaucagcauacaaucgaccugaccgauucugagaugaacaaacuuuucgaacgcacccggaagcaacugagagagaaugccgaggacaugggaaacggcugcuuuaaaauuuaucacaagugugauaaugcuugcaucggguccauucgcaacggaacauacgaccacgauguguaccgggacgaagcccucaauaacagauuccagaucaagggcguugagcugaaaagcggguauaaggauuggauccuuuggauuuccuuugccaucucuugcuuccugcucugugugguccugcugggcuuuauuaugugggcuugccagaaaggaaauauccgcuguaacauuugcaucuga

SEQ ID NO: 192829 - RNA, 1701 nt, Artificial Sequence; identical to SEQ ID NO: 192144
  derived and/or modified CDS sequence (opt5) from hemagglutinin__InfluenzaA__ABD61359

SEQ ID NO: 192830 - RNA, 1701 nt, Artificial Sequence; identical to SEQ ID NO: 192782
  derived and/or modified CDS sequence (opt5) from hemagglutinin__InfluenzaA__ABD61370

SEQ ID NO: 192831 - RNA, 1701 nt, Artificial Sequence; identical to SEQ ID NO: 192722
  derived and/or modified CDS sequence (opt5) from hemagglutinin__InfluenzaA__ABD61381

SEQ ID NO: 192832 - RNA, 1701 nt, Artificial Sequence
  derived and/or modified CDS sequence (opt5) from hemagglutinin__InfluenzaA__ABD61392
augaagaccaucauugcccugagcuacauccucugccugguguucgcucagaaacuucccggcaacgacaauuccacagccacgcugugucucgggcaccaugcggucccuaacggaacccugguuaagacaauuaccaaugaucaaaucgaggugacaaacgcuaccgaacuugugcagucuagcuccacaggcgggauuugcgacucuccgcaccagauccuggauggagagaauuguacccucaucgacgcccugcugggcgauccccauugcgacggguuucagaacaaagaaugggaucucuucgucgagagaagcaaggccuauuccaauuguuacccuuaugacgugcccgauuacgcuucucugcggagccuuguugccuccagcggaacgcuggaauuuaacaaugagucuuucaacuggaccggcguggcucaaaauggcacauccagcgccugcaaacgcgggucuaacaaguccuuuuucagcagacucaauuggcugcaccagcuuaaguauaaauacccugcgcugaacgucaccaugcccaauaacgagaaguuugacaaacucuauauuuggggagugcaucacccuucuacagauuccgaccagaucagccuguacgcccaggcuccgggccggguuaccguguccacgaagcgcucucaacagacagucauucccaacaucgggagcagaccuugggugcggggaguguccagccgcauuucuaucuacuggaccauugucaaacccggcgauauccugcucaucaauuguacagggaaccugauugccccuagaggauauuucaagauccgguccggcaagagcucuauuaugcgcagcgacgcuuccaucggcaaaugcaauucugaauguauuacccccaacgggagcaucccgaaugacaagccuuuucagaacguuaauagaaucaccuacggagccugcccccgguaugugaaacagaacacacuuaagcuggcgacgggcaugcgcaaugugccugagaaacaaaccagagggauuuucggagccaucgcuggcuuuauugaaaacgggugggagggaauggucgauggcugguacggcuuccggcaccaaaauuccgaggggacaggacaggccgcugaccucaagagcacccaggccgccaucaaccagauuaauggcaaacugaaccgccuuaucgaaaagacaaaugagaaguuucaucagaucgaaaaagaguucucugaaguggaggggcggauucaggaucuggagaaguauguugaagacaccaaaaucgaucucugguccuacaacgcugagcugcugguggcgcucgaaaaccaacacacgauugaccugacagauagcgagaugaauaaacuuuucgaaagaaccaagaagcagcugagagagaacgccgaggacaugggaaauggcuguuuuaagaucuaucauaaaugcgauaacgcuugcauugggucuauccgcaauggcaccuacgaccacgaugucuaccgggacgaagcccucaacaauagauuccagauuaagggaguggagcugaaauccggcuauaaggacuggauccuuuggaucagcuuugccauuuccuguuuccugcucugcguugugcugcugggguuuaucaugugggcuugucagaaaggaaacauucgcugcaauaucuguauuuga

SEQ ID NO: 192833 - RNA, 1701 nt, Artificial Sequence; identical to SEQ ID NO: 192812
  derived and/or modified CDS sequence (opt5) from hemagglutinin__InfluenzaA__ABD61403

SEQ ID NO: 192834 - RNA, 1701 nt, Artificial Sequence
  derived and/or modified CDS sequence (opt5) from hemagglutinin__InfluenzaA__ABD61529
augaagaccaucauugcccugagcuacaucuucugccucguguuugcucagaaacugcccggcaacgacaauuccacagccacgcuuugucuggggcaccaugcggucccuaacggaacccucguuaagacaauuaccaaugaucaaaucgaggugacaaacgcuaccgaacuggugcagucuagcuccacaggcagaauuugcgacucuccgcaccggauccuugaugggaaaaauuguacccugaucgacgcccuccugggagauccccauugcgacggcuuccagaacgagaagugggaucuguuugucgaacgcagcaaagccuucuccaauuguuauccuuacgacgugcccgauuaugcuucucucagaagccugguugccuccagcgggacgcuugaguuuauuaacgaaggauucaauuggaccggcgugacacagucuggcggguccuacgcuugcaagcggggaagcgucaacagcuuuuucucccgccugaauuggcucuaugagagcgagucuaaguacccugugcugaacguuaccaugcccaauaacggcaaauuugacaagcuguauaucuggggagugcaccauccuuccacagauaaagaacaaaccaaucuguacgucagagccagcgggcgggugacgguguccacaaagcgcucucagcagaccgucauuccgaacaucggcagcagacccuggguucgggggcucuccagccgcauuucuaucuacuggacaauugugaaaccuggagacauccugcugaucaacuccaccggcaaucucauugcgcccagaggcuauuucaagauccggaccgggaagucuucuauuaugcgcagcgaugccccuaucggaacauguuccucugagugcauuacgcccaacggcagcaucccgaaugacaaaccuuuucagaacgugaauaagaucaccuacggggcuugucccagauaugucaaacaaaacacacugaaacuugccaccggaaugcggaaugugccugaaaagcagacacgcggcauuuucggggcuaucgccggauuuauugagaacggcugggagggcaugguugacgggugguacggauucagacaccaaaauuccgaaggcaccgggcaggcggccgaucuuaagagcacgcaggcugccaucgaccagauuaacggacggcucaauagacugaucgagaaaacaaacgaaaaguuccaccagaucgagaaggaauuuucugagguggagggccgcauucaagaucuugaaaaauaugucgaggacaccaagaucgaucugugguccuacaaugcugaacuccugguggcccuggagaaccagcauaccauugaccucacagauagcgaaaugaauaaacuguucgagaagacccggaaacagcuuagagagaacgccgaagacauggggaacggcugcuuuaagaucuaucacaagugugauaaugcuugcauuggaucuauccgcaacggcacauacgaccaugauguuuaccgggacgaggcgcugaauaacagauuccagauuaaagggguggaacucaaguccggauauaaagacuggauccuguggaucagcuuugccauuuccugcuuccuucugugugucgugcuccugggcuuuaucaugugggcuugccaaaaggggaauauucgcuguaacaucugcauuuga

SEQ ID NO: 192835 - RNA, 1698 nt, Artificial Sequence; identical to SEQ ID NO: 192813
  derived and/or modified CDS sequence (opt5) from hemagglutinin__InfluenzaA__ABD61540

SEQ ID NO: 192836 - RNA, 1701 nt, Artificial Sequence
  derived and/or modified CDS sequence (opt5) from hemagglutinin__InfluenzaA__ABD61757
augaagaccaucauugcccugagcuacaucuucugccucguguuugcucaggaccugcccggcaacgauaauuccacagccacgcuuugucuggggcaccaugcggucccuaacggaacccucguuaaaacaauuaccaaugaccaaaucgaggugacaaacgcuaccgaacuggugcagucuagcuccacaggcaagauuugcgauaauccgcacagaauccuugacgggaucaacuguacccugauugaugcccuccugggagacccccauugcgauggcuuccagaaugagaaaugggaccuguuugucgaacggucuaaggccuucagcaacuguuauccuuacgaugugcccgacuaugcuucccuccgcucucugguugccagcuccgggacgcuugaguuuaucaaugaaggauucaacuggaccggcgugacacagaauggcgggagcucugcuugcaaaagaggaccugauaacggcuuuuucucccggcugaauuggcucuacaagagcgggucuaccuaucccguccaaaacgugacaaugccuaauaacgacaacuccgauaagcuguacauuuggggaguucaccauccgagcaccgacaaagagcagacggaccuuuaugugcaggccucuggcaaggucacaguguccaccaaacgcagccagcaaacagugauccccaaugucggguccagaccuuggguucggggacugucuagccgcguguccauuuacuggaccaucgugaagcccggcgauauucucgucaucaacagcaauggcaaccugaucgcgccuagaggguacuuuaaaaugcggaccggaaagucuuccauuaugcgcagcgacgcccccaucggcacauguucuagcgagugcauuacgccgaauggguccaucccuaacgauaagcccuuccagaaugugaacaaaauuaccuauggagcuuguccuaaguacguuaaacagaauacacugaagcucgccaccggcaugagaaacgugcccgaaaaacagacacgggggaucuuuggagcuaucgccggcuucauugagaauggcugggaagggaugaucgacggaugguauggcuuucgccaccaaaacucugaggggaccggacaggcggccgaucuuaagagcacgcaggcugccauugaccaaaucaauggcaaacugaacagagucauugagaagacaaaugaaaaguuccaccagaucgagaaagaguucuccgaaguggaagggcggauccaggaucuggagaaguacguugaggacaccaaaauugaucucuggagcuauaacgcugaacugcuuguggcccuggagaaccagcauaccaucgaccucacagauucugaaaugaauaagcuguuugagaaaacccgcagacaacugcgggaaaacgccgaggacaugggcaauggaugcuucaagauuuaccacaagugugacaacgcuugcaucggcuccauuagaaaugggacauaugaucaugacgucuaccgcgaugaggcgcucaacaaucgguuucagaucaaaggaguggaacuuaagagcggcuacaaagacuggauucuguggaucucuuucgccaucuccugcuuucugcucugugucgugcugcuuggguucauuaugugggcuugccagaagggaaacaucagauguaauauuugcaucuga

SEQ ID NO: 192837 - RNA, 1701 nt, Artificial Sequence
  derived and/or modified CDS sequence (opt5) from hemagglutinin__InfluenzaA__ABD61777
augaagaccaucauugcccugagcuacaucuucugccucggcuuugcucagaaacugcccgggaacgacaauuccacagccacgcuuugucugggacaccaugcggugccuaacggcacccucgucaagacaauuaccaaugaucaaaucgagguuacaaacgcuaccgaacuggugcagucuagcuccacagggagaauuugcgacucuccgcaccggauccuugauggaaagaauuguacccugaucgacgcccuccugggcgauccccauugcgacggguuccagaacgagaagugggaucuguuuguggaacgcagcaaagccuucuccaauuguuauccuuacgacguccccgauuaugcuucucucagaagccugguggccuccagcggaacgcuugaguuuauuaacgaaggcuucaauuggaccggcguuacacagucugggggauccuacgcuugcaagcggggcagcgugaacuccuuuuucucucgccugaauuggcucuaugagagcgagucuaaguacccugcccugaacgucaccaugcccaauaacgggaaauuugacaagcuguauaucuggggagugcaccauccuuccacagauaaagaacaaaccaaucuguacguuagagcgagcggccgggugacggucuccacaaagcgcucucagcagaccgugauuccgaacaucgggagcagacccugggugcggggacucuccagccgcauuucuaucuacuggacaauugucaaaccuggcgacauccugcugaucaacuccaccggcaaucucauugcccccagaggguauuucaagauccggaccggaaagagcucuauuaugcgcagcgaugcuccuaucggcacauguuccucugagugcauuacgcccaacgggagcaucccgaaugacaaaccuuuucagaacguuaauaagaucaccuacggagccugucccagauaugugaaacaaaacacacugaaacuugcuaccggcaugcggaaugugccugaaaaacagacacgcgggauuuucggagccaucgcgggcuuuauugagaacggcugggaggggauggucgacggaugguacggcuucagacaccaaaauuccgaagggaccggacaggccgcugaucuuaagagcacgcaggccgcuaucgaccagauuaacggcaaacucaaucggcugaucgagaagacaaacgaaaaguuccaccagaucgagaaagaauuuucugagguggaggggcgcauucaagaucuugaaaaguauguugaggacaccaaaaucgaucugugguccuacaaugccgaacuccugguggcccuggagaaccagcauaccauugaccucacagauagcgaaaugaauaagcuguucgagaaaaccagaaagcagcuucgggagaacgcugaagacaugggcaacggaugcuuuaagaucuaucacaaaugugauaaugcgugcauuggcucuaucagaaacgggacauacgaccaugaugucuaccgcgacgaggcccugaauaaccgguuccagauuaagggaguggaacucaaauccggcuauaaggacuggauccuguggaucagcuuugcuauuuccugcuuccuucuguguguugugcuccugggguuuaucaugugggccugccaaaaaggaaauauuagauguaacaucugcauuuga

SEQ ID NO: 192838 - RNA, 1701 nt, Artificial Sequence
  derived and/or modified CDS sequence (opt5) from hemagglutinin__InfluenzaA__ABD77598
augaagaccaucauugcccugagcuacauccucugccugguguucgcucagaaacuucccgucaacgacaauuccacagccacgcugugucucggccaccaugcgguuccuaacgggacccuggugaagacaauuaccaaugaucacaucgaggugacaaacgcuaccgaacuuguccaaucuagcccgacaggaagaauuugcgacucuccccaucagauccuggauggcgagaauuguacccucaucgacgcccugcugggggauccucacugcgacggauuucagaacaaagaaugggaucucuucguggagcggucuacggccuauagcaauuguuaccccuaugacguuccugauuacgcuucccugcgcucucuuguggccagcuccggcacccuggaauuuaacaaugagagcuucaacuggacaggggucgcucagaauggaaccucuuccgccugcaagagacggagcauuaaauccuuuuucucccgccucaacuggcugcaucaacuuaaguauaaguaccccgcgcugaaugugacaaugccuaacaaugagaaauuugacaagcucuauaucuggggcguucaccacccgagcaccgauucugaccagauuucccuguacgcccaggcuagcggcagagugacggucuccacaaaacggucucagcaaaccgugauccccaacauugggagccgcccuugggugagaggagucuccagccggaucucuauuuacuggacaaucguuaagcccggcgauauccugcucauuaacuccaccgggaaucugaucgccccucgcggauauuucaaaauuagaagcggcaagucuagcaucaugcgguccaacgcucccauugggaaguguaauucugaaugcaucaccccgaacggaagcaucccuaaugacaaacccuuucagaacgugaaucgcauuacauacggcgccuguccuagauaugugaagcagaacacgcuuaaacuggcgaccggcaugcggaauguccccgagaagcagacacgcgggaucuucggagccauugcuggcuuuaucgaaaacgggugggagggaaugguggacggcugguacggguucagacaucaaaauuccgagggaaccggccaggccgcugaucucaaaagcacacaggccgccauuaaccaaaucaauggcaagcugaaccggcuuaucgagaaaaccaaugaaaaguuucaccagauugaaaaggaguucucugaaguugaggggagaauccaggaccuggagaaauauguggaagauacgaagauugaccucugguccuacaacgcugagcugcuggucgcgcucgaaaaccagcauacaaucgaucugaccgacagcgagaugaauaaacuuuucgaacgcacccggaagcaacugagagagaacgccgaggauaugggaaauggcugcuuuaaaauuuaucacaagugugacaacgcuugcaucgggucuauucgcaauggaacauacgaucacgacguguaccgggaugaagcccucaacaauagauuccagaucaagggcguugagcugaaauccggguauaaggacuggauccuuuggauuagcuuugccaucuccugcuuccugcucugugugguccugcugggcuuuauuaugugggcuugccagaaaggaaacauccgcuguaauauuugcaucuga

SEQ ID NO: 192839 - RNA, 1701 nt, Artificial Sequence; identical to SEQ ID NO: 192722
  derived and/or modified CDS sequence (opt5) from hemagglutinin__InfluenzaA__ABD77609

SEQ ID NO: 192840 - RNA, 1701 nt, Artificial Sequence; identical to SEQ ID NO: 192722
  derived and/or modified CDS sequence (opt5) from hemagglutinin__InfluenzaA__ABD77620

SEQ ID NO: 192841 - RNA, 1701 nt, Artificial Sequence; identical to SEQ ID NO: 192722
  derived and/or modified CDS sequence (opt5) from hemagglutinin__InfluenzaA__ABD77631

SEQ ID NO: 192842 - RNA, 1701 nt, Artificial Sequence; identical to SEQ ID NO: 192722
  derived and/or modified CDS sequence (opt5) from hemagglutinin__InfluenzaA__ABD77642

SEQ ID NO: 192843 - RNA, 1701 nt, Artificial Sequence; identical to SEQ ID NO: 192722
  derived and/or modified CDS sequence (opt5) from hemagglutinin__InfluenzaA__ABD77653

SEQ ID NO: 192844 - RNA, 1698 nt, Artificial Sequence; identical to SEQ ID NO: 192813
  derived and/or modified CDS sequence (opt5) from hemagglutinin__InfluenzaA__ABD77708

SEQ ID NO: 192845 - RNA, 1698 nt, Artificial Sequence
  derived and/or modified CDS sequence (opt5) from hemagglutinin__InfluenzaA__ABD77719
augaaggugaaacugcucguccugcuuugcaccuucacagccacguacgcugacaccaucuguauuggcuaucacgccaacaauagcacagauaccguugacacagugcuggagaagaacgugaccgucacacauuccgugaaucuccuggaagauucucacaacgggaaacuuugccugcucaagggaaucgcgccccugcagcugggcaauuguagcguugcuggguggauucucggaaacccugagugcgaacugcuuaucuccaaagagucuuggagcuacauuguggaaaccccgaaucccgagaacggcacguguuauccuggguacuuugccgacuaugaggaacugagagagcaacucuccucugucagcuccuucgaacgguuugagaucuuccccaaggagagcucuuggccuaaucauaccgugacaggaguuuccgccagcugcucucacaacggcaaguccagcuuuuaccgcaaucugcuuuggcugaccggcaaaaacgggcucuaucccaaucugucuaaguccuacgcuaacaauaaagaaaaggaggugcugguccucuggggagugcaucacccuccgaacaucggcgaucagagagcccuguaccacacagaaaacgcuuaugugagcgucguuuccucucauuacagccggcgcuucacccccgagauugccaaaagaccuaaggugcggaaucaggaagggcgcaucaacuauuacuggacgcuucuggagcccggagacacaauuaucuuugaggcgaauggcaaccucauugccccuagauaugcuuucgcccugucccggggguuuggaagcggcaucauuaccucuaaugcucccauggaugaaugugacgccaagugccagacaccgcaaggcgcgaucaacuccagccuuccuuuccagaaugugcaccccgucaccaucggggaguguccuaaauacgugcgcucugccaagcugagaaugguuaccggacuccggaacauucccagcauccagucccgcggccuguuuggggcuauugccggauucaucgaaggcggguggacaggaaugguggauggcugguauggcuaccaucaccagaaugagcaagggucuggauacgcugccgaccagaaaagcacgcagaacgccauuaauggcaucaccaacaaggucaauuccgugaucgaaaagaugaacacacaguuuaccgcuguugggaaagaguucaauaaacuggagagacggauggaaaaccucaacaagaagguggaugacggauuccuggauauuuggacauauaaugcggagcuucugguccuccuggaaaacgagcgcacccuugacuuucacgacagcaaugugaaaaaccuguacgaaaaggucaaaucucaacucaagaauaacgccaaagagaucggcaaugggugcuucgaguuuuaucauaaguguaacaaugaaugcauggaguccgugaagaacggcacguacgauuaucccaaauacagcgaagagucuaagcugaauagagagaaaauugacggaguuaagcuggaauccaugggcguguaucagauccucgcuauuuacagcacagucgccuccucucuggugcuucugguuagccucggggccaucuccuucuggaugugcucuaacggaagccugcagugucggaucugcauuuga

SEQ ID NO: 192846 - RNA, 1698 nt, Artificial Sequence; identical to SEQ ID NO: 192813
  derived and/or modified CDS sequence (opt5) from hemagglutinin__InfluenzaA__ABD77730

SEQ ID NO: 192847 - RNA, 1701 nt, Artificial Sequence; identical to SEQ ID NO: 192722
  derived and/or modified CDS sequence (opt5) from hemagglutinin__InfluenzaA__ABD77752

SEQ ID NO: 192848 - RNA, 1701 nt, Artificial Sequence; identical to SEQ ID NO: 192722
  derived and/or modified CDS sequence (opt5) from hemagglutinin__InfluenzaA__ABD77763

SEQ ID NO: 192849 - RNA, 1701 nt, Artificial Sequence
  derived and/or modified CDS sequence (opt5) from hemagglutinin__InfluenzaA__ABD77774
augaagaccaucauugcccugagcuacauccucugccugguguucgcucagaaacuucccgucaacgacaauuccacagccacgcugugucucggccaccaugcgguuccuaacgggacccuggugaagacaauuaccaaugauaacaucgaggugacaaaugcuaccgaacuuguccaaucuagcuccacaggaagaauuugcgacucuccgcaccagauccuggauggcgagaacuguacccucaucgacgcccugcugggggauccccauugcgacggauuucagaauaaagaaugggaucucuucguggagcggagcacggccuauuccaacuguuacccuuaugacguucccgauuacgcuucucugcgcagccuuguggccuccagcggcacccuggaauuuaauaacgagucuuucaauuggacaggggucgaccagaacggaaccuccagcgcuugcaagagacggucuaauaaauccuuuuucagccgccucaacuggcugcaccaacuuaaguauaaguacccugcccugaaugugacaaugcccaacaacgagaaauuugauaagcucuauauuuggggcguucaucacccuucuaccgacuccgaucagaucagccuguacgcgcaggccuccggcagagugacggucucuacaaaacggagccagcaaaccgugauuccgaauaucgggucccgccccugggugagaggagucagcucucggauuuccaucuacuggacaauuguuaagccuggcgacauccugcucaucaacagcaccgggaaucugauugcuccccgcggauauuucaaaaucagaucuggcaagagcuccauuaugcggucuaacgccccuaucgggaaguguaauagcgaaugcauuacccagaacggauccauccccaaugacaaaccguuucagaacgugaaucgcaucacauacggcgcuuguccuagauaugugaagcagaacacgcuuaaacuggccaccggcaugcggaauguccccgagaagcaaacacgcgggauuuucggagcgaucgccggcuuuauugaaaacgggugggagggaaugguggauggcugguacggguucagacaccagaauagcgagggaaccggccaggcugccgaccucaaaucuacacaagcugccaucaaccagauuaauggcaagcugaaccggcuuaucgagaaaaccaacgaaaaguuucaucagaucgaaaaggaguucuccgaaguugaggggcgcauucaggaucuggagaaauauguggaagacacgaagaucgaucucuggagcuacaaugccgagcugcuggucgcucucgaaaaccaacacacaauugaccugaccgauucugagaugaauaaacuuuucgaaagaacccggaagcagcugagagagaacgcggaggacaugggaaauggcugcuuuaaaaucuaucauaagugugauaacgccugcauuggguccauccgcaauggaacauacgaccacgauguguaccgggacgaagcucucaacaauagauuccagauuaagggcguugagcugaaaagcggguauaaggacuggauccuuuggaucuccuuugccauuucuugcuuccugcucugugugguccugcugggcuuuaucaugugggccugccagaaaggaaacauucgcuguaauaucugcauuuga

SEQ ID NO: 192850 - RNA, 1701 nt, Artificial Sequence; identical to SEQ ID NO: 192849
  derived and/or modified CDS sequence (opt5) from hemagglutinin__InfluenzaA__ABD77785

SEQ ID NO: 192851 - RNA, 1701 nt, Artificial Sequence
  derived and/or modified CDS sequence (opt5) from hemagglutinin__InfluenzaA__ABD77807
augaaggccaaacugcucauccugcuuugcgcucugagcgccaccgacgcggauacaauuuguaucggcuaccacgcuaacaauuccacggacaccguggauacaguccucgagaagaacguuaccgugacacauucugugaaucugcuugaagacagccacaacgggaaacugugcagacucaagggaauugccccgcugcagcugggcaaauguaauaucgccggguggauucucggaaacccugagugcgaaucccugcuuucuaagcggagcugguccuauaucgcugagacccccaauucugaaaacggcacauguuaccccggggauuucgccgacuaugaggagcugcgcgaacaacucagcuccgucagcucuuuugagagauucgaaaucuuuccuaaggagcgguccuggcccaaacauaauauuacccgcggagugacggcugccugcagccacgcgggcaagucuuccuucuacaaaaaccugcuuuggcugaccgagacaaauggcagcuauccuaagcucucuaaauccuacguuaacaauaaggaaaaggaggugcugguccuguggggagugcaucaccccagcaacaucgaagaucagaaaacccucuauagaaaggagaaugccuacguuuccguggucucuagcaacuacaaccggcgcuuuacaccugaaauugcugagagaccgaaagugcgggggcaggccggccgcaugaauuauuacuggacccugcuugagcccggggacacgaucauuuucgaagcuaacggaaaucugaucgccccuugguaugcguuugcccucuccagaggcuucgggagcggaauuaucacaucuaacgcuuccauggaugagugugacaccaagugccagacaccccaaggcgccaucaauagcucucugccuuuucagaacauucaccccgugaccaucggcgaauguccgaaauacgucaagagcaccaaacuucggaugguuacagggcugcgcaauauuccuuccauccagucuagaggacucuucggcgcuauugccggguuuaucgagggaggcuggacggggaugaucgauggaugguauggcuaccaucaccagaacgaacaaggcagcggguaugccgcugaccagaaguccacccagaaugcgauuaacggaaucacaaauaaggugaacagcgugauugagaaaaugaauacccaguucacagccgucggcaaggaguuuaacaaacuggaaaagcggauggagaaucugaacaaaaagguggaugacggguuccucgacaucuggaccuacaacgcugaacugcuuguucugcucgagaaugaacgcacgcuggauuuccaugacucuaacgugaagaaucuuuacgagaaagucaagaaccaacugagaaauaacgccaaagagauuggaaauggcugcuuugaguucuaucacaaguguaacaaugaaugcauggaauccgugaaaaacgggacauacgauuaucccaaguacagcgaggagucuaagcucaaucgggagaaaaucgacggcguuaagcuggaauccaugggaguguaucagauccuggccauuuacagcaccgucgcuuccucucucgugcugcuugucagccugggcgccaucuccuuuuggaugugcucuaacgggagccuccaguguagaauuugcaucuga

SEQ ID NO: 192852 - RNA, 1701 nt, Artificial Sequence
  derived and/or modified CDS sequence (opt5) from hemagglutinin__InfluenzaA__ABD77818
augaaggccaaacugcucgugcugcuuugcgcucugagcgccaccgacgcggauacaaucuguauuggcuaccacgcuaacaauuccacggacaccgucgauacaguucucgagaagaacgugaccgugacacauucugucaaucugcuugaagacagccacaacgggaaacugugcagacucaagggaaucgcuccccugcagcugggcaaauguuccauugccggguggauccucggaaauccugagugcgaaucucuguucagcaagaaguccuggucuuauauugccgagaccccgaacagcgaaaauggcacauguuaccccggguauuuugccgauuacgaggagcuucgggaacaacuguccagcgugucuuccuucgagcgcuuugaaaucuucccuaaagagagcucuuggcccaagcauaccguuacgagaggagugaccgcuuccugcagccacaaaggcaagucuuccuuuuaucggaaccuccuguggcuuacagagaaaaauggcagcuacccuaaccuguccaagucuuaugucaauaacaaggaaaaagaggugcucguucuguggggagugcaucaccccagcaauaucgaagaccagaagaccauuuaccgcaaagagaacgccuacgucuccguggugagcucucacuauaauagacgguucacaccugaaaucgcgaagcgcccgaaagucagagaucaggaggggcggauuaacuacuauuggacccugcucgagcccggcgacacgaucauuuuugaagccaacgggaaucugaucgcuccuugguacgccuucgcucuuucccgcggauuuggcagcgggauuaucacaucuaacgccagcauggaugagugugacgcgaagugccagacaccccaaggagccaucaauuccucucugccuuuccagaacguucaucccgugaccauuggcgaauguccgaaauaugugagaagcaccaagcuccggauggucaccggccugcgcaauaucccuuccauucagagcagagggcuuuuuggagcuaucgccggcuucauugaagggggauggacaggcaugaucgaugggugguacggauaucaccaucagaacgaacaaggcucuggcuacgcugccgaccagaaguccacgcagaaugccaucaacgggauuaccaauaaagugaacagcguuaucgagaagaugaauacacaguuuaccgcugugggaaaagaguucaacaagcuggaaaaacggauggagaaucucaacaagaaggucgaugacggcuuccuggacauuuggacauacaaugcggaacugcucgugcugcuugagaacgaacgcacccuggauuuucacgacucuaacguuaaaaaucucuaugagaaggugaaaucccaacuuaagagcaacgccaaagagaucgggaauggaugcuucgaauuuuaccacaaguguaacaaugagugcauggaauccgucaagaacggcacguaugauuaccccaaauauucugaggagagcaagcugaauagagagaaaauugacggggugaagcuggaguccaugggcgucuaccagauccucgcuaucuauucuacaguggccagcucccugguucugcucgugagccugggagccauuucuuucuggaugugcuccaacggcagccuucagugucggaucugcauuuga

SEQ ID NO: 192853 - RNA, 1701 nt, Artificial Sequence
  derived and/or modified CDS sequence (opt5) from hemagglutinin__InfluenzaA__ABD77829
augaagaccaucauugcccugagcuacauccucuaucugguguucgcucagaaacuucccggcaacgacaauuccacagccacgcugugccucgggcaccaugcggucccuaacggaacccugguuaagacaauuaccaaugaucaaaucgaggugacaaacgcuaccgaacuugugcagucuagcuccacaggcagacugugugacucuccgcaccggauucucgaugggaaaaauugcacccugaucgacgcccugcucggagauccccauugugacggcuuucagaacaaggagugggaucuguucgucgaacgcagcaaagccuacuccgacugcuauccuuacgaugugcccgacuaugcuucucuuagaagccugguugccuccagcgggacgcucgaguuuaccaaugaaggauucaacuggacaggcguggcucagaauggcaccucuuacgccuguaagcggggguccgucaagagcuuuuucucucgccugaacuggcuucacaaacuggaguauaaguacccugcgcucaaugugacaaugcccaacaaugauaaauuugacaagcuguacaucuggggaguucaucacccuuccaccgauagcgaccaaacgucucuguaugugcaggccuccggcagagucacagugagcaccaaacggucccagcagacagugauuccgaacaucgggucucgccccugggucagaggaguuagcucccggauuagcaucuacuggaccauugugaagccuggcgacauccuccugauuaauucuaccgggaaccuuaucgcuccccgcggauauuucaagaucagauccggcaaaagcucuauuaugcggagcgaugccccuaucggcaacugcaauuccgaguguauuacacccaacgggucuaucccgaaugacaagccuuuucaaaacgugaaucgcauuacguacggagcuugccccagauaugucaaacagaacacccugaagcucgccacaggcaugcggaaugugccugaaaaacagacccgcgggaucuucggagcgaucgccggcuuuauugagaacgggugggaaggaaugguugauggcugguacggcuucagacaccagaauagcgaggggacaggacaagcugccgaccugaaguccacccaggcugccaucaaccagauuaauggcaaacuuaaccggcugaucgagaagacgaaugaaaaguuucaucaaauugagaaagaguucagcgaaguggaagggagaauccaggaucucgagaaguaugucgaggacacaaaaaucgaucuguggucuuacaacgccgaacugcucguggcucuggagaaucagcacaccauugaccuuaccgauuccgaaaugaacaagcuguucgagcgcacacggaaacagcucagagaaaacgcggaggacaugggaaauggcuguuuuaagaucuaccauaagugcgauaacgccuguauugggagcauccgcaauggcaccuaugaccacgacguuuaccgggaugaggcucugaacaauagauuccaaauuaaaggaguggaacuuaagucuggcuauaaagacuggauccuguggauuuccuuugccaucagcugcuuccuccugugcgucgugcugcucggguuuaucaugugggccugucagaagggaaacauucgcugcaauaucuguauuuga

SEQ ID NO: 192854 - RNA, 1701 nt, Artificial Sequence
  derived and/or modified CDS sequence (opt5) from hemagglutinin__InfluenzaA__ABD77862
augaagaccaucauugcccugagcuacauccucugccugguguucgcucagaaacuucccggcaacgacaauuccacagccacgcugugucucgggcaccaugcggucccuaacggaacccugguuaagacaauuaccaaugaucaaaucgaggugacaaacgcuaccgaacuugugcagucuagcuccacaggcagaauuugcgacucuccgcaccggauccuggaugggaaaaauuguacccucaucgacgcccugcugggagauccccauugcgacggcuuucagaacaaggagugggaucucuucgucgaacgcagcaaagccuauuccgacuguuacccuuaugaugugcccgacuacgcuucucugagaagccuuguugccuccagcgggacgcuggaguuuaccaaugaaggauucaacuggacaggcguggcucaggauggcaccucuuaugccugcaagcggggguccgucaagagcuuuuucucucgccucaauuggcugcacaaacuugaguacaaguauccugcgcugaacgugacaaugcccaauaacgacaaauuugauaagcucuacauuuggggaguucaucacccuuccaccgacagcgaccaaacgucuaucuacgugcaggccuccggcagagucacagugagcaccaaacggucccagcagacagugauuccgaauaucgggucucgccccugggucagaggaguuagcucccggauuagcaucuauuggaccauugugaagccuggcgauauccugcugaucaacucuaccgggaaucucauugcuccccgcggauacuucaagaucagauccggcaaaagcucuauuaugcggagcgacgccccuaucggcaacuguaacuccgagugcauuacacccaaugggucuaucccgaacgauaagccuuuucaaaaugugaaccgcaucacguauggagcuugucccagauacgucaaacagaauacccugaaacuugccacaggcaugcggaacgugccugaaaagcagacccgcgggauuuucggagcgaucgccggcuuuauugagaaugggugggaaggaaugguugacggcugguauggcuucagacaccagaacagcgaggggacaggacaagcugccgaucugaaguccacccaggcugccaucaaucagauuaacggcaaacucaaucggcugaucgagaagacgaacgaaaaguuucaucaaaucgagaaagaguucagcgaaguggaagggcgcauucaggaccuugagaaguacgucgaggauacaaaaaucgaccuguggucuuauaaugccgaacuccugguggcucuggagaaccagcacaccauugaucucaccgacuccgaaaugaauaagcuguucgagagaacacggaaacagcuuagagaaaacgcggaggauaugggaaacggcugcuuuaagaucuaccauaagugugacaaugccugcauugggagcauccgcaacggcaccuacgaccacgauguuuaucgggacgaggcucugaauaacagauuccaaauuaaaggaguggaacucaagucuggcuacaaagauuggauccuguggaucuccuuugccauuagcugcuuccuucugugugucgugcuccugggguuuaucaugugggccugccagaagggaaauauucgcuguaacaucugcauuuga

SEQ ID NO: 192855 - RNA, 1701 nt, Artificial Sequence
  derived and/or modified CDS sequence (opt5) from hemagglutinin__InfluenzaA__ABD77884
augaagaccaucauugcccugagcuacauccucugccugguguucgcucagaaacuucccggcaacgacaauuccacagccacgcugugucucgggcaccaugcggucccuaacggaacccugguuaagacaauuaccaaugaucaaaucgaggugacaaacgcuaccgaacuugugcagggcucuagcacagggagaauuugcgacuccccgcaccggauccuggaugggaaaaauuguacccucaucgacgcccugcugggcgauccccauugcgacggguuucagaacaaggagugggaucucuucgucgaacgcucuaaagccuauagcaauuguuacccuuaugacgugcccgauuacgcuucccugagaucucuuguugccagcuccggaacgcuggaguuuaacaaugagagcuucaacuggaccggcguggcucagaauggcacaucuuaugccugcaagcggcgcuccgucaagagcuuuuucucuagacucaacuggcugcacaaacuugaauacaaguauccugcgcugaaugugaccaugcccaacaaugacaaauuugauaagcucuacauuuggggaguucaucacccuuccacagacagcgaucaaaccucucuguacgugcaggccuccggacgggucacggugagcacaaaacgcucccagcagaccgugaucccgaacauuggcucuagacccuggguccgcgggguuagcucccggaucagcauuuauuggacaaucgugaagccuggagacauucugcucaucaacucuaccggcaaucugaucgcucccagaggguacuucaagauucgguccggaaaaagcucuaucaugcgcagcgacgccccuauugauaacuguaauuccgagugcaucacccccaacggcucuauuccgaaugacaagccuuuucaaaacgugaauagaaucacauauggcgcuuguccccgguacgucaaacagaacacgcuuaagcuggccaccgggaugcgcaaugugccugaaaaacagacaagaggaaucuucggcgcgauugccggguuuaucgagaacggaugggaaggcaugguugaugggugguauggauuccggcaccagaauagcgagggcaccggccaagcugccgaccucaaguccacacaggcugccauuaaccagaucaaugggaaacugaacagacuuauugagaagaccaaugaaaaguuucaucaaaucgagaaagaguucagcgaaguggaaggacgcauccaggaucuggagaaguacgucgaggacacgaaaauugaucucuggucuuauaacgccgaacugcugguggcucucgagaaccagcacacaaucgaccugaccgauuccgaaaugaauaaacuuuucgagcggaccagaaagcagcugcgcgaaaacgcggaggacaugggcaaugggugcuuuaagauuuaccauaagugugauaacgccugcaucggaagcauucggaauggcacauacgaccacgacguuuauagagaugaggcucucaacaaucgcuuccaaaucaaagggguggaacugaagucuggcuacaaagacuggauucuuuggaucuccuuugccaucagcugcuuccugcucugugucgugcugcugggauuuauuaugugggccugccagaagggcaacauccgguguaauauuugcaucuga

SEQ ID NO: 192856 - RNA, 1701 nt, Artificial Sequence
  derived and/or modified CDS sequence (opt5) from hemagglutinin__InfluenzaA__ABD77895
augaagaccaucauugcccugagcuacauccucugccugguguucgcucagaaacuucccggcaacgacaauuccacagccacgcugugucucgggcaccaugcggucccuaacggaacccugguuaagacaauuaccaaugaucaaaucgaggugacaaacgcuaccgaacuugugcagucuagcuccacaggcagaauuugcgacucuccgcaccggauccuggaugggaaaaauuguacccucaucgacgcccugcugggagauccccauugcgacggcuuucagaacaaggagugggaucucuucgucgaacgcagcaaagccuauuccaauuguuacccuuaugacgugcccgauuacgcuucucugagaagccuuguugccuccagcgggacgcuggaguuuaacaaugaaucuuucaacuggaccggaguggcucagaauggcacauccuaugccugcaagcggcgcagcgucaagucuuucuucuccagacucaacuggcugcacaaacuugaguacaaguauccugcgcugaaugugaccaugcccaacaaugacaaauuugauaagcucuacauuuggggcguucaucacccuagcacagacucugaucaaaccucccuguacgugcaggccagcgggcgggucacgguguccacaaaacgcucucagcagaccgugaucccgaacauuggaagcagacccuggguccggggcaucuccagccgcauuucuaucuauuggacaauuguuaagccuggggacauccugcucaucaacuccaccggaaaucugauugcucccagaggcuacuucaagauccggagcgggaaaucuagcauuaugcgcuccgacgccccuaucgauaacuguaauucugagugcauuacccccaacggaagcaucccgaaugacaagccuuuucaaaacgugaauagaaucacauauggcgcuuguccccgguacgugaaacagaacacgcuuaagcuggccaccggcaugcgcaaugucccugaaaaacagacaagagggauuuucggagcgaucgccggcuuuauugagaacgggugggaaggaaugguggauggcugguauggguuccggcaccaaaauuccgagggaaccggccaggcugccgaccucaagagcacacaggcugccaucaaccagauuucuggcaaacugaauagacuuaucgagaagaccaacgaaaaguuucaucaaaucgagaaagaauuuuccgagguugaagggcgcauucaggaucuggagaaguacguggaggacacgaaaaucgaucucuggagcuauaaugccgaacugcuggucgcucucgagaaccagcacacaauugaccugaccgauucugaaaugaacaagcuguucgagcggaccagaaaacagcugcgcgaaaaugcggaggacaugggaaacggcugcuuuaagaucuaccauaagugugauaaugccugcauuggguccauccggaacggaacauacgaccacgacguguauagagaugaggcucucaauaaccgcuuccaaauuaaaggcguugaacuuaagagcggguacaaagacuggauccuuuggaucuccuuugccauuucuugcuuccugcucugugugguccugcugggcuuuaucaugugggccugccagaagggaaauauucgguguaacaucugcauuuga

SEQ ID NO: 192857 - RNA, 1701 nt, Artificial Sequence; identical to SEQ ID NO: 192855
  derived and/or modified CDS sequence (opt5) from hemagglutinin__InfluenzaA__ABD77906

SEQ ID NO: 192858 - RNA, 1698 nt, Artificial Sequence
  derived and/or modified CDS sequence (opt5) from hemagglutinin__InfluenzaA__ABD77917
augaaggugaaacugcucguccugcuuugcaccuucacagccacguacgcugacaccaucuguauuggcuaucacgccaacaauagcacagauaccguugacacagugcuggagaagaacgugaccgucacacauuccgugaaucuccuggaagauucucacaacgggaaacuuugccugcucaagggaaucgcgccccugcagcugggcaauuguagcguugcuggguggauucucggaaacccugagugcgaacugcuuaucuccaaagagucuuggagcuacauuguggaaaccccgaaucccgagaacggcacguguuauccuggguacuuugccgacuaugaggaacugagagagcaacucuccucugucagcuccuucgaacgguuugagaucuuccccaaggagagcucuuggccuaaucauaccgugacaggaguuuccgccagcugcucucacaacggcaaguccagcuuuuaccgcaaucugcuuuggcugaccggcaaaaacgggcucuaucccaaucugucuaaguccuacgcuaacaauaaagaaaaggaggugcugguccucuggggagugcaucacccuccgaacaucggcaaccagaaagcccuguaccacacagaaaaugcuuaugugagcgucguuuccucucauuacagcagacgguucacccccgagauugccaagcgcccuaaggugagagaucaggaagggcggaucaacuauuacuggacgcuucuggagcccggagacacaauuaucuuugaggcgaauggcaaccucauugccccucgcuaugcuuucgcccuguccagaggguuuggaagcggcaucauuaccucuaaugcucccauggaugaaugugacgccaaaugccagacaccgcaaggcgcgaucaacuccagccuuccuuuccagaaugugcaccccgucaccaucggggaguguccuaaguacgugcggucugccaaacugcgcaugguuaccggacucagaaacauucccagcauccagucccggggccuguuuggggcuauugccggauucaucgaaggcggguggacaggaaugguggauggcugguauggcuaccaucaccagaaugagcaagggucuggauacgcugccgaccaaaagagcacgcagaacgccauuaauggcaucaccaacaaagucaauuccgugaucgaaaagaugaacacacaguuuaccgcuguugggaaagaguucaauaagcuggagcgcagaauggaaaaccucaacaagaaaguggaugacggauuccuggauauuuggacauauaaugcggagcuucugguccuccuggaaaacgagcggacccuugacuuucacgacagcaaugugaagaaccuguacgaaaaagucaagucucagcucaaaaauaacgccaaggagaucggcaaugggugcuucgaguuuuaucauaaguguaacaaugaaugcauggaguccgugaaaaacggcacguacgauuaucccaaguacagcgaagagucuaaacugaaucgcgagaagauugacggaguuaaacuggaauccaugggcguguaucagauccucgcuauuuacagcacagucgccuccucucuggugcuucugguuagccucggggccaucuccuucuggaugugcucuaacggaagccugcaguguagaaucugcauuuga

SEQ ID NO: 192859 - RNA, 1698 nt, Artificial Sequence
  derived and/or modified CDS sequence (opt5) from hemagglutinin__InfluenzaA__ABD77928
augaaggugaaacugcucguccugcuuugcaccuucacagccacguacgcugacaccaucuguauuggcuaucacgccaacaauagcacagauaccguugacacagugcuggagaagaacgugaccgucacacauuccgugaaucuccuggaagauucucacaacgggaaacuuugccugcucaagggaaucgcgccccugcagcugggcaauuguagcguugcuggguggauucucggaaacccugagugcgaacugcuuaucuccaaagagucuuggagcuacauuguggaaaccccgaaucccgagaacggcacguguuauccuggguacuuugccgacuaugaggaacugagagagcaacucuccucugucagcuccuucgaacgguuugagaucuuccccaaggagagcucuuggccuaaucauaccgugacaggaguuuccgccagcugcucucacaacggcaaguccagcuuuuaccgcaaucugcuuuggcugaccggcaaaaacgggcucuaucccaaucugucuaaguccuacgcuaacaauaaagaaaagaaagugcugguccucuggggagugcaucacccuccgaacaucggcgaucagaaggcccuguaccacacagagaacgcuuaugugagcgucguuuccucucauuacagcagacgguucacccccgaaauugccaagcgcccuaaagugagagaccaggaggggcggaucaauuauuacuggacgcuucuggaacccggagauacaauuaucuuugaggcgaacggcaaucucauugccccucgcuaugcuuucgcccuguccagaggguuuggaagcggcaucauuaccucuaacgcucccauggacgagugugaugccaagugccagacaccgcaaggcgcgaucaauuccagccuuccuuuccagaacgugcaccccgucaccaucggggaauguccuaaauacgugcggucugccaagcugcgcaugguuaccggacucagaaauauucccagcauccagucccggggccuguuuggggcuauugccggauucaucgagggcggguggacaggaaugguggacggcugguauggcuaccaucaccagaacgaacaagggucuggauacgcugccgaucagaaaagcacgcagaaugccauuaacggcaucaccaauaaggucaacuccgugaucgagaaaaugaauacacaguuuaccgcuguugggaaggaguucaacaagcuggaacgcagaauggagaaucucaacaaaaagguggacgauggauuccuggacauuuggacauauaacgcggaacuucugguccuccuggagaaugaacggacccuugacuuucacgauagcaacgugaaaaaucuguacgagaaggucaaaucucaacucaagaacaaugccaaggaaaucggcaacgggugcuucgaguuuuaucauaaauguaauaacgagugcauggaauccgugaagaauggcacguacgacuaucccaaauacagcgaggaaucuaagcugaaccgcgagaaaauugauggaguuaagcuggaguccaugggcguguaucagauccucgcuauuuacagcacagucgccuccucucuggugcuucugguuagccucggggccaucuccuucuggaugugcucuaauggaagccugcaguguagaaucugcauuuga

SEQ ID NO: 192860 - RNA, 1698 nt, Artificial Sequence; identical to SEQ ID NO: 192814
  derived and/or modified CDS sequence (opt5) from hemagglutinin__InfluenzaA__ABD77939

SEQ ID NO: 192861 - RNA, 1698 nt, Artificial Sequence; identical to SEQ ID NO: 192814
  derived and/or modified CDS sequence (opt5) from hemagglutinin__InfluenzaA__ABD77950

SEQ ID NO: 192862 - RNA, 1698 nt, Artificial Sequence; identical to SEQ ID NO: 192813
  derived and/or modified CDS sequence (opt5) from hemagglutinin__InfluenzaA__ABD77961

SEQ ID NO: 192863 - RNA, 1698 nt, Artificial Sequence; identical to SEQ ID NO: 192814
  derived and/or modified CDS sequence (opt5) from hemagglutinin__InfluenzaA__ABD77983

SEQ ID NO: 192864 - RNA, 1698 nt, Artificial Sequence; identical to SEQ ID NO: 192814
  derived and/or modified CDS sequence (opt5) from hemagglutinin__InfluenzaA__ABD77994

SEQ ID NO: 192865 - RNA, 1698 nt, Artificial Sequence; identical to SEQ ID NO: 192813
  derived and/or modified CDS sequence (opt5) from hemagglutinin__InfluenzaA__ABD78005

SEQ ID NO: 192866 - RNA, 1698 nt, Artificial Sequence; identical to SEQ ID NO: 192813
  derived and/or modified CDS sequence (opt5) from hemagglutinin__InfluenzaA__ABD78016

SEQ ID NO: 192867 - RNA, 1698 nt, Artificial Sequence; identical to SEQ ID NO: 192814
  derived and/or modified CDS sequence (opt5) from hemagglutinin__InfluenzaA__ABD78027

SEQ ID NO: 192868 - RNA, 1698 nt, Artificial Sequence; identical to SEQ ID NO: 192814
  derived and/or modified CDS sequence (opt5) from hemagglutinin__InfluenzaA__ABD78038

SEQ ID NO: 192869 - RNA, 1701 nt, Artificial Sequence; identical to SEQ ID NO: 192849
  derived and/or modified CDS sequence (opt5) from hemagglutinin__InfluenzaA__ABD78049

SEQ ID NO: 192870 - RNA, 1698 nt, Artificial Sequence; identical to SEQ ID NO: 192368
  derived and/or modified CDS sequence (opt5) from hemagglutinin__InfluenzaA__ABD78060

SEQ ID NO: 192871 - RNA, 1698 nt, Artificial Sequence
  derived and/or modified CDS sequence (opt5) from hemagglutinin__InfluenzaA__ABD78071
augaaggccaaacugcucgugcugcuuugcaccuucacagcuacguacgccgacaccaucuguauuggcuaucacgcgaacaauagcacagauaccgucgacacaguucuggagaagaacgugaccgugacacauuccgucaaucuccuggaagauucucacaacgggaaacuuugccugcucaagggaaucgcuccccugcagcugggcaauuguagcguggccggguggauucucggaaacccugagugcgaacugcuuaucuccaaagagucuuggagcuacauuguugaaaccccgaaucccgagaacggcacguguuauccuggguacuuugccgacuaugaggaacugagagagcaacucuccucugugagcuccuucgaacgguuugagaucuuccccaagggaagcucuuggccuaaucauaccgucacaggcguguccgcuagcugcucucacaacggcaaguccagcuuuuaccgcaaucugcuuuggcugaccgggaaaaacggacucuaucccaaucugucuauguccuacguuaacaauaaggagaaagaagugcugguccucuggggcgugcaucacccuccgaacaucggggaucagagagcccuguaccacacagagaacgcuuaugugagcgucguuuccucucauuacagccggcgcuucacccccgaaauugccaagagaccuaaagugcgggaccaggagggacgcaucaauuauuacuggacgcuucuggaacccggcgauacaauuaucuuugaggcgaacgggaaucucauugccccuugguaugcuuucgcccuguccggaggcuuuggcagcgggaucauuaccucuaacgcucccaugggagagugugacgccaagugccagacaccgcaaggcgcgaucaauuccagccuuccuuuccagaacgugcaccccgucaccaucggggaauguccuaaguacgugagaucugccaaacugcggaugguuaccggacuccgcaauauucccagcauccaguccagaggccuguuuggggcuauugccggauucaucgagggcggcuggacagggaugguggauggaugguauggcuaccaucaccagaacgaacaagggucuggauacgcugccgaccaaaagagcacgcagaaugccauuaacggcaucaccaauaaagucaacuccgugaucgagaagaugaauacacaguuuaccgcuguugggaaagaguucaacaagcuggaacggcgcauggagaaucucaacaaaaagguggaugacggcuuccuggauauuuggacauauaacgcggaacuucugguccuccuggagaaugaaagaacccuugacuuucacgacagcaacgugaagaaucuguacgagaaagucaagucucagcucaaaaacaaugccaaggaaaucggaaacggcugcuucgaguuuuaucauaaauguaauaacgagugcauggaauccgugaagaaugggacguacgauuaucccaaguacagcgaggaaucuaaacugaaccgggagaagauugacggaguuaaacuggaguccaugggcguguaucagauccucgcuauuuacagcacagucgccuccucucuggugcuucugguuagccucggggccaucuccuucuggaugugcucuaauggaagccugcagugucgcaucugcauuuga

SEQ ID NO: 192872 - RNA, 1698 nt, Artificial Sequence
  derived and/or modified CDS sequence (opt5) from hemagglutinin__InfluenzaA__ABD78093
augaaggccaaacugcucgugcugcuuugcaccuucacagcuacguacgccgacaccaucuguauuggcuaucacgcgaacaauagcacagauaccgucgacacaguucuggagaagaacgugaccgugacacauuccgucaaucuccuggaagauucucacaacgggaaacuuugccugcucaagggaaucgcuccccugcagcugggcaauuguagcguggccggguggauucucggaaacccugagugcgaacugcuuaucuccaaagagucuuggagcuacauuguugaaaccccgaaucccgagaacggcacguguuauccuggguacuuugccgacuaugaggaacugagagagcaacucuccucugugagcuccuucgaacgguuugagaucuuccccaagggaagcucuuggccuaaucauaccgucacaggcguguccgcuagcugcucucacaacggcaaguccagcuuuuaccgcaaucugcuuuggcugaccgggaaaaacggacucuaucccaaucugucuauguccuacguuaacaauaaggagaaagaagugcugguccucuggggcgugcaucacccuccgaacaucggggaucagagagcccuguaccacacagagaacgcuuaugugagcgucguuuccucucauuacagccggcgcuucacccccgaaauugccaagagaccuaaagugcgggaccaggagggacgcaucaauuauuacuggacgcuucuggaacccggcgauacaauuaucuuugaggcgaacgggaaucucauugccccuugguaugcuuucgcccuguccagaggauuuggcagcggcaucauuaccucuaacgcucccaugggggagugugacgccaagugccagacaccgcaaggagcgaucaauuccagccuuccuuuccagaacgugcaccccgucaccaucggcgaauguccuaaguacgugcggucugccaaacugcgcaugguuaccgggcucagaaauauucccagcauccagucccggggacuguuuggcgcuauugccggguucaucgagggaggcuggacaggcaugguggaugggugguauggauaccaucaccagaacgaacaaggcucuggguacgcugccgaccaaaagagcacgcagaaugccauuaacggaaucaccaauaaagucaacuccgugaucgagaagaugaauacacaguuuaccgcuguuggcaaagaguucaacaagcuggaacgcagaauggagaaucucaacaaaaagguggaugacggguuccuggauauuuggacauauaacgcggaacuucugguccuccuggagaaugaacggacccuugacuuucacgacagcaacgugaagaaucuguacgagaaagucaagucucagcucaaaaacaaugccaaggaaaucggcaacggaugcuucgaguuuuaucauaaauguaauaacgagugcauggaauccgugaagaauggcacguacgauuaucccaaguacagcgaggaaucuaaacugaaccgcgagaagauugacgggguuaaacuggaguccaugggaguguaucagauccucgcuauuuacagcacagucgccuccucucuggugcuucugguuagccucggcgccaucuccuucuggaugugcucuaaugggagccugcaguguagaaucugcauuuga

SEQ ID NO: 192873 - RNA, 1701 nt, Artificial Sequence
  derived and/or modified CDS sequence (opt5) from hemagglutinin__InfluenzaA__ABD78115
augaagaccaucauugcccugagcuacauccucugccugguguucgcucagaaacuucccggcaacgacaauuccacagccacgcugugucucgggcaccaugcggucccuaacggaacccugguuaagacaauuaccaaugaucaaaucgaggugacaaacgcuaccgaacuugugcagucuagcuccacaggcagaauuugcgacucuccgcaccggauccuggaugggaaaaauuguacccucaucgacgcccugcugggagauccccauugcgacggcuuucagaacaaggagugggaucucuucgucgaacgcagcaaagccuauuccgacuguuacccuuaugaugugcccgacuacgcuucucugagaagccuuguugccuccagcgggacgcuggaguuuaccaaugaaggauucaacuggacaggcguggcucaggauggcaccucuuaugccugcaagcggggguccgucaagagcuuuuucucucgccucaauuggcugcacaaacuugaguacaaguauccugcgcugaacgugacaaugcccaauaacgacaaauuugauaagcucuacauuuggggaguucaucacccuuccaccgacagcgaccaaacgucucuguacgugcaggccuccggcagagucacagugagcaccaaacggucccagcagacagugaucccgaauauugggucucgccccugggucagaggaguuagcucccggaucagcauuuauuggaccaucgugaagccuggcgauauucugcucaucaacucuaccgggaaucugaucgcuccccgcggauacuucaagauuagauccggcaaaagcucuaucaugcggagcgacgccccuauuggcaacuguaacuccgagugcaucacacccaaugggucuauuccgaacgauaagccuuuucaaaaugugaaccgcaucacguauggagcuugucccagauacgucaaacagaauacccuuaagcuggccacaggcaugcggaacgugccugaaaaacagacccgcgggaucuucggagcgauugccggcuuuaucgagaaugggugggaaggaaugguugacggcugguauggcuucagacaccagaacagcgaggggacaggacaagcugccgaucucaaguccacccaggcugccauuaaucagaucaacggcaaacugaaucggcuuauugagaagacgaacgaaaaguuucaucaaaucgagaaagaguucagcgaaguggaagggagaauccaggaccuggagaaguacgucgaggauacaaaaauugaccucuggucuuauaaugccgaacugcugguggcucucgagaaccagcacaccaucgaucugaccgacuccgaaaugaauaaacuuuucgagcgcacacggaagcagcugagagaaaacgcggaggauaugggaaacggcugcuuuaagauuuaccauaagugugacaaugccugcaucgggagcauucgcaacggcaccuacgaccacgauguuuaucggaaugaggcucucaacaauagauuccaaaucaaaggaguggaacugaagucuggcuacaaagacuggauucuuuggaucuccuuugccaucagcugcuuccugcucugugucgugcugcugggguuuauuaugugggccugccagaagggaaacauccgcuguaauauuugcaucuga

SEQ ID NO: 192874 - RNA, 1701 nt, Artificial Sequence
  derived and/or modified CDS sequence (opt5) from hemagglutinin__InfluenzaA__ABD78126
augaagaccaucauugcccugagcuacauccucugccugguguucgcucagaaacuucccggcaacgacaauuccacagccacgcugugucucgggcaccaugcggucccuaacggaacccugguuaagacaauuaccaaugaucaaaucgaggugacaaacgcuaccgaacuugugcagucuagcuccacaggcagaauuugcgacucuccgcaccggauccuggaugggaaaaauuguacccucaucgacgcccugcugggagauccccauugcgacggcuuucagaacaaggagugggaucucuucgucgaacgcagcaaagccuauuccgacuguuacccuuaugaugugcccgacuacgcuucucugagaagccuuguugccuccagcgggacgcuggaguuuaccaaugaaggauucaacuggacaggcguggcucaggauggcaccucuuaugccugcaagcggggguccgucaagagcuuuuucucucgccucaauuggcugcacaaacuugaguacaaguauccugcgcugaacgugacaaugcccaauaacgacaaauuugauaagcucuacauuuggggaguucaucacccuuccaccgacagcgaccaaacgucucuguacgugcaggccuccggcagagucacagugagcaccaaacggucccagcagacagugaucccgaauauugggucucgccccugggucagaggaguuagcuccaucauuagcaucuauuggaccauugugaagccuggcgauauccugcucaucaacucuaccgggaaucugauugcuccccggggauacuucaagauccgcuccggcaaaagcucuauuaugagaagcgacgccccuaucggcaacuguaacuccgagugcauuacacccaaugggucuaucccgaacgauaagccuuuucaaaaugugaaccggaucacguauggagcuuguccccgcuacgucaaacagaauacccuuaagcuggccacaggcaugagaaacgugccugaaaaacagacccgggggauuuucggagcgaucgccggcuuuauugagaaugggugggaaggaaugguugacggcugguauggcuuccgccaccagaacagcgaggggacaggacaagcugccgaucucaaguccacccaggcugccaucaaucagauuaacggcaaacugaauagacuuaucgagaagacgaacgaaaaguuucaucaaaucgagaaagaguucagcgaaguggaagggcggauucaggaccuggagaaguacgucgaggauacaaaaaucgaccucuggucuuauaaugccgaacugcugguggcucucgagaaccagcacaccauugaucugaccgacuccgaaaugaauaaacuuuucgagagaacacgcaagcagcugcgggaaaacgcggaggauaugggaaacggcugcuuuaagaucuaccauaagugugacaaugccugcauugggagcaucagaaacggcaccuacgaccacgauguuuaucgcgacgaggcucucaauaaccgguuccaaauuaaaggaguggaacugaagucuggcuacaaagauuggauccuuuggaucuccuuugccauuagcugcuuccugcucugugucgugcugcugggguuuaucaugugggccugccagaagggaaauauuagauguaacaucugcauuuga

SEQ ID NO: 192875 - RNA, 1701 nt, Artificial Sequence
  derived and/or modified CDS sequence (opt5) from hemagglutinin__InfluenzaA__ABD79032
augaagaccaucauugcccugagcuacaucuucugccucgugcugggccaggacuuucccgggaacgauaauuccacagcuacgcuuugucugggacaccaugccgucccuaacggcacccucguuaaaacaauuaccaaugaccaaaucgaggugacaaacgcgaccgaacuggugcagucuagcuccacagggaagauuugcaauaacccgcacagaauccuugauggaaucgacuguacccugauugaugcucuccugggcgacccccauugcgauggguuccagaaugagacgugggaccuguuugucgaacggucuaaagccuucagcaacuguuauccuuacgaugugcccgacuaugccucccuccgcucucugguugcuagcuccggaacccuugaguuuaucagcgaaggcuucacauggaccggcgugacacagaaugggggaucuaacgccugcaagagaggcccugauauuggguuuuucucccggcugaauuggcucuacaaaagcggaucuaccuaucccguccugaacgugacgaugccuaauaacgacaauuuugauaagcuguacaucuggggcguucaccauccguccacagaccaagagcagaccagccuguaugugcaggcuucugggcgcgucacaguguccaccaagagaagccagcaaaccauuauccccaacauuggaucccggccuugggugcgcggccucucuagcagaaucuccaucuacuggacaauugucaaacccggcgacauccugguuauuaacagcaaugggaaccugaucgccccucggggauacuucaagaugcgcacgggcaaaucuuccauuaugagaagcgaugcgcccaucgggaccuguaucucugagugcauuacaccgaauggaagcaucccuaacgacaagcccuuucagaaugugaacaaaauuaccuauggcgccuguccuaaguacgugaagcagaauacacucaaacuggcuaccgggaugcggaacguccccgaaaagcagacgcgcggacuuuucuccgccaucgcuggcuuuauugagaauggcugggaagggaugaucgauggaugguauggcuucagacaccaaaacucugaggggacaggacaggccgcggaccugaaaagcacccaggccgcuaucgaucaaauuaauggcaagcucaaccgggugaucgagaaaaccaaugaaaaguuccaccagauugagaaagaauuuuccgagguugaagggcgcauccaggaccuggagaaguacguggaggauacaaagauugaccuuuggagcuauaacgccgaacugcucgucgcucuggagaaucagcauaccaucgaucugacagacucugaaaugaacaaacucuucgagaagacgagacggcaacugagagaaaacgccgaggauaugggcaauggaugcuuuaaaauuuaccacaagugugacaacgccugcaucggcuccauccgcaaugggaccuaugaccaugauguguaccgggacgaggcucuuaacaauagauuccagauuaaaggaguugaacuuaagagcggcuacaaggauuggauccucuggauuucuuuugcgaucuccugcuuccugcuuugugugguccugcucggguuuauuaugugggccugccagaaaggaaacauccgcuguaauaucugcauuuga

SEQ ID NO: 192876 - RNA, 1701 nt, Artificial Sequence
  derived and/or modified CDS sequence (opt5) from hemagglutinin__InfluenzaA__ABD79112
augaaggccaaacugcucauccugcuuugcgcucugagcgccaccgacgcggauacaauuuguaucggcuaccacgcuaacaauuccacggacaccguggauacaguccucgagaagaacguuaccgugacacauucugugaaucugcuugaagacagccacaacgggaaacugugcagacucaagggaauugccccgcugcagcugggcaaauguaauaucgccggguggauucucggaaacccugagugcgaaucccugcuuucuaagcggagcugguccuauaucgcugagacccccaauucugaaaacggcgccuguuaccccggggauuucgcugacuaugaggagcugcgcgaacaacucagcuccgucagcucuuuugagagauucgaaaucuuuccuaagggacgguccuggcccgagcauaauauugauaucggcgugacagccgcgugcagccacgccggcaaaucuuccuucuacaagaaccugcuuuggcugaccgagaaagacgggagcuauccuaaucucaacaagucuuacguuaauaaaaaggaaaaggaggugcugauucuguggggaguccaucaucccccuaacaucgaaaaucagaaaacgcucuaucgcaaggagaacgcuuacguguccguugugagcuccaacuacaauagacgguuuaccccggaaauugccgagcgccccaaagucagaggccaggcugggcggaucaacuauuacuggacacugcuugagccuggagauaccauuaucuucgaagccaauggcaaccugaucgcgcccugguaugccuuugcucucaaucgcgggauuggaucuggcaucauuacaagcaacgccuccauggacgagugugauaccaagugccagacgccucaaggcgcuaucaauagcucucugcccuuccagaacauucacccguuuacaaucggggaauguccuaaauacgugagauccaccaaacuucggauggugacaggacugcgcaauauccccagcauucagucuagaggccucuucggggccaucgccggauuuauugagggcgggugggacggaaugaucgauggcugguauggcuaccaccaccagaacgaacaagggagcggauaugcugcggaccagaaguccacccagaaugccauuaacggcaucaccaauaaggucaacucuguuaucgagaagaugaauacacaguucacggcuguggggaaagaguuuaacaagcuggaaaaacggauggagaaccugaauaagaaaguggacgauggauuccucgacauuuggaccuacaacgccgaacugcuuguccugcucgagaaugaacgcacacuggauuuccaugacagcaacgugaagaaucuuuacgagaagguuaaaaaccaacugagaaauaacgccaaggagaucggcaaugggugcuuugaguucuaucacaaauguaacaaugaaugcauggaauccgugaagaacggcaccuacgauuauccuaaauuuagcgaggagucuaagcucaaucgggaaaagauugacggagucaaacuggaguccaugggcguguaccagauccuggcuauuuauagcacaguugccucuucccucgugcugcuugucagccugggggcgaucuccuucuggaugugcucuaacggaagccuccaguguagaauuugcaucuga

SEQ ID NO: 192877 - RNA, 1701 nt, Artificial Sequence
  derived and/or modified CDS sequence (opt5) from hemagglutinin__InfluenzaA__ABD79123
augaagaccaucauugcccugagcuacauccucugccugguguucgcucagaaacuucccggcaacgacaauuccacagccacgcugugucucgggcaccaugcggucccuaacggaacccugguuaagacaauuaccaaugaucaaaucgaggugacaaacgcuaccgaacuugugcagucuagcuccacaggcagaauuugcgacucuccgcaccagauccuggaugggaaaaauuguacccucaucgacgcccugcugggagauccccauugcgacggcuuucagaacaaggagugggaucucuucgucgaacggagcacggccuauuccaauuguuacccuuaugacgugcccgauuacgcuucucugcgcagccuuguugccuccagcgggacccuggaguuuacaaaagaaggauucaacuggaccggcguggcucaagacggcacaucuuaugccugcaagagaggguccgucaagagcuuuuucucucggcucaauuggcugcacaaacuugaguacaaguauccugcgcugaacgugaccaugcccaauaacgauaaauuugacaagcucuacauuuggggaguucaucacccuuccacggauagcgaccagacaucucuguacgugcaggccuccggccgcgucaccgugagcacaaaaagaucccagcaaaccgugaucccgaauauugggucucggcccuggguccgcggaguuagcuccagaaucagcauuuauuggaccaucgugaagccuggcgacauucugcucaucaacucuacagggaaucugaucgcuccccggggauacuucaagauucgcuccggcaaaagcucuaucaugagaagcgaugccccuauugacaacuguaacuccgagugcaucacgcccaauggcucuauuagcaacgauaagccguuucagaaugugaaccggaucaccuauggggcuuguccucgcuacgucaaacagaauacacuuaagcuggccaccggaaugagaaacgugcccgaaaaacagacacggggcaucuucggggcgauugccggauuuaucgagaauggcugggaagggaugguugacggaugguauggcuuccgccaccaaaacuccgagggcaccgggcaggcugccgaucucaagagcacgcaggcugccauuaaucaaaucaacggaaaacugaauagacuuauugagaagacaaacgaaaaguuucaucagaucgagaaagaguucucugaaguggaaggccggauccaggaccuggagaaguacgucgaggauaccaaaauugaccucugguccuauaaugccgaacugcugguggcucucgagaaccagcacaccaucgaucugacagacagcgaaaugaauaaacuuuucgagagaacccgcaagcaacugcgggaaaacgcggaggauauggggaacggaugcuuuagaauuuaccauaagugugacaaugccugcaucggcucuauucgcaacgggacauacgaccacgauguuuaucgggacgaggcucucaauaacagauuccagaucaagggcguggaacugaaauccggauacaaggauuggauucuuuggaucagcuuugccaucuccugcuuccugcucugugucgugcugcugggcuuuauuaugugggccugccagaaagggaauauccgcuguaacauuugcaucuga

SEQ ID NO: 192878 - RNA, 1701 nt, Artificial Sequence
  derived and/or modified CDS sequence (opt5) from hemagglutinin__InfluenzaA__ABD79134
augaagaccaucauugcccugagcuacauccucugccugguguucgcucagaaacuucccggcaacgacaauuccacagccacgcugugucucgggcaccaugcggucccuaacggaacccugguuaagacaauuaccaaugaucaaaucgaggugacaaacgcuaccgaacuugugcagucuagcuccacaggcagaauuugcgacucuccgcaccagauccuggaugggaaaaauuguacccucaucgacgcccugcugggagauccccauugcgacggcuuucagaacaagaaaugggaucucuucgucgagcggagcacggccuauuccaauuguuacccuuaugacgugcccgauuacgcuucucugcgcagccuuguugccuccagcgggacccuggaauuuacaaaggagggauucaacuggaccggcguggcucaagacggcacaucuuaugccugcaagagaggguccgucaagagcuuuuucucucggcucaauuggcugcacaaacuugaauacaaauauccugcgcugaacgugaccaugcccaauaacgauaaguuugacaaacucuacauuuggggaguucaucacccuuccacggauagcgaccagacaucucuguacgugcaggccuccggccgcgucaccgugagcacaaagagaucccagcaaaccgugaucccgaauauugggucucggcccuggguccgcggaguuagcuccagaaucagcauuuauuggaccaucgugaagccuggcgacauucugcucaucaacucuacagggaaucugaucgcuccccggggauacuucaaaauucgcuccggcaagagcucuaucaugagaagcgaugccccuauugacaacuguaacuccgagugcaucacgcccaauggcucuauuagcaacgauaaaccguuucagaaugugaaccggaucaccuauggggcuuguccucgcuacgucaagcagaauacacuuaaacuggccaccggaaugagaaacgugcccgagaagcagacacggggcaucuucggggcgauugccggauuuaucgaaaauggcugggaggggaugguugacggaugguauggcuuccgccaccaaaacuccgaaggcaccgggcaggcugccgaucucaaaagcacgcaggcugccauuaaucaaaucaacggaaagcugaauagacuuauugagaagacaaacgagaaauuucaucagaucgaaaaggaguucucugaaguggagggccggauccaggaccuggaaaaauacgucgaggauaccaagauugaccucugguccuauaaugccgagcugcugguggcucucgaaaaccagcacaccaucgaucugacagacagcgagaugaauaaacuuuucgaaagaacccgcaagcaacugcgggagaacgcggaagauauggggaacggaugcuuuaagauuuaccauaaaugugacaaugccugcaucggcucuauuagaaacgggacauacgaccacgauguuuaucgcgacgaggcucucaauaaccgguuccagaucaagggcguggagcugaaauccggauacaaggauuggauucuuuggaucagcuuugccaucuccugcuuccugcucugugucgugcugcugggcuuuauuaugugggccugccagaaagggaauaucagauguaacauuugcaucuga

SEQ ID NO: 192879 - RNA, 1701 nt, Artificial Sequence
  derived and/or modified CDS sequence (opt5) from hemagglutinin__InfluenzaA__ABD79145
augaagaccaucauugcccugagcuacauccucugccugguguucgcucagaaacuucccggcaacgacaauuccacagccacgcugugucucgggcaccaugcggucccuaacggaacccugguuaagacaauuaccaaugaucaaaucgaggugacaaacgcuaccgaacuugugcagucuagcuccacaggcagaauuugcgacucuccgcaccagauccuggaugggaaaaauuguacccucaucgacgcccugcugggagauccccauugcgacggcuuucagaacaaggagugggaucucuucgucgaacggagcacggccuauuccaauuguuacccuuaugacgugcccgauuacgcuucucugcgcagccuuguugccuccagcgggacccuggaguuuacaaaagaaggauucaacuggaccggcguggcucaagacggcacaucuuaugccugcaagagaggguccgucaagagcuuuuucucucggcucaauuggcugcacaaacuugaguacaaguauccugcgcugaacgugaccaugcccaauaacgauaaauuugacaagcucuacauuuggggaguucaucacccuuccacggauagcgaccagacaucucuguacgugcaggccuccggccgcgucaccgugagcacaaaaagaucccagcaaaccgugaucccgaauauugggucucggcccuggguccgcggaguuagcuccagaaucagcauuuauuggaccaucgugaagccuggcgacauucugcucaucaacucuacagggaaucugaucgcuccccggggauacuucaagauucgcuccggcaaaagcucuaucaugagaagcgaugccccuauugacaacuguaacuccgagugcaucacgcccaauggcucuauuagcaacgauaagccguuucagaaugugaaccggaucaccuauggggcuuguccucgcuacgucaaacagaauacacuuaagcuggccaccggaaugagaaacgugcccgaaaaacagacacggggcaucuucggggcgauugccggauuuaucgagaauggcugggaagggaugguugacggaugguauggcuuccgccaccaaaacuccgagggcaccgggcaggcugccgaucucaagagcacgcaggcugccauuaaucaaaucaacggaaaacugaauagacuuauugagaagacaaacgaaaaguuucaucagaucgagaaagaguucucugaaguggaaggccggauccaggaccuggagaaguacgucgaggauaccaaaauugaccucugguccuauaaugccgaacugcugguggcucucgagaaccagcacaccaucgaucugacagacagcgaaaugaauaaacuuuucgagagaacccgcaagcaacugcgggaaaacgcggaggauauggggaacggaugcuuuaagauuuaccauaagugugacaaugccugcaucggcucuauuagaaacgggacauacgaccacgauguuuaucgcgacgaggcucucaauaaccgguuccagaucaaaggcguggaacugaaguccggauacaaagauuggauucuuuggaucagcuuugccaucuccugcuuccugcucugugucgugcugcugggcuuuauuaugugggccugccagaaggggaauaucagauguaacauuugcaucuga

SEQ ID NO: 192880 - RNA, 1701 nt, Artificial Sequence; identical to SEQ ID NO: 192879
  derived and/or modified CDS sequence (opt5) from hemagglutinin__InfluenzaA__ABD79156

SEQ ID NO: 192881 - RNA, 1701 nt, Artificial Sequence; identical to SEQ ID NO: 192095
  derived and/or modified CDS sequence (opt5) from hemagglutinin__InfluenzaA__ABD79167

SEQ ID NO: 192882 - RNA, 1701 nt, Artificial Sequence; identical to SEQ ID NO: 192879
  derived and/or modified CDS sequence (opt5) from hemagglutinin__InfluenzaA__ABD79178

SEQ ID NO: 192883 - RNA, 1701 nt, Artificial Sequence
  derived and/or modified CDS sequence (opt5) from hemagglutinin__InfluenzaA__ABD79189
augaagaccaucauugcccugagcuacauccucugccugguguucgcucagaaacuucccggcaacgacaauuccacagccacgcugugucucgggcaccaugcggucccuaacggaacccugguuaagacaauuaccaaugaucaaaucgaggugacaaacgcuaccgaacuugugcagucuagcuccacaggcagaauuugcgacucuccgcaccagauccuggaugggaaaaauuguacccucaucgacgcccugcugggagauccccauugcgacggcuuucagaacaaggagugggaucucuucgucgaacggagcacggccuauuccaauuguuacccuuaugacgugcccgauuacgcuucucugcgcagccuuguugccuccagcgggacccuggaguuuacaaaagaaggauucaacuggaccggcguggcucaagacggcacaucuuaugccugcaagagaggguccgucaagagcuuuuucucucggcucaauuggcugcacaaacuugaguacaaguauccugcgcugaacgugaccaugcccaauaacgauaaauuugacaagcucuacauuuggggaguucaucacccuuccacggauagcgaccagacaucucuguacgugcaggccuccggccgcgucaccgugagcacaaaaagaucccagcaaaccgugaucccgaauauugggucucggcccuggguccgcggaguuagcuccagaaucagcauuuauuggaccguggugaagccuggcgacauccugcucauuaacucuacagggaaucugaucgcuccccggggauacuucaagauccgcuccggcaaaagcucuauuaugagaagcgaugccccuaucgacuccuguaacucugagugcauuacgcccaacggcagcaucuccaaugauaagccguuucagaacgucaaucggauuaccuauggggcuuguccucgcuacgugaaacagaacacacuuaagcuggccaccggaaugagaaauguucccgaaaaacagacacggggcaucuucggggcgaucgccggauuuauugagaacggcugggaagggaugguggacggaugguauggcuuccgccaccaaaauagcgagggcaccgggcaggcugccgaucucaagucuacgcaggcugccaucaaccaaauuaauggaaaacugaacagacuuaucgagaagacaaaugaaaaguuucaucagauugagaaagaguucuccgaagucgaaggccggauccaggaccuggagaaguacguggaggauaccaaaaucgaccucuggagcuauaacgccgaacugcugguugcucucgagaaucagcacaccauugaucugacagacucugaaaugaacaagcuguucgagagaacccgcaaacaacugcgggaaaaugcggaggauauggggaacggaugcuuuaagaucuaccauaagugugacaacgccugcauuggcuccaucagaaaugggacauacgaccacgauguguaucgcgacgaggcucucaacaaucgguuccagauuaaaggcgucgaacuuaagagcggauacaaagauuggauccuuuggauuuccuuugccaucucuugcuuccugcucugugugguccugcugggcuuuaucaugugggccugccagaaggggaacauuagauguaauaucugcauuuga

SEQ ID NO: 192884 - RNA, 1701 nt, Artificial Sequence; identical to SEQ ID NO: 192879
  derived and/or modified CDS sequence (opt5) from hemagglutinin__InfluenzaA__ABD79200

SEQ ID NO: 192885 - RNA, 1701 nt, Artificial Sequence
  derived and/or modified CDS sequence (opt5) from hemagglutinin__InfluenzaA__ABD79211
augaagaccaucauugcccugagcuacauccucugccugguguucgcucagaaacuucccggcaacgacaauuccacagccacgcugugucucgggcaccaugcggucccuaacggaacccugguuaagacaauuaccaaugaucaaaucgaggugacaaacgcuaccgaacuugugcagucuagcuccacaggcagaauuugcgacucuccgcaccagauccuggaugggaaaaauuguacccucaucgacgcccugcugggagauccccauugcgacggcuuucagaacaaggagugggaucucuucgucgaacggagcacggccuauuccaauuguuacccuuaugacgugcccgauuacgcuucucugcgcagccuuguugccuccagcgggacccuggaguuuacaaaagaaggauucaacuggaccggcguggcucaagacggcacaucuuaugccugcaagagaggguccgucaagagcuuuuucucucggcucaauuggcugcacaaacuugaguacaaguauccugcgcugaacgugaccaugcccaauaacgauaaauuugacaagcucuacauuuggggaguucaucacccuuccacggauagcgaccagacaucucuguacgugcaggccuccggccgcgucaccgugagcacaaaaagaucccagcaaaccgugaucccgaauauugggucucggcccuggauccgcggagucagcuccagaauuagcaucuauuggaccauuguuaagccuggcgacauccugcucaucaacucuacagggaaucugauugcuccccggggauacuucaagauccgcuccggcaaaagcucuauuaugagaagcgaugccccuaucgacaacuguaacuccgagugcauuacgcccaauggcucuaucagcaacgauaagccguuucagaaugugaaccggaucaccuauggggcuuguccucgcuacgugaaacagaauacacuuaagcuggccaccggaaugagaaacguccccgaaaaacagacacggggcauuuucggggcgaucgccggauuuauugagaauggcugggaagggaugguggacggaugguauggcuuccgccaccaaaacuccgagggcaccgggcaggcugccgaucucaagagcacgcaggcugccaucaaucaaauuaacggaaaacugaauagacuuaucgagaagacaaacgaaaaguuucaucagaucgagaaagaguucucugaaguugaaggccggauucaggaccuggagaaguacguggaggauaccaaaaucgaccucugguccuauaaugccgaacugcuggucgcucucgagaaccagcacaccauugaucugacagacagcgaaaugaauaaacuuuucgagagaacccgcaagcaacugcgggaaaacgcggaggauauggggaacggaugcuuuaagaucuaccauaagugugacaaugccugcauuggcucuaucagaaacgggacauacgaccacgauguguaucgcgacgaggcucucaauaaccgguuccagauuaaaggcguugaacugaaguccggauacaaagauuggauccuuuggaucagcuuugccauuuccugcuuccugcucugugugguccugcugggcuuuaucaugugggccugccagaaggggaauauuagauguaacaucugcauuuga

SEQ ID NO: 192886 - RNA, 1701 nt, Artificial Sequence; identical to SEQ ID NO: 192095
  derived and/or modified CDS sequence (opt5) from hemagglutinin__InfluenzaA__ABD79222

SEQ ID NO: 192887 - RNA, 1701 nt, Artificial Sequence; identical to SEQ ID NO: 192095
  derived and/or modified CDS sequence (opt5) from hemagglutinin__InfluenzaA__ABD79233

SEQ ID NO: 192888 - RNA, 1701 nt, Artificial Sequence
  derived and/or modified CDS sequence (opt5) from hemagglutinin__InfluenzaA__ABD79244
augaagaccaucauugcccugagcuacauccucugccugguguucgcucagaaacuucccggcaacgacaauuccacagccacgcugugucucgggcaccaugcggucccuaacggaacccugguuaagacaauuaccaaugaucaaaucgaggugacaaacgcuaccgaacuugugcagucuagcuccacaggcagaauuugcgacucuccgcaccagauccuggaugggaaaaauuguacccucaucgacgcccugcugggagauccccauugcgacggcuuuaagaacaaagagugggaucucuucgucgaacggagcacggccuauuccaauuguuacccuuaugacgugcccgauuacgcuucucugcgcagccuuguugccuccagcgggacccuggaguuuacaaacgaaggauucaauuggaccggcguggcucaggacggcacaucuuaugccugcaagagaggguccgucaagagcuuuuucucucggcucaacuggcugcacaaacuugaguacaaguauccugcgcugaaugugaccaugcccaacaaugauaaauuugacaagcucuacauuuggggaguucaucacccuuccacggauagcgaccaaacaucucuguacgugcaggccuccggccgcgucaccgugagcacaaaaagaucccagcagaccgugaucccgaacauugggucucggcccuggguccgcggaguuagcuccagaaucagcauuuauuggaccaucgugaagccuggcgacauucugcucaucaauucuacagggaaccugaucgcuccccggggauacuucaagauucgcuccggcaaaagcucuaucaugagaagcgaugccccuauugacaacuguaauuccgagugcaucacgcccaacggcucuauuccgaaugauaagccuuuucaaaacgugaaucggaucaccuauggggcuuguccccgcuacgucaaacagaacacacuuaagcuggccaccggaaugagaaaugugccugaaaaacagacacggggcaucuucggggcgauugccggauuuaucgagaacggcugggaagggaugguugacggaugguauggcuuccgccaccagaauagcgagggcaccgggcaagcugccgaucucaaguccacgcaggcugccauuaaccagaucaauggaaaacugaacagacuuauugagaagacaaaugaaaaguuucaucaaaucgagaaagaguucagcgaaguggaaggccggauccaggaccuggagaaguacgucgaggauaccaaaauugaccucuggucuuauaacgccgaacugcugguggcucucgagaaucagcacaccaucgaucugacagacuccgaaaugaacaaacuuuucgagagaacccgcaagcagcugcgggaaaacgcggaggauauggggaauggaugcuuuaagauuuaccauaagugugacaacgccugcaucggcagcauuagaaaugggacauacgaccacgauguuuaucgcgacgaggcucucaacaaucgguuccaaaucaaaggcguggaacugaagucuggauacaaagauuggauucuuuggaucuccuuugccaucagcugcuuccugcucugugucgugcugcugggcuuuauuaugugggccugccagaaggggaacaucagauguaauauuugcaucuga

SEQ ID NO: 192889 - RNA, 1701 nt, Artificial Sequence; identical to SEQ ID NO: 192315
  derived and/or modified CDS sequence (opt5) from hemagglutinin__InfluenzaA__ABD94734

SEQ ID NO: 192890 - RNA, 1701 nt, Artificial Sequence; identical to SEQ ID NO: 192702
  derived and/or modified CDS sequence (opt5) from hemagglutinin__InfluenzaA__ABD94745

SEQ ID NO: 192891 - RNA, 1701 nt, Artificial Sequence
  derived and/or modified CDS sequence (opt5) from hemagglutinin__InfluenzaA__ABD94767
augaagaccaucauugcccugagcuacauccucugccugguguucgcucagaaacuucccgucaacgacaauuccacagccacgcugugucucggccaccaugcgguuccuaacgggacccuggugaagacaauuaccaaugauaacaucgaggugacaaaugcuaccgaacuuguccaaucuagcuccacaggaagaauuugcgacucuccgcaccagauccuggauggcgagaacuguacccucaucgacgcccugcugggggauccccauugcgacggauuucagaauaaagaaugggaucucuucguggagcggagcacggccuauuccaacuguuacccuuaugacguucccgauuacgcuucucugcgcagccuuguggccuccagcggcacccuggaauuuaauaacgagucuuucaauuggacaggggucgaccagaacggaaccuccagcgcuugcaagagacggucuaauaaauccuuuuucagccgccucaacuggcugcaccaacuuaaguauaaguacccugcccugaaugugacaaugcccaacaacgagaaauuugauaagcucuauauuuggggcguucaucacccuucuaccgacuccgaucagaucagccuguacgcgcaggccuccggcagagugacggucucuacaaaacggagccagcaaaaugugauuccgaacaucgggucccgccccugggugagaggagucagcucucggauuuccaucuacuggaccauuguuaagccuggcgacauccugcucaucaauagcacagggaaccugauugcuccccgcggauauuucaaaaucagaucuggcaagagcuccauuaugcggucuaaugccccuaucgggaaguguaacagcgaaugcauuacccccaauggauccaucccgaacgacaaaccuuuucagaaugugaaccgcaucaccuacggcgcuugucccagauaugugaagcagaauacacuuaaacuggccacgggcaugcggaacgucccugagaagcagacccgcgggauuuucggagcgaucgccggcuuuauugaaaaugggugggagggaaugguggauggcugguacggguucagacaccaaaacagcgagggaacaggccaggcugccgaccucaaaucuacccaggcugccaucaaucaaauuaacggcaagcugaaccggcuuaucgagaaaacaaaugaaaaguuucaucagaucgaaaaggaguucuccgaaguugaggggcgcauucaggaucuggagaaauauguggaagacaccaagaucgaucucuggagcuacaacgccgagcugcuggucgcucucgaaaaucagcacacgauugaccugacagauucugagaugaacaaacuuuucgaaagaacccggaagcaacugagagagaaugcggaggacaugggaaacggcugcuuuaaaaucuaucauaagugugauaaugccugcauuggguccauccgcaacggaaccuacgaccacgauguguaccgggacgaagcucucaauaacagauuccagauuaagggcguugagcugaaaagcggguauaaggacuggauccuuuggaucuccuuugccauuucuugcuuccugcucugugugguccugcugggcuuuaucaugugggccugccagaaaggaaauauucgcuguaacaucugcauuuga

SEQ ID NO: 192892 - RNA, 1698 nt, Artificial Sequence; identical to SEQ ID NO: 192872
  derived and/or modified CDS sequence (opt5) from hemagglutinin__InfluenzaA__ABD94778

SEQ ID NO: 192893 - RNA, 1698 nt, Artificial Sequence; identical to SEQ ID NO: 192872
  derived and/or modified CDS sequence (opt5) from hemagglutinin__InfluenzaA__ABD94789

SEQ ID NO: 192894 - RNA, 1701 nt, Artificial Sequence
  derived and/or modified CDS sequence (opt5) from hemagglutinin__InfluenzaA__ABD94822
augaagaccaucauugcccugagcuacauccucugccugguguucgcucagaaaauucccggcaacgacaauuccacagccacgcuuugucuggggcaccaugcggucccuaacggaacccucguuaagacaaucaccaaugaucaaauugaggugacaaacgcuaccgaacuggugcagucuagcuccacaggcagaaucugcgacucuccgcaccggauccuugauggggagaauuguacccugauugacgcccuccugggagauccccauugcgacggcuuucagaacaaagaaugggaucuguucgucgagcgcagcaaggccuauuccaauuguuacccuuaugacgugcccgauuacgcuucucucagaagccugguugccuccagcgggacgcuugaauuuaacaaugagucuuucaacuggaccggaguggcucagaauggcacauccuaugccugcaaacggagcucuaucaaguccuuuuucagccgccugaacuggcuccaccaacugaaguacaaauauccugcgcuuaaugucaccaugcccaacaaugacaaguuugauaaacuguacauuuggggcgugcaucacccuucuacagacuccgaucagaccagccucuacgcccaggcuuccgggagaguuacggugucuacaaagcggagccagcaaaccgucaucccgaacauuggaucccgccccugggugagaggcgugagcucucggaucuccauuuauuggacaaucgucaaaccuggggacauccugcugauuaacagcaccggaaaucucaucgcuccccgcggcuacuucaagauuagaucuggaaagagcuccaucaugcggucugacgccccuauugggaaauguaacagcgagugcaucacccccaauggcuccaucccgaacgauaagccuuuucagaauguuaaccgcauuacauauggcgccugucccagauacgugaaacagaauacgcugaaacuugcgaccgggaugcggaacgugccugaaaagcagacacgcggaaucuucggcgccauugcuggguuuaucgagaauggaugggaaggcauggucgacgggugguauggauucagacaccaaaacagcgagggcaccggccaggccgcugaucugaagucuacacaggccgccauuaaucaaaucaacgggaaacucaaucggcugaucgagaagaccaacgaaaaguuucaucagauugagaaagaguucuccgaaguggaaggaagaauccaggaccuugagaaguacguugaggauacgaaaauugaccuguggagcuauaaugcugaacuccugguggcgcuggagaaccagcacacaaucgaucucaccgacucugaaaugaacaagcuguucgagcgcacccggaaacaacuuagagaaaaugccgaggauaugggcaacgggugcuuuaagauuuaccauaagugugacaaugcuugcaucggauccauucgcaacggcacauacgaucacgacgucuaucgggacgaggcccugaauaacagauuccagaucaaagggguggaacucaagagcggcuacaaagauuggauccuguggauuuccuuugccaucucuugcuuccuucuguguguugugcuccugggauuuauuaugugggcuugccagaagggcaauauccgcuguaacauuugcaucuga

SEQ ID NO: 192895 - RNA, 1701 nt, Artificial Sequence
  derived and/or modified CDS sequence (opt5) from hemagglutinin__InfluenzaA__ABD94833
augaagaccaucauugcccugagcuacauccucugccugguguucgcucagaaacuucccggcaacgacaauuccacagccacgcugugucucgggcaccaugcggucccuaacggaacccugguuaagacaauuaccaaugaucaaaucgaggugacaaacgcuaccgaacuugugcagucuagcuccacaggcagaauuugcgacucuccgcaccggauccuggaugggaaaaauuguacccucaucgacgcccugcugggagauccccauugcgacggcuuucagaacaaggagugggaucucuucgucgaacgcagcaaagccuauuccgacuguuacccuuaugaugugcccgacuacgcuucucugagaagccuuguugccuccagcgggacgcuggaguuuaccaaugaaggauucaacuggacaggcguggcucaggauggcaccucuuaugccugcaagcggggguccgucaagagcuuuuucucucgccucaauuggcugcacaaacuugaguacaaguauccugcgcugaacgugacaaugcccaauaacgacaaauuugauaagcucuacauuuggggaguucaucacccuuccaccgacagcgaccaaacgucucuguacgugcaggccuccggcagagucacagugagcaccaaacggucccagcagacagugaucccgaauauugggucucgccccugggucagaggaguuagcucccggaucagcauuuauuggaccaucgugaagccuggcgauauucugcucaucaacucuaccgggaaucugaucgcuccccgcggauacuucaagauuagauccggcaaaagcucuaucaugcggagcgacgccccuauuggcaacuguaacuccgagugcaucacacccaaugggucuauuccgaacgauaagccuuuucaaaaugugaaccgcaucacguauggagcuugucccagauacgucaaacagaauacccuuaagcuggccacaggcaugcggaacgugccugaaaaacagacccgcgggaucuucggagcgauugccggcuuuaucgagaaugggugggaaggaaugguugacggcugguauggcuucagacaccagaacagcgaggggacaggacaagcugccgaucucaaguccacccaggcugccauuaaucagaucaacggcaaacugaaucggcuuauugagaagacgaacgaaaaguuucaucaaaucgagaaagaguucagcgaaguggaagggagaauccaggaccuggagaaguacgucgaggauacaaaaauugaccucuggucuuauaaugccgaacugcugguggcucucgagaaccagcacaccaucgaucugaccgacuccgaaaugaauaaacuuuucgagcgcacacggaagcagcugagagaaaacgcggaggauaugggaaacggcugcuuuaagauuuaccauaagugugacaaugccugcaucgggagcauucgcaacggcaccuacgaccacgauguuuaucgggacgaggcucucaauaacagauuccaaaucaaaggaguggaacugaagucuggcuacaaagauuggauucuuuggaucuccuuugccaucagcugcuuccugcucugugucgugcugcugggguuuauuaugugggccugccagaagggaaauauccgcuguaacauuugcaucuga

SEQ ID NO: 192896 - RNA, 1701 nt, Artificial Sequence
  derived and/or modified CDS sequence (opt5) from hemagglutinin__InfluenzaA__ABD94844
augaagaccaucauugcccugagcuacauccucugcaugguguucgcucagaaacugcccggcaacgacaauuccacagccacgcuuugucuggggcaccaugcggucccuaacggaacccucguuaagacaauuaccaaugaucaaaucgaggugacaaacgcuaccgaacuggugcagucuagcuccacaggcagaauuugcgacucuccgcaccggauccuugaugggaaaaauuguacccugaucgacgcccuccugggagauccccauugcgacggcuuucagaacaaggagugggaucuguucgucgaacgcagcaaagccuauuccaauuguuacccuuaugacgugcccgauuacgcuucucucagaagccugguugccuccagcgggacgcuugaguuuaacaaugaaucuuucaacuggaccggaguggcucagaauggcacauccuaugccugcaagcggcgcagcgucaagucuuucuucuccagacugaacuggcuccacaaacuggaguacaaguauccugcgcuuaaugugaccaugcccaacaaugacaaauuugauaagcuguacauuuggggcguucaucacccuagcacagacucugaucaaaccucccucuacgugcaggccagcgggcgggucacgguguccacaaaacgcucucagcagaccgugaucccgaacauuggaagcagacccuggguccggggcguuuccagcaucauuucuaucuauuggacaauugugaagccuggggacauccugcugaucaacuccaccggaaaucucauugcuccccgcggcuacuucaagaucagaagcgggaaaucuagcauuaugcgguccgacgccccuaucggaaacuguaauucugagugcauuacccccaacggcagcaucccgaaugauaagccuuuucaaaacgugaaucgcaucacauauggcgcuugucccagauacgucaaacagaacacgcugaagcuggccaccgggaugcggaaugugccugaaaaacagacacgcggaauuuucggcgcgaucgccggguuuauugagaacggaugggaaggcaugguugacgggugguauggauucagacaccaaaauuccgagggcaccggccaggcugccgaucuuaagagcacacaggcugccaucaaccagauuaaugggaaacucaaccggcugaucgagaagaccaaugaaaaguuucaucaaaucgagaaagaauuuucugagguggaaggacgcauucaggaccuugagaaguacgucgaggauacgaaaaucgaccugugguccuauaacgccgaacuccugguggcucuggagaaccagcacacaauugaucucaccgacagcgaaaugaauaagcuguucgagagaacccggaaacagcuuagagaaaacgcggaggauaugggcaaugggugcuuuaagaucuaccauaagugugacaacgccugcauuggaucuauccgcaauggcacauacgaucacgacguuuaucgggacgaggcucugaacaauagauuccaaauuaaagggguggaacucaaguccggcuacaaagauuggauccuguggaucagcuuugccauuuccugcuuccuucugugugucgugcuccugggauuuaucaugugggccugccagaagggcaacauucgcuguaauaucugcauuuga

SEQ ID NO: 192897 - RNA, 1701 nt, Artificial Sequence
  derived and/or modified CDS sequence (opt5) from hemagglutinin__InfluenzaA__ABD94855
augaagaccaucauugcccugagcuacauccucugccugguguucgcucagaaacuucccggcaacgacaauuccacagccacgcugugucucgggcaccaugcggucccuaacggaacccugguuaagacaauuaccaaugaucaaaucgaggugacaaacgcuaccgaacuugugcagggcucuagcacagggagaauuugcgacuccccgcaccggauccuggauggaaagaauuguacccucaucgacgcccugcugggcgauccccauugcgacggguuucagaacaaggagugggaucucuucgucgaacgcucuaaagccuauagcaauuguuacccuuaugacgugcccgauuacgcuucccugagaucucuuguugccagcuccggaacgcuggaguuuaacaaugagagcuucaacuggaccggcguggcucagaauggcacaucuuaugccugcaagcggggguccgucaagagcuuuuucucucgccucaacuggcugcacaaacuugaauacaaguauccugcgcugaaugugaccaugcccaacaaugacaaauuugauaagcucuacauuuggggaguucaucacccuuccacagacagcgaucaaaccucucuguacgugcaggccuccggcagagucacggugagcacaaaacggucccagcagaccgugaucccgaacauugggucucgccccugggucagaggaguuagcucccggaucagcauuuauuggacaaucgugaagccuggcgacauucugcucaucaacucuaccgggaaucugaucgcuccccgcggauacuucaagauuagauccggcaaaagcucuaucaugcggagcgacgccccuauugauaacuguaauuccgagugcaucacccccaacggcucuauuccgaaugacaagccuuuucaaaacgugaaucgcaucacauauggggcuugucccagauacgucaaacagaacacgcuuaagcuggccaccggaaugcggaaugugccugaaaaacagacacgcggcaucuucggggcgauugccggauuuaucgagaacggcugggaagggaugguugauggaugguauggcuucagacaccagaauagcgagggcaccgggcaagcugccgaccucaaguccacacaggcugccauuaaccagaucaauggaaaacugaaccggcuuauugagaagaccaaugaaaaguuucaucaaaucgagaaagaguucagcgaaguggaaggcagaauccaggaucuggagaaguacgucgaggacacgaaaauugaucucuggucuuauaacgccgaacugcugguggcucucgagaaccagcacacaaucgaccugaccgauuccgaaaugaauaaacuuuucgagcgcacccggaaacagcugagagaaaacgcggaggacauggggaauggaugcuuuaagauuuaccauaagugugauaacgccugcaucggcagcauucgcaaugggacauacgaccacgacguuuaucgggaugaggcucucaacaauagauuccaaaucaaaggcguggaacugaagucuggauacaaagacuggauucuuuggaucuccuuugccaucagcugcuuccugcucugugucgugcugcugggcuuuauuaugugggccugccagaaggggaacauccgcuguaauauuugcaucuga

SEQ ID NO: 192898 - RNA, 1701 nt, Artificial Sequence
  derived and/or modified CDS sequence (opt5) from hemagglutinin__InfluenzaA__ABD94866
augaagaccaucauugcccugagcuacaucuccugccucguguucgcucagaaacugcccggcaacgacaauucuacagccacgcuuugucuggggcaccaugcggucccuaacggaacccucguuaagacaauuaccaaugaucaaaucgaggugacaaacgcuaccgaacuggugcagagcuccucuacaggcagaauuugcgacgggccgcaccagauccuugauggaaagaauuguacccugaucgacgcccuccugggcgauccccauugcgacggguuucagaacaaggagugggaucuguucgucgaacggagcaaagccuauuccaauuguuacccuuaugacgugcccgauuacgcuucucuccgcagccugguugccuccagcggaacgcuugaguuuaccaacgaaucuuucaauuggacaggcguggcucaaaacggcaccuccuaugccugcaagagagggagcgucaagucuuucuucucccggcugaauuggcuccacaaacuggaguacaaguauccugcgcuuaacgugacaaugcccaauaacgacaaauuugauaagcuguacauuuggggaguucaucacccuagcaccgacucugaucagacgucccucuacgugcagagcuccggccgcaucacagucucuaccaaaagaagccagcaaacagugaccccgaauauugggucccggcccugggugcgcggagucagcucuagaaucuccauuuauuggaccaucguuaagccuggcgacauucugcugaucacaagcacggggaaccucaucgcuccccggggauacuucaagauucgcagaggcaaaucuagcaucaugcgguccgacgccccuauugauaacuguaauucugagugcaucacccccaacggcagcauuccgaaugacaagccuuuucagaacgugaaucgcaucacauauggggccugucccagauacgugaaacagaacacccugaaacuugcuacaggaaugcggaaugucccugaaaaacagacccgcggcaucuucggggccauugcgggauuuaucgagaacggcugggaagggaugguggauggaugguauggcuucagacaccaaaauuccgagggcacggggcaggccgcugaccucaagagcacacaggccgcuauuaaccaaaucaauggaaaacugaaccggcugauugagaagaccaaugaaaaguuucaucagaucgagaaagaauuuucugagguugaaggcagaauccaggaucuugagaaguacguggaggacaccaaaauugaucugugguccuauaacgccgaacuccuggucgcccuggagaaucagcacacaaucgaccucaccgauagcgaaaugaacaagcuguucgagcgcacacggaaacaacuuagagaaaacgcugaggacauggggaauggaugcuuuaagauuuaccauaagugugauaacgcgugcaucggcucuauucgcaaugggacguacgaccacgacguguaucgggaugaggcccugaacaauagauuccagaucaaaggcguugaacucaaguccggauacaaagacuggauucuguggaucagcuuugcuaucuccugcuuccuucugugugugguccuccugggcuuuauuaugugggccugccagaaggggaacauccgcuguaauauuugcaucuga

SEQ ID NO: 192899 - RNA, 1701 nt, Artificial Sequence
  derived and/or modified CDS sequence (opt5) from hemagglutinin__InfluenzaA__ABD94877
augaagaccaucauugcccugagcuacauccucugccugguguucgcucagaaacuucccggcaacgacaauuccacagccacgcugugucucgggcaccaugcggucccuaacggaacccugguuaagacaauuaccaaugaucaaaucgaggugacaaacgcuaccgaacuugugcagucuagcuccacaggcagaauuugcgacucuccgcaccggauccuggaugggaaaaauuguacccucaucgacgcccugcugggagauccccauugcgacggcuuucagaacaaggagugggaucucuucgucgaacgcagcaaagccuauuccaauuguuacccuuaugacgugcccgauuacgcuucucugagaagccuuguugccuccagcgggacgcuggaguuuaacaaugaaucuuucaacuggaccggaguggcucagaauggcacauccuaugccugcaagcggcgcagcgucaagucuuucuucuccagacucaacuggcugcacaaacuugaguacaaguauccugcgcugaaugugaccaugcccaacaaugacaaauuugauaagcucuacauuuggggcguucaucacccuagcacagacucugaucaaaccucccuguacgugcaggccagcgggcgggucacgguguccacaaaacgcucucagcagaccgugaucccgaacauuggaagcagacccuggguccggggcguuuccagccgcaucucuauuuauuggacaaucgugaagccuggggacauucugcucaucaacuccaccggaaaucugaucgcucccagaggcuacuucaagauucggagcgggaaaucuagcaucaugcgcuccgacgccccuauugauaacuguaauucugagugcaucacccccaacggaagcauuccgaaugacaagccuuuucaaaacgugaauagaaucacauauggcgcuuguccccgguacgucaaacagaacacgcuuaagcuggccaccggcaugcgcaaugugccugaaaaacagacaagagggaucuucggagcgauugccggcuuuaucgagaacgggugggaaggaaugguugauggcugguauggguuccggcaccaaaauuccgagggaaccggccaggcugccgaccucaagagcacacaggcugccauuaaccagaucaauggcaaacugaacagacuuauugagaagaccaaugaaaaguuucaucaaaucgagaaagaauuuucugagguggaagggcgcauccaggaucuggagaaguacgucgaggacacgaaaauugaucucugguccuauaacgccgaacugcugguggcucucgagaaccagcacacaaucgaccugaccgauagcgaaaugaauaaacuuuucgagcggaccagaaagcagcugcgcgaaaacgcggaggacaugggaaauggcugcuuuaagauuuaccauaagugugauaacgccugcaucgggucuauucggaauggaacauacgaccacgacguuuauagagaugaggcucucaacaaucgcuuccaaaucaaaggcguggaacugaaguccggguacaaagacuggauucuuuggaucagcuuugccaucuccugcuuccugcucugugucgugcugcugggcuuuauuaugugggccugccagaagggaaacauccgguguaauauuugcaucuga

SEQ ID NO: 192900 - RNA, 1701 nt, Artificial Sequence
  derived and/or modified CDS sequence (opt5) from hemagglutinin__InfluenzaA__ABD94888
augaagaccaucauugcccugagcuacauccucugccugguguucgcucagaaacuucccggcaacgacaauuccacagccacgcugugucucgggcaccaugcggucccuaacggaacccugguuaagacaauuaccaaugaucaaaucgaggugacaaacgcuaccgaacuugugcagucuagcuccacaggcagaauuugcgacucuccgcaccggauccuggaugggaaaaauuguacccucaucgacgcccugcugggagauccccauugcgacggcuuuaagaacaaagagugggaucucuucgucgaacgcagcacggccuauuccaauuguuacccuuaugacgugcccgauuacgcuucucugagaagccuuguugccuccagcgggacccuggaguuuacaaacgaaggauucaauuggaccggcguggcucaggacggcacaucuuaugccugcaagcggggguccgucaagagcuuuuucucucgccucaacuggcugcacaaacuugaguacaaguauccugcgcugaaugugaccaugcccaacaaugauaaauuugacaagcucuacauuuggggaguucaucacccuuccacggauagcgaccagacaucucuguacgugcaagccuccggcagagucaccgugagcacaaaacggucccagcagaccgugaucccgaacauugggucucgccccugggucagaggaguuagcucccggaucagcauuuauuggaccaucgugaagccuggcgacauucugcucaucaauucuacagggaaccugaucgcuccccgcggauacuucaagauuagauccggcaaaagcucuaucaugcggagcgaugccccuauugacaacuguaauuccgagugcaucacgcccaacggcucuauuccgaaugauaagccuuuucagaacgugaaucgcaucaccuauggggcuugucccagauacgucaaacaaaacacacuuaagcuggccaccggaaugcggaaugugccugaaaaacagacacgcggcaucuucggggcgauugccggauuuaucgagaacggcugggaagggaugguugacggaugguauggcuucagacaccagaauagcgagggcaccgggcaggcugccgaucucaaguccacgcaagcugccauuaaccagaucaauggaaaacugaaccggcuuauugagaagacaaaugaaaaguuucaucagaucgagaaagaguucagcgaaguggaaggcagaauccaagaccuggagaaguacgucgaggauaccaaaauugaccucuggucuuauaacgccgaacugcugguggcucucgagaaucagcacaccaucgaucugacagacuccgaaaugaacaaacuuuucgagcgcacccggaagcagcugagagaaaacgcggaggauauggggaauggaugcuuuaagauuuaccauaagugugacaacgccugcaucggcagcauucgcaaugggacauacgaccacgauguuuaucgggacgaggcucucaacaauagauuccagaucaaaggcguggaacugaagucuggauacaaagauuggauucuuuggaucuccuuugccaucagcugcuuccugcucugugucgugcugcugggcuuuauuaugugggccugccaaaaggggaacauccgcuguaauauuugcaucuga

SEQ ID NO: 192901 - RNA, 1701 nt, Artificial Sequence; identical to SEQ ID NO: 192879
  derived and/or modified CDS sequence (opt5) from hemagglutinin__InfluenzaA__ABD94899

SEQ ID NO: 192902 - RNA, 1701 nt, Artificial Sequence
  derived and/or modified CDS sequence (opt5) from hemagglutinin__InfluenzaA__ABD94910
augaagaccaucauugcccugagcuacauccucugccugguguucgcucagaaacuucccggcaacgacaauuccacagccacgcugugucucgggcaccaugcggucccuaacggaacccugguuaagacaauuaccaaugaucaaaucgaggugacaaacgcuaccgaacuugugcagaauagcagcacaggcagaauuugcgacuccccgcaccggauccuggaugggaaaaacuguacccucaucgacgcccugcugggagauccccauugcgacggcuuucagaauaaggagugggaucucuucgucgaacgcucuaaagccuauagcaacuguuacccuuaugacgugcccgauuacgcuucccugagaucucuuguugccagcuccgggacgcuggaguuuaauaacgaaucuuucaauuggaccggaguggcucagaacggcacaucuuaugccugcaagcggcgcuccgucaagagcuuuuucucuagacucaauuggcugcacaaacuugaguacaaguauccugcgcugaacgugaccaugcccaauaacgacaaauuugauaagcucuacauuuggggcguucaucacccuuccacagacagcgaucaaaccucucuguacgugcaggccuccgggcgggucacggugagcacaaaacgcucccagcagaccgugaucccgaacauuggaucuagacccuggguccggggcguuagcucccgcaucagcauuuauuggacaaucgugaagccuggggacauucugcucaucaauucuaccggaaaccugaucgcucccagaggcuacuucaagauucgguccgggaaaagcucuaucaugcgcagcgacgccccuauuggaaauuguaacuccgagugcaucacccccaauggcucuauuccgaacgauaagccuuuucaaaaugugaacagaaucacauauggcgcuuguccccgguacgucaaacagaauacgcuuaagcuggccaccgggaugcgcaacgugccugaaaaacagacaagaggaaucuucggcgcgauugccggguuuaucgagaauggaugggaaggcaugguugacgggugguauggauuccggcaccagaacagcgagggcaccggccaagcugccgaucucaaguccacacaggcugccauuaaucagaucaacgggaaacugaauagacuuauugagaagaccaacgaaaaguuucaucaaaucgagaaagaguucagcgaaguggaaggacgcauccaggaccuggagaaguacgucgaggauacgaaaauugaccucuggucuuauaacgccgaacugcugguggcucucgagaaucagcacacaaucgaucugaccgacuccgaaaugaacaaacuuuucgagcggaccagaaagcagcugcgcgaaaaugcggaggauaugggcaacgggugcuuucggauuuaccauaagugugacaaugccugcaucggaagcauuagaaacggcacauacgaucacgacguuuaucgcgacgaggcucucaauaaccgguuccaaaucaaggggguggaacugaaaucuggcuacaaggauuggauucuuuggaucuccuuugccaucagcugcuuccugcucugugucgugcugcugggauuuauuaugugggccugccagaaaggcaauaucagauguaacauuugcaucuga

SEQ ID NO: 192903 - RNA, 1701 nt, Artificial Sequence
  derived and/or modified CDS sequence (opt5) from hemagglutinin__InfluenzaA__ABD94921
augaagaccaucauugcccugagcuacauccucugccugguguucgcucagaaacuucccggcaacgacaauuccacagccacgcugugucucgggcaccaugcggucccuaacggaacccugguuaagacaauuaccaaugaucaaaucgaggugacaaacgcuaccgaacuugugcagucuagcuccacaggcagaauuugcgacgggccgcaccagauccuggauggaaagaauuguacccucaucgacgcccugcugggcgauccccauugcgacggguuucagaacaaggagugggaucucuucgucgaacggucuaaagccuauagcaauuguuacccuuaugacgugcccgauuacgcuucccugcgcucucuuguugccagcuccggaacgcuggaguuuaccaacgagagcuucaauuggacaggcguggcucaaaacggcaccucuuaugccugcaagagaggguccgucaagagcuuuuucucucggcucaauuggcugcacaaacuugaauacaaguauccugcgcugaacgugacaaugcccaauaacgacaaauuugauaagcucuacauuuggggaguucaucacccuuccaccgacagcgaucagacgucucuguacgugcaguccagcggccgcgucacaguguccaccaaaagaucucagcaaacagugaccccgaauaucgggagccggcccuggguccgcggaguuuccagcagaauuucuaucuauuggaccauugugaagccuggcgacauccugcucauuaacuccacagggaaccugaucgcuccccggggauacuucaagauccgcagaggcaaaagcucuauuaugcggagcgacgccccuaucgauaauuguaacuccgagugcauuacgcccaauggcucuaucccgaacgacaagccuuuucagaaugugaaccgcauuaccuauggggccugucccagauacgucaaacagaauacacuuaagcuggcuaccggaaugcggaacgugccugaaaaacagacacgcggcaucuucggggccaucgcgggauuuauugagaauggcugggaagggaugguugauggaugguauggcuucagacaccaaaacagcgagggcaccgggcaggccgcugaccucaaguccacgcaggccgcuaucaaucaaauuaacggaaaacugaaucggcuuaucgagaagacaaacgaaaaguuucaucagauugagaaagaguucagcgaaguggaaggcagaauccaggaucuggagaaguacgucgaggacaccaaaaucgaucucuggucuuauaaugccgaacugcugguggcccucgagaaccagcacaccauugaccugacagauuccgaaaugaacaaacuuuucgagcgcacccggaaacaacugagagaaaaugcugaggacauggggaacggaugcuuuaagaucuaccauaagugugauaaugcgugcauuggcagcauccgcaacgggacauacgaccacgacguuuaucgggaugaggcccucaauaacagauuccagauuaaaggcguggaacugaagucuggauacaaagacuggauccuuuggauuuccuuugcuaucagcugcuuccugcucugugucgugcugcugggcuuuaucaugugggccugccagaaggggaauauucgcuguaacaucugcauuuga

SEQ ID NO: 192904 - RNA, 1701 nt, Artificial Sequence; identical to SEQ ID NO: 192879
  derived and/or modified CDS sequence (opt5) from hemagglutinin__InfluenzaA__ABD94932

SEQ ID NO: 192905 - RNA, 1698 nt, Artificial Sequence
  derived and/or modified CDS sequence (opt5) from hemagglutinin__InfluenzaA__ABD94943
augaaggugaaacugcucauccugcuuugcaccuucacagccacguacgcugacaccauuuguaucggcuaucacgccaacaauagcacagauaccgucgacacaguucuggagaagaacgugaccgugacacauuccgucaaucuccuggaagauucucacaacgggaaacuuugccugcucaagggaauugcgccccugcagcugggcaauuguagcguggcuggguggauccucggaaacccugagugcgaacugcuuauuuccaaagagucuuggagcuacaucguugaaaccccgaaucccgagaacggcgccuguuauccuggguacuuugccgacuaugaggaacugagagagcaacucuccucugugagcuccuucgaacgguuugagaucuuccccaaggagagcucuuggccuaaucauacggucaccggaguguccgcuagcugcucucacaacggcaaguccagcuuuuaccgcaaucugcuuuggcugacaggcaaaaacgggcucuaucccaaucugucuaaguccuacgccaacaauaaaaagaaagaaguucugauucucuggggagugcaucacccuccgaacaucggcgaucagagaacccuguaccacacagagaacgcuuaugucagcgugguguccucucauuacagccggcgcuucacccccgaaauuacgaagagaccuaagguccgggaccaggaggggcgcaucaauuauuacuggacacuucuggaacccggagauaccauuaucuuugaggccaacggcaaucucauugcgccuugguaugccuucgcucuguccagaggguuuggaagcggcaucaucacaucuaacgcccccauggacgagugugaugcuaaaugccagaccccgcaaggcgccauuaauuccagccuuccuuuccagaacguucaccccgugaccaucggggaauguccuaaguacgugcggucugcgaaacugcgcauggucacaggacucagaaauauucccagcauccagucccggggccuguuuggggccauugcuggauucaucgagggcggguggacgggaaugguggacggcugguauggcuaccaucaccagaacgaacaagggucuggauacgccgcugaucaaaagagcacccagaaugccaucaacggcauuacaaauaaaguuaacuccgugaucgagaagaugaauacccaguuuacagccgucgggaaagaguucaacaagcuggaacgcagaauggagaaucucaacaagaaaguggacgauggauuccuggacauuuggaccuauaacgcugaacuucugguucuccuggagaaugaacggacgcuugacuuucacgauagcaacgugaagaaucuguacgagaaagucaagucucagcucaaaaacaaugcgaaggaaaucggcaacgggugcuucgaguuuuaucauaaguguaauaacgagugcauggaauccgugaaaaauggcacauacgacuaucccaaguacagcgaggaaucuaaacugaaccgcgagaagauugauggagucaaacuggacuccaugggcguguaucagauccucgccaucuacagcaccguugcuuccucucuggugcuucuggucagccucggggccauuuccuucuggaugugcucuaauggaagccugcaguguagaaucugcauuuga

SEQ ID NO: 192906 - RNA, 1701 nt, Artificial Sequence; identical to SEQ ID NO: 192705
  derived and/or modified CDS sequence (opt5) from hemagglutinin__InfluenzaA__ABD94954

SEQ ID NO: 192907 - RNA, 1698 nt, Artificial Sequence; identical to SEQ ID NO: 192814
  derived and/or modified CDS sequence (opt5) from hemagglutinin__InfluenzaA__ABD94965

SEQ ID NO: 192908 - RNA, 1698 nt, Artificial Sequence; identical to SEQ ID NO: 192813
  derived and/or modified CDS sequence (opt5) from hemagglutinin__InfluenzaA__ABD94987

SEQ ID NO: 192909 - RNA, 1698 nt, Artificial Sequence; identical to SEQ ID NO: 192813
  derived and/or modified CDS sequence (opt5) from hemagglutinin__InfluenzaA__ABD94998

SEQ ID NO: 192910 - RNA, 1698 nt, Artificial Sequence; identical to SEQ ID NO: 192813
  derived and/or modified CDS sequence (opt5) from hemagglutinin__InfluenzaA__ABD95009

SEQ ID NO: 192911 - RNA, 1698 nt, Artificial Sequence; identical to SEQ ID NO: 192814
  derived and/or modified CDS sequence (opt5) from hemagglutinin__InfluenzaA__ABD95020

SEQ ID NO: 192912 - RNA, 1698 nt, Artificial Sequence
  derived and/or modified CDS sequence (opt5) from hemagglutinin__InfluenzaA__ABD95031
augaaggugaaacugcucguccugcuuugcaccuucacagccacguacgcugacaccaucuguauuggcuaucacgccaacaauagcacagauaccguugacacagugcuggagaagaacgugaccgucacacauuccgugaaucuccuggaagauucucacaacgggaaacuuugccugcucaagggaaucgcgccccugcagcugggcaauuguagcguugcuggguggauucucggaaacccugagugcgaacugcuuaucuccaaagagucuuggagcuacauuguggaaaccccgaaucccgagaacggcacguguuauccuggguacuuuaccgacuaugaggaacugagagagcaacucuccucugucagcuccuucgaacgguuugagaucuuccccaaggagagcucuuggccuaaucauacagugaccggaguuuccgccagcugcucucacaacggcaaguccagcuuuuaccgcaaucugcuuuggcugacaggcaaaaacgggcucuaucccaaucugagacggucuuacgccaacaauaaggaaaaagaggugcugguccucuggggagugcaucacccuccgaacaucggcgaucagaaggcucuguaccacaccgaaaacgccuauguguccgucguuagcucccauuacucucgcagauucacgcccgagauugcuaaacggccuaaggugcgcgggcaggaaggaagaaucaauuauuacuggacacuucuggagcccggcgacaccauuaucuuugaggccaacgggaaucucauugcgccucgguaugccuucgcucugagccgcggauuuggcuccggcaucauuacaagcaacgcccccauggaugaaugugacgcuaagugccagaccccgcaaggggccaucaauucuucccuuccuuuccagaacgugcaccccgucaccaucggagaguguccuaaauacgugagaagcgcgaagcugcggaugguuacaggccuccgcaauauucccucuauccagagcagagggcuguuuggagccauugcuggcuucaucgaagggggauggacgggcaugguggauggcugguauggguaccaucaccagaacgagcaaggauccggcuacgccgcugaccagaaaucuacccagaaugccauuaacgggaucacaaauaaggucaacagcaucauugaaaagaugaauacccaguuuacagccgugggaaaagaguucaacaaacuggagcggcgcauggaaaaucucaacaagaagguugaugacggcuuccuggauaucuggaccuauaacgcugagcuucuggugcuccuggaaaaugagagaacgcuugacuuucacgacuccaacgucaaaaaucuguacgaaaaggugaaaagccaacucaagaacaaugcgaaagagauugggaacggcugcuucgaguuuuaucauaaguguaauaacgaaugcauggagucugucaagaauggaacauacgauuaucccaaauacuccgaagagagcaagcugaaccgggagaaaaucgacggcgugaagcuggaaucuauggggguuuaucagauucucgccaucuacuccaccguggcuagcucccugguccuucuggugucucucggagccaucagcuucuggaugugcuccaauggcucucugcaguguagaauuugcaucuga

SEQ ID NO: 192913 - RNA, 1698 nt, Artificial Sequence
  derived and/or modified CDS sequence (opt5) from hemagglutinin__InfluenzaA__ABD95042
augaaggccaaacugcucgugcugcuuugcaccuucacagcuacguacgccgacaccaucuguauuggcuaucacgcgaacaauagcacagauaccgucgacacaguucuggagaagaacgugaccgugacacauuccgucaaucuccuggaagauucucacaacgggaaacuuugccugcucaagggaaucgcuccccugcagcugggcaauuguagcguggccggguggauucucggaaacccugagugcgaacugcuuaucuccaaagagucuuggagcuacauuguugaaaccccgaaucccgagaacggcacguguuauccuggguacuuugccgacuaugaggaacugagagagcaacucuccucugugagcuccuucgaacgguuugagaucuuccccaagggaagcucuuggccuaaucauaccgucacaggcguguccgcuagcugcucucacaacggcaaguccagcuuuuaccgcaaucugcuuuggcugaccgggaaaaacggacucuaucccaaucugucuauguccuacguuaacaauaagggcaaagaggugcugguccucuggggagugcaucacccuccgaacaucggggaucagagagcccuguaccacacagaaaacgcuuaugugagcgucguuuccucucauuacagccggcgcuucacccccgagauugccaagagaccuaaagugcgggaccaggaaggccgcaucaauuauuacuggacgcuucuggagcccggggauacaauuaucuuugaagcgaacggaaaucucauugccccuugguaugcuuucgcccuguccagaggcuuuggcagcgggaucauuaccucuaacgcucccaugggagagugugacgccaagugccagacaccgcaaggcgcgaucaauuccagccuuccuuuccagaacgugcaccccgucaccaucggggaguguccuaaguacgugcggucugccaaacugcgcaugguuaccggacucagaaauauucccagcauccagucccggggccuguuuggggcuauugccggauucaucgaaggcggcuggacagggaugguggauggaugguauggcuaccaucaccagaacgagcaagggucuggauacgcugccgaccaaaagagcacgcagaaugccauuaacggcaucaccaauaaagucaacuccgugaucgaaaagaugaauacacaguuuaccgcuguugggaaagaguucaacaagcuggaacgcagaauggagaaucucaacaaaaagguggaugacggcuuccuggauauuuggacauauaacgcggagcuucugguccuccuggaaaaugagcggacccuugacuuucacgacagcaacgugaagaaucuguacgaaaaagucaagucucagcucaaaaacaaugccaaggagaucggaaacggcugcuucgaauuuuaucauaaauguaauaacgagugcauggaguccgugaagaaugggacguacgauuaucccaaguacagcgaagagucuaaacugaaccgcgaaaagauugacggaguuaaacuggaguccaugggcguguaucagauccucgcuauuuacagcacagucgccuccucucuggugcuucugguuagccucggggccaucuccuucuggaugugcucuaauggaagccugcaguguagaaucugcauuuga

SEQ ID NO: 192914 - RNA, 1698 nt, Artificial Sequence; identical to SEQ ID NO: 192913
  derived and/or modified CDS sequence (opt5) from hemagglutinin__InfluenzaA__ABD95053

SEQ ID NO: 192915 - RNA, 1698 nt, Artificial Sequence; identical to SEQ ID NO: 192872
  derived and/or modified CDS sequence (opt5) from hemagglutinin__InfluenzaA__ABD95064

SEQ ID NO: 192916 - RNA, 1698 nt, Artificial Sequence
  derived and/or modified CDS sequence (opt5) from hemagglutinin__InfluenzaA__ABD95075
augaaggccaaacugcucgugcugcuuugcaccuucacagcuacguacgccgacaccaucuguauuggcuaucacgcgaacaauagcacagauaccgucgacacaguucuggagaagaacgugaccgugacacauuccgucaaucuccuggaagauucucacaacgggaaacuuugccugcucaagggaaucgcuccccugcagcugggcaauuguagcguggccggguggauucucggaaacccugagugcgaacugcuuaucuccaaagagucuuggagcuacauuguugaaaccccgaaucccgagaacggcacguguuauccuggguacuuugccgacuaugaggaacugagagagcaacucuccucugugagcuccuucgaacgguuugagaucuuccccaagggaagcucuuggccuaaucauaccgucacaggcguguccgcuagcugcucucacaacggcaaguccagcuuuuaccgcaaucugcuuuggcugaccgggaaaaacggacucuaucccaaucugucuauguccuacguuaacaauaaggagaaagaagugcugguccucuggggcgugcaucacccuccgaacaucggggaucagagagcccuguaccacacagagaacgcuuaugugagcgucguuuccucucauuacagccggcgcuucacccccgaaauugccaagagaccuaaagugcgggaccaggagggacgcaucaauuauuacuggacgcuucuggaacccggcgauacaauuaucuuugaggcgaacgggaaucucauugccccuugguaugcuuucgcccuguccaagggauuuggcagcggcaucauuaccucuaacgcucccaugggggagugugacgccaagugccagacaccgcaaggagcgaucaauuccagccuuccuuuccagaacgugcaccccgucaccaucggcgaauguccuaaauacgugagaucugccaagcugcggaugguuaccgggcuccgcaauauucccagcauccaguccagaggacuguuuggcgcuauugccggguucaucgagggaggcuggacaggcaugguggaugggugguauggauaccaucaccagaacgaacaaggcucuggguacgcugccgaccagaaaagcacgcagaaugccauuaacggaaucaccaauaaggucaacuccgugaucgagaaaaugaauacacaguuuaccgcuguuggcaaggaguucaacaaacuggaacggcgcauggagaaucucaacaagaagguggaugacggguuccuggauauuuggacauauaacgcggaacuucugguccuccuggagaaugaaagaacccuugacuuucacgacagcaacgugaaaaaucuguacgagaaggucaaaucucaacucaagaacaaugccaaagaaaucggcaacggaugcuucgaguuuuaucauaaguguaauaacgagugcauggaauccgugaagaauggcacguacgauuaucccaaauacagcgaggaaucuaagcugaaccgggagaaaauugacgggguuaagcuggaguccaugggaguguaucagauccucgcuauuuacagcacagucgccuccucucuggugcuucugguuagccucggcgccaucuccuucuggaugugcucuaaugggagccugcagugucgcaucugcauuuga

SEQ ID NO: 192917 - RNA, 1698 nt, Artificial Sequence; identical to SEQ ID NO: 192913
  derived and/or modified CDS sequence (opt5) from hemagglutinin__InfluenzaA__ABD95086

SEQ ID NO: 192918 - RNA, 1698 nt, Artificial Sequence; identical to SEQ ID NO: 192872
  derived and/or modified CDS sequence (opt5) from hemagglutinin__InfluenzaA__ABD95097

SEQ ID NO: 192919 - RNA, 1698 nt, Artificial Sequence
  derived and/or modified CDS sequence (opt5) from hemagglutinin__InfluenzaA__ABD95119
augaaggccaaacugcucauccugcuuugcaccuucacagcuacguacgccgacaccauuuguaucggcuaucacgcgaacaauagcacagauaccguggacacaguccuggagaagaacguuaccgugacacauuccgugaaucuccuggaagauucucacaacgggaaacuuugccugcucaagggaauugcuccccugcagcugggcaauuguagcgucgccggguggauccucggaaacccugagugcgaacugcuuauuuccaaagagucuuggagcuacaucguggaaaccccgaaucccgagaacggcacguguuauccuggguacuuugccgacuaugaggaacugagagagcaacucuccucuguuagcuccuucgaacgguuugagaucuuccccaagggaagcucuuggccuaaucauaccgugacaggcgucuccgcuagcugcucucacaacggcaaguccagcuuuuaccgcaaucugcuuuggcugaccgggaaaaacggacucuaucccaaucugucuauguccuacgugaacaauaaggagaaagaaguucuggugcucuggggcguccaucacccuccgaacauuggggaucagagagcccuguaccacacagagaacgcuuaugugagcguggucuccucucauuacagccggcgcuucacccccgaaaucgccaagagaccuaaaguucgggaccaggagggacgcauuaauuauuacuggacgcuucuggaacccggcgauacaaucauuuuugaggcgaacgggaaucucaucgccccuugguaugcuuucgcccuguccagaggauuuggcagcggcauuaucaccucuaacgcucccaugggggagugugacgccaagugccagacaccgcaaggagcgaucaauuccagccuuccuuuccagaacgugcaccccgugaccauuggcgaauguccuaaguacguccggucugccaaacugcgcauggugaccgggcucagaaauauccccagcauucagucccggggacuguuuggcgcuaucgccggguucauugagggaggcuggacaggcaugguugaugggugguauggauaccaucaccagaacgaacaaggcucuggguacgcugccgaccaaaagagcacgcagaaugccaucaacggaaucaccaauaaagugaacuccgucauugagaagaugaauacacaguuuaccgcugugggcaaagaguucaacaagcuggaacgcagaauggagaaucucaacaaaaagguugaugacggguuccuggauaucuggacauauaacgcggaacuucuggugcuccuggagaaugaacggacccuugacuuucacgacagcaacgucaagaaucuguacgagaaagugaagucucagcucaaaaacaaugccaaggaaauuggcaacggaugcuucgaguuuuaucauaaauguaauaacgagugcauggaauccgucaagaauggcacguacgauuaucccaaguacagcgaggaaucuaaacugaaccgcgagaagaucgacggggugaaacuggaguccaugggaguuuaucagauucucgcuaucuacagcacaguggccuccucucugguccuucuggugagccucggcgccaucuccuucuggaugugcucuaaugggagccugcaguguagaauuugcaucuga

SEQ ID NO: 192920 - RNA, 1698 nt, Artificial Sequence
  derived and/or modified CDS sequence (opt5) from hemagglutinin__InfluenzaA__ABD95130
augaaggccaaacugcucgugcugcuuugcaccuucacagcuacguacgccgacaccaucuguauuggcuaucacgcgaacaauagcacagauaccgucgacacaguucuggagaagaacgugaccgugacacauuccgucaaucuccuggaagauucucacaacgggaaacuuugccugcucaagggaaucgcuccccugcagcugggcaauuguagcguggccggguggauucucggaaacccugagugcgaacugcuuaucuccaaagagucuuggagcuacauuguugaaaccccgaaucccgagaacggcacguguuauccuggguacuuugccgacuaugaggaacugagagagcaacucuccucugugagcuccuucgaacgguuugagaucuuccccaagggaagcucuuggccuaaucauaccgucacaggcguguccgcuagcugcucucacaacggcaaguccagcuuuuaccgcaaucugcuuuggcugaccgggaaaaacggaucuuaucccaaucucuccaugagcuacguuaacaauaaggagaaagaagugcugguccuguggggcgugcaucacccuccgaacaucggggaucagagagcccucuaccacacagagaacgcuuauguguccgucguuucuagccauuacucccggcgcuucacccccgaaauugccaagagaccuaaagugcgggaccaggagggacgcaucaauuauuacuggacgcugcuugaacccggcgauacaauuaucuuugaggcgaacgggaaucugauugccccuugguaugcuuucgcccucagcagaggauuuggcucuggcaucauuaccuccaacgcucccaugggggagugugacgccaagugccagacaccgcaaggagcgaucaauagcucucugccuuuccagaacgugcaccccgucaccaucggcgaauguccuaaguacgugcggagcgccaaacuucgcaugguuaccgggcugagaaauauucccuccauccagucucggggacucuuuggcgcuauugccggguucaucgagggaggcuggacaggcaugguggaugggugguauggauaccaucaccagaacgaacaaggcagcggguacgcugccgaccagaaguccacgcagaaugccauuaacggaaucaccaauaaagucaacagcgugaucgagaagaugaauacacaguuuaccgcuguuggcaaagaguucaacaagcuggaacgcagaauggagaaucugaacaaaaagguggaugacggguuccucgauauuuggacauauaacgcggaacugcuuguccugcucgagaaugaacggacccuggacuuucacgacucuaacgugaagaaucuuuacgagaaagucaagucccaacugaaaaacaaugccaaggaaaucggcaacggaugcuucgaguuuuaucauaaauguaauaacgagugcauggaaagcgugaagaauggcacguacgauuaucccaaguacucugaggaauccaaacucaaccgcgagaagauugacgggguuaaacuggagagcaugggaguguaucagauccuggcuauuuacuccacagucgccucuagccucgugcugcuuguuucccugggcgccaucucuuucuggaugugcagcaaugggucccuccaguguagaaucugcauuuga

SEQ ID NO: 192921 - RNA, 1698 nt, Artificial Sequence; identical to SEQ ID NO: 192872
  derived and/or modified CDS sequence (opt5) from hemagglutinin__InfluenzaA__ABD95141

SEQ ID NO: 192922 - RNA, 1698 nt, Artificial Sequence; identical to SEQ ID NO: 192872
  derived and/or modified CDS sequence (opt5) from hemagglutinin__InfluenzaA__ABD95152

SEQ ID NO: 192923 - RNA, 1698 nt, Artificial Sequence; identical to SEQ ID NO: 192919
  derived and/or modified CDS sequence (opt5) from hemagglutinin__InfluenzaA__ABD95163

SEQ ID NO: 192924 - RNA, 1698 nt, Artificial Sequence; identical to SEQ ID NO: 192913
  derived and/or modified CDS sequence (opt5) from hemagglutinin__InfluenzaA__ABD95174

SEQ ID NO: 192925 - RNA, 1698 nt, Artificial Sequence
  derived and/or modified CDS sequence (opt5) from hemagglutinin__InfluenzaA__ABD95185
augaaggccaaacugcucgugcugcuuugcaccuucacagcuacguacgccgacaccaucuguauuggcuaucacgcgaacaauagcacagauaccgucgacacaguucuggagaagaacgugaccgugacacauuccgucaaucuccuggaagauucucacaacgggaaacuuugccugcucaagggaaucgcuccccugcagcugggcaauuguagcguggccggguggauucucggaaacccugagugcgaacugcuuaucuccaaagagucuuggagcuacauuguugaaaccccgaaucccgagaacggcacguguuauccuggguacuuugccgacuaugaggaacugagagagcaacucuccucugugagcuccuucgaacgguuugagaucuuccccaagggaagcucuuggccuaaucauaccgucacaggcguguccgcuagcugcucucacaacggcgaguccagcuuuuaccgcaaucugcuuuggcugaccgggaagaacggacucuaucccaaucugucuauguccuacguuaacaauaaagaaaaggaggugcugguccucuggggcgugcaucacccuccgaacaucggggaucagagagcccuguaccacacagaaaacgcuuaugugagcgucguuuccucucauuacagccggcgcuucacccccgagauugccaaaagaccuaaggugcgggaccaggaaggacgcaucaauuauuacuggacgcuucuggagcccggcgauacaauuaucuuugaggcgaacgggaaucucauugccccuugguaugcuuucgcccuguccagaggauuuggcagcggcaucauuaccucuaacgcucccaugggggaaugugacgccaaaugccagacaccgcaaggagcgaucaauuccagccuuccuuuccagaacgugcaccccgucaccaucggcgaguguccuaaguacgugcggucugccaagcugcgcaugguuaccgggcucagaaauauucccagcauccagucccggggacuguuuggcgcuauugccggguucaucgaaggaggcuggacaggcaugguggaugggugguauggauaccaucaccagaacgagcaaggcucuggguacgcugccgaccagaaaagcacgcagaaugccauuaacggaaucaccaauaaggucaacuccgugaucgaaaagaugaauacacaguuuaccgcuguuggcaaagaguucaacaaacuggagcgcagaauggaaaaucucaacaagaaaguggaugacggguuccuggauauuuggacauauaacgcggagcuucugguccuccuggaaaaugagcggacccuugacuuucacgacagcaacgugaagaaucuguacgaaaaggucaaaucucaacucaagaacaaugccaaagagaucggcaacggaugcuucgaguuuuaucauaaguguaauaacgaaugcauggaguccgugaaaaauggcacguacgauuaucccaaguacagcgaagagucuaagcugaaccgcgagaaaauugacgggguuaagcuggaauccaugggaguguaucagauccucgcuauuuacagcacagucgccuccucucuggugcuucugguuagccucggcgccaucuccuucuggaugugcucuaaugggagccugcaguguagaaucugcauuuga

SEQ ID NO: 192926 - RNA, 1698 nt, Artificial Sequence; identical to SEQ ID NO: 192913
  derived and/or modified CDS sequence (opt5) from hemagglutinin__InfluenzaA__ABD95196

SEQ ID NO: 192927 - RNA, 1698 nt, Artificial Sequence; identical to SEQ ID NO: 192371
  derived and/or modified CDS sequence (opt5) from hemagglutinin__InfluenzaA__ABD95207

SEQ ID NO: 192928 - RNA, 1698 nt, Artificial Sequence; identical to SEQ ID NO: 192872
  derived and/or modified CDS sequence (opt5) from hemagglutinin__InfluenzaA__ABD95218

SEQ ID NO: 192929 - RNA, 1698 nt, Artificial Sequence; identical to SEQ ID NO: 192919
  derived and/or modified CDS sequence (opt5) from hemagglutinin__InfluenzaA__ABD95229

SEQ ID NO: 192930 - RNA, 1698 nt, Artificial Sequence; identical to SEQ ID NO: 192872
  derived and/or modified CDS sequence (opt5) from hemagglutinin__InfluenzaA__ABD95240

SEQ ID NO: 192931 - RNA, 1698 nt, Artificial Sequence; identical to SEQ ID NO: 192913
  derived and/or modified CDS sequence (opt5) from hemagglutinin__InfluenzaA__ABD95251

SEQ ID NO: 192932 - RNA, 1698 nt, Artificial Sequence; identical to SEQ ID NO: 192371
  derived and/or modified CDS sequence (opt5) from hemagglutinin__InfluenzaA__ABD95262

SEQ ID NO: 192933 - RNA, 1698 nt, Artificial Sequence; identical to SEQ ID NO: 192872
  derived and/or modified CDS sequence (opt5) from hemagglutinin__InfluenzaA__ABD95273

SEQ ID NO: 192934 - RNA, 1698 nt, Artificial Sequence; identical to SEQ ID NO: 192368
  derived and/or modified CDS sequence (opt5) from hemagglutinin__InfluenzaA__ABD95284

SEQ ID NO: 192935 - RNA, 1698 nt, Artificial Sequence; identical to SEQ ID NO: 192872
  derived and/or modified CDS sequence (opt5) from hemagglutinin__InfluenzaA__ABD95295

SEQ ID NO: 192936 - RNA, 1698 nt, Artificial Sequence
  derived and/or modified CDS sequence (opt5) from hemagglutinin__InfluenzaA__ABD95306
augaaggccaaacugcucgugcugcuuugcaccuucacagcuacguacgccgacaccaucuguauuggcuaucacgcgaacaauagcacagauaccgucgacacaguucuggagaagaacgugaccgugacacauuccgucaaucuccuggaagauucucacaacgggaaacuuugccugcucaagggaaucgcuccccugcagcugggcaauuguagcguggccggguggauucucggaaacccugagugcgaacugcuuaucuccaaagagucuuggagcuacauuguugaaaccccgaaucccgagaacggcacguguuauccuggguacuuugccgacuaugaggaacugagagagcaacucuccucugugagcuccuucgaacgguuugagaucuuccccaagggaagcucuuggccuaaucauaccgucacaggcguguccgcuagcugcucucacaacggcaaguccagcuuuuaccgcaaucugcuuuggcugaccgggaaaaacggacucuaucccaaucugucuauguccuacguuaacaauaaggagaaagaaauccuggugcucuggggcguccaucacccuccgaacauuggggaucagagagcccuguaccacacagagaacgcuuaugugagcguggucuccucucauuacagccggcgcuucacccccgaaaucgccaagagaccuaaaguucgggaccaggagggacgcauuaauuauuacuggacgcuucuggaacccggcgauacaaucauuuuugaggcgaacgggaaucucaucgccccuugguaugcuuucgcccuguccagaggauuuggcagcggcauuaucaccucuaacgcucccaugggggagugugacgccaagugccagacaccgcaaggagcgaucaauuccagccuuccuuuccagaacgugcaccccgugaccauuggcgaauguccuaaguacguccggucugccaaacugcgcauggugaccgggcucagaaauauccccagcauucagucccggggacuguuuggcgcuaucgccggguucauugagggaggcuggacaggcaugguugaugggugguauggauaccaucaccagaacgaacaaggcucuggguacgcugccgaccaaaagagcacgcagaaugccaucaacggaaucaccaauaaagugaacuccgucauugagaagaugaauacacaguuuaccgcugugggcaaagaguucaacaagcuggaacgcagaauggagaaucucaacaaaaagguugaugacggguuccuggauaucuggacauauaacgcggaacuucuggugcuccuggagaaugaacggacccuugacuuucacgacagcaacgucaagaaucuguacgagaaagugaagucucagcucaaaaacaaugccaaggaaauuggcaacggaugcuucgaguuuuaucauaaauguaauaacgagugcauggaauccgucaagaauggcacguacgauuaucccaaguacagcgaggaaucuaaacugaaccgcgagaagaucgacggggugaaacuggaguccaugggaguuuaucagauucucgcuaucuacagcacaguggccuccucucugguccuucuggugagccucggcgccaucuccuucuggaugugcucuaaugggagccugcaguguagaauuugcaucuga

SEQ ID NO: 192937 - RNA, 1698 nt, Artificial Sequence; identical to SEQ ID NO: 192913
  derived and/or modified CDS sequence (opt5) from hemagglutinin__InfluenzaA__ABD95328

SEQ ID NO: 192938 - RNA, 1701 nt, Artificial Sequence
  derived and/or modified CDS sequence (opt5) from hemagglutinin__InfluenzaA__ABD95339
augaaggccaaacugcucgugcugcuuugcgcucugagcgccaccgacgcggauacaaucuguauuggcuaccacgcuaacaauuccacggacaccgucgauacaguucucgagaagaacgugaccgugacacauucugucaaucugcuugaagacagccacaacgggaaacugugcagacucaagggaaucgcuccccugcagcugggcaaauguuccauugccggguggauccucggaaauccugagugcgaaucucuguucagcaagaaguccuggucuuauauugccgagaccccgaacagcgaaaauggcacauguuaccccggguauuuugccgauuacgaggagcuucgggaacaacuguccagcgugucuuccuucgagcgcuuugaaaucuucccuaaagagagcucuuggcccaagcauuccguuaccagaggagugacggcuagcugcucucacaaaggcaaguccagcuuuuaucggaaccuccuguggcuuaccgagaaaaauggcuccuacccuaaccugucuaagagcuaugucaaugacaaggaaaaagaggugcucguucuguggggagugcaucaccccuccaacaucgaagaucagaagacaauuuaccgcaaagagaaugccuacgucagcguggugucuucccacuauaacagacgguucaccccugaaaucgcgaagcgcccgaaagucagagaccaggaggggcggauuaauuacuauuggacacugcucgagcccggcgauaccaucauuuuugaagccaacgggaaccugaucgcuccuugguacgccuucgcucuuagccgcggauuuggcucugggauuaucacgagcaauguuuccauggacgagugugaugccaagugccagacaccccaaggagcgaucaacucuagccugccuuuccagaaugugcaucccgugaccauuggcgaauguccgaaauaugucagauccacaaagcuccggauggugaccggccugcgcaacaucccuagcauucagucuagagggcuuuuuggagccaucgcuggcuucauugaagggggauggaccggcaugaucgacgggugguacggauaucaccaucagaaugaacaaggcuccggcuacgccgcugaucaaaagagcacacagaacgccaucaaugggauuacgaacaaaguuaauucugugaucgagaagaugaacacccaguuuacagccgucggaaaagaguucaauaagcuggaaaaacggauggagaaccucaauaagaagguggacgacggcuuccuggauauuuggaccuacaacgcugaacugcucguucugcuugagaaugaacgcacacuggacuuucacgauuccaacgugaaaaaccucuaugagaaggucaaaagccagcugaagaauaacgcgaaagagaucgggaauggaugcuucgaauuuuaccacaaguguaacaaugagugcauggaauccgugaagaacggcaccuaugacuaccccaaauauucugaggagagcaaacuuaauagagagaagauugauggggucaagcuggaguccaugggcguguaccagauccucgccaucuauucuacgguugcuagcucccuggugcugcucgucagccugggagccauuucuuucuggaugugcuccaacggcagccuucagugucggaucugcauuuga

SEQ ID NO: 192939 - RNA, 1698 nt, Artificial Sequence; identical to SEQ ID NO: 192814
  derived and/or modified CDS sequence (opt5) from hemagglutinin__InfluenzaA__ABE11657

SEQ ID NO: 192940 - RNA, 1698 nt, Artificial Sequence
  derived and/or modified CDS sequence (opt5) from hemagglutinin__InfluenzaA__ABE11668
augaaggccaaacugcucgugcugcuuugcaccuucacagcuacguacgccgacaccaucuguauuggcuaucacgcgaacaauagcacagauaccgucgacacaguucuggagaagaacgugaccgugacacauuccgucaaucuccuggaagauucucacaacgggaaacuuugccugcucaagggaaucgcuccccugcagcugggcaauuguagcguggccggguggauucucggaaacccugagugcgaacugcuuaucuccaaagagucuuggagcuacauuguugaaaccccgaaucccgagaacggcacguguuauccuggguacuuugccgacuaugaggaacugagagagcaacucuccucugugagcuccuucgaacgguuugagaucuuccccaaggagagcucuuggccuaaucauaccgucacaggaguguccgcuagcugcucucacaacggcaaguccagcuuuuaccgcaaucugcuuuggcugaccggcaaaaacgggcucuaucccaaucugucuauguccuacguuaacaauaaggaaaaagaggugcugguccucuggggagugcaucacccuccgaacaucggcgaucagagagcccuguaccacacagaaaacgcuuaugugagcgucguuuccucucauuacagccggcgcuucacccccgagauugccaagagaccuaaagugcgggaccaggaagggcgcaucaauuauuacuggacgcuucuggagcccggagauacaauuaucuuugaggcgaacggcaaucucauugccccuugguaugcuuucgcccuguccagaggguuuggaagcggcaucauuaccucuaacgcucccauggacgaaugugaugccaagugccagacaccgcaaggcgcgaucaauuccagccuuccuuuccagaacgugcaccccgucaccaucggggaguguccuaaguacgugcggucugccaaacugcgcaugguuaccggacucagaaauauucccagcauccagucccggggccuguuuggggcuauugccggauucaucgaaggcggguggacaggaaugguggacggcugguauggcuaccaucaccagaacgagcaagggucuggauacgcugccgaucaaaagagcacgcagaaugccauuaacggcaucaccaauaaagucaacuccgugaucgaaaagaugaauacacaguuuaccgcuguugggaaagaguucaacaagcuggagcgcagaauggaaaaucucaacaaaaagguggacgauggauuccuggacauuuggacauauaacgcggagcuucugguccuccuggaaaaugagcggacccuugacuuucacgauagcaacgugaagaaucuguacgaaaaagucaagucucagcucaaaaacaaugccaaggagaucggcaacgggugcuucgaguuuuaucauaaauguaauaacgaaugcauggaguccgugaagaauggcacguacgacuaucccaaguacagcgaagagucuaaacugaaccgcgagaagauugauggaguuaaacuggaauccaugggcguguaucagauccucgcuauuuacagcacagucgccuccucucuggugcuucugguuagccucggggccaucuccuucuggaugugcucuaauggaagccugcaguguagaaucugcauuuga

SEQ ID NO: 192941 - RNA, 1698 nt, Artificial Sequence
  derived and/or modified CDS sequence (opt5) from hemagglutinin__InfluenzaA__ABE11679
augaaggugaaacugcucguccugcuuugcaccuucacagccacguacgcugacaccaucuguauuggcuaucacgccaacaauagcacagauaccguugacacagugcuggagaagaacgugaccgucacacauuccgugaaucuccuggaagauucucacaacgggaaacuuugccugcucaagggaaucgcgccccugcagcugggcaauuguagcguugcuggguggauucucggaaacccugagugcgaacugcuuaucuccaaagagucuuggagcuacauuguggaaaccccgaaucccgagaacggcacguguuauccuggguacuuugccgacuaugaggaacugagagagcaacucuccucugucagcuccuucgaacgguuugagaucuuccccaaggagagcucuuggccuaaucauaccgugacaggaguuuccgccagcugcucucacaacggcaaguccagcuuuuaccgcaaucugcuuuggcugaccggcagaaacgggcucuaucccaaucugucuaaauccuacgcuaacaauaaggaaaaagaggugcugguccucuggggagugcaucacccuccgaacaucggcgaucagcgggcccuguaccacacagaaaacgcuuaugugagcgucguuuccucucauuacagccgcagauucacccccgagauugccaagcggccuaaagugcgcgaccaggaagggagaaucaauuauuacuggacgcuucuggagcccggagauacaauuaucuuugaggcgaacggcaaucucauugccccucgguaugcuuucgcccugucccgcggguuuggaagcggcaucauuaccucuaacgcucccauggacgaaugugaugccaagugccagacaccgcaaggcgcgaucaauuccagccuuccuuuccagaacgugcaccccgucaccaucggggaguguccuaaguacgugagaucugccaaacugcggaugguuaccggacuccgcaauauucccagcauccaguccagaggccuguuuggggcuauugccggauucaucgaaggcggguggacaggaaugguggacggcugguauggcuaccaucaccagaacgagcaagggucuggauacgcugccgaucaaaagagcacgcagaaugccauuaacggcaucaccaauaaagucaacuccgugaucgaaaagaugaauacacaguuuaccgcuguugggaaagaguucaacaagcuggagcggcgcauggaaaaucucaacaaaaagguggacgauggauuccuggacauuuggacauauaacgcggagcuucugguccuccuggaaaaugagagaacccuugacuuucacgauagcaacgugaagaaucuguacgaaaaagucaagucucagcucaaaaacaaugccaaggagaucggcaacgggugcuucgaguuuuaucauaaauguaaugacgaaugcauggaguccgugaagaacggcacguacgauuaucccaaguacagcgaagagucuaaacugaaucgggagaagauugacggaguuaaacuggaauccaugggcguguaucagauccucgcuauuuacagcacagucgccuccucucuggugcuucugguuagccucggggccaucuccuucuggaugugcucuaacggaagccugcaguguagaaucugcauuuga

SEQ ID NO: 192942 - RNA, 1698 nt, Artificial Sequence
  derived and/or modified CDS sequence (opt5) from hemagglutinin__InfluenzaA__ABE11690
augaaggccaaacugcucgugcugcuuugcaccuucacagcuacguacgccgacaccaucuguauuggcuaucacgcgaacaauagcacagauaccgucgacacaguucuggagaagaacgugaccgugacacauuccgucaaucuccuggaagauucucacaacgggaaacuuugccugcucaagggaaucgcuccccugcagcugggcaauuguagcguggccggguggauucucggaaacccugagugcgaacugcuuaucuccaaagagucuuggagcuacauuguugaaaccccgaaucccgagaacggcacguguuauccuggguacuuugccgacuaugaggaacugagagagcaacucuccucugugagcuccuucgaacgguuugagaucuuccccaagggaagcucuuggccuaaucauaccgucacaggcguguccgcuagcugcucucacaacggcaaguccagcuuuuaccgcaaucugcuuuggcugaccgggaaaaacggacucuaucccaaucugucuauguccuacguuaacaauaaggagaaagaagugcugguccucuggggcgugcaucacccuccgaacaucgggaaccagagagcccuguaccacacagagaaugcuuaugugagcgucguuuccucucauuacagccggcgcuucacccccgaaauugccaagagaccuaaagugcgggaucaggagggacgcaucaacuauuacuggacgcuucuggaacccggcgacacaauuaucuuugaggcgaaugggaaccucauugccccuugguaugcuuucgcccuguccagaggauuuggcagcggcaucauuaccucuaaugcucccaugggggagugugaugccaagugccagacaccgcaaggagcgaucaacuccagccuuccuuuccagaaugugcaccccgucaccaucggcgaauguccuaaguacgugcggucugccaaacugcgcaugguuaccgggcucagaaacauucccagcauccagucccggggacuguuuggcgcuauugccggguucaucgagggaggcuggacaggcaugguggacgggugguauggauaccaucaccagaaugaacaaggcucuggguacgcugccgaucaaaagagcacgcagaacgccauuaauggaaucaccaacaaagucaauuccgugaucgagaagaugaacacacaguuuaccgcuguuggcaaagaguucaauaagcuggaacgcagaauggagaaccucaacaaaaagguggacgauggguuccuggacauuuggacauauaaugcggaacuucugguccuccuggagaacgaacggacccuugauuuucacgacagcaaugugaagaaccuguacgagaaagucaagucucagcucaaaaauaacgccaaggaaaucggcaauggaugcuucgaguuuuaucauaaauguaacaaugagugcauggaauccgugaagaacggcacguacgacuaucccaaguacagcgaggaaucuaaacugaaucgcgagaagauugaugggguuaaacuggaguccaugggaguguaucagauccucgcuauuuacagcacagucgccuccucucuggugcuucugguuagccucggcgccaucuccuucuggaugugcucuaacgggagccugcaguguagaaucugcauuuga

SEQ ID NO: 192943 - RNA, 1698 nt, Artificial Sequence
  derived and/or modified CDS sequence (opt5) from hemagglutinin__InfluenzaA__ABE11701
augaaggccaaacugcucgugcugcuuugcaccuucacagcuacguacgccgacaccaucuguauuggcuaucacgcgaacaauagcacagauaccgucgacacaguucuggagaagaacgugaccgugacacauuccgucaaucuccuggaagauucucacaacgggaaacuuugccugcucaagggaaucgcuccccugcagcugggcaauuguagcguggccggguggauucucggaaacccugagugcgaacugcuuaucuccaaagagucuuggagcuacauuguugaaaccccgaaucccgagaacggcacguguuauccuggguacuuugccgacuaugaggaacugagagagcaacucuccucugugagcuccuucgaacgguuugagaucuuccccaagggaagcucuuggccuaaucauaccgucacaggcguguccgcuagcugcucucacaacggcaaguccagcuuuuaccgcaaucugcuuuggcugaccgggaaaaacggacucuaucccaaucugucuauguccuacguuaacaauaaggagaaagaagugcugguccucuggggcgugcaucacccuccgaacaucggggaucagaaggcccuguaccacacagagaacgcuuaugugagcgucguuuccucucauuacagcagacgguucacccccgaaauugccaaacgcccuaaggugagagaccaggagggacggaucaauuauuacuggacgcuucuggaacccggcgauacaauuaucuuugaggcgaacgggaaucucauugccccuugguaugcuuucgcccugucccgcggauuuggcagcggcaucauuaccucuaacgcucccaugggggagugugacgccaagugccagacaccgcaaggagcgaucaauuccagccuuccuuuccagaacgugcaccccgucaccaucggcgaauguccuaaauacgugagaucugccaagcugcggaugguuaccgggcuccgcaauauucccagcauccaguccagaggacuguuuggcgcuauugccggguucaucgagggaggcuggacaggcaugguggaugggugguauggauaccaucaccagaacgaacaaggcucuggguacgcugccgaccagaaaagcacgcagaaugccauuaacggaaucaccaauaaggucaacuccaucauugagaaaaugaauacacaguuuaccgcugugggcaaggaguucaacaaacuggaacggcgcauggagaaucucaacaagaagguugaugacggguuccuggauaucuggacauauaacgcggaacuucuggugcuccuggagaaugaaagaacccuugacuuucacgacagcaacgucaaaaaucuguacgagaaggugaaaucucaacucaagaacaaugccaaagaaauuggcaacggaugcuucgaguuuuaucauaaguguaauaacgagugcauggaauccgucaagaauggcacguacgauuaucccaaauacagcgaggaaucuaagcugaaccgggagaaaaucgacggggugaagcuggaguccaugggaguuuaucagauucucgcuaucuacagcacaguggccuccucucugguccuucuggugagccucggcgccaucuccuucuggaugugcucuaaugggagccugcagugucgcauuugcaucuga

SEQ ID NO: 192944 - RNA, 1698 nt, Artificial Sequence; identical to SEQ ID NO: 192872
  derived and/or modified CDS sequence (opt5) from hemagglutinin__InfluenzaA__ABE11712

SEQ ID NO: 192945 - RNA, 1698 nt, Artificial Sequence; identical to SEQ ID NO: 192913
  derived and/or modified CDS sequence (opt5) from hemagglutinin__InfluenzaA__ABE11723

SEQ ID NO: 192946 - RNA, 1698 nt, Artificial Sequence; identical to SEQ ID NO: 192919
  derived and/or modified CDS sequence (opt5) from hemagglutinin__InfluenzaA__ABE11734

SEQ ID NO: 192947 - RNA, 1698 nt, Artificial Sequence; identical to SEQ ID NO: 192872
  derived and/or modified CDS sequence (opt5) from hemagglutinin__InfluenzaA__ABE11812

SEQ ID NO: 192948 - RNA, 1698 nt, Artificial Sequence; identical to SEQ ID NO: 192913
  derived and/or modified CDS sequence (opt5) from hemagglutinin__InfluenzaA__ABE11823

SEQ ID NO: 192949 - RNA, 1698 nt, Artificial Sequence; identical to SEQ ID NO: 192913
  derived and/or modified CDS sequence (opt5) from hemagglutinin__InfluenzaA__ABE11834

SEQ ID NO: 192950 - RNA, 1698 nt, Artificial Sequence; identical to SEQ ID NO: 192913
  derived and/or modified CDS sequence (opt5) from hemagglutinin__InfluenzaA__ABE11845

SEQ ID NO: 192951 - RNA, 1698 nt, Artificial Sequence; identical to SEQ ID NO: 192919
  derived and/or modified CDS sequence (opt5) from hemagglutinin__InfluenzaA__ABE11856

SEQ ID NO: 192952 - RNA, 1701 nt, Artificial Sequence
  derived and/or modified CDS sequence (opt5) from hemagglutinin__InfluenzaA__ABE11900
augaaggccaaacugcucgugcugcuuugcgcuuucaccgccacauacgcggacacgaucuguauuggcuaucacgcuaacaauagcaccgauacagucgacaccguucuggagaagaacgugacagugacccauuccgucaaucuccuggaagauucucacaacgggaaacuuugcagacugaagggaacagcuccccuccagcugggcaauuguagcguggccggguggauccugggaaacccugagugcgaaucccucuuuucuaaagagagcugguccuacauugccgaaaccccgaaucccgagaacggcacguguuauccuggguacuucgccgacuaugaggaacugcgggagcaacuuucuagcguuuccagcuuugaacgcuucgagaucuuucccaaggagucuuccuggccuaaucauaccgugacaaagggagucaccgcuagcugcucucacaacggcaaauccagcuucuacaagaaucugcucuggcugacagaaaagaacggccuuuaucccaaucugucuaaguccuacgugaacaauaaagagaaggaaguucucgugcuguggggaguccaucacccuagcaacauuggggaucagagagccaucuaccacaccgagaacgcguauguguccguggucucuagccauuacucccggcgcuuuacgccggaaaucgccaagagacccaaaguucgggaccaggagggccgcauuaauuauuacuggacacugcucgagccuggggauaccaucauuuucgaagcuaacggaaaucugaucgcccccugguaugcuuuugcccuuagcagaggcuucgggucuggaauuaucacauccaacgcgagcaugggcgagugugacgccaagugccagaccccucaaggcgcuauuaauucuagccugcccuuucagaacgugcacccggugaccaucggggaauguccuaaauacguccgguccacaaagcuccgcauggugacgggacugagaaauauccccucuauucagagccggggccuuuucggggccaucgcuggauuuauugagggcggguggaccggaaugaucgauggcugguauggcuaccaucaccagaacgaacaaggguccggauacgccgccgaccagaaaagcacacagaaugcuauuaacggcaucaccaauaagguuaacucugugaucgagaaaaugaauacacaguucaccgcggucgggaaggaguucaacaagcuggaacgcagaauggagaaucucaacaaaaagguggaugacggauuucuggauauuuggacguauaacgccgaacugcucguucugcuugagaaugaacggacacuggacuuccacgacuccaacgugaaaaaucucuacgagaaggucaaaacccaacugaagaacaaugcuaaggagaucggcaacgggugcuuugaguucuaucauaaauguaauaacgaaugcauggaaagcgugaagaauggcaccuacgauuauccuaaauacucugaggaguccaaacuuaaccgcgagaaaauugacggagucaagcuggaaagcaugggcguguaucagauccucgccauuuacuccacaguugccucuagccuggugcugcucaucucccugggggcuaucucuuuuuggaugugcagcaauggaucccuucaguguagaauuugcaucuga

SEQ ID NO: 192953 - RNA, 1701 nt, Artificial Sequence
  derived and/or modified CDS sequence (opt5) from hemagglutinin__InfluenzaA__ABE11942
augaaggccaaacugcucgugcugcuuugcgcuuucaccgccacauacgcggacacgaucuguauuggcuaucacgcuaacaauagcaccgauacagucgacaccguucuggagaagaacgugacagugacccauuccgucaaucuccuggaagauucucacaacgggaaacuuugcagacugaagggaacagcuccccuccagcugggcaauuguagcguggccggguggauccugggaaacccugagugcgaaucccucuuuucuaaagagagcugguccuacauugccgaaaccccgaaucccgagaacggcacguguuauccuggguacuucgccgacuaugaggaacugcgggagcaacuuucuagcguuuccagcuuugaacgcuucgagaucuuucccaaggagucuuccuggccuaaucauaccgugacaaagggagucaccgcuagcugcucucacaacggcaaauccagcuucuacaagaaucugcucuggcugacagaaaagaacggccuuuaucccucucuguccaagagcuacgugaauaacaaagagaaggaaguucucgugcuguggggaguccaucacccuuccaauauuggggaucagagagccaucuaccacaccgagaacgcguaugugucuguggucagcucccauuacagccggcgcuuuacgccggaaaucgccaagagacccaaaguucgggaccaggagggccgcauuaacuauuacuggacacugcucgagccuggggauaccaucauuuucgaagcuaauggaaaccugaucgcccccugguaugcuuuugcccuuucuagaggcuucggguccggaauuaucacaagcaaugcgucuaugggcgagugugacgccaagugccagaccccucaaggcgcuauuaacagcucccugcccuuucagaaugugcacccggugaccaucggggaauguccuaaauacguccggucuacaaagcuccgcauggugacgggacugagaaacauccccagcauucagucccggggccuuuucggggccaucgcuggauuuauugagggcggguggaccggaaugaucgauggcugguauggcuaccaucaccagaaugaacaagggagcggauacgccgccgaccagaaaucuacacagaacgcuauuaauggcaucaccaacaagguuaauuccgugaucgagaaaaugaacacacaguucaccgcggucgggaaggaguucaauaagcuggaacgcagaauggagaaccucaauaaaaagguggaugacggauuucuggauauuuggacguauaacgccgaacugcucguucugcuugagaacgaacggacacuggacuuccacgacagcaaugugaaaaaccucuacgagaaggucaaaacccaacugaagaauaacgcuaaggagaucggcaaugggugcuuugaguucuaucauaaauguaacaaugaaugcauggaaucugugaagaacggcaccuacgauuauccuaaauacuccgaggagagcaaacuuaaucgcgagaaaauugacggagucaagcuggaauccaugggcguguaucagauccucgccauuuacucuacaguugccagcucccuggugcugcucgucucucugggggcuaucagcuuuuggaugugcuccaacggaagccuucaguguagaaucugcauuuga

SEQ ID NO: 192954 - RNA, 1701 nt, Artificial Sequence
  derived and/or modified CDS sequence (opt5) from hemagglutinin__InfluenzaA__ABE12078
augaagaccaucauugcccugagcuacauccucugccugguguucgcucagaaacuucccggcaacgacaauuccacagccacgcugugucucgggcaccaugcggucccuaacggaacccugguuaagacaauuaccaaugaucaaaucgaggugacaaacgcuaccgaacuugugcagucuagcuccacaggcgggauuugcgacucuccgcaccagauccuggauggagagaauuguacccucaucgacgcccugcugggcgauccccauugcgacggguuucagaacaaagaaugggaucucuucgucgagagaagcaaggccuauuccaauuguuacccuuaugacgugcccgauuacgcuucucugcggagccuuguugccuccagcggaacgcuggaauuuaacaaugagucuuucaacuggaccggcguggcucaaaauggcacauccagcgccugcaaacgcagaucuaacaaguccuuuuucagccggcucaauuggcugcaccagcuuaaguauaaauacccugcgcugaacgucaccaugcccaauaacgagaaguuugacaaacucuauauuuggggagugcaucacccuucuacagauuccgaccagaucagccuguacgcccaggcuccggggcgcguuaccguguccacgaagagaucucaacagacagucauucccaacaucggcagccggccuugggugcgcgggguguccagcagaauuucuaucuacuggaccauugucaaacccggagauauccugcucaucaauuguacaggcaaccugauugccccucggggguauuucaagauccgcuccggaaagagcucuauuaugagaagcgacgcuuccaucggcaaaugcaauucugaauguauuacccccaacggcagcaucccgaaugacaagccuuuucagaacguuaaucggaucaccuacggggccugcccccgcuaugugaaacagaacacacuuaagcuggcgacgggaaugagaaaugugccugagaaacaaacccggggcauuuucggggccaucgcuggauuuauugaaaacggcugggaggggauggucgauggaugguacggcuuccgccaccaaaauuccgagggcacagggcaggccgcugaccucaagagcacccaggccgccaucaaccagauuaauggaaaacugaacagacuuaucgaaaagacaaaugagaaguuucaucagaucgaaaaagaguucucugaaguggagggccggauucaggaucuggagaaguauguugaagacaccaaaaucgaucucugguccuacaacgcugagcugcugguggcgcucgaaaaccaacacacgauugaccugacagauagcgagaugaauaaacuuuucgaaaagaccaagaagcagcugagagagaacgccgaggacauggggaauggauguuuuaaaaucuaucauaagugcgauaacgcuugcauuggcucuauccgcaaugggaccuacgaccacgaugucuaccgggacgaagcccucaacaauagauuccagauuaaaggcguggagcugaaguccggauauaaagacuggauccuuuggaucagcuuugccauuuccuguuuccugcucugcguugugcugcugggcuuuaucaugugggcuugucagaaggggaacauucgcugcucuaucuguauuuga

SEQ ID NO: 192955 - RNA, 1701 nt, Artificial Sequence; identical to SEQ ID NO: 192849
  derived and/or modified CDS sequence (opt5) from hemagglutinin__InfluenzaA__ABE12123

SEQ ID NO: 192956 - RNA, 1698 nt, Artificial Sequence; identical to SEQ ID NO: 192872
  derived and/or modified CDS sequence (opt5) from hemagglutinin__InfluenzaA__ABE12248

SEQ ID NO: 192957 - RNA, 1701 nt, Artificial Sequence
  derived and/or modified CDS sequence (opt5) from hemagglutinin__InfluenzaA__ABE12623
augaagaccaucauugcccugagcuacaucuucugccucgugcugggccaggaccuucccgggaacgauaauuccacagcuacgcugugucucggacaccaugccgucccuaacggcacccugguuaaaacaauuaccaaugaccaaaucgaggugacaaacgcgaccgaacuugugcagucuagcuccacagggaagauuugcaauaacccgcacagaauccuggauggaaucgacuguacccucauugaugcucugcugggcgacccccauugcgauggguuucagaaugagacgugggaccucuucgucgaacggucuaaagccuuuagcaacuguuauccuuacgaugugcccgacuaugccucccugcgcucucuuguugcuagcuccggaacccuggaguucaucaaugaaggcuuuacauggaccggcgugacacagaacgggggaagcaaugccugcaagagaggcccugauucuggguucuuuucccggcucaacuggcuguacaaaagcggaucuaccuaucccguccuuaaugugacgaugccuaacaaugacaacuucgauaagcuguacauuuggggcguucaccauccguccacaaaccaagagcagaccagccucuaugugcaggcuucugggcgcgucacaguguccaccaagagaagccagcaaaccaucauucccaauaucggaucccggccuugggugcgcggccugucuagcagaauuuccaucuacuggacaaucgucaaacccggcgacauucugguuaucaacagcaaugggaaccucauugccccucggggauacuuuaagaugcgcacgggcaaaucuuccaucaugagaagcgacgcgcccauugggaccuguaucucugagugcaucacaccgaauggaagcauuccuaacgauaagcccuuccagaaugugaacaaaaucaccuauggcgccuguccuaaguacgugaagcagaauacacugaaacuugcuaccgggaugcggaacguccccgaaaagcagacgcgcggacuguuuggcgccauugcuggcuucaucgagaaugggugggaaggaaugauugacggcugguauggguuuagacaccaaaacuccgagggaacaggccaggccgcggaucucaaaucuacccaggccgcuaucgaccaaaucaaugggaagcugaaccgggugauugagaaaaccaaugaaaaguuccaccagaucgagaaagaguucagcgaaguugaaggccgcauucaggaucuugagaaguacguggaggacacaaagaucgaucugugguccuauaacgccgaacuccuggucgcucuggagaaccagcauaccauugaccucacagauagcgaaaugaauaaacuguuugagaagacgagacggcaacuuagagaaaacgccgaggacaugggaaauggcugcuuccgcaucuaccacaaaugugauaacgccugcauugggucuauccggaauggaaccuaugaccaugacguguacagagaugaggcucugaacaaucgcuuucagaucaagggcguugaacucaaauccggguacaaggacuggauucuguggaucagcuucgcgauuucuugcuuucuucugugugugguccuccugggauucaucaugugggccugccagaagggcaacauucgguguaauaucugcaucuga

SEQ ID NO: 192958 - RNA, 1701 nt, Artificial Sequence; identical to SEQ ID NO: 192902
  derived and/or modified CDS sequence (opt5) from hemagglutinin__InfluenzaA__ABE12645

SEQ ID NO: 192959 - RNA, 1701 nt, Artificial Sequence; identical to SEQ ID NO: 192879
  derived and/or modified CDS sequence (opt5) from hemagglutinin__InfluenzaA__ABE13076

SEQ ID NO: 192960 - RNA, 1701 nt, Artificial Sequence; identical to SEQ ID NO: 192855
  derived and/or modified CDS sequence (opt5) from hemagglutinin__InfluenzaA__ABE13323

SEQ ID NO: 192961 - RNA, 1701 nt, Artificial Sequence
  derived and/or modified CDS sequence (opt5) from hemagglutinin__InfluenzaA__ABE13471
augaagaccaucauugcccugagcuacauccucugccugguguucgcucagaaacuucccggcaacgacaauuccacagccacgcugugucucgggcaccaugcggucccuaacggaacccugguuaagacaauuaccaaugaucaaaucgaggugacaaacgcuaccgaacuugugcagaauagcagcacaggcagaauuugcgacuccccgcaccggauccuggaugggaaaaacuguacccucaucgacgcccugcugggagauccccauugcgacggcuuucagaauaaggagugggaucucuucgucgaacgcucuaaagccuauagcaacuguuacccuuaugacgugcccgauuacgcuucccugagaucucuuguugccagcuccgggacgcuggaguuuuauaaugaaucuuucaacuggaccggaguggcucagaauggcacaucuuacgccugcaagcggcgcuccgucaagagcuuuuucucuagacucaacuggcugcacaaacuugaguauaaguacccugcgcugaaugugaccaugcccaacaaugacaaauuugauaagcucuacauuuggggcguucaucacccuuccacagacagcgaucaaaccucucuguaugugcaggccuccgggcgggucacggugagcacaaaacgcucccagcagaccgugaucccgaacauuggaucuagacccuggguccggggcguuagcucccgcaucagcauuuacuggacaaucgugaagccuggggacauucugcucaucaacucuaccggaaaucugaucgcucccagaggcuauuucaagauucgguccgggaaaagcucuaucaugcgcagcgacgccccuauuggaaacuguaauuccgagugcaucacccccaacggcucuauuccgaaugauaagccuuuucaaaacgugaauagaaucacauacggcgcuuguccccgguaugucaaacagaacacgcuuaagcuggccaccgggaugcgcaaugugccugaaaaacagacaagaggaaucuucggcgcgauugccggguuuaucgagaacggaugggaaggcaugguugacgggugguacggauuccggcaccagaauagcgagggcaccggccaagcugccgaucucaaguccacacaggcugccauuaaccagaucaaugggaaacugaacagacuuauugagaagaccaaugaaaaguuucaucaaaucgagaaagaguucagcgaaguggaaggacgcauccaggaccuggagaaguaugucgaggauacgaaaauugaccucuggucuuacaacgccgaacugcugguggcucucgagaaccagcacacaaucgaucugaccgacuccgaaaugaauaaacuuuucgagcggaccagaaagcagcugcgcgaaaacgcggaggauaugggcaaugggugcuuucggauuuaccauaagugugacaacgccugcaucggaagcauuagaaauggcacauaugaucacgacguuuaccgcgacgaggcucucaacaaucgguuccaaaucaaggggguggaacugaaaucuggcuauaaggauuggauucuuuggaucuccuuugccaucagcugcuuccugcucugugucgugcugcugggauuuauuaugugggccugccagaaaggcaacaucagauguaauauuugcaucuga

SEQ ID NO: 192962 - RNA, 1701 nt, Artificial Sequence
  derived and/or modified CDS sequence (opt5) from hemagglutinin__InfluenzaA__ABE13555
augaagaccaucauugcccugagcuacauccucugccugguguucgcucagaaacuucccggcaacgacaauuccacagccacgcugugucucgggcaccaugcggucccuaacggaacccugguuaagacaauuaccaaugaucaaaucgaggugacaaacgcuaccgaacuugugcagggcucuagcacagggagaauuugcgacuccccgcaccggauccuggaugggaaaaauuguacccucaucgacgcccugcugggcgauccccauugcgacggguuucagaacaaggagugggaucucuucgucgaacgcucuaaagccuauagcaauuguuacccuuaugacgugcccgauuacgcuucccugagaucucuuguugccagcuccggaacgcuggaguuuaacaaugagagcuucaacuggaccggcguggcucagaauggcacaucuuaugccugcaagcggcgcuccgucaagagcuuuuucucuagacucaacuggcugcacaaacuugaauacaaguauccugcgcugaaugugaccaugcccaacaaugacaaauuugauaagcucuacauuuggggaguucaucacccuuccacagacagcgaucaaaccucucuguacgugcaggccuccggacgggucacggugagcacaaaacgcucccagcagaccgugaucccgaacauuggcucuagacccuggguccgcgggguuagcucccggaucagcauuuauuggacaaucgugaagccuggagacauucugcucaucucuuccaccggcaaccugaucgcucccagaggguacuucaagauucggagcggaaaaucuagcaucaugcgcuccgacgccccuauugauaauuguaacucugagugcaucacccccaauggcagcauuccgaacgacaagccuuuucaaaaugugaacagaaucacauauggcgcuuguccccgguacgucaaacagaauacgcuuaagcuggccaccgggaugcgcaacgugccugaaaaacagacaaagggaaucuucggcgcgauugccggguuuaucgagaauggaugggaaggcaugguugaugggugguauggauucagacaccagaacuccgagggcaccggccaagcugccgaccucaaaagcacacaggcugccauuaaucagaucaacgggaagcugaaucggcuuauugagaagaccaacgaaaaauuucaucaaaucgagaaggaguucucugaaguggaaggaagaauccaggaucuggagaaauacgucgaggacacgaagauugaucucugguccuauaaugccgaacugcugguggcucucgagaaccagcacacaaucgaccugaccgauagcgaaaugaacaaacuuuucgagcgcacccggaagcagcugagagaaaaugcggaggacaugggcaacgggugcuuuaagauuuaccauaaaugugauaaugccugcaucggaucuauucgcaacggcacauacgaccacgacguuuaucgggaugaggcucucaauaacagauuccaaaucaaggggguggaacugaaauccggcuacaaggacuggauucuuuggaucagcuuugccauguccugcuuccugcucugugucgugcugcugggauuuaucaugugggccugccagaaaggcaauauucgcuguaacaucugcauuuga

SEQ ID NO: 192963 - RNA, 1701 nt, Artificial Sequence
  derived and/or modified CDS sequence (opt5) from hemagglutinin__InfluenzaA__ABE13606
augaagaccaucauugcccugagcuacauccucugccugguguucgcucagaaacuucccggcaacgacaauuccacagccacgcugugucucgggcaccaugcggucccuaacggaacccugguuaagacaauuaccaaugaucaaaucgaggugacaaacgcuaccgaaauggugcagucuagcuccacaggcagaauuugcgacucuccgcaccggauccuugaugggaaaaauuguacccugaucgacgcccuccugggagauccccauugcgacggcuuucagaacaaggagugggaucuguucgucgaacgcagcaaagccuauuccaauuguuacccuuaugacgugcccgauuacgcuucucucagaagccugguugccuccagcgggacgcuugaguuuaccaacgaaggauucaauuggacaggcguggcucaggacggcaccucuuaugccugcaagcggggguccgucaagagcuuuuucucucgccugaacuggcuccacaaacuggaguacaaguauccugcgcuuaaugugacaaugcccaacaaugauaaauuugacaagcuguacauuuggggaguucaucacccuuccaccgauagcgaccaaacgucucucuacgugcaggccuccggcagagucacagugagcaccaaacggucccagcagacagugaucccgaacauugggucucgccccugggucagaggaguuagcucccggaucagcauuuauuggaccaucgugaagccuggcgacauucugcugaucaauucuaccgggaaccucaucgcuccccgcggauacuucaagauuagauccggcaaaagcucuaucaugcggagcgaugccccuauuggcaacuguaauuccgagugcaucacacccaacgggucuauuccgaaugacaagccuuuucaaaacgugaaucgcaucacguauggagcuugucccagauacgucaaacagaacacccugaaacuugccacaggcaugcggaaugugccugaaaagcagacccgcgggaucuucggagcgauugccggcuuuaucgagaacgggugggaaggaaugguugauggcugguauggcuucagacaccagaauagcgaggggacaggacaagcugccgaccugaaguccacccaggcugccauuaaccagaucaauggcaaacucaaccggcugauugagaagacgaaugaaaaguuucaucaaaucgagaaagaguucagcgaaguggaagggagaauccaggaucuugagaaguacgucgaggacacaaaaauugaucuguggucuuauaacgccgaacuccugaucgcucuggagaaucagcacaccauugaccucaccgauuccgaaaugaacaagcuguucgagcgcacacggaaacagcuuagagaaaacgcggaggacaugggaaauggcugcuuuaagaucuaccauaagugugauaacgccugcauugggagcauccgcaauggcaccuacgaccacgacguguaucgggaugaggcucugaacaauagauuccaaauuaaaggaguugaacucaagucuggcuacaaagacuggauccuguggaucuccuuugccauuagcugcuuccuucugugugugguccuccugggguuuaucaugugggccugccagaagggaaacauucgcuguaauaucugcauuuga

SEQ ID NO: 192964 - RNA, 1701 nt, Artificial Sequence
  derived and/or modified CDS sequence (opt5) from hemagglutinin__InfluenzaA__ABE13628
augaagaccaucauugcccugagcuacauccucugccugguguucgcucagaaacuucccggcaacgacaauuccacagccacgcugugucucgggcaccaugcggucccuaacggaacccugguuaagacaauuaccaaugaucaaaucgaggugacaaacgcuaccgaacuugugcagucuagcuccacaggcagaauuugcgacucuccgcaccggauccuggaugggaaaaauuguacccucaucgacgcccugcugggagauccccauugcgacggcuuucagaacaaggagugggaucucuucgucgaacgcagcaaagccuauuccaauuguuacccuuaugacgugcccgauuacgcuucucugagaagccuuguugccuccagcgggacgcuggaguuuaccaacgaaggauucaauuggacaggcguggcucaggacggcaagucuuaugccugcaagcggggguccgucaacagcuuuuucucucgccucaauuggcugcacaaacuugaguacaaguauccugcgcugaacgugaccaugcccaauaacgauaaauuugacaagcucuacauuuggggaguucaucacccuuccacagauagcgaccaaaccucucuguacgugcaggccuccggcagagucacggugagcacaaaacggucccagcagaccgugaucccgaauauugggucucgccccugggucagaggaaucagcucccggauuagcaucuauuggacaauuguuaagccuggcgacauccugcucaucaacucuaccgggaaccugauugcuccccgcggauacuucaagaucagaaauggcaaauccagcauuaugcggucugaugccccuaucgacaacuguaauagcgagugcauuacccccaacggcuccaucccgaaugauaagccuuuucaaaacgugaaucgcaucacauauggggcuugucccagauacgugaaacagaacacgcuuaagcuggccaccggaaugcggaaugucccugaaaaacagacacgcggcauuuucggggcgaucgccggauuuauugagaacggcugggaagggaugguggacggaugguauggcuucagacaccaaaauucugagggcaccgggcaggcugccgaucucaagagcacacaggcugccaucgaccagauuaacggaaaacugaaucggcuuaucgagaagaccaacgaaaaguuucaucaaaucgagaaagaguucuccgaaguugaaggccgcauucaggaucuggagaaguacguggaggacacgaaaaucgaucucuggagcuauaaugccgaacugcuggucgcucucgagaaccagcacacaauugaccugaccgauucugaaaugaacaagcuguucgagagaacccggaaacagcugagagaaaaugcggaggacauggggaacggaugcuuuaagaucuaccauaagugugacaaugccugcauuggcuccauccgcaacgggacauacgaucacgacguguaucgggaugaggcucucaauaacagauuccaaauuaaaggcguugaacuuaagagcggauacaaagacuggauccuuuggaucucuuuugccauuuccugcuuccugcucugugugguccugcugggcuuuaucaugugggccugccagaaggggaauauucgcuguaacaucugcauuuga

SEQ ID NO: 192965 - RNA, 1701 nt, Artificial Sequence
  derived and/or modified CDS sequence (opt5) from hemagglutinin__InfluenzaA__ABE13824
augaagaccaucauugcccugagcuacauccucugccagguguucgcucaaaaacugcccggcaacgacaauuccacagccacgcuuugucuggggcaccaugcggucccuaacggaacccucguuaagacaauuaccaaugaucagaucgaggugacaaacgcuaccgaacuggugcagucuagcuccacaggcagaauuugcgacucuccgcaccggauccuugaugggaaaaauuguacccugaucgacgcccuccugggagauccccauugcgacggcuuucagaacaaggagugggaucuguucgucgaacgcagcaaagccuauuccaauuguuacccuuaugacgugcccgauuacgcuucucucagaagccugguugccuccagcgggacgcuugaguuuaccaacgaaggauucaauuggacaggcguggcucaagacggcaagucuuaugccugcaagcggggguccgucaacagcuuuuucucucgccugaauuggcuccacaaacuggaguacaaguauccugcgcuuaacgugaccaugcccaauaacgauaaauuugacaagcuguacauuuggggaguucaucacccuuccacagauagcgaccagaccucucucuacgugcaggccuccggcagagucacggugagcacaaaacggucccagcaaaccgugaucccgaauauugggucucgccccugggucagaggaaucagcucccggauuagcaucuauuggacaauuguuaagccuggcgacauccugcugaucaacucuaccgggaaccucauugcuccccgcggauacuucaagaucagaaauggcaaauccagcauuaugcggucugaugccccuaucgacaacuguaauagcgagugcauuacccccaacggcuccaucccgaaugauaagccuuuucagaacgugaaucgcaucacauauggggcuugucccagauacgugaaacagaacacgcugaagcuggccaccggaaugcggaaugucccugaaaaacagacacgcggcauuuucggggcgaucgccggauuuauugagaacggcugggaagggaugguggacggaugguauggcuucagacaccaaaauucugagggcaccgggcaggcugccgaucuuaagagcacacaggcugccaucgaccaaauuaacggaaaacucaaucggcugaucgagaagaccaacgaaaaguuucaucagaucgagaaagaguucuccgaaguugaaggccgcauucaggaucuugagaaguacguggaggacacgaaaaucgaucuguggagcuauaaugccgaacuccuggucgcucuggagaaccagcacacaauugaccucaccgauucugaaaugaacaagcuguucgagagaacccggaaacaacuuagagaaaaugcggaggacauggggaacggaugcuuuaagaucuaccauaagugugacaaugccugcauuggcuccauccgcaacgggacauacgaucacgacguguaucgggaugaggcucugaauaacagauuccagauuaaaggcguugaacucaagagcggauacaaagacuggauccuguggaucucuuuugccauuuccugcuuccuucugugugugguccuccugggcuuuaucaugugggccugccagaaggggaauauucgcuguaacaucugcauuuga

SEQ ID NO: 192966 - RNA, 1701 nt, Artificial Sequence; identical to SEQ ID NO: 192965
  derived and/or modified CDS sequence (opt5) from hemagglutinin__InfluenzaA__ABE14019

SEQ ID NO: 192967 - RNA, 1701 nt, Artificial Sequence
  derived and/or modified CDS sequence (opt5) from hemagglutinin__InfluenzaA__ABE14030
augaagaccaucauugcccugagcuacauccucugccugguguucgcucagaaacuucccggcaacgacaauuccacagccacgcugugucucgggcaccaugcggucccuaacggaacccugguuaagacaauuaccaaugaucaaaucgaggugacaaacgcuaccgaacuugugcagucuagcuccauuggcagaaucugcgacucuccgcaccggauccuggaugggaaaaauuguacacucauugacgcccugcugggagauccccauugcgacggcuuucagaacaaggagugggaucucuucgucgaacgcagcaaagccuauuccaauuguuacccuuaugacgugcccgauuacgcuucucugagaagccuuguugccuccagcgggacccuggaguuuacgaacgaaggauucaauuggaccggcguggcucaggacggcaagucuuaugccugcaagcggggguccgucaacagcuuuuucucucgccucaauuggcugcacaaacuugaguacaaguauccugcgcugaacgugacaaugcccaauaacgauaaauuugacaagcucuacaucuggggaguucaucacccuuccaccgauagcgaccaaacaucucuguacgugcaggccuccggcagagucaccgugagcacgaaacggucccagcagacagugauuccgaauaucgggucucgccccugggucagaggaauuagcucccggaucagcauuuauuggaccaucguuaagccuggcgacauccugcucauuaacucuacagggaaccugaucgcuccccgcggauacuucaagauuagaaauggcaaauccagcaucaugcggucugaugccccuauugacaacuguaauagcgagugcaucacccccaacggcuccaucccgaaugauaagccuuuucaaaacgugaaucgcauuaccuauggggcuugucccagauacgugaaacagaacacacuuaagcuggccacgggaaugcggaaugucccugaaaaacagacccgcggcaucuucggggcgauugccggauuuaucgagaacggcugggaagggaugguggacggaugguauggcuucagacaccaaaauucugagggcacagggcaggcugccgaucucaagagcacccaggcugccauugaccagaucaacggaaaacugaaucggcuuaucgagaagacaaacgaaaaguuucaucaaauugagaaagaguucuccgaaguugaaggcagaauccaggaucuggagaaguacguggaggacaccaaaauugaucucuggagcuauaaugccgaacugcuggucgcucucgagaaccagcacacgaucgaccugacagauucugaaaugaacaagcuguucgagcgcacccggaaacagcugagagaaaaugcggaggacauggggaacggaugcuuuaagauuuaccauaagugugacaaugccugcaucggcuccauucgcaacgggaccuacgaucacgacguguaucgggaugaggcucucaauaacagauuccaaaucaaaggcguugaacuuaagagcggauacaaagacuggauccuuuggauuucuuuugccaucuccugcuuccugcucugugugguccugcugggcuuuauuaugugggccugccagaaggggaauauccgcuguaacauuugcaucuga

SEQ ID NO: 192968 - RNA, 1701 nt, Artificial Sequence; identical to SEQ ID NO: 192964
  derived and/or modified CDS sequence (opt5) from hemagglutinin__InfluenzaA__ABE14041

SEQ ID NO: 192969 - RNA, 1701 nt, Artificial Sequence; identical to SEQ ID NO: 192965
  derived and/or modified CDS sequence (opt5) from hemagglutinin__InfluenzaA__ABE14063

SEQ ID NO: 192970 - RNA, 1701 nt, Artificial Sequence
  derived and/or modified CDS sequence (opt5) from hemagglutinin__InfluenzaA__ABE14124
augaagaccaucauugcccugagcuacauccucugccugguguucgcucagaaacuucccggcaacgacaauuccacagccacgcugugucucgggcaccaugcggucccuaacggaacccugguuaagacaauuaccaaugaucaaaucgaggugacaaacgcuaccgaacuugugcagucuagcuccacaggcagaauuugcgacucuccgcaccggauccuggaugggaaaaauuguacccucaucgacgcccugcugggagauccccauugcgacggcuuucagaacaaggagugggaucucuucgucgaacgcagcaaagccuauuccaauuguuacccuuaugacgugcccgauuacgcuucucugagaagccuuguugccuccagcgggacgcuggaguuuaccaacgaaggauucaauuggacaggcguggcucaggacggcaccucuuaugccugcaagcggggguccgucaagagcuuuuucucucgccucaacuggcugcacaaacuugaguacaaguauccugcgcugaaugugacaaugcccaacaaugauaaauuugacaagcucuacauuuggggaguucaucacccuuccaccgauagcgaccaaacgucucuguacgugcaggccuccggcagagucacagugagcaccaaacggucccagcagacagugaucccgaacauugggucucgccccugggucagaggaguuagcucccggaucagcauuuauuggaccaucgugaagccuggcgacauucugcucaucaauucuaccgggaaccugaucgcuccccgcggauacuucaagauuagauccggcaaaagcucuaucaugcggagcgaugccccuauuggcaacuguaauuccgagugcaucacacccaacgggucuauuccgaaugacaagccuuuucaaaacgugaaucgcaucacguauggagcuugucccagauacgucaaacagaacacccuuaagcuggccacaggcaugcggaaugugccugaaaaacagacccgcgggaucuucggagcgauugccggcuuuaucgagaacgggugggaaggaaugguugauggcugguauggcuucagacaccagaauagcgaggggacaggacaagcugccgaccucaaguccacccaggcugccauuaaccagaucaauggcaaacugaaccggcuuauugagaagacgaaugaaaaguuucaucaaaucgagaaagaguucagcgaaguggaagggagaauccaggaucuggagaaguacgucgaggacacaaaaauugaucucuggucuuauaacgccgaacugcugaucgcucucgagaaucagcacaccauugaccugaccgauuccgaaaugaacaaacuuuucgagcgcacacggaagcagcugagagaaaacgcggaggacaugggaaauggcugcuuuaagaucuaccauaagugugauaacgccugcauugggagcauccgcaauggcaccuacgaccacgacguguaucgggaugaggcucucaacaauagauuccaaauuaaaggaguugaacugaagucuggcuacaaagacuggauccuuuggaucuccuuugccauuagcugcuuccugcucugugugguccugcugggguuuaucaugugggccugccagaagggaaacauucgcuguaauaucugcauuuga
